United States Patent Application Publication US 2013/0332133 A1 - sequence listing, part 22

SEQ ID NO: 204042 - DNA, 730 bp, Unknown
  Bacterial polypeptide expressing nucleotide sequence isolated from the Sargasso Sea
atgaaaacgcaagctgcagtagcttttgaagcaggtaagccattagaaatatgtgaagtagatctagatggtcctaaaagtggtgaagtattagtagaaatcaaagcaactggtatctgccatactgatgcatttactttgagcggagatgatcctgaaggagtatttccttctattcttggtcatgaaggtgctggaatcgtagttgaagttggtccaaatgtctcatccgtaaaaccaggagaccacgtcatacctttatatactgctgaatgtagagaatgtgaatattgcttacatcccaagacaaacttgtgccaggccgtaagagaaacccaaggtcaaggtgttatgccagatggaacgagtcgattttctcttaacggtaaacctttaatgcattacatgggctgttcaactttttcaaactacactgtcatgccagagatctcattagctaaagtcagagaagacgccccttttgataaaatatgctatataggatgtggcgttacaactggtataggtgcagttatttttcaagctaaagttgaaattgggtctaccgttgcaatatttggccttggaggcattggtcttaatgtgattcagggctccaggttagcgggtgccagcagaattattggtattgatattaattctgaacgagaatcattaggtaaaaaatttggtatgacgcgatttcaattaaccctaataaaaggttgaa

SEQ ID NO: 204043 - DNA, 477 bp, Unknown
  Bacterial polypeptide expressing nucleotide sequence isolated from the Sargasso Sea
tatgagaaaaaaaattacattagtaggcgcaggaaatataggaggaactcttgcgcatcttattgctttaaaacaattgggagatattacgctaattgatattgcaaaaggtgtgcctcaaggtaaggctttagatctatcgcaatcctctgctgttgaattgtttgatataaaaattgatggttcaaataattatagttcgcttaaaaattctgatgtagtaataatcacagccggtctgcctagaatgccaggtatgtcaagagatgatctaattgagacaaatacaaaaattatttcaactattggtcaagctattaataagtattgtcgaaaagcttttattatttgtattactaatcctttagatgcaatggttagtattcttcaatcctcttcaaaagttagtaaaaatatgtgtgttggaatggctggaatcctagacagttctcgtctgaaattttttttatctaaaga

SEQ ID NO: 204044 - DNA, 712 bp, Unknown
  Bacterial polypeptide expressing nucleotide sequence isolated from the Sargasso Sea
aagccccgcggccccgggatggagcgcgcggatctgctcgagatgaacggcgccatcttcgtcgagcagggcaaggccctgaacgaggtggcgaagcccacgtgcaaggtgtgcgtggtcgggaacccgtgcaacaccaacgcgttgatctgcatggagaacgcgccgaacctcgaccgcaagaacttccacgcgctgacgaggctggacgagaaccgcgccaagtgccagctcgcgctcaaggcgggggtgttctacgacaccgtgtccaacgtcacgatctggggcaaccactcgacgacgcaggtgccggatttcgtcaacgcgaagatcggcggcaagcccgcggcggaggtgatcgcggaccaggcgtggctggaggaggagttcacgcccgcgattcagacgaggggcggcttgttgatcaagaagtgggggcgctcctcggcggcgtccaccgcggtgtccatcgcggacgccatcaaggcgctcgtcacgcccacgcgcgagggggactggttctcctccgcggtgtgcacggacgggaacccgtacggtatcgccgaggggatcatcttctccatgccatgcaggagcgccggcgacgggagctacgagatcgtcgaggggctcgagatcgacgagtggctccaggcgcgcatcgacgccagcgaggaggaactcacgaaggaggcggactgcgtgtcgcacc

SEQ ID NO: 204045 - DNA, 634 bp, Unknown
  Bacterial polypeptide expressing nucleotide sequence isolated from the Sargasso Sea
aatgaacttagaaaataaaaaaattataattactggagcaacgggtggaattggtaatagcctagtcgaaaaattttatggacataaatcaaaaataattgccaccggaacaaatgaagaaaaactcaaaaatctaaaaacaaaatttagcaagatagaggtaaaaaaattcaaacttgaacaacacgaaaaaatcgacgaatttgttgagaacgtaaataatgaattaggtggtattgacgtgttagtcaataatgcaggaattactttagacaatttgtctataagattgactgaagaaaactggaaaaaagttttggatattaacctcacctcaacttttttaatgtgtaaatcaacaataaaaagaatgctaaagaataaatatggaaaaattatcaatattacatcgatagtaggacatacaggtaatttaggtcaagctaactattctgcctcgaaagcaggtatagttgcattttcaaaaagtttagctatagagtacgcaagaaaaaatattaatattaattgcgtatctcctggatttataaaaactgaaatgacagataaaatcaatgaagagtttaaaaagagtcttatagataaaatcccttcaggaaacctaggaactggt

SEQ ID NO: 204046 - DNA, 511 bp, Unknown
  Bacterial polypeptide expressing nucleotide sequence isolated from the Sargasso Sea
gaagtaaagaattcaatctctgttttagtaaataacgctggaataactagagataatattgttttaagaatgtctgaagaagaatggcaagacataatgaatgtaaatttaaatggcaccttttatttatcaaaaaaagtattaaagatgatgcttaaactgaaatggggaaggattattaatattacttctacttcggcatcgataggaaatcgaggtcaatcaaattattcagcggccaaagcaggtgtagaagcttttacaaaatcacttgcgagagaagtagggaaaagaaatataaccattaattcaattgcaccaggttttattaatactgatatgactcagcaaagcgatggagttaacacggatgaattaataaaagagatacctttaggaaggtttggtaaacctggtgaagttgctcacttagcatcttttctttgctcagaagaggcttcttatataactggacaaaccatacacattaatggaggtttatatatgtgat

SEQ ID NO: 204047 - DNA, 1003 bp, Unknown
  Bacterial polypeptide expressing nucleotide sequence isolated from the Sargasso Sea
gaaactattgaacagcaactgccccgtgcttatatgcagtattccagcttcgctgaaccaatcaacaaacatatttatctgcgtgctattcacgataaaaacgaaacgttgttttatcgtctggtgaaagagcatctggaagaaatgatcccggtgatttatacgccaacagtaggggatgcctgtgagcgcttctcggctatttatcgcagcgcccgtggtatttttgtctcctacagcgaacgtgagcatatggatgacatactgcgcagcgtcactaagaaaaaagtcaaagtcatagtagttacagacggcgaacgtgtactgggtttaggtgaccagggcgttggcggtatgggtatttccatcggcaagttatctttgtatacagcctgtggtggtatcagcccagcttataccttaccagtgatgttggatgtgggtaccaataacgaaaaactgttgaatgaccctgtctatatgggttcaaaacataaacgtattaccggcgaagagtacgatgcttttatcgaccagtttatgaaagcggtaaaacgccgttggcctgaagctttggtgcaatttgaggacttcgctcagcctaacgctatgcctattttaaaacgctaccgtgaagaatactgttgttttaacgatgatattcagggcacagctgccgtgactgtaggctctttattagccgcttgtcgcagtaaaggtgtaaaactgtcatcacaaaaagtggtctttgttggggctggttcagccggttgtggtattgcagaacaaattatcagccaaatgaaaaccgaaggtttggatgacgcaactgcccgcaaacaagtctacatggttgaccgttttggtttattaaccgaaggcatggctgatttacgtgatttccaagaagctctgatgcagaaaaaatcagatttggcagactgggcatacagtggagaatatgcttctttattggatgtgatgaattgcgctaaacccggat

SEQ ID NO: 204048 - DNA, 574 bp, Unknown
  Bacterial polypeptide expressing nucleotide sequence isolated from the Sargasso Sea
tatgtttactatcaaacctgtagttgctttagttactggtggctctcgtggaattggacaggcaatagctaacggacttgctaagcagggcgtaatagtagcagctactgcaactagcgaagagggtgccgcggcgattagtaaatcttttaaggatcaagggtataacggtaaaggctttgcttttaatgttaatgacgaagaggcactgccattattactagattctattaaagaacaaatgggtagcgcaccgtctatcttagttaataatgctggaataactcgtgacaatataattctgcggatgaagccagagcagtgggaagatgtcattaccaccaatttaaatggggtatacagaattactaaagcttgcttaaaaccaatggttaaagctagatggggacgaattatcaatataacatcagtatcaggtttgattggcaattttggacaagctaattactctgccgccaaggctggggtagctgcctttagtaaatccctggcaagagaggtagcaagttttggtattactgttaattgtgtttcacctgggttactaaaactg

SEQ ID NO: 204049 - DNA, 382 bp, Unknown
  Bacterial polypeptide expressing nucleotide sequence isolated from the Sargasso Sea
atgtatttaaaaaaaattaatttaaaaaataaagttgctttagttactggtgcaggaaaaggtattggtagagcttgttcaattgcacttgcagaagctggtgcaaccataattggagtgagcagaactgcttctgatcttaataaacttcaaaaagatataaaaaaagttaaaggaaaattaacaaaaataacttgcgatataatggattatgaagatctttcttctaaattaaaaaaaattaagaaagtagatatacttgtaaataatgctggtacaaatattccagagccttttgaaaaaattaaacaaacaagtatgaactatcttgtagatttaaatatgaaagcagcattcaatgttgcacaattagtagtcctaa

SEQ ID NO: 204050 - DNA, 850 bp, Unknown
  Bacterial polypeptide expressing nucleotide sequence isolated from the Sargasso Sea
ataaatttagaagatattaaagcaccagatgtttttgaagttgagagaatttgtaaagaaaagatgaaaatacctgttttccatgacgatcaacatggaacagctattgtggtaggggcggctgcggtcaacgcaatagagctttcacataggaaaattgaaagtactaaaatcgttgcggtaggggcaggtgcttccggaatagcatgcttggaaatgttggtaaaacttggtgcaaaaaaagaaaatatatggctctgtgatagtaagggcttaattaccaaaaatagaagcgaaataaacgaagagaaaaaaagatttgctcaagatagtcaattttctaagttagaagatgttattgaaaattccgacctgtttttaggactttcaggcccaggagtattgacaagtaaaatggttctcaaaatgaatgagcaacctataatatttgcccttgcaaatcccgacccggaaatcaatcctgctgatgcgctgaaggtagcgcctaatgcactgatagctacgggtcgatctgattatccaaatcaagtaaataatgttttgtgtttcccttttatttttagaggtgctctagatgttggggcaacacaaataaacgatgagatgaaattggcgtgtatacacgccatcgccaacctggcgagacagacttcaactgctgaaactgtggaagcgtaccaaggagaaattttaaaatttggcaaagagtaccttatccccaaaccttttgacccaagactattaccaaatgttgcagcagctgtagcagaggctgcaattaatagtggggttgcttctcggcctttgaaagatgtggaagctctataaa

SEQ ID NO: 204051 - DNA, 559 bp, Unknown
  Bacterial polypeptide expressing nucleotide sequence isolated from the Sargasso Sea
atgattaattttaaaggaaaaaaaattttgataacaggtgctactggtggaataggtaatgcacttgtaaaaaaattcttgtctttagatggaacagtgttagcgacaggaacaaatacagaaagattagatattttaaaaaaagaatttcctaatattaatgttttaaaatttgatatttctgatcattccaaaatagaagattttatagaaaatgtaacctcacaattagtaggactagatgttttggttaataacgctggtatcacaatggataatttgtcactaagaatgaaagatgaagaatggaaaaaagtaattgacgtaaatttaagttcaactttttatttatgtaaacatgcaataaaaaaaatgttaaaaaataaatatggaagaattgtaaatattacctctattgttggacatactggaaatttaggacaagcaaactattccgcatcaaaagcaggaatggtagctatgtctaaaagtttagcaattgagtatgcaaaaaaaaatattacaataaattgtgtctcgcctggctttattcaatcta

SEQ ID NO: 204052 - DNA, 487 bp, Unknown
  Bacterial polypeptide expressing nucleotide sequence isolated from the Sargasso Sea
gcaactggcgtatgtcatacagatgctttcaccctctcaggggatgatcctgagggagctttcccagcaatcttaggtcatgagggtgcaggtatagttgtcgaggttggaaagggcgttaaaagtctgaagcctggagatcatgtcatacctctctatacagctgaatgcggtaaatgcgagttttgtctccatccaaaaactaatttgtgtcaggcggtaagagagacacaaggtaaaggtattatgcctgatggcacaagtagattttcactggatggcaagcctattcttcattatatggggtgctcaacattttctaattactctgtacttcctgaaatttctttagcaaaagttagaaaggatgctccattcgacaagatttgctatatcggttgtggagttactactgggataggggctgtggctttcactatgggagttgaagctggatctacggtagcaatatttggattaggaggca

SEQ ID NO: 204053 - DNA, 915 bp, Unknown
  Bacterial polypeptide expressing nucleotide sequence isolated from the Sargasso Sea
caggtaagccgctgctatcagcagtaccgcagcttcgacgacgccattaataaacatatttatttacgtgccattcaggataacaacgaaaccttgttctatcgtttggtgcaacagcatttagaggaaatgttgccgattatctacaccccgacagtgggtgatgcctgtgaacaattttctgatatttatcgcagtgcccgcggcctgtttattagctatcaggatcgctataacctggacgatgtgctgcgcaacgccactaaagccaaagtaaaggttatcgtggtgacagatggtgagcgggtattagggttaggcgatcagggtattggtggtatgggtatttccatcggtaaattgtcgctctataccgcctgtggtggtatcagcccggcttataccttaccagtcatgctcgatgtgggtactaacaataaaaagctgttagaggatccgatgtatatggggctgcgccagccgcgcgttgctcaggatgagtacaatgaatttatcgagctgtttatcgccgctgtgcaacggcgttggcctgaagcgatcattcaattcgaagactttgctcagccaaacgcgatgccgatcctgcaacgctatcgtgaacaggtacgctgttttaatgatgatattcaaggtacggctgcagtaaccgtcggcactttattggccgcctgtcgcagtaaaggggtgccgttacatcagcaaaaagtggtatttgtcggtgcgggttcggccggctgtggtattgcagaagcgattatcagtcaaatggttgctgaaggcattgcggagccacaggcgcgtagccaaatttatatggtggatcgttttgggttgctgactgaaggtatgcccgatctacgggatttccagcaagctttacaacaatctactgcg

SEQ ID NO: 204054 - DNA, 484 bp, Unknown
  Bacterial polypeptide expressing nucleotide sequence isolated from the Sargasso Sea
atgaataaaaaaatttcattagttggctcaggtaacattggaggtacattagcgcatttaatagcattaaaggaattagcagatattaatttaattgatgttgttaaaggagttccacaaggtaaagctctggatttagcacaatcttcttctatagaattgtttgatgttaaaattgaaggatcaaatagttattcatctctaaaaaattctgatgtagtaattataaccgccggtatacctagattaccaggaatgtctcgagatgatttattacaaacaaatacaaaaattatttcagatataggtaaagctataaaaaaatattgtcctaaagcattcttaatatgtattactaatccattagatgcaatggttagtatcttacaatcatcctcaaaagtaaaacataatatgtgtgttggaatggcaggtatattagatagttcacgtatgaaatattttttatcaaaagaaaattaaa

SEQ ID NO: 204055 - DNA, 610 bp, Unknown
  Bacterial polypeptide expressing nucleotide sequence isolated from the Sargasso Sea
aatgctcttaaaaaatcacttgggagagaaatgttatgtagttgcttgtgatttaagtaaaaaagatgaaatttcagaacttgttaaaaaaactgatgaattattggggcatatcgatattcttgtaaacaatgcaggaataacaaaagataacatttttcttaggatgtctgaaaacgaatgggaagatgtattaaatgttaaccttaattcaacattcagcatccttaagttaattacaaaagggatggttaaaagaaaatatggaagaattattaatatttcatcagttgttggagttactggtggtgcaggccaagtcaactactcggcatcaaaagcaggattgattggtctaacaaaatctttgtcccaagaaatagcaacaagaaatatcacagttaactgtattgcccctggttttatagaaacccctatgacagaaaaattagatgataaaagaaaagatacaattcttaattcaatacctatgaatagaattggtacgccgaaagatttatcttctgctattatctttttagctagtcaagaatcaagctacataactgggcaaactctacatattaatggcggtttatatatgaattaa

SEQ ID NO: 204056 - DNA, 2278 bp, Unknown
  Bacterial polypeptide expressing nucleotide sequence isolated from the Sargasso Sea
aatgagtaaaattaaaaatgagacagtcagaaaagcggccttagattttcatgagtttccaaaaccaggaaagttagaaattagggctactaaacctttggcgaaccaaagtgatttagctaaagcatattcaccgggagtagctgaagcatgtttagaaattaaaaaagactttaagaaatctggaaattatacatctaaatcaaatttagtagcagttatttcgaacgggaccgcagttttgggattaggtaatatcggggctttggctgctaaacccgtcatggaaggtaaggcagtattatttaaaaaatttgcaggtattgattgttttgatatagaaatcaacgagaataatcctgacaaattagccgaaatcattgtttctttagaaccaacttttggagctattaatcttgaggatataaaagctcctgactgttttgttattgaaaagatttgtaaagataagatgagtattcctgttttccatgatgatcaacatggtacagcaattgttgttggggcagcattagtaaattcacttaagcttgtagacaaaaaaatttcagaaataaaagttgtatgtacaggtggtggtgccgctggtattgcatgtttggagatgttagttagtttagggtgtaaaaagaaaaatatctggctttgtgatagatcaggtttagtaacagaagatcgtaaagataaaaatatatataaggctgcttttgcacagaaagctgagagtagttcattagaaacagttattgaaggagcagatttctttttaggattatcaggtcctaatactttatcaaaaagtatgttaaaaaaaatgaatgaatccccaattatttttgcacttgctaacccaatacccgaaattatgccagaaattgtttacgaggttttccctaatgcaattgtggctacgggcaggtctgattatccaaaccaagtaaataatgtattatgttttccattcatttttagaggtgcacttgatatagcagctactgaaataaatgaaaaaatgaaaatagcatgtgttgaggcaattgcgaagctagctagggagcattcttcagcagaagctgcagctgcttatcaaggtgaagatatgaaatttggacctaattatgtaatccctaaaccttttgatccaagattactgccattcgttgcctcggcagttgcaaaggctgcaattgaaaccggtgtggctacaaaaaagattggttcaatattagaatatacaaaaaaactagagcattcagcttataaatcttcactattgatgcgcccagtatttgaagctgcaagatctgcaagtagaaagattgttttttcagacggagaagacgaacgtgttttaagagcttctttttctatgattgaagaaactggtgacagacccatactaataggtcggccagaagtagtaataagtagaatagaaaaatacggtcttccattaagaattaataaagactttgaattagttaatcctgaaagtgacccccgttttcgagaatattgggaaacctaccataaaattatggagaggcggggtgtaaccccagcacttgcaaaagccataatgagaactaatagtactgctattgctgcaatcatggtctatagaaaagaagctgatagtatgatttgtggaacatttggacaatacctttggcatcttaaatatataaaagagatccttgaaaatggtggattaaatgcgataggtgccctttcacttatgattttagaaaatggtcctttattaatagctgatactcaggttaacgctattccgtcaccagatcaaatttcccaaacagtaattgcaacagcaaggcatgctagacgttttggtattgaaccaaagatagcattatgttctcattcacagtttggtaatttggatagtgattcaggtcgaaatatgcgagatgctcttagaattttggatgagagtaaatgtgattttctatatgacggcgaaatgcattctgatgctgctcttgaccctgaactgagatcaagaataatgcctaatagtcgattagatggtgccgcaaatgctttagtttttgccaatactgacgcagctagcggtgtcagaaacatattaaaaatgtgtgctaatggtcttgaagtaggtcctattcttatggggatggggaacaaagcccatattgtaacttcttcaattactgcaagaggattgcttaacatagccgctttagcaggtacacccgttcaaacatatagttag

SEQ ID NO: 204057 - DNA, 2053 bp, Unknown
  Bacterial polypeptide expressing nucleotide sequence isolated from the Sargasso Sea
gatgtctgacaaattagataaagaggctctggattaccataggtacccagtgccaggaaaattgcaggttacagctacaaagccactcgctaatcaatatgatctatctcttgcttattcgccgggtgtagctgcagctagtagatctatagcagctgatgagtccgaagcagcagctttgacggcacgaggtaatttagtggcagtaatatctaatggtactgctgttttaggtttaggaaatattggtgcgttggcatcaaaacccgtaatggaagggaaggccgggctttttaaaaaattcgcgggtattgatgtctttgatatagaaatagatgaagatgatccagagcaattgatcaagattatcaagtcactggagccaacttttggtggtattaatttggaagatatcaaagcacccgaatgctttgttgtagagagccaacttaagcgagatatgaacatacccgttatgcatgacgatcagcatggtacagcgatcatcgtagcagctgcggtgctaaatgggctaaaaattgcaaacaaagacattaaaaaagttaaattagtatgttccggggctggtgctgctgcattggcctgtttagatctgctggttaagttaggattaaacaaaaataatatatttgtatccgatgtggctggtgtaatttatgagggcagagaagaggagactaaccaatataatagaatttatgcccagaagactaaacttagaaaattgaaggaaattatttctgatgcagatatttttttaggattgtctgctccgggcgttttgagcggggaaatggtcagtgatatggctgaacaaccccttatttttgcattagccaatccagatccagaaatagcccctgaggaagcaaaaaaggcacgaccagatgcaattattgcaactggtcgatctgattatcccaatcaggttaataatgtactttgttttccgttcctatttagaggtgcacttgacgccggggctactggtataaatgatgctatgaaaatggcttgtgtaacagcacttgctaacctagctcagatagagacagatgagacggtggtaaaggcttatgatcttcaggaactcaattttgggccggaatatctgatacctaaaccctttgatcctagattattagtagagcttgcacctgcggttgcccaagcagctatggatagtggcgtagcactgcggccgattaaggattttgagatttacaagcaaaaattaagcgattttgtttttcgatcgggtacagcaatgaagcctgtttttgcattagccaaatccaaccctaagagagttgtttatgctgaaggcgagtcaaggagagtattaagagcaattcaaaactctattgatgaagggatagttaggcctgttttaatcggtcgtagaaacgttgtagagttacgaatcgagcagctagggcttagattgtcgttagataaagattttgagcttgttgatccagaaggggatgaacgttatcgagaatattgggagctttatcactcaataactagtcgaaacggagtttctaagaatgaagcacggtatcttgtacggactaacactactgtaatcgcttctcttatgttgttaagaaaagaagctgacgcaatgatttgcggtgttactggtagatatagagagcacttgcctcatttattggatataattggactacggaagggcgttgctagggcggctgccttgagtatgttgatactccctaaaggtacattttttatttgcgacacacatgtcaatccgggaccctcagctgaacaaattgctggttatactgttttggccgccgagtctgtaagattttttggcatagaaccaaaaatagcagttttatcacattccaatttcggaagttcctctcatcaaaatgcggtaaagatgagggatgccgtaaagcttataaataagatggcacctgatctggaagttgagggagagatgcatgcagatgctgcgttagatcccgaattaagagatgcattggtaccagac

SEQ ID NO: 204058 - DNA, 742 bp, Unknown
  Bacterial polypeptide expressing nucleotide sequence isolated from the Sargasso Sea
atgtctcagcgaattgcgtacgtaacgggcgggatgggcggcatcggcaccagcatctgccagcgcctgtcgaaagacggcttcaaggtggtcgcgggttgcggcccgaactcgccgcgccgggtgaaatggctcgaggagcagaaggcgctcgggtacgatttcatcgcgtcggaaggcaacgtcggcgactgggactcgaccaaggaagcgttcgacaaggtcaaggccgaagtcggcgagatcgacgtgctggtcaacaatgcgggcatcacgcgcgacgtcgtgttccgcaagatgacgcacgaagactggaccgccgtgatcgacaccaacctgacgagcctgttcaacgtgacgaagcaggtgatcgacgggatggtcgaacgcggctggggccggatcatcaacatttcgtcggtgaacggccagaaggggcagttcggccagaccaactactcgaccgcgaaggccggtatccacggcttcacgatgtcgctcgcccaggaagtcgcgacgaagggcgtgacggtcaacaccgtgtcgccgggctacatcggcaccgacatggtgaaggcaattcgaccggacgtgctcgagaagatcgtcgcgacgatcccggtgcggcgtctcggtgggccggaggaaatcggttcgatcgtcgcgtggctcgcgtcgaacgattccggtttcgcgacgggcgcagacttctcgctgaacggcggcctgcacatgggctgag

SEQ ID NO: 204059 - DNA, 718 bp, Unknown
  Bacterial polypeptide expressing nucleotide sequence isolated from the Sargasso Sea
atgagtaatggtaatgtttttatttctggcgcatcaagaggaattggtaattcaattgcttatcattttgccgaaaatgattatgtagttgttggaacatccagaaatgaattcgagtttgataaaaaaattaaaaatcttattcctgtaaaacttgatgttacctctagagaagatattcaaaattgttttaatgatttgaaaacaaagaatttgctaccagacattcttatcaataatgcaggtattacctcagaccagatttttttaagaatgaaagatgaagaatgggataacgttattgatactaatcttaatggagtttttaacctttcaaagatttttgtaaaaaatatgatcaaaaataaaaaaggtagaataataaacatatcatctatttctggattaatgggcaatcctggacaagtcaattattcttcatcaaagtctgcacttaatggttttactaagtcacttgcaaaggaattgggttctagaaacataactgtaaactgcgttgctccaggatatatagatacagatatgacatcttttttagatgaagattcaaaaaaacaaatagaaaaatctattcctctcggtcgtttgggtagcggtgaagatatatctaaattggtagcatttctggcttctgatgaggcctcatatattacaggtcaaaccatatcaattgatggtggtttgcttatgtactaat

SEQ ID NO: 204060 - DNA, 742 bp, Unknown
  Bacterial polypeptide expressing nucleotide sequence isolated from the Sargasso Sea
gatgaagaaagttgccttgatcaccggagcccgtggcggcatcggatccgccatcaccaccgccttgctggcccaggggtatcgcatcatcgccacccactccagccccaacggggcagcggcgcacgactggtacggggagcagggttttcggccggatcaggtgcggctgctggcgctggacgtcgccgacaccgccatgtgccgcgacaccctgggccgattgctgcaggatgaagggcgggtggatgtgctggtcaacaatgccggcatcacccgggacggggccttcaagcggatgaccccggagcagtggttcgaggtgatccacaccaacctgtgcagcctctacaacgtgacccagccgctgttcgacgccatgtgcgagcagcgcgatgcccgcatcatcaacatctcctcggtcaatggccagaaggggcagttcggccaggtcaactactcggccgccaaggcgggcatgctgggcttcaccaaggcgctggcggcggaaggcgcccgcttcggggtgacggtcaacgccatcgcccccggctacaccgccacccccatggtggaggcgatccgcaccgacatcctcgacagcatcaaggccgacatccccatgcgccggctggccaagccggaagagatcgctgccgccgtggtgtttcttgccagcgaggcgggtgcctatatcaccggcgagaccctggccatcaacggcggcctttacatgaagtga

SEQ ID NO: 204061 - DNA, 1690 bp, Unknown
  Bacterial polypeptide expressing nucleotide sequence isolated from the Sargasso Sea
catggacgataataaacgccccctctatcttccgtttgcaggacctgccattcttgaagcacccttaattaacaagggcagtgcattttcggaagaagagcgtattttctttaacctcgaaggcttagtaccctacgccattgaaactattgaagaacaggcgtcacgcgcctacgatcagttcagaagtttcaataacgatctcgataagcacatctatctgcgcaacattcaagacaccaacgaaaccctgttttatcgtttagtgcaaaaccacatcagcgaaatgatgccaattatctacaccccgacggtaggtttggcctgtgagcgcttctcgaaaaactatcgccgtaaccgtggtctgttcatctcctacccgaataaggacagaatcgacgacatcctcaataactcgactcgccaaaaagtaaaaatcatcgttgtgaccgacggtgagcgcatcttaggcttaggcgaccaaggtattggcggcatggggatcccgattggtaaattgtcactctacactagctgtggtgggatcagccccgcatacacactgccaattaccttagacgtaggtaccgataatccacagttgctggaagatcctatgtacatgggttggcgccatccacgtattggcggcgaagagtatgccgagtttattgaagcctttatgcaagccgtgcatgtacgttggccagatacactgatccaattcgaagattttgcccaaaagaatgcgatgccaatccttgagcgttataaggatcgctactgctgctttaacgatgacattcaaggcaccgctgcagtgactgtgggctcgttactcgccgcctgtaaagccgctggcactgagctgaacaaacaacgcatcgcctttttaggtgccggtagcgctggctgtggtattgccgaagccatcgttgcacaaatggtgtcagaagggatcagcgacgagcaagcccgcagccaagtctgcatggttgaccgttggggcctgctgctcgacaacatgccgaacctgttgccattccaacaaaaattggctcaaaaatgtgcagaaatcagcaactggaataacttcagcgacaatatttcactgctcgatgtggtgaacaacgctaagccaacggtactgattggcgtatctggtgcaccgggtctatttaccgaagaaattgttcgtgcaatgcatagccactgcgaacgcccaattatcttcccactgtcgaaccccactagccgtgttgaagcgacgccaaaagacattctgcactggacgtctggccaagccttagtggcaacgggtagtccattcgagcctgtggttgttgatggcgagacctatgaaatcgcgcaatgtaacaacagctttatcttcccaggcattggtttaggtgtactcgcctcgggtgctcgtcatgtctccgatgcgatgttaatggcgtcgagccgcgcgctcgccgaatgctcaccgttagccattaatggctcagggccgctcctgccaaaactggaagacattcactcagtgagtaagcatattgcctttgccgtcggtaaagtggcgattgagcaaggcctatccttgcctgcgagtgatgagctgctgatgcaatctatcgaagataatttctggaagccagagtaccgccgttataagcgtacttcgttctaa

SEQ ID NO: 204062 - DNA, 745 bp, Unknown
  Bacterial polypeptide expressing nucleotide sequence isolated from the Sargasso Sea
atgtttgatttagctgggaaaatcgcattaatcacaggagcctcccggggtattggtaaatctatttctatgattcttgctcaaaatggagctcatgttatttgtattagtaggaatattaatgatgtacaatcagttgttgatgatattactaataaaaaatttaatgcaagtgcagcgtcctgtgatatatctagtactgataacgtgacttcattagtaaaaaatataattgatgaacatgggaaaatagatattttagtaaataatgcaggcattactagagataatctattaatgagaatgtctgaggatgattgggacaaagtacttaatgtgaatttaaaagctgtatttacatctataaaagtagcttcacgttcaatgataaaacagcgtagtggaagaattataaatatttcatcggttgttggtcttaccggaaattctggacaagtaaattatgccgcgtctaaagcaggtctaattggcatgactaaatcaattgctaaagaatttgcttctcgtggaataactgcaaattgtattgcaccaggatatattgaaacagaaatgactagcaacctaacagatgacgttaaatcatcaataaaagaacaaatacctcttggcagaattggttgtgttgaagatatagcacatgctgtagcatatttagcttctgatgaagcaagctatattacaggacagaccctgactgttgatggcggtatggtcatgtaac

SEQ ID NO: 204063 - DNA, 2302 bp, Unknown
  Bacterial polypeptide expressing nucleotide sequence isolated from the Sargasso Sea
atgaaacagacagagacacagcagcaggccgcgttcgactatcacgaatttccgaccccgggaaagatctcggtcgtcgccagcaagccgctcgtgacccagcgcgatctcgcgctggcgtacacgcccggcgtggcgggcgtatgcgaggccatcgccgccgatccgctgcaggcgcaccgtttcacgagccgcggcaacctggtgggcgtgatcacgaacggcacggccgtgctgggcctgggcaacatcggcccgctcgcgtccaagccggtcatggaaggcaaggccgtgctgttcaagaagttcgcggggatcgacgtgttcgacatcgagatcaacgaaaccgatccggacaagctggtcgacatcatcgccggtctcgagccgaccttcggcggcatcaacctcgaggacatcaaggcccccgagtgcttcacggtcgagcagaagctgcgcgatcgcatgaagatcccggttttccacgacgatcagcacggcaccgccatcaccgtctcggccgcgttcatcaacgggctgaaggtggtcgggaagtccatcaaggaggtgaaggtcgtgacgtcgggcgccggtgcggccgcgctcgcctgcctggacctgctggtcgacctcgggctgccggtcgaaaacgtctgggtgaccgacatcgaaggcgtcgtctatcgcggccggaccacgctgatggacccggccaagtcgcgcttcgcgcaggaaaccgatgcgcgcaagctggccgacgtgatcggcggcgcagacgtgttcctgggcctgtcggtgggcggcatcctcaccgcggagatgctcaagcagatggcggcgcgcccgctgattctcgcgctggccaacccgacgccggaaatcttcccggaactggcgcatgcgacgcgtgacgacgtcgtcatcgcgacgggtcgctcggactacccgaaccaggtcaacaacgtcctctgcttcccgtacatcttccgcggcgcgctggacgtgggcgcgacgacgatcacccgtgaaatggagatcgccgccgttcacgcgatcgccgggctggccgaggaagagcagaacgaagtcgtcgcggcggcctacggcgcgtacgacgtgtcgttcggcgcgcaatacctgattccgaagccgttcgacccgcgcctgatcgtgcggatcgcgccggcggtggccaaggcggcgatggagggcggcgtggcgaagcgcccgctgaccgatctcgatgcgtacgtcgagcaactgcagcaattcgtctaccattccggcgcgttcatgaagccgctgttcgcgacggcgcgtcgcctggtgcgcgacggcggcaaggcgcggatcgtctttaccgaaggcgaggacgagcgcgtgctgcgcgcggtgcaggtgatcgtcgacgagaagctggcgcggccgatcctggtcgggcgcccggaagtgctgctggcgcgcatcgagcgattcggcctgcggatccggctcggtcaggatgtcgaagtgaccaatccggaatatgacgagcgcttcccgcagtactggacgaagtactgggagctgcgctgccgggacggcatctcgaaggagatggcgcgggtcgagatgcgccgccgcctgacgctgatcggcgccatgatggtgcggctcggcgatgcggacgggatgatctgcgggacggtgggcgagtatcacaatcacctgcggttcgtggacgaagtgatcggcaagaagccgggggcttcgacctacgcggcgatgaatgtcctgttgctcgatcagcggacggtcgcgctggtggatacgcacgtgaacgacaaccccgatgcggagcagattgctgaattcacgatcgcggcggcgcggcagatggaatggctcaatttgacgccgaaagtcgcgctgctgtcgcggtcgaatttcgggtcggggagcgcggcttcgggcgtgaagatgcgccgggcgctggagatcgtccgggaacaggcgccggatatcgaggcggatggcgagatgcatggcgactgcgcgctcgatgaagggctgcgggcgaagctgctgccgatgtcgccgttgaagggggcggcgaatttgctggtttgtccgaatgtggatgcggggaatattgcttacaacctgctcaagaccgaggcggggagcaatgtggcggtggggccgttcttgttgggcgtcaacgcaccggtgaacattcttacttccagcgccaccgtgcggcggatcgtgaatatggccgcgctgacggtgattgaggcgaatcggggtgtggcgggctgat

SEQ ID NO: 204064 - DNA, 342 bp, Unknown
  Bacterial polypeptide expressing nucleotide sequence isolated from the Sargasso Sea
aatgtatttaaaaaaaattaatttaaaaaataaagttgctttagtaacaggtgcgggaaaaggtattggtagagcatgttctattgcacttgcagaagctggtgcaacaataattggagtgagcagaactgcttctgatcttgataaacttcaaaaagatataaaaaaagttaaaggaaaattaactaaaataacatgtgatataatggattatgaagatctttcttctaaattaaaaaaaattaaaaaagtagatatacttgtaaataacgcaggtacaaacattcctgagccttttgaaaaaataaagcaaacaagcatgaattatcttgtagatttaaa

SEQ ID NO: 204065 - DNA, 747 bp, Unknown
  Bacterial polypeptide expressing nucleotide sequence isolated from the Sargasso Sea
acacatacgaagaatctaaaaattctgacattgtcgtcattactgctggaattgcaagaaaacctgggatgagcagagatgatttattgataactaatatgaatatagtaggttctgtgacagaaaatataatgaagttttctaaaaaccctattatcatagttgtttccaacccacttgatgcaatggttcaacacagcttttcaaaaagcggcctttctaaagaaagagtaattggcatggctggaattttagatacaggaagatttagaactttcatcgctgaagaattagatgtttcagtaaatagcatcgatgcatacgtattaggtgggcatggagattctatggtccctttactgaaagcaaccactgttggtggggttccagttgaagaattaattgaaaagaacagactggaagaaatcgttcaaaggacaagagatggaggagcagaaattgttgcccacctaaagaccggaagtgcttattacgccccttctgctgccgtagctcagatggtagatgcaataatatttgatacaaaagaggtatttccatgtgctgcaatgttagatggggaatacgatatcaaaggtgtctatgctggagttcctgttaaacttggtagctcaggcatagaagaaatagttaatttaaacttgagccaaagtgaaaaagatggattgaccgcatcttcaaaggctgttgaagaattaattgatgtaatgaaaggtcagtcataaa

SEQ ID NO: 204066 - DNA, 502 bp, Unknown
  Bacterial polypeptide expressing nucleotide sequence isolated from the Sargasso Sea
ggaattgacatcctcgttaataatgcaggaataactaaagactctctgttattaagaatgaaagaggaagattgggatatggttatgaatattaatcttaaaggtgcattccattgtatgaaaacagtcataaaacctatgatgaaaaatcgtaaaggacgtataataaacataacatcaatcgttggtattactggaaattctggtcaatcaaactatgccgcttcaaaggcggggctgattgggtttaccaaatctttagcaaaagaagtggcttccagaggtattactgtaaattgtattgcccctgggtggatccagaccgaaatgacaaacgatttaaatgaaaatataaaaacagaaatcttaggtaaaattccaattggaagacttggtgttgcagaggatattgcatatgctgcactttatcttgcttctaatgaggcaagttacataacaggccaaaccatcacagttgatggtggcagaataataaactaaa

SEQ ID NO: 204067 - DNA, 718 bp, Unknown
  Bacterial polypeptide expressing nucleotide sequence isolated from the Sargasso Sea
atgagtagagaaaatatttttgtatctggagcctcaagaggtatcggtaaagaaattgcaattaattttgctaaaaaaggttttaacgttgttggaacatcaagaggtgactttgactttaatctagatttagataatttaaaacctatcaaactagacataactaatagagatgatgttcatgattgttttgattggctcaaatcaaagaacttattgccagacatattagtaaacaatgctggcataacttctgatcaactttttataagaatgaaagatgaagagtgggataatgtaattgaaactaatctcacaggaacatttaatttatctaaagtgtttattaaaaatatgattaagaataagtttggaagaattataaatattacatctatatctggtcttatgggtaatccaggacaagttaattattcatcatctaaggctgcacttactggttttactaaatctttagctaaagaggttggatcaagaaatataacagtaaattcagttgcacctggttatatagaaacagatatgactagttttttagaagatgaaacaagaatgaatataattaaaaatattcctttaggaagaattggtaaggttgatgatgtttctgagctagtcatgttcttagcatcagatgaagcttcatatataactggtcagacaatctctgtagacggcggtctcttaatgtattaat

SEQ ID NO: 204068 - DNA, 1690 bp, Unknown
  Bacterial polypeptide expressing nucleotide sequence isolated from the Sargasso Sea
catggacgataataaacgccccctctatcttccgtttgcaggacctgccattcttgaagcgccattgattaacaagggcagtgcattttctgaagaagagcgtattttctttaacctcgaaggcttagtaccctatgccattgaaactattgaagaacaagcatcgcgcgcctacgatcagttcagaagtttcaataacgatctcgataagcacatttatctgcgcaacattcaagacaccaacgaaaccctgttttatcgtttagtgcaaaatcatatcagcgaaatgatgccaattatctacaccccaacggtaggtttggcctgtgagcgcttctcgaaaaactatcgccgtaaccgtggtctgttcatctcttacccaaacaaagacagaattgacgacatcctcaataactcgactcgccaaaaagtaaaaatcatcgttgtgaccgacggtgagcgcatcttaggcttaggcgaccagggtattggcggcatggggatcccgattggtaaattgtcactctataccagctgtggtgggatcagtcccgcgtatacactgccaataaccttagacgtaggtaccgacaatccacagttgctggaagatcctatgtacatgggttggcgccatccgcgtattggtggcgaagagtatgccgagtttatcgaagcctttatgcaagccgtgcatgtacgttggccagatactctgatccaattcgaagattttgcccaaaagaatgcgatgccaatccttgagcgttataaggatcgctactgctgctttaacgatgacattcaaggcaccgccgctgtgactgtaggttcgttactcgccgcctgtaaagccgcgggtactgagcttaacaaacagcgtgtcgccttcttaggtgctggtagcgctggctgcggtattgccgaagctatcgttgcgcaaatggtgtctgaagggatcagcgacgagcaagcccgcagccaagtctgcatggttgaccgttggggcctgctgctcgacaacatgcctaacctgttgccattccaacaaaaattggctcaaaaatgtgccgatatcagcaactggaataacttcagcgacaatatttcactgctcgatgtggtcaataacgctaagccaacggtactgattggcgtatcgggcgcaccgggtttgtttaccgaagaaattgttcgtgcaatgcatagccactgcgaacgtccaattatcttcccactgtcgaaccccaccagccgtgttgaagcgacgccaaaagacattctgcactggacgtctggccaagccttagtggcaacgggtagcccgttcgaacctgtggttgttgatggcgagacctatgaaatcgcgcaatgtaacaacagctttatcttcccaggcattggtttaggtgtactcgcctcgggagctcgccatgtctccgatgcgatgttaatggcatcgagccgcgcgctcgccgaatgctcaccgttagccattaatggctcagggccactcctgccaaaactggaagatattcactcagtgagtaagcatattgcgttcgccgtcggtaaagtggcgattgagcaaggcttatccttacctgcgagtgatgagctgctgatgcaatctatcgaagataatttctggaagccagagtaccgccgttataagcgtacttcgttctaa

SEQ ID NO: 204069 - DNA, 286 bp, Unknown
  Bacterial polypeptide expressing nucleotide sequence isolated from the Sargasso Sea
aatgttaaaacaaattgttcttaaaaataaagtcgctttagtaacgggtgctggaaaaggtataggaagagcttgtgcaatcgccttagcccaagcaggtgcgaaagtcatactaataagtagaactccaaatgatttaaaagaagtaactagtaaaataagaaaaacaaaaggtactagtttatcttttatttgtgacgtgacggacgatgtaaaattcaaaatgattttaaaaaaaattcctaaactagaaattttagttaataatgctggcagtaatcgtcca

SEQ ID NO: 204070 - DNA, 760 bp, Unknown
  Bacterial polypeptide expressing nucleotide sequence isolated from the Sargasso Sea
atgtatttaaaaaagataaatttaaaaaacaaagttgctttagtaacaggtgcaggaaaaggtataggtagagcttgttcaattgctcttgcagaagccggcgcaacaataattggagtaagtagaactacttctgatcttgataagcttcaaaaagatataaaaaaagttaaaggaaaattaattaaaattacttgtgatataatggattatgatgatctttcttctaaattaaaaaaaattaagaaagtagatatacttgtaaataatgcaggtacaaacattcctgaaccttttgaaaaaattaaacaaagaagtatgaactatcttgtagatttaaatatgaaagcagcattcaatgttgcgcaattagtagtcctaaaaatgttaaaaaataaaaaaaaaggtggatctataattaatatgtcctcacaattagggcatgttggtatgtcaggtagaaatatttataacatgacaaaatttggaattgagggattaacaaaaggaatgggagttgaacttgcaacaaaaaatattagagtaaacaccgttgcacctacatttgttgaaaccccaatggttaaaaaattctttaaaaataaaaaatttaaacagcttgctttaagcaatatacccatgggaaaagttgcaacagagtctgatgttgctacagctgtatgttttttagcttcagatgctgcaagtatgataaccgggacatcaattgtgattgatggaggttggacagcaaaataat

SEQ ID NO: 204071 - DNA, 1045 bp, Unknown
  Bacterial polypeptide expressing nucleotide sequence isolated from the Sargasso Sea
ttgattaaaaccagagcagctgttgcttttgaggctggaaagcctctggagattcatgaagttgatctagaggggcctagggcaggagaggttctggttgaaatgaaagcgactggtgtatgtcatacagatgcttttaccctttcaggggatgatcctgagggagcttttccagcaatcttaggtcatgagggtgccggcatagttgtcgaggttggaaagggcgttaaaagtttgaagcctggagatcatgtaatacctctctacactgcagagtgtggtgaatgcgagttttgtctccatccaaaaactaatttgtgtcaggcggtaagagagacacaaggtaaaggtattatgcctgatggcacgagtagattttcactgggcggcaagcctattcttcactatatggggtgctccacattttctaattactctgtgctccctgaaatttctttagcaaaagttagaaaggatgctccattcgacaagatttgctatatcggttgtggagttactacaggtatcggggctgtggctttcaccatgggggttgaagctggatccacggtagcaatatttggattaggaggcataggtctcaatgttattcaaggcgcgaaaatggttggtgcttcaagaataattggaatagatttaaatgattcccgtgctgacatagggactaaatttggcatgactgactttattaaccctaataatattgaaaatgtagttgatcacattattgaaattactggtggaggggttgattatagtttcgagtgcattgggaatgttgatgtgatgaggcaagctcttgagtgctgtcataagggctggggtgaaagttgcattattggggttgcgggtgcaggcaaagaaatctcaaccagaccatttcagcttgttaccggtcgctcatggagaggcactgcttttgggggcgcaagagggcgaacagacgtaccaagaatagttgattggtacatggacggaaagattaatatagatgatcttattactcacaaaaatgcctcttgag

SEQ ID NO: 204072 - DNA, 703 bp, Unknown
  Bacterial polypeptide expressing nucleotide sequence isolated from the Sargasso Sea
atggaaactaaaaaagtacttgtaactggcggaaacagaggaataggaaaggggattgttgaaggattcttggataatggaaatgaagttctagcaacatgcagagatgtatctaaattcccttttgaaaacgataagcttacagttgctgaactcgatatttctgatgtcgattcagtggaaaattttaagaagacagttgacgattttgggcctgaaattctagtaaataatgccggcataacgaaagataatatatttttaagaatgtctgatgatgagtggcttgatgtcataaatactaaccttacaggcacatttagaattactaaacttgttgcaaaaggcatgcttaaacaaaagtggggcaggattgtaaacataagttcaatctctggaatgatgggaaatccaggacaggcaaattattctgcatctaaatcaggcatagatggttttactaggtctctagctaaagagcttggttcaaggaatataacagttaattcaatagcgccaggcttcatctcaacagacatgactgaagatctttctaacgaagatttaataaaaaatattcccttaggaagaatgggaaatgttgaagatgtagcttctttggttatgtttctgtcttctgaagatgcaaattatattacgggccaaactttagtagttgatggcggactatttatgaagtaat

SEQ ID NO: 204073 - DNA, 733 bp, Unknown
  Bacterial polypeptide expressing nucleotide sequence isolated from the Sargasso Sea
atgcttaacttttcaacaaaaacagcaattgtaactggaggatcaagaggaattgggaaagaaatttctcttattcttgctcaaaataattttaatgttgtagcagttgctacgagtgaaaaatctttagattcaatcagagacatagaaaatattcatccattttgcagtgatatttctaatgaaaaatcaattgaaaaactatatgaatttgttatttcaaaatttggtcatgcagatgttcttgtcaataatgctggtattcatatggataatattctactaagaatgaaatctgaagaatggaatcaagtcatgaatgttaatcttaatggtccatttcatttaacaaaaacagtcttaaaagatatggtaaagaacaaaaatggaagaattattaatatttcttctatttctggaacagatggtaataaaggacaaggaaattatgctgcctcaaagggtggtctattggctttaacaaaatctctagcaaaagaagttggtcgtagaaatattacagtaaattgcattgcaccgggattaattgaaactgacatgatctcacacctttctgacacagtgaaacagggatatttagaaagaattcctctaaaaaaacttggaaaaccaaaagatattggtaatatgattttatttttatgttccgatgaagccagttatattacagggcaaacattttatattgacggtggaatgtcattaaattaat

SEQ ID NO: 204074 - DNA, 703 bp, Unknown
  Bacterial polypeptide expressing nucleotide sequence isolated from the Sargasso Sea
tatggaaactaaaaaagtacttgtaactggcggaaacagaggaataggaaaggggattgttgaaggattcttggataatggaaatgaagttctagcaacatgcagagatgtgtctaaatttccttttgaaaacgataagcttacagttgctgagctcgatatttctgatgctggttcagtggaaaattttaagaaaacagttgacgattttgggcctgaaattctagtaaataatgccggcataacgaaagataatatatttttaagaatgtctgatgatgagtggcttgatgtcataaatactaaccttacaggcacatttagggttactaaacttgttgcaaaaggcatgcttaaacaaaagtggggcaggattgtaaacataagctcaatctctggaatgatgggaaatccaggacaggctaattactctgcatccaaatcaggcatagatggctttaccagatctctagctaaagagcttggttcaagaaatataacagttaattcaatagcaccaggcttcatctcaacagacatgacagaagatctttccaatgaagatttagtaaaaaatatccccttaggaagaatgggaaatgttgaagatgtagcttctttggttatgtttctatcttccgaagatgcaaattatattacaggccaaactttagtagttgatggcggactatttatgaagtaa

SEQ ID NO: 204075 - DNA, 739 bp, Unknown
  Bacterial polypeptide expressing nucleotide sequence isolated from the Sargasso Sea
ttgtttgatttagaaggtaaaaaggcactgattactggcgcaagtggcggtattggcaaagagatagcaaaagttttaatcgaacacaatgcggaggtttgtatatctggaagaaaccatgaagagttaaatgcgcttaaaaaatctcttggtatgaaatgccatgtagttacctgtgatttaagtaaaaaagctgaaattatagaacttattaaaaaagctgatgagtttatggggtatattgatattcttgtaaacaatgcaggaataacaaaagacaatatttttcttaggatgtctgaaaacgaatgggaagatgtattaaatgttaatcttaattcaacattcaatattcttaaattaattacaaaaggtatggttaaaagaaaatatggaagaattataaatatttcatctgttgttggagtaactggtggtgcaggccaagttaactactcagcatctaaagctggattgattggtctaacaaaatctttatctcaagaaatagcaacaagaaatattacagttaactgtattgctcccggttttattgaaactcctatgactgaaaaattagatgataaaagaaaagatgcaattcttaattccataccaatgaatagaattggtaagccaaaagatttatcttctgctattgtttttttagctagtaaagaatcaagctacataactgggcaaaccttacatataaatggcggtttatatatgaattaga

SEQ ID NO: 204076 - DNA, 1696 bp, Unknown
  Bacterial polypeptide expressing nucleotide sequence isolated from the Sargasso Sea
catgtttgaagataataaccagaaacgtcccctctacatcccctatgccggtccggccctgctggagaccccgctgctcaacaagggcagcgccttcaccagcgaagagcgcagcaacttcaacctcgaaggcctgctgccccagaatatcgagaccatcgaagagcaggccgagcgggcctaccgtcagttcatggcgttcggcaacgacatggacaagcacatctacctgcgcaacatccaggacaccaacgagacgctgttctaccggctgctgaccaaccacctgaccgagatgctaccggtcatctacaccccgaccgtcggcaaggcgtgcgaggagttctccaacatctaccgtcgcgcccgcggcctgttcatctcctatccggacaaggacaggatcgatgacatgctgcaaaacgccaccaagcagaacgtcaaggtgatcgtggtcaccgacggtgagcggatcctgggcctcggcgatcagggcatcggcggcatgggcattcccatcggcaagctgtcgctctacaccgcttgcggcggcatctcgccagcctactgcctgccggtggtgctggacgtgggtaccaacaaccagcagctattgaatgaccccttctacatgggctggcgcaatccgcgcatctcgggcgaagagtatgcagagttcgtcgacgccttcattcaggcggtcaagcgccgctggcccgacatcctgctgcagttcgaggacttcgcccagaacaacgccatgccgctgctcaatcgctacaagaacgagctctgctgcttcaacgatgacattcagggcaccgccgccgtgaccctgggcagcctcatcgctgcctgcaaggcctccggcgccaagctctccgagaagcgggtcgccttcctcggcgccggcagcgccggatgcggcatcgccgagcagatcgtggcgcagatgaaagccgaggggctgaccgatgcccaggcccgcagccgggtcttcatggtggaccggtttggcctcatcaccgacaagattcccaaccagctcgacttccagcgccgcctctcccagccggtggagcgcatcgccgattggccggtgggagacaacatctccctgctggaggtgatggagcacggtcgcccggacatcctgatcggggtctccggccagccggggctgttcaccgaagaggtggtcaagaccatgcacaagcactgtgcccgccccatcatcttcccgctctccaaccccacctcccgggtcgaggcgacgccggcagatctgatccgctggaccgacggccaggcgctggtggccaccggcagcccgtttgcaccggtggagtacaagggcaagcgctacgtcatcgcccagtgcaacaactccttcatcttcccggggatcggccttggcgtgatcgccgccggtgccacccgggtgaccgatgccatgctgatgtcggccagccgcgcgctggcagagtgctcgccgctggtgaaaggggaggagggctccttgctgccggatctggcggacattcaccaggtctcccgctacatcgccaagatggtggccaagaccgccatgctgcagggcaaggcggtacagaccccggacgaggtgatcgatcaatccatcgaggccaatttctggcgccccgagtatcgtcgctatcgccgtacctccttctga

SEQ ID NO: 204077 - DNA, 307 bp, Unknown
  Bacterial polypeptide expressing nucleotide sequence isolated from the Sargasso Sea
atgtatttaaaaaaaattaatttaaaaaataaagttgctttagttactggtgcgggaaaaggtattggtagagcatgctctatcgctcttgcggaagctggtgcaacaataattggaataagtagaactgcttctgatcttgataaacttcaaaaagatataaaaaaagttaaaggaaaattaactaaaataacttgcgatattatggattatgaggatctttcctctaaattaaaaaaaattaagaaagttgatatacttgtaaataatgctggtacaaatattcctgagccttttgaaaaataaa

SEQ ID NO: 204078 - DNA, 703 bp, Unknown
  Bacterial polypeptide expressing nucleotide sequence isolated from the Sargasso Sea
atggaaaataagaaagtacttgtaacaggcggaaacaggggcataggaaaagggattgttgaaggattcttgaacaatggaaatgaagttttagctagttgcagagatgcatctaaatttccattagagaacgatagacttacagttgcagagctggatattgccgatactaaatctatagataattttaaaaatacagttgagagttttgggcctgaaatcttggtaaacaatgctgggataacaaaagataatatatttttaaggatgtctgatgatgagtggctagatgtcattaacactaatcttaccgggacatttagagttactaaattggtcgcaaaaggcatgcttaaacaaaagtggggcaggatcataaatataagttcaatatctggaatgatgggcaatccaggacaagcaaattattctgcttcaaaatcaggcatagatggctttaccagatctttagctaaagaacttggttcaagaaacattacagtaaactcagtagcgcctggctttattgcaactgatatgacagatagccttactgatgaagagcttacaaaaaaaataccactgggaagaataggaaaagttgaggatgtagtttctttggttctattcctttcttcggaagattcaaattatattacaggccaaactttagtggttgatggcggactatttatgaagtaat

SEQ ID NO: 204079 - DNA, 262 bp, Unknown
  Bacterial polypeptide expressing nucleotide sequence isolated from the Sargasso Sea
atgaaaacaagagcagccgttgcctgggaagcaggaaaaccgctagaagtcatggaaatcgatctcgaaggaccacgagaaggcgaggtcctcattcgtaatgtagcaactggagtctgtcatacagatgcattcaccctttccggtgaagaccctgaaggaattttcccatccgtactaggacacgaaggtggagcagtagtcgaagaaattggtcctggagtttcttccgtttcggttgcagatcaagtgatcccccgct

SEQ ID NO: 204080 - DNA, 565 bp, Unknown
  Bacterial polypeptide expressing nucleotide sequence isolated from the Sargasso Sea
atgacaattaattttaacgataaagttgcaatagtcacaggcgcaggtggtggtcttggaagatgtcacgcattagaatttgcaaaaagaggagctaaagttgtcgtaaatgacttaggtggttctgttgatggtactggtggatcaagtgaagctgctgataaagtagttgatgaaataaaagccatgggtggtgaggcaatttctaacggatcaagtgtaactgacaaagcaggcgtgaaaaaattagttgatgatacaatggctgcctttggtcgtgtagatattttagtaaataatgcaggtgttctaagagacaagtcgtttgcaaaagtaacacttgatgattttgaatttgtagtaaacgttcatatgatgggttctgtttattgtacaaaagcggtttggccaattatgacagaacaaaattatggaagaataatcatgacatcttcatcttcaggggtatttggaaattttggacaatcaaattacggagctgctaaaatgggagttgttggactaatgaatactcttaaaattgaaggtatgaaatataatataa

SEQ ID NO: 204081 - DNA, 688 bp, Unknown
  Bacterial polypeptide expressing nucleotide sequence isolated from the Sargasso Sea
tcggaatacacggtgcttcctgaaattgcagtggccaagatcagctcacaagcccctttggaaaaagtctgcctgttgggatgcggaattacgaccggaattggtgctgttctgaatacggcaaaggtggaaaaaggttcagtggtcgccatttttgggctgggcggagtaggcctgggtgcgatccagggcgcagtgatggcaggtgcggaaagaattgtcgccattgatgtgaatcctgataaggaggaatttgcccggtcactcggagcaaccgattttgtcaatcccaaagatcatgatgcttcgatccaggaagtggtcgtggaactcacggacggcggagtggattattcctttgaatgtgtgggcaatgttgaattgatgcgctcggctctggaatgctgccacaagggttggggagaatccgtgatcatcggggttgccggagcaggacaggaaatcaatacccgtccttttcagttggtcacaggaagagtttggagagggtcggcctttggcggagtcaaaggacgttctcaacttcccggctatgtcgatcaatatctaagtggagaattgaaggtggatgaattcatcacttacacgatgcccttggaagaaatcaacaatgcttttgacctgatgcacgaaggaaaaagcatccggtcggtcattcatttctgaa

SEQ ID NO: 204082 - DNA, 450 bp, Unknown
  Bacterial polypeptide expressing nucleotide sequence isolated from the Sargasso Sea
catgacaattaattttaacgataaagttgcaatagtcacaggcgcaggtggtggtcttggaagatgtcacgcattagaatttgcaaaaagaggagctaaagttgtcgtaaatgacttaggtggttctgttgatggtactggtggatcaagtgaagctgctgataaagtagttgatgaaataaaagccatgggtggtgaggcaatttctaacggatcaagtgtaactgacaaagcaggcgtgaaaaaattagttgatgatacaatggctgcctttggtcgtgtagatattttagtaaataatgcaggtgttctaagagacaagtcgtttgcaaaagtaacacttgatgattttgaatttgtagtaaacgttcatatgatgggttctgtttattgtacaaaagccgtttggccaattatgacagaacaaaattatggaagaataatcatgac

SEQ ID NO: 204083 - DNA, 691 bp, Unknown
  Bacterial polypeptide expressing nucleotide sequence isolated from the Sargasso Sea
attcgcaaatcacacagttgttcccgaaatagctctcgctaaaattcgtgaagacgccccttttgacaaagtttgttacatcggttgtggggtgaccacagggcttggtgcggttatgaacaccgccaaagtccagcctggcgacaatgtagttgtgtttgggctgggtggcatagggctcaacgtgctccagggagctcgtatagcaggggccgacatgattgtcggcgtagacttaaatccttctaaaaaagagctcgctgaaaaatttggcatgacacattttgtaaacccatcagaagttggtgcagaccttgtcccctatctagttgatcttaccaaaggtggtgctgatttcagttttgagtgcatcggaaatgtaaatgtcatgcgccaagccctggagtgttgccataagggatggggtacttcaattattattggagttgccggttcgggccaagaaatagcgacccgtccattccagctcgtaacgggaagaaattggcgtggaacagcgtttggcggcgcgaaaggccgaacagatgtgcctcggattgtggattggtatatggatggaaagataaacattgatgatctgatcacccatactatgcctttagaaaaaattaacgaagggttcgatctaatgaggaaaggcacgtcaattcgcagtgtggtaaagttttag

SEQ ID NO: 204084 - DNA, 447 bp, Unknown
  Bacterial polypeptide expressing nucleotide sequence isolated from the Sargasso Sea
aatgatcaaaacacgtgctgctgtggcttggggcccgggtcaaccgttaaaaattgaagaagtggatttaatgccaccacaaaaaggcgaagtgctggtacgtatagtggcgaccggtgtttgtcataccgacgcttatactttgtcgggtcaggattctgaaggcaaattcccttgtattctgggccatgaaggtggcggtgtggtcgaagctataggtgagggcgtcaccagcgtggcggtgggcgatcatgtcattcctttgtacacaccagaatgcggtaaatgtaagttctgtttatccggtaaaactaacctttgtcaggccattcgtgccacacagggtcagggtttaatgccggatggcactacacgtttttctaaagatggtcagcctatttatcactatatgggcacttctactttttctgaatacactgtgctgcc

SEQ ID NO: 204085 - DNA, 745 bp, Unknown
  Bacterial polypeptide expressing nucleotide sequence isolated from the Sargasso Sea
aatgaaacaagcaattgtcacgggtgcaggtggaggtttaggattttcaatatgtaaaagtctttctgaaaacaatttttctgttgcagcagtagatttaaatcttaccgatgcagaaaaaactagtgaaaagcttaataacacaaaaccatacgctgcagatgttagagatgaagaatcaataatttcattgtatgaaaaaattgataatacacctgaccttattgtgaataatgcaggtatcgcaagatttggcaaactttttgatcaaaagttatcagattttcaagatgtagttcaaacaaaccttattggaagttttattgttgccacggagggtgctaaacggatggttaaagaggataagaaaggatctattattaatatcacttctgttcattctgtaaacccagggcctggggttggtgcatatccaactactaaatctggattatattcattaacaaaacttatggccctagagtggggcgaatatggaattcgtgttaatgccatagcgccaggttttattgattccggaatgtcaaaaccattttttgaaaatccaaaagtaagaaagtcacgcggaaaggctgtaccattgcaaagacttggttcagcagatgatattgcaaatactgttttgtttctagcatcagaagaagcatcttacataaatgcaaacgaaatagtagttgatggtggagttatccatagtgttttaatgcatcttcctcgagattga

SEQ ID NO: 204086 - DNA, 479 bp, Unknown
  Bacterial polypeptide expressing nucleotide sequence isolated from the Sargasso Sea
agccgggattattgctatcgatatcaacgaagataagtttgatattgcgaaaaagctcggcgcaacagatgtggtaaacccgaagaaatttgataagccgattcaggaagtcattgttgagatgaccgatggcggcgttgacttctcgtttgaatgtatcggtaatgttcacgttatgcgctcagcacttgaatgctgccataaaggctggggcgagtcggttattattggtgttgccggtgcaggccaggaaatttctaccagaccatttcagctggtaacaggtcgggtatggcgtggtacggcgtttggcggtgtaaaagggcgcagcgagctaccagattatgtcaaccgttacttaaatggtgagtttgagctggatacctttattacccataccatgccgctggaagatattaataaagcctttgatttaatgcatgaaggtaagtcaatcagaactgttattcatttttgat

SEQ ID NO: 204087 - DNA, 427 bp, Unknown
  Bacterial polypeptide expressing nucleotide sequence isolated from the Sargasso Sea
atgacaataagttttgaagataaagtagcaatagtaacaggtgctgggggtggattaggaagatgccatgcgcttcaatttgctgagagaggtgctaaagttattgttaatgatctaggtggctctgtggatggatcaggtggatcaagtgaagcagctgataaggttgtaaaagaaattaaagctatgggtggcgatgcaatctcaaatggatcaagtgtaactgataaagctggtgtaaaaaaactggtagatgacgcaatggcagcatatggaagaattgatattcttgtaaataatgctggtgtcttgagagataaatcttttgcaaaagtaaccttagatgattttgaatttgtagttgatgtacatatgatgggatctgtctattgcactaaagctgtatggcctattatggtgaacagaa

SEQ ID NO: 204088 - DNA, 904 bp, Unknown
  Bacterial polypeptide expressing nucleotide sequence isolated from the Sargasso Sea
atgacaattagttttaatgataaagtagcaatagttacaggcgcaggtggcggactcggaagatgtcacgcattagaatttgcaaaaagaggggctaaagttgtcgttaatgacttaggtggttctgttgatggtactggtggatcaagtgaagctgctgataaagtagttgatgaaataaaagccatgggcggtgaggcaatttctaacgggtctagtgtaactgacaaagcaggcgtaaaaaaattagttgatgatacaatggctgcctttggtcgcgttgatattctagtaaataatgcaggtgttcttagagacaaatcttttgctaaagtaactcttgatgattttgaatttgtagtaaacgttcacatgatgggttctgtttattgtacaaaagctgtttggccaattatgacagaacaaaattatggaagaataatcatgacatcttcatcttctggcgtatttggaaattttggacaatcaaattacggtgcagcaaaaatgggagttgttggactaatgaatactcttaaaattgaaggtatgaaatataatattaaagtaaattctctaatacctgttgcagcaacacgaatgacagaaaatttaggaatgccagatgcagtttttgacagtttaaaaccagaaactgtttcacctgcagtcatgtttatggcatcagatgatgcgccgaatggtgcaatgatatcagccggtgctggtgtatttgcttctgcagaaatagttcattcacaaggtgttgctctaaaaggcgatgaacttaatgcggatatgttagctgaaaagtgggctgaagcatcgaatatggacggtggtaaggcgcttaaaacaggtgcagagcatacagctcacatatttaaaaaactggctgaataaa

SEQ ID NO: 204089 - DNA, 745 bp, Unknown
  Bacterial polypeptide expressing nucleotide sequence isolated from the Sargasso Sea
aatgaaacaagcaattgtcacgggtgcaggtggaggtttaggattttcaatatgtaaaagtctttctgaaaacaatttttctgttgcagcagtagatttaaatcttaccgattcagaaaaaactagtgataaacttaataatacaaaaccatacgctgcggatgttcgagatgaagaatcaataaattcattgtatgaaaaaattgataatacacctgaccttattgtgaataatgcaggtatcgccagatttggaaaactttttgatcaaaagttatcagattttcaagatgtagttcaaacaaaccttattggaagttttattgttgcaacggagggtgctaaacggatggttaaagaggataagaaaggatctattataaatataacctctattaattcctcgaatccagggcctggagtaggagcttattcagcttctaaattaggactttactcattgacaaaacttatggccctagagtggggtgaatatggaattcgtgttaatgcaattgcaccaggctttacagatgcaggaatgtcaaaaccaatatataaaaatccaaatattcgaaattcgcgtggaaaagctgtaccattgcaaagacttggttcagccgaagatatagcaaatactgttttgtttctagcatcagaagaagcatcttacataaatgcaaacgaaatagtagttgatggtggagtgattcacagtgttttaatgcatcttcctcgagaataa

SEQ ID NO: 204090 - DNA, 1558 bp, Unknown
  Bacterial polypeptide expressing nucleotide sequence isolated from the Sargasso Sea
gaaaaaagcgctgaggattatttcttagctggtaagtctttaccatggtgggcaattggagcttctttaattgccgcaaatatttcggctgaacaattcattgggatgtcagggtctggctttgcattagggttagctatagcatcatatgaatggatggctgctattacgttgttgattgttggaaaatattttttaccaatttttattgaaaaaggattatatacgattcctgaatttattgaaaaaagattcagtacagaacttaaaacaattcttgcaattttctggattgcactatttgtatttgtaaatctaacaactgttttatatttaggagggctagctttggatactgtaatgggaagtggcgatgggtcgatattaattaacgcaataattggtttagcactatttgctgctgcttattctctatggggtggtcttgcagctgttgcttggactgatgttgttcaggtagttgttttaatttttggaggtttgatgatgacgtattttgcattggttaatttaggtgatggtggatcagcaattgatggtttgaaatatgtttatgaaacagtgcctgaaaggttttcaatgattttatctaaaggtgagataataactccaaatggtaatgatgcttggtttgatttgcctggcctagctgtactaattggaggaatgtgggttgcaaatctatattattgggggttcaaccaatatattattcaaagaactttagctgcaaaaagtttggaagaaggacaaaaaggtattgcatttgcagcattcttaaaacttcttattccaatttttgttgttcttcccggcataatcgtttacgtaatgaatttggatgcatctggagcattagctgttagttcgctagatcaaggatttattggtgaaaatggtgcaattattaatgataatgcagcaccatggttaataaaagaaattatccctgttggattaaaaggattgattttagcagccttagcagctgcaattgtttcatcgcttgcatcgatggtaaattcaacatcaacaatctttacaatggatatttataaatccatcattaataaaaatgctgatgatagatctctagttaaagttggtagaattgcaggacttgtttcattgattgttgcaattttaatagcacctcaattaaaaagtctaggtcaggtattccaatatattcaggaatatacaggtgttgttagtcctggtattttagcagtttttctaatgggcttattttataaaaaagcaagtaataatggagctatttggggtgttatatcctcgatacctattgcaatgtattttaaggtaggtccaaatggttggtctagtttatctattttcaatcatgatataccatttatgaatcaaatgttgattacctgcttagcaacaatgtttataatatttattgtaagtaaaattgaaggtaatcaggatgatccaaaaggaatagtaataaccaaaaagctttttagcacttcacctgcttttaatatttctgcttttgttgtttgtatca

SEQ ID NO: 204091 - DNA, 931 bp, Unknown
  Bacterial polypeptide expressing nucleotide sequence isolated from the Sargasso Sea
atgagcatcgatttcaaggacaaggtagccatcgtcaccggcgcaggcggcggtttgggccgcgaatacgcgctcgaactcgccaagcgcggcgccaaggtcgttgtcaacgatctgggcggatcgcgtgacggcaccggcacgtccgacgcggcggccaaggtggtcgaggaaatcgaaaaggcgggcggcgaagcgatcgccaacggcgcatcggtcaccgaatacgaccagatggaaaagatgatcgccgacgccaagcagaaatggggcggcgtccacgtcctcatcaacaatgccggcgttcttcgcgacaagagcttcgccaagatggaaccggcggatttcgacttcgtcgtaaaggtccaccttctgggcagcgccaacgccaccaaggcggcgtgggaaaccatgcgcgaacaggcttatggccgcgtgctgatgaccgcgagctccaccggcctgttcggcaatttcggccaggccaattacggcgcagccaagctcggcctcgcaggcctgaccaagacgctttatctcgaaggtgcgaagtacaacatcaaggtcaacacgctctcgcctgtcgcgggcacgcgcatgaccgaggatctgttccccgagcaggccttcgaactgttcgatccggtcaacgtggtccccgccgcgctcttcctcgtcagcgaagatgcgcccaccaacgccatcgtcggcgcaggcgcgggcggtttccacagcgcctggaccgtgatgaacgacgcagtctggctgccggaagaccagcgcacggtcgaaggttttgccgaaaactgggacaagatcagcgacttctcgaacctgaaggctccgcagagcgggtccgaacagtcgggcgcgatcctgaccgcaatgcagaaggtcaccggcaccgggccgagctcggcacgcggctgac

SEQ ID NO: 204092 - DNA, 1048 bp, Unknown
  Bacterial polypeptide expressing nucleotide sequence isolated from the Sargasso Sea
atgaaagctgtggtatttgaatcgtttggtggaaaattaaatattcaggacgtaaagaagcccatgccaaaatctcacggggtagtgatacgggtaaaagccacaggcgtgtgccgcagcgattggcatggctggatgggacatgatgatggaataaacttacctcatgtaccgggtcatgaatttgctggtgttgtcgagtccgttggaagcgatgtaaagcgattcaaagcgggcgataaagttacggttccttttattagtgcgtgtggaagatgttcagaatgctcttcgggtaatcaccaggtgtgtggtaaccaaacacagccgggctttactcactggggctcgtttgcagaatatgtagaaatcgattttggagacgttaatctggttcatctccctgaagaaatagactacgtgactgcggctagcttgggttgccgttttgctacatcatttcgcgcagtggttgaccaaggtaaggtgagcgctgggcaatgggtcgctgttcacggctgtggtggcgttgggctatctgctgtgatgattgcatcgagtattggcgcaaacgttattgccgttgatatttcggatgacgcactagcattggcgcaaaagcttggcgctgatgtagtgataaatgctaagaatgaaaaggatgtctctgcgacaatcaagcgcctttcattaggcggtgcgcacgtgtcaattgacgccttaggaaatcctattacctgtgtaaactcggtaaatagcttaagaaagcgtggtaaacatgttcaagttggtttgctattagctgaacagtcaacgcctcctattcccatggatacggtcgttgcacatgagcttgaagtaataggtagtcacggtatgcaggcgtatcgttacgaggccatgtttggcatgatcgccacaaaaaagctgaatccccaagccctgattggaaagataatttcacttcaagaagcgcctaaagcgttgactgaaatggacaaatattcacaatctggcgtgaccgttatttctttcgatgaaaagtgaa

SEQ ID NO: 204093 - DNA, 634 bp, Unknown
  Bacterial polypeptide expressing nucleotide sequence isolated from the Sargasso Sea
atgagcgaactaagatttgacgaaagagttgcgttagtgaccggagcaggcggcggcctcggccgagaacacgctttgctcttagcttccagaggggccgccgtaatggtcaacgacctcggctcaccaacaatgggaggccaagaccacgacgctacgcctgcagaaaacgtggtggccgagatacgcgcgctaggcggtatcgcttcatcaaatagtgattcagtagcaacgcgagacggcgctgaatctatggtttcggcaaccatcgaagagttcggtggactagacatcgtcattaataacgccggcattattagaaatagaacgtttctaaatatcggtgagtatgaatttgaaccagtgcttgatgttcatgtcaagggatgcttttacgtcacccgccccgcttacgagcacatgaaatcggtgggctatggtcgcatcattaacaccagctccggctcaggcctcttcggctcattcggtcagagcgcttactcagctgcgaaagcggccatatacggattcacgcgaacgttagcgatcgaaggcgcccgttacggtattcatgtcaacgcaatagcccccggagccctaactcgaatgaccggagacgtgctcggcgatgacg

SEQ ID NO: 204094 - DNA, 904 bp, Unknown
  Bacterial polypeptide expressing nucleotide sequence isolated from the Sargasso Sea
atgacaattaattttaatgataaagttgctattgtaactggcgctggtggcggtcttggtagatgtcatgcgcttcaattagcagagagaggtgcaaatattgtagttaacgacttaggtggttctgttgatggaacaggtgggtcgagtgaagcagctgaaaaagttgtcgacgaaattaagtctgcaggtggaaatgcaattgcgaatggttctagtgttacagataaagctggtgtaaaaaaacttgttgatgacacaatgacagcttttggccgtattgatattttagtcaataatgctggtgtacttcgtgataaatcttttgcaaaagttacacttgatgacttcgagtttgttgtggatgttcatatgatgggctctgtctattgtacaaaagctgtatggccgattatggttgaacagaactatggacgaataatcatgacttcatcttcgtcaggcatttttggaaattttggacaatcaaattatggtgcagcaaagatgggtgttgttggattaatgaatacacttaaaattgaaggtatgaaatataatattaaagtcaattcgctcgttccagtagcggcgacaagaatgactgaaaatttaggaatgcctgatgcagtatttgacagcttaagaccagagtcagtgtcgccagcggtaatatttatggcatctgaagatgctcctaacggtgcaatgatttcagctggtgcaggcgtatttgcttcggcagaaattgttcactcagagggtgtagcgttgaaaggcgatgatttaaacgctgatgttcttgcagaaaaatggtcggaagcatcagatctttcaaatggtaaagcattgaaaagtggtgctgaacataccgcacacatattcaaaaaactttctggttaga

SEQ ID NO: 204095 - DNA, 636 bp, Unknown
  Bacterial polypeptide expressing nucleotide sequence isolated from the Sargasso Sea
aatgcgcgctgcagttcttactcgtagaagttggatagaaatacttgagcaaaaaataccacccaccaatggagatgaagtcagggtcaggataaaagcagggggcatttgtggctctgatattcactacttccaacactataaaatgggagatttccctgtaaaagaaccatttatcctaggtcatgaagcggctggcgtagttgagacagttggagaaaatgttgaagacttgcagagtggtgacctagtggtagtgaacccaagtcatccttgtaaaaactgcagctattgtttctcaggaagagaactcttatgtgccaatatgagttttttagggagttctagaaaattcccccatattcaaggaatgttctctcagagctttactacgaaacgatcgcaatgctttaaactacctccaaatctctccccacatcatgccgctttcgcagaaccactctcagttgccatgcatgctgtccagaatgttggcgtcttaatcggtgccaatgtcttgatttccggggcgggaccaattggctgtttgatccttatggtggcgaagttagggggagcgaatactgttacaataacagatattaaaaaagagcctctgcgagttgcggagaatat

SEQ ID NO: 204096 - DNA, 512 bp, Unknown
  Bacterial polypeptide expressing nucleotide sequence isolated from the Sargasso Sea
tctggaagtaaagattcttatgaaaacaagagctgcagttgcctgggaagcaggcaagccactggaaattatggaaataaatttggacggacctcatgatggtgaagtcctcattcgtaatgttgctactggagtctgccataccgacgcctataccctctctggatcagatccggaaggtattttcccttctatacttggccacgagggaggttcagtagttgaggaaataggctctggagtctcttccgtttccgtaggagatcatgtcatccctctctatacaccagagtgtaaaaagtgcaaattttgtacttctggtaaaacaaacctctgtcaatcaattcgagcaacccaaggacagggactgatgcctgatggtacttcgcgtttttcttcagaaggaaaaactgtatttcactatatgggtacttcaactttttctgaatacacggtgattcctgaaatagcactggcaaaaatcaactcagaagctccacttgaaaaggtat

SEQ ID NO: 204097 - DNA, 590 bp, Unknown
  Bacterial polypeptide expressing nucleotide sequence isolated from the Sargasso Sea
tatgtcaattacatttaatgatcgtgttgcaattgtaactggtgcaggtggaggattaggaaaatgtcatgcattagacttagcacgaagaggtgcaaaagttgttgttaatgacttaggtggaaatgtagatggatcagatgatggctcttcttctgcggcagaaatggtcgttgaggaaataaaagctgctggcggtgaagcaatagctaatggagctagtgtaactgatgcagaacaagtcaaagcaatggttgatgaagtcatggatacctatggtcgtattgatatcttggttaataatgcaggtattcttagggataaaagtttttctaaagttgaagaccaagattttagaatggtcttagaagttcaccttatgggaagtgtaaactgcacaaaagcagtttgggaaattatgaaagagcagaactatggaagaatagtaatgacatcttcatcgagtggactttatggaaacttcggtcaaactaattatggatctgcaaagatgggagtagttggccttatgaatacacttaaacttgaaggagctaagtataatgttaaatgcaatactcttgcacctc

SEQ ID NO: 204098 - DNA, 610 bp, Unknown
  Bacterial polypeptide expressing nucleotide sequence isolated from the Sargasso Sea
tatggctattacttttaaagatcgagtagcgatcgtaacaggtgcaggtggcggtcttggtagatgtcacgctttagatctcgcaaaaagaggggctaaagttgttgttaatgatcttggtggaaacgtggatggatctgatgatggttcactttctgctgctcagcaagttgttgaagaaattaaagcaggtggcggagaagctatggcaaatggagccagcgttactgatagagatcaagttgatgcaatggttaaagaggttatggatacctacggccgtatagatattttggttaataatgccggaattctaagagataaaagttttacaaaagtagaggaagaagatttcagaatggtcttagaagtgcatttaatgggaagtgttaattgcacaaaggctgtatgggaaatcatgagagaacaaaattacggacgaattgtaatgacgtcttcatcaagtggactttatggtaattttggacagacaaattatggttcagccaagatgggtgttgttggtttaatgaacactcttaagttagagggagctaaatacaatataaaatgtaatacgttggcacccttagccggaactaggatgaca

SEQ ID NO: 204099 - DNA, 890 bp, Unknown
  Bacterial polypeptide expressing nucleotide sequence isolated from the Sargasso Sea
gtctattaggtttgatgaaaaagttgtaattgtaactggagcagggggaggtcttggaagggagcatgctttagagttggccagaagaggagcaaaagttgttgtaaatgatcttggtggctctgttgatggaaatggtgcaagtgattcagcgaacgaggtggtagatcagattaaatctgaaggcggtgatgctatagcaaatggagctagtgttactgacctagacgccgtaaagggaatggttgatgagaccacgaagaagtggggaagagtagacatcctagtaaataatgcaggaatcttaagagataaaagtttccataaaatttctattgaagatttcaatttagttatgtctgttcattttcaaggtactttgaattgcactcattcagtttttccaataatgagagagcaaaattatgggagaataatctttaccagttcctcaagtggtgtatttggaaactttggtcaatctaactatggatcagcaaaaatggctatggttggcttaatgaatactcttaagatagaaggacaaaaatataatattcacacaaattcaataacccctgttgcttacacaagaatgacagatggattactgccagaggaggttggagagagtcttctgccagaatatgtaacgccggctgttatttacctttcaagtgatgaagctcctaatggagctattgtttcggctggtgctggagtttactcacgaatatttattcatgaaacagatggagtatcacttggaatgagtgaagaaatgactcctgagaacatcgctgcaagctgggattcaatatctgatatgaagggcgcaaaggcccttcaaagtggaccagagcaatcgataaagattttgaaaaattaaa

SEQ ID NO: 204100 - DNA, 538 bp, Unknown
  Bacterial polypeptide expressing nucleotide sequence isolated from the Sargasso Sea
aatgatcaaaacacgtgctgctgtggcctggggcccgggtcaaccgttaaaaattgaagaagtggatttaatgccaccgcaaaaaggcgaagtgctggtacgtattgttgcaaccggtgtttgccataccgacgcatatactttgtcgggtcaggattctgaaggcaaattcccttgtattttaggtcatgaaggtggcggtgtagttgaagctgtaggcgagggcgtcaccagtgtggcggtgggcgatcatgtcatccctttatacacaccagaatgcggtaaatgtaaattctgtttatctggtaaaaccaacctgtgtcaggccattcgtgctacccagggccagggcttaatgccagatggtactactcgtttttccaaagacggtcagcctatttatcactatatgggcacttctactttttctgaatatacggtgctgccagaaatttcgttagccaaaattaataaagcagcacctttggaaaaggtctgtttattagggtgtggcgttaccacaggtatgggcgctgtg

SEQ ID NO: 204101 - DNA, 696 bp, Unknown
  Bacterial polypeptide expressing nucleotide sequence isolated from the Sargasso Sea
catgtcgaacgaaaaaccacagtttatcaagtcaaaggccgccgtggcctgggggccgggacagccgctaaagattgaagaagtcgatgtgatgttacctaaagccggcgaagtgttagttcgcatcgtggcgactggtgtgtgtcataccgatgcgtttaccttaagcggtgacgacccggaaggcgtgttccctgcgatcctcggccatgagggcggcggtattgttgagcaagtgggcgaaggcgtgaccagcgtgcaggtgggcgaccatgtaatcccactttacacgccagaatgcggcgaatgtaaattctgtttatcgggtaaaacaaatctgtgccagaagatccgtgcgacccaaggcaaaggtttaatgccagacggcaccacgcgtttctataaagatggccagccaattttccattatatgggctgttctaccttctctgaatacactgtattacctgagatttcattggctaaagtcaataaaaccgcgccattagcagagatctgtctgctaggttgtggtgtgacgacaggtatgggcgccgtaatgaacaccgctaaggtggaagaaggcgcgaccgtggcgattttcggccttggcggtatcggtctttcggccattattggtgcgaccatggccaaagctagccggatcattgccatcgatattaatgaatctaaatt

SEQ ID NO: 204102 - DNA, 633 bp, Unknown
  Bacterial polypeptide expressing nucleotide sequence isolated from the Sargasso Sea
aatgaaggcacttgtttacgatggtcccaaagatatttgttaccgtgaagtccctgatccaaaccagagacaagaccacgtccttataatgattaaagcggtaggaatttgcggttctgatatgcatgcctatttaggccacgatgaaaggcgcccagctccattgatcttgggtcatgaagcagctggaattatttgtgagggtgctcgagatggtgaacgggttacaataaaccctctcgtttcatgcggtaagtgttcggcttgtggaactggaagagaaaacatctgtcctaacaggcaaattatttccatgcctccaagagagggtgcatttgcgcaatatgtaactattcctgaaagaaatttggttaatgtaccaaccgagtattctcttgataaagcagccttagttgagcctttggctgttggttggcacactgccaaattagctgccaatgcaattgacgctaatatggaaaaaaaagctctagtaattggtggtggtgcaattggtctggcgactgcattagctctcaaggctatgggtactactgaactgacaatatcagaatttaatccgttgcgtagacaatatttgcttgaacatatagatgccaaagttgtggaaaa

SEQ ID NO: 204103 - DNA, 595 bp, Unknown
  Bacterial polypeptide expressing nucleotide sequence isolated from the Sargasso Sea
tatgacgataaattttgagaatcaagtggccatcgttactggtgcaggtggaggactaggtcgacaacacgcgcttgagcttggaagacgcggggcgagggtcgttgtaaacgatttgggtggcgatgtggatggttccgggggttctgtgtcagcggcagaacttgtctcccaagagatcatcgataacggtggtcaagccatcgccaacggtgcctctgtcagtgatatcgattctgttcaaaatatgattgatcaaaccatggccacttggggacgcattgatatacttgttaataatgcgggtatacttcgtgataaaaccttttcaaaacttgaagtatccaactggcatgcagttctagatgtgcatcttaacggaagcatgaactgctcaaagctcgtatggccaataatgactcagcaaaattatggtcgaatagtcatgacgacatcgacctcaggattgtttggtaattttggacaaagtaattatggtgccgcgaagcttggcctcgttggctttatgaatactctcaggttcgaaggcgcaaagtacaatatccatacaaattcaattgccccgatcgcggcc

SEQ ID NO: 204104 - DNA, 745 bp, Unknown
  Bacterial polypeptide expressing nucleotide sequence isolated from the Sargasso Sea
atgtctataagatttgatgggaaagttgcgatcgtaacaggagccggcggaggcttaggaagatgtcatgctctagatttggcttccagaggggcaaaggtagttgtaaatgatttaggtggatctgttgatggaactggaggctctttgtcagcagcagaaaaagtcgttgaggaaattaaagaagcagggggcgaagccatttcaaacggagcaagtgttacagatatgagccaagttgaagaaatggttaagcaaaccatggaaacttggggaagaatagatattttggtaaacaatgctggaatacttcgcgataaaagtttttctaaagttaccgatgaagacttcagactagttttggaagttcatttaatggggactgtcaattgtacaaaagcagtttgggatattatgaaagaacaaagttatggaagaattttagttacgtcctcatccagtggcgtgtatggaaattttggtcaaacaaattatggtgcagctaaaatgggagttcttggtttaataaacacattaaaactagaaggagcaaaatataatatcaagtgtaatgggctcacgcctgttgcgggtacaagaatgacagaagatctaatgccgccagaagttttagagaaacttcaacccgattgtgtaagtccagccagtaactttcatggtttcagaagatgctcctactggagttgttatggctgctggggctggggtttttgcaagaataatg

SEQ ID NO: 204105 - DNA, 683 bp, Unknown
  Bacterial polypeptide expressing nucleotide sequence isolated from the Sargasso Sea
tatgcctgatggcacaagcagattttctataaatggtaaacctatacttcactacatgggtacatcaacattttccaatcatactgttgttccagaaattgctcttgcaaaagtcaacaaatcagccccctttgacaaaatttgttatataggttgtggagttacaactggcataggagctgttataaacacagcgaaagccgaagctggatgcaaggctgtagtttttgggcttggtggaataggtctaaatgttatccaaggtttaagaatgataggagccaacatgattgttggagttgacactaataataaaaaagaatcatggggcaaaaagtttggtatgacccattttgtaaatccaaatgatgttggtaatgatttagtaaatcatcttgtagagataaccgaaggtggtgccgattattcttttgaatgtattggtaatgtagaagttatgcgacaagctctagaatgtgctcacaaagggtggggtgagagtataattattggggttgctggtgcaggaaaggaaatatctaccagacctttccaacttgtcactggaagaagttggagaggcactgcttttggaggtgcaagaggccgtacagacgtacctaaaattgttgattggtaccttcaaggtaaaatagatattgacccaatgattactcatactc

SEQ ID NO: 204106 - DNA, 586 bp, Unknown
  Bacterial polypeptide expressing nucleotide sequence isolated from the Sargasso Sea
atgtcattagcattgaaagatggtcagacacatattaagtctaaagcagccgttgcgtgggccgctggtgaaccgttaaaaatggaagagattgatgttgaacttccaaaaaaaggcgaagtactagtacgtattgttgccagtggtgtatgccataccgatgcgttcacgctttcaggtgatgatccagaaggtgtgtttccttcagtacttggccacgaaggtggcggtattgtagaaatggtaggtgaaggggtgacgtctgttgaagtaggcgaccatgttattcctttatacacagcagaatgcggtgaatgtaaattctgtacgtctggaaaaacaaacttatgccaagcggttcgtgaaacccaaggtaaaggtttgatgccagatggtactagccgcttttcgaaagacggtgagccaatttaccattacatgggttgctctactttttctgaatacaccgtattgccagaaatttctttggctaaagtgaataaatcagcgcctcttgaagaagtctgcttgttaggctgtggggttaccacgggtatgggcgctgtgcttaatactgctaaagaaa

SEQ ID NO: 204107 - DNA, 865 bp, Unknown
  Bacterial polypeptide expressing nucleotide sequence isolated from the Sargasso Sea
catgttatacccgctttatactccagaatgtgggatatgtaaattctgcacgtctggcaaaacaaacctctgccaagctattcgatctacccagggtcagggcctgatgcccgatggcagttcgcgcttttcatcggggggaaaacccgtttatcactatatgggtacatcaaccttttccgaatacactgtccttcctgaaatttcagtggcaaagatcaatgccaaagccccacttgaaaaggtatgcctactcggatgtggcatcaccaccgggataggtgcagtaatcaacacggctaaggttgaagcgggctctactgttgctattttcggactcggtggtgttggtctaggagctattcagggtgcagtcatggcgagtgcagaaaggatcattgcaatcgacgttaatcaggacaaggagagttttgcccgctctcttggggcaaccgattttgtaaatcctaaggaccacaatgtctccatccaggaagtaatagtcgaacttacagaaggtggtgtcgattattcatttgaatgcgtcgggaatgtagagttaatgcgttccgcattggaatgctgccacaaagggtggggcgaatcggttatcattggtgtcgcgggtgcaggccaagaaataagtaccaggccatttcagctggtaactggtcgtgtttggcgcggctcagcttttggaggagtaaagggacgttcgcaactaccaagctacgttgaacagtatatgaatggcgaacttaaagtggatgagtttatcacttttaccatgcccctggaggaaatcaaccgagcattcgaactgatgcatgaaggcaagagcatacgatccgtaatccatttctga

SEQ ID NO: 204108 - DNA, 420 bp, Unknown
  Bacterial polypeptide expressing nucleotide sequence isolated from the Sargasso Sea
tatgtcaattacatttaatgatcgtgttgcaattgtaactggtgcaggtggaggattaggaaaatgtcatgcattagacctagcacgaagaggtgcaaaagttgttgttaatgacttaggtggaaatgtagatggaacagatgacggctcttcctctgcagcagaaatggtcgttgaggaaataaaagctgctggcggtgaagcaatagctaatggagctagtgtaactgatgcagaacaagtaaaagcaatgattgaccaagtcatggacacctatggtcgtattgatatcttggttaataatgcaggtattcttagagataaaagtttttctaaagttgaagaccaagattttagaatggttctagaagttcatctcatgggaagtgtaaattgtacaaaagcggtttgggaaataat

SEQ ID NO: 204109 - DNA, 872 bp, Unknown
  Bacterial polypeptide expressing nucleotide sequence isolated from the Sargasso Sea
taccctttccggagaggatcctgaaggaattttcccatctgtactgggacacgaaggtggagcagtcgtcgaagaaatcggtcccagagtttcttctgtttcggttggtgacaaagttatcccactttacacaccggaatgtggaaaatgtaaattttgtatgtccggcaagacaaatctctgtcaggcgattcgtgttacccagggtcaaggtctcatgcctgatgggacttcacgtttttcttcaggcaggaaacaggtgttccattatatggggacctctacgttttcggaatatacggttcttcccgaaattgcagtggctaaaatcaactcacaagcccctttagaaaaagtctgcctgttgggatgcggaattacgactggcattggtgcagttctgaatactgcgaaggttgaaaaaggttcagtggtagccatatttggccttggtggtgtgggactgggtgctatccagggtgctgtcatggcaggagcgggtagaatttttgcaattgatgtgaatcctggtaaggaagaatttgcccgatcactcggagcaactgattttgtaaatccaaaagatcatgcaacttcgatccaagaagtgatcgtggaactaacagacggcggagtggattattcctttgaatgtgtgggcaatgttgagttaatgcgttccgctctggaatcctgccataaaggctggggagaatctgtgatcattggagttgccggagcaggacaggaaatcagcacacgcccatttcagttagtcacaggaagggtttggagaggatctgcctttggcggtgtcaaaggacgttctcaacttcctggctatgtcgatcaatatctaagtggagaatgaa

SEQ ID NO: 204110 - DNA, 536 bp, Unknown
  Bacterial polypeptide expressing nucleotide sequence isolated from the Sargasso Sea
aatgccaataagtttcaaagataaagtagcaatagtcacaggtgctggtggtggattaggaagatgccatgcacttcaatttgctgagagaggcgcaaaagttattgttaatgatttaggtggtgctgttgatggatcaggtggttcaagtgaagcagctgataaggttgtcgatgaaattaaagctatgggtggtgatgctatttcaaatggttcaagtgtaactgataaagctggtgtaaaaaaactagtagatgatgcaatggcagcttatggaaggattgatgttcttgtaaataatgccggtgttttgagagataaatcttttgcaaaagtaactttggatgattttgaatttgtagttgatgtacatatgatggggtctgtctattgtaccaaagcagtatggccaattatggttgagcaaaaatatggtcgaatagtcatgacatcttcttcttctggaatatttggtaattttggacagtctaactatggatcagctaaaatgggagttggtgggattatgaatactc

SEQ ID NO: 204111 - DNA, 691 bp, Unknown
  Bacterial polypeptide expressing nucleotide sequence isolated from the Sargasso Sea
atgaaaacacgagccgcaatcgcctgggaagccaatcgcccgttggaaattgaagaggttgacctagagggtcctaaagacggagaggttctagttagaatagtgacaactagtctatgtcatactgacgtgtttacattgtctggagaagatccagaagggctgttcccatgtatcttgggacacgaaggttgtggtatagtagaagatattggcaaaggcgtcacatcggtaaagcctggcgaccatgtaatcccactttacgttcccgaggatccagaatgcccctacatcaaatctggcaagactaacctttgccaaacaattagagagacacaaggcgctggcgtcatgcctgatggcacctcacggttttcttataagggccaacagatcttgcactacatgggtaccagtacattcagcgaatacacggtattaccagaaatttcagttgccaagatttctaaagaggcaccgttatccaaggcatcggtcatgggttgcgctgttccaactggtataggcgctgtccgcaatacggccaaggttgaggcgggtgctaccgtggcagtctttggattaggcgcggttggtatggcggttattcaaggtgctgtgttgaaaggtgcatcgaggatcataggcatagatgtcaaccctaataaattcttcttgccaaatcactagg

SEQ ID NO: 204112 - DNA, 285 bp, Unknown
  Bacterial polypeptide expressing nucleotide sequence isolated from the Sargasso Sea
ccagggtcaaggtctcatgcctgatgggacttcacgtttttcttccggcgggaaacaggtgttccattatatggggacctctacgttttcggaatacacggtgcttcctgaaattgcagtggccaaaatcagcccaaaagcccctttggaaaaagtctgcctgttgggatgcggaataacgaccggaatcggtgcagttctgaatacggcaaaggtggaaaaaggttctgtggtcgccatttttgggctgggcggagtaggcctgggtgcgatccagggcgcagt

SEQ ID NO: 204113 - DNA, 828 bp, Unknown
  Bacterial polypeptide expressing nucleotide sequence isolated from the Sargasso Sea
attttaggacatgaagctgctgggattgttgaagaaataggagttggtgttagctcagttagtaaaggtgactttgtattaatgacacctataggcccctgcgggatttgtgaaatgtgcaatttagaaagatacacactttgtgaaagaggacaaacattcgtctttgggacacttccggatggaagtacaccatttataaaagatgagtctcctgtatatcaaggattgggagtgggtggttttgctgaatacacagttttagaagaaagaaatgttgtacgtattgaaaagggtatttctttggaaactgtttgtttaataggctgtggagttcaaacaggtgttggttccgttttaaacactgcaaaagtaattcctggttcaacagtgcttgttatgggtttgggaggcgtaggactatcggttgtgcaaggggcacgtattgctaaagctgaaaagataattgcatcagatcctgtcgaagagaggagatctgccgcccttaaattaggagcaactaatgttgtggatccaagcgataataatcttgttaacgctgtgatggaattaactatggggaaaggggttgattatgctttcgatgctgttggtaactccgaattgattacacttggtctaactgtaagtaaggcaggtgggagcacagtaatagtgggagctccaccccccgatgaagagctaaaatttccatcttccttacatctaatgatgagtgaaaaacgtttacttggttctttactagggtcttgtaatgctcaggtggacattcctcgtctgatcgactattggcagagtggccaacta

SEQ ID NO: 204114 - DNA, 765 bp, Unknown
  Bacterial polypeptide expressing nucleotide sequence isolated from the Sargasso Sea
tatgacgattcgatatgacgacaaagtagcgctggtgaccggcgcgggcggtggcttgggcagaagccatgccattgaactggccaagcggggcgccaaggtggtggttaatgacctcggtggctccgtttcgggagagggcgccaactcacaggcctctctcgatgtggtggccgagatcgaagcacttggcggcgaggccatggcacacggcgccaatgtggctgacctcgaacaggtgctggatatggtcgcacagaccatgggccgctgggggcgtctcgatattctcgtaaacaacgcgggcatcctccgggacaagagcttctccaaggggtcggtagaggatttcaggttggtgaccgatgtgcacctgatgggctccgtccactgcaccaaggcgtgctgggacatcatgaaggatcaggagtatggtcgtatcgttatgacatcttcctcgagcgggctctatggcaattttggccagaccaactacggtgcctccaagatggggatgatcggcatgatgaacacgctggctcaagaaggtgccaagtacaacgtcaaaatcaatgcgctggcgccgacagcaggcacacggatgacagaggggttgattgaagagaaggcattcgccctgctcacaccggagacagtgacaccggcagtgctgtatctggtgtcagaagacgcgccgactcgcactattttggcagctggggcgggaagcttcgccgttgccaagattgtcgagacggaaggtat

SEQ ID NO: 204115 - DNA, 584 bp, Unknown
  Bacterial polypeptide expressing nucleotide sequence isolated from the Sargasso Sea
aatgaagtcacgcgcagcagttgcattggaagcgggtaaaccgctggagctggttgagattgatgtggaaggcccgaaagcgggtgaagtgctggttaaaatggccgccactagcgtatgccataccgatgcctatacgctttcgggtgcagacccggaaggcaactttcctgccgttttaggtcatgaaggcgcaggggttgtgcaggaagtgggcgagggcgttacaagcttgaaaccgggcgatcatgtgattccgctctacactgccgaatgtggcaagtgtaaattctgcttatctggcaaaaccaatctatgtggcagcgttcgcgctacccagggcaaaggcgtaatgcctgatggtacctcgcgtttctcactcgatggcaaaatgcttcaccactacatgggtacctcaacctttagtgaatataccgtgctacccgaagtgtcgttggcggtagtttcaaaagaagcacccatggataaaatctgcctgctgggttgcggtgtgactaccggtattggtgcggtgcttaataccgccaaggttgagccgggcgctacggtagcggtatttggcc

SEQ ID NO: 204116 - DNA, 295 bp, Unknown
  Bacterial polypeptide expressing nucleotide sequence isolated from the Sargasso Sea
ctgcaatttcaggaagcaccgtgctacccagggtcaaggtctcatgcctgatgggacttcacgtttttcttccggcgggaaacaggtgttccattatatggggacctctacgttttcggaatacacggtgcttcctgaaattgcagtggccaaaatcagcccaaaagcccctttggaaaaagtctgcctgttgggatgcggaataacgaccggaatcggtgcagttctgaatacggcaaaggtggaaaaaggttctgtggtcgccatttttgggctgggcggagtaggcctgggt

SEQ ID NO: 204117 - DNA, 301 bp, Unknown
  Bacterial polypeptide expressing nucleotide sequence isolated from the Sargasso Sea
ctgcgccaacagtattcaaagccgcgacagtgcgtaggcagcaaaacgataccgaaggttaaggcctgcggcgtctgccacacggaccttcacgtcatcaagcatgaggtgcctttcccgcaaccagctgtgcttggccatgaggtcgatcggctcagcgcaagccgggcaaatcttttcgatctagacttaaaagaggagatgaaaagattcctttcaatctaccgtagacatctggttgttttcctcccccaaccgggcaaacaaaaaaactgtgtgtgtgcgtgtgtgaaaatatagg

SEQ ID NO: 204118 - DNA, 910 bp, Unknown
  Bacterial polypeptide expressing nucleotide sequence isolated from the Sargasso Sea
atgggtattgatttccaaggccgcgtggccatcgtgacgggcgcaggcggtggcctgggccgccagcatgcattggcgctggcccagcgcggcgccaaggtgctcgtcaatgacctgggcggcgcggtggacggcagcggcggcacggtgacggccgcgcaggccgtggtcgacgagatccgcgccgcaggcggcgaggccctggccaacggcgcatcggtcaccgacttcgcggccgtcgaagccatggtgcagcaggccattgacgcttggggccgggtggacatcctggtcaacaacgccggcatcctgcgcgacaagtcgttcgccaagatggacatggccgacttccgcctggtggtggatgtgcacctgatgggcgcagccaactgctgcaaggccgtgtggccgcacatggtggcccagcaatatggccgcatcgtcatgacgacatcctccaccggcctgtatggcaacttcggccaggccaactacggcgcggccaagctggcccaggtggggctgatgcagaccctggccatcgaaggcgccaagtacaacatccacgtgaacgccctggcccccacggccgccacgcgcatgaccgaaggcctgatgccacaggaagtgctggacgccttgaagcccgaagccgtggtgcccgccatgctggtgctggcgcacgaaagcgcgccttcgcgcaccattttgtgtgccggtgctggcacgtttgaagcggcccatatcacgctcacgcagggcatccatctggggattggcgccgatgtgcccgagcaactggcggcccgcctggccgaggtgaccgagcgcgcgggcgagcaagtaccacaaagtggcgcggcgcaaggaaccaatgaagttggaaaggctttggccgcaagggcttgat

SEQ ID NO: 204119 - DNA, 611 bp, Unknown
  Bacterial polypeptide expressing nucleotide sequence isolated from the Sargasso Sea
tatgtcaattacatttaatgatcgtgttgcaattgtaacaggtgcaggtggaggattaggaaaatgtcacgcgttggacctggcacgaagaggcgctaaggttgtagttaatgatttgggtggaaatgtagatggatctgatgatggttcctctactgcagcagaaatggtcgttgaagaaatcaaggctgccggtggtgaagcaatcgctaatggagctagtgttactgatgcagaccaggttaaagcaatggttgaccaaaccatggatgcctatggtcgcattgatatcttggttaacaatgcaggtattttaagagataaaagtttttcaaaggttgaagatcaagattttagaatggttctagaagttcatctcatgggaagtgtaaattgtacaaaagcggtttgggaaataatgaaagagcagaactatggaagaatagtaatgacttcttcgtctagtggactttatggtaactttggtcaaactaattatggttctgcaaagatgggcgtagttggcctaatgaatactcttaaactagaaggagctaagtacaatgttaagtgtaatacttttggcgccattagcgggaacaagaatgacg

SEQ ID NO: 204120 - DNA, 1039 bp, Unknown
  Bacterial polypeptide expressing nucleotide sequence isolated from the Sargasso Sea
atgcgtgccgcagtacttactggtaaaagttcgatagaaattctcgaacaaaaaacacccggcatcggagaggacgatgtcagggttagaataaaagctgggggtatttgcggctccgaccttcactatttttatcattatagaatgggggatttccctgttcgggaaccatttattctgggtcatgaagcagctggggtaattgaggccgttggaacaaatgtgaaacgtctgcagaatggtgacttagtagtaataaacccaagccatccttgcaggcactgcagttattgttttacgggacgacagcttttgtgtgctgatatgcgttttttaggaagttctagaaagttccctcacatccaagggatgttttctcaaacttttacgacgaaccaatcccaatgttacaaactgccatcaaattttgatgtacaccatgccgctttcgctgaaccactttcggtagccatgcatgctgtacaaaatgccggcgcgcttataggtgccaatgttttgatttctggctcgggaccaattggctgtttgattcttatggcggcaaggctggcaggagccaatactattacaataacagatataaaaaaggaaccgcttcgagttgcagaggatatcggcgcatcacgagccttagatatctcgcaatcagttaaacaaataccgctcacagatgatccacgaggaagtttcgatgtcgctttcgaagcctcaggaaatcaagcggcggtgctattagcaataaaaaatctcaagcccgggggcactttcgtgcaagtgggaacattcaaaaataccgatatttctatcccatccgatctgatcatgacaaaagagttaactctcaaaagctcgttcagatttgataaggaattttcttgggcgacagagtatctagcgactcagagggtcaatgttcaacctcttttatcccatatttttcctatggaggacgctaacgaagccttccaaatagcccaggatagaaacaatgcaatgaaggttcatctgtctttctaaa

SEQ ID NO: 204121 - DNA, 919 bp, Unknown
  Bacterial polypeptide expressing nucleotide sequence isolated from the Sargasso Sea
atgaaaacacgcgctgctattgcttgggaaccaaaccgacctcttgaaattgaagaaatagatttagatggtccaaaggcaggtgaagtacttgttcgtattgttactactagcctttgccatactgatgtattcacgctgtctggcgaggacccagaaggcttgtttccatgcattcttggtcacgaaggttgtggtgtcgttgaagaggttggtcagggcgtcacctctgtaaagcccggtgaccatgtgattcctctttatgtgccagaggacccaaactgcccatacatcaaatctggtaaaactaacctttgtcaaacaattcgggcaactcagggagctggtgtaatgcctgatggtagttctcgcttttcctataaaggtaaagaaattcttcattatatgggaacaagtacatttagtgagtacactgtacttcctgaaatttcagtagctaaaatttccaaagaagcccctttgtcaaaagcttctgtgatgggttgtgccgtcccaacaggcattggtgcagtgcgcaatacagctaaggtagaggctggtgcaaccgttgctgtgtttggcctgggagcagtaggtatggcagtcatccaaggagctgtcttgaaaggagcatcccgtattattggaatagatgtcaatatcaacaaattcgagattgctaaggcacttggtgctacggaatgtataaatccaaaggaccactcttctcctattcatgaagtattaattgaaatgacaaatggaggccttgattacacctttgaagccgttggaaatgtagagctgatgcgttcagcactggaatcttgccataagggatggggtgaatgcacagtgattggtgtcgccggtgcagggcaggagatttctacacggcctttccagtggtcacgggccg

SEQ ID NO: 204122 - DNA, 907 bp, Unknown
  Bacterial polypeptide expressing nucleotide sequence isolated from the Sargasso Sea
atgtctattaggtttgatgaaagagttgtaattgtaactggagcaggcggcggtcttggaagggagcatgctttagagtttgccagaagaggagcaaaagttgttgtaaatgatctaggtggctctgttgatggaaatggtgccagtgattcagcgaatgaggtagtagaacagattaaatctgagggcggtgatgctatagcaaatggagctagtgttactgatctagaagctgtaaaaggaatggttgatgaggccatgaagaagtggggaagagtggatgtcctggtaaataatgcaggaatcttaagagataaaagtttccataaaatatctattgaagatttcaatttagttatgtctgttcattttcaaggtactttgaattgcacacatacagtttttccaataatgagagagcaaaattatgggagaataatctttactagttcctctagtggtgtatttggaaactttggtcaatccaactatggatcagcaaaaatggctatggtcggcttaatgaatactcttaagatagaaggacaaaaatataatattcacacaaattcaataacccctgttgcttacacaagaatgacagatggattactgccagaagaggttggagagagtcttcagccagaatatgtaacgccggctgttatttacctgtcaggtgatgaagctcctaatggagctattgtttcggctggtgctggagtttactcgcgaatatttattcacgaaacagatggagtatcgcttggaatgggtgaagaaatgactcctgaaaacatcgctgcaagctgggactcaatatccgatatgaagggcgctaaggcccttcagagtggaccagagcaatcgataaagatttttgaaaaattaaaccaaaaagattagt

SEQ ID NO: 204123 - DNA, 916 bp, Unknown
  Bacterial polypeptide expressing nucleotide sequence isolated from the Sargasso Sea
tatgtctattacttttaatgatcgtgtagctatcgtcactggagcaggcggaggtttgggaaggtgtcatgctctagatctagccaaaagaggtgccaaagttgttgtaaatgacctgggtggaaatgtagatggatcagatgatggttcagtatcagctgcagaggctgttgtagaagaaataaaagcagcaggtggagaggcaatggctaatggggctagtgttacagacaaagatcaagttaatgccatggttgaagaggtcatgagcaaatacggtcaaatagatattttagtaaataacgcaggaatcttaagagacaagagtttttcgaaggtagaagatgaagattttaggatggttctcgaagtccatttaatgggcagcgtgaattgcacgaaagccgtttgggagataatgaaagaacaaaattatggaagaatagttatgacttcctcttctagtggattgtatggtaatttcggtcagactaattatggtgcggctaaaatgggtgttgttggtttgatgaatacgcttaagttagaaggcgctaaatacaatgttaaatgtaatactttagccccgttggcgggcactagaatgactgagagtttgatgcctggagaagttatcgaacagatcaaacctgattacgtcactccagcggtgacttacatggtttcggaagatgcacctactggcgtaatcatagctgctggcgcaggagtgtttaccagagtcatggttcatgaaactaaaggagtctatcttggaacaggtgaagatatgaccgctgagaacattgaagccaattgggatcagatctctgatatgactgatgctaccttgtgttatcaaggcggagatcagtctatgaaagtatttagtcttatacaagaaagcgaaaagtaa

SEQ ID NO: 204124 - DNA, 907 bp, Unknown
  Bacterial polypeptide expressing nucleotide sequence isolated from the Sargasso Sea
atgtctataagatttgatgaaaaagttgtaattgtaaccggggcaggcggcggtcttggaagggaacatgctatagagtttgctagaagaggagcaaaagttgttgtaaatgatcttggtggctctgttgatgggaatggcgccagtaattcagcgaatgaggtggtagagcagatcaaatcagagggcggtgatgctatagcaaacggtgcaagtgttactgatctagacgcagtaaaagcaatggttgacgagaccatgaagaaatggggaagagtagacgtcctagtaaataatgctggaatcttaagagataaaagtttccataaaatatctattgaagatttcaatttagttatgtcagttcattttcagggcactttaaattgcacacatacggtttttccaataatgagagagcaaaattatgggagaataatctttactagttcctcaagtggtgtatttggaaactttggtcaatctaactatggatcagcaaaaatggctatggttggcttaatgaatacacttaagatagaaggacaaaaatataatattcacacaaattcaataacccctgttgcttatacaagaatgacagatggattactgccagaggaggttggggagaatcttcaaccagaatatgtaacaccggctgttatttacctttcaggtgatgaagctcctaatggagctattgtttcggctggtgctggagtttactcgcgaatatttattcatgaaacagacggagtatcgcttggaatgggtgaagaaatgactcctgaaaatatcgcagcaagctgggattcaatatccgatatgaaggacgctaaggcccttcaaagtggaccagagcaatcgataaagatttttgaaaaattaaaccaaaaagattagt

SEQ ID NO: 204125 - DNA, 916 bp, Unknown
  Bacterial polypeptide expressing nucleotide sequence isolated from the Sargasso Sea
tatgtctataacttttaacgatcaagttgcaattgttactggtgccggtggaggtctaggtagatgccatgcgctagatttagctaaaagaggcgctaaagttgttgtaaatgacctaggtggtaatgttgatggttctgatgatggttcgttatctgctgctgaaatggttgtagaagaaatcaaagctgccggaggagaagcaatggccaatggagctagcgtaactgatgctgatcaggtcaaagctatggttgatgaggtcatggaaaaatatggccgtatagacatattagtcaacaatgctggtattctcagagataaaagcttttcaaaagttgaagatcaagactttagaatggtcgttgaagtccatttgatgggaagcgtcaattgcacgaaagcagtttgggaaatcatgaaggagcaaaactatggaagaatcgtaatgacttcttcatcaagcggattgtatggaaactttggtcaaactaattacgggtcagcaaaaatgggggtcgtaggacttatgaacaccttaaagttagaaggtgcgaaatataatgttaaatgtaataccttggcaccattggctggtacaagaatgactgaaagcttaatgcctggagaagtaattgaacaaataaaacctgagtatgttactcctgctgtaacttatatggtctcagaagacgctcctactggagtaattatagctgcgggagcgggtgtatttacaagagttatgatacatgaaactaaaggtgtttatttaggaaccggtgacgatatgacggctgaaaatattgaagctaactgggaacagatttctgatatgactgacgccacactttgttatcagggtggagatcaatcaatgaaagccttcactttaatccaagaaagtaagaaataa

SEQ ID NO: 204126 - DNA, 403 bp, Unknown
  Bacterial polypeptide expressing nucleotide sequence isolated from the Sargasso Sea
atgaaaacaactgcagcagttctttatgaggtaaatcaaccattagttgtggaacaacttgatattgatgaacctaagaatggggaggtccgcgtaaaaatagcatcggccggcgtatgccattctgattaccattgtatgaaaggtgaatggacggttcctttgccaatggtgcttggacatgaagcagctggaattgtggagtctattggtccgggggtaaccaatgttgtgcctggggaccatgtgattctaaatttcagacctaattgtggatggtgcaagttttgtacagtaggacgacctgttctttgtaatggtgcagacacagatcgctggatgatgtttgatggtactgctaggctccataaaaacggttcagatgtcttccattttgcgagga

SEQ ID NO: 204127 - DNA, 855 bp, Unknown
  Bacterial polypeptide expressing nucleotide sequence isolated from the Sargasso Sea
aatgaaggcacttgtttacgatggtcccaaagctatttcttaccgtgaagtccctgatccaaaccagagacaagaccacttccttataatgattaaagcggtaggaatttgcggttctgatatgcatgcctatttaggccacgatgaaaggcgtccagctccattgatcttgggtcatgaagcagctggaattatttgtgagggtgctcgagatggtgaacgggttacaataaaccctcttgtttcatgcggtaagtgttcggcttgtggaagtggaagagaaaacatctgtcctgacaggcaaattatttccatgcctccaagagagggtgcatttgcgcaatatgtaactattcctgaaagaaatctggttaatgtaccaactaagtattctcttgataaagcagccttagttgagcctttggctgttggttggcatactgccaaattagctaccaatgcaattgacgctaatatggaaaaaaaagctctagtaattggtggtggtgcaattggtctggcaactgcattggctcttaaggctatgggtatttctgaactgacaatatcagaatgtaatccgttgcgtagacaatatttgctggaacatatagatgccaaagttgtggaaaaaactgagagttcattttcaatcgttattgacgcagtgggctttggctcaactcgtgctgtggcatcacaacttgtatcccccggcggggtcattgcacacgtgggtttaggagacaacactaatggtcttgatgttaggcgtataacccttcaggaaataacctttatcgggacctacacctatactgcacaagattttaaagatactgcagaagcattatt

SEQ ID NO: 204128 - DNA, 880 bp, Unknown
  Bacterial polypeptide expressing nucleotide sequence isolated from the Sargasso Sea
catgggaatctgtaacggacgcaccgtcatcatcaccggcgcgggtggcgggctcgggcgcgaatacgcgctggcattcgcggccgaaggcgcggcggtcgtcgtcaacgacatccggcacgacgccgcacaggcggtcgtcgacgagatcgcgcagcgcggcggtcgcgcgcttgccaatgccgacgacatcacgcgcgtcgacaccgcgcagcgtatcgtcgacgcggcacacgcagcattcggcgacatacacgtgctcgtcaacaacgcgggcatctgccgcgacaagatgttcacgagcatgacggaaaccgactgggacgacgtgatgcgcgtgcacctgcgcggccacttctgcctgtcgaacgtgctggcgcgcgtgtggcgcgacgcggcgaaagccggccatgcggtcgacgcgcggatcgtcaacacgagttcgggcgccgggctgcaaggctcgatcggccagtcgaactacggcgcggcgaaggcgggcatcgccgcgctcacgctgatgcaggcggccgagctgcagcgctacggcgtgcgcgtgaacgcgctcgcgccggccgcgcgcacgtcgatgaccgaaggcgtgttcgccgacatgatgaagaagcccgaggacggcggcttcgactacttcgatccggccaacgtcgcgccgctggtcgtgtggctcggcagcgcgctgtcggccgacgtgacgggccaggtgttcgaggtcgcgggcgggatgatcgcggtcgccgaaggctggcgcaccggcccgagcgtcgatcgcggcgcgcgctgggcggcggccgaggtcggcccggcggtcgcgcagctgctcgccgctgcgcggcccgcgcagcgcgtgtacgggagctga

SEQ ID NO: 204129 - DNA, 781 bp, Unknown
  Bacterial polypeptide expressing nucleotide sequence isolated from the Sargasso Sea
cccacccagggcaaggggctgatgccggacggcaccacccgcttctccaaggacggccagcccatctaccactacatgggcacctccaccttcagcgaatacacggtactgcccgaaatctccatcgccaaggtggatccggccgcccccctggaagaggtctgcctgctgggctgcggcgtcaccaccggcatcggcgccgtgatgaacaccgccaaggtgaaagagggtgagagcgtcgccatcttcgggctggggggcatcggcctctccgccatcataggcgcgcgcctggccaaggccggccgcatcatcgccatcgacatcaacgagagcaagttcgagctggcccgcaagctgggcgccaccgactgcatcaacccgaacacgttcgacaagcccatccaggaggtgatcgtcgagatgaccgacggcggcgtagacttctccttcgagtgcatcggcaacgtcaaggtgatgcgcgcggcactggagtgctgccacaagggctggggcgagtcggtcatcatcggcgtggccggtgcgggccaggagatcagcacccgtccgttccagctggtcaccggccgggtgtggcgcggcagcgccttcgggggcgtgcgcggtcgcagcgagctgccgagctacgtacagcgctacatgcagggtgagttcaagctggacgacttcatcacccacaccatgcccctcgagcagatcaacgaggcgttcgatctgatgcacgaaggcaagagcatccgcaccgtcatccactactgat

SEQ ID NO: 204130 - DNA, 502 bp, Unknown
  Bacterial polypeptide expressing nucleotide sequence isolated from the Sargasso Sea
atgacccaaaccatgaaagccgcagtggtacacgccttcggcgagccgctgcgcctcgaggaagtcaaggtgccgatgcccggccccggccagatcctggtaaagatcgccgcctccggcgtctgccacaccgacctgcatgcggccgagggcgattggccggtcaagccggccctgccgttcatcccaggtcacgaaggcgtcggtcatgtggccgcggtgggcgccggtgtgaaacgggtgaaggaaggcgaccgggtcggtgtgccctggctgtacaccgcctgcggttgttgcgagcactgcctgaccggctgggaaaccctctgcgaaggccagcagaacaccggttactcggtcaacggtgcctatgccgagtacgtgctggcggacccgaattacgtgggcatcctgccgaagaacgtcgaattcgacgagatcgcgccgatcctctgtgccggggtcaccgtctacaagggcctcaaggtcactgaggcgcggc

SEQ ID NO: 204131 - DNA, 754 bp, Unknown
  Bacterial polypeptide expressing nucleotide sequence isolated from the Sargasso Sea
tctgcaagtaaagattcttatgaaaacaagagccgcagttgcctgggaagcaggcaagccactggaaattatggaaataaatttggaaggacctcatgatggtgaagtcctcattcgtaatgttgctactggagtctgccatacggacgcctataccctctctggatcagatccggaaggtattttcccttctatacttggccacgagggaggttctgtagttgaggaaataggctctggagtctcttccgtttccgtaggagatcatgtcattcctctctatacaccagagtgtaaaaagtgcaaattttgtacttctggtaaaacaaacctctgtcaatcaattcgagcaacccaaggacagggactgatgcctgatggtacttcgcgtttttcttcagaaggaaaaaccgtatttcactatatgggtacttcaactttttctgaatacacggtgattcctgaaatagcattagcaaaaatcaactcagaagctccacttgaaaaggtatgtctactaggatgcgggattactacaggtataggagcagtaataaatacggcaaaagttgaggcaggttccgtggttgctatttttggccttggtggggttggacttggcgcaattcagggtgcagttatggcaggtgcatcaagaatagtcgcaatagatgtaaatgaagaaaaggaagaatttgctagatctcttggcgcaacagatttcataaatcctaaagatcatgattctttaatc

SEQ ID NO: 204132 - DNA, 792 bp, Unknown
  Bacterial polypeptide expressing nucleotide sequence isolated from the Sargasso Sea
catgacatcgtttaaagattcattgcaagaaggtcaaactcatatcaagtcaaaagctgcggtggcttggggcccgggtgagccgttaaagatggaagaagttgacgtagagcttcctaagaaaggcgaggtacttgtacgcatcgttgcaactggcgtatgtcacactgacgcatttacgctgtccggtgatgatcctgaaggcgtattcccttcaattctaggccacgaaggtggcggtattgttgaaatggtgggcgaaggtgtgactagtgtagaagttggtgatcacgtaatccctctttacacagcagagtgcggcgaatgtaagttctgtaaatcaggtaaaactaacctttgccaagcagtgcgcgaaacacaaggtaaaggcttaatgccagacggcacaagccgcttctctaaaaatggtgagccaatttatcattacatgggctgctcaacgttttctgagtacacggttttaccagaaatatcgctagcgaaagtaaacaaaaatgcgccgctagacgaagtctgcttacttggctgtggtgtgacaaccggtatgggcgccgtgcttaaaacggcgaaagtacaagaaggcgacacggttgctatctttgggttaggtggtatcggtctatctgccattattggtgcacgcatggcaggcgccggccgcattattggtattgatattaatgaaagcaagtttgacttagcgaagcagcttggcgcaactgatttagttaaccctaagaatttcgacaagcctattcagggaagtgattg

SEQ ID NO: 204133 - DNA, 875 bp, Unknown
  Bacterial polypeptide expressing nucleotide sequence isolated from the Sargasso Sea
catgagggctgccttgcacacagagattgggaagccattgtctgttgtaaatgatgttgagttcatttcgcctaaaaaaggtcaagtgttaattagaacagagtattgcggaatctgtcattcggatgtaagtgtaatggactcattggatctaactccgatgattttaggacacgaagctgccggggtggtcgaagaaataggagacggtgttaggtcagttgctaagggcgactttgtgttaatgaccccgataggcccatgcgggaattgtgaaatgtgcaccctggagaggcacacactttgcgaaaggggacaaacgtttgtgtttgggacgctaccggatggaagcacaccatttacgaaagataagtctcccgtgtatcaaggactaggggtaggcggtttcgccgagtacacagttttagaagagagaaatatcgtacgtatcgaaaaaggcatccctttagaaactgtttgcttgataggttgcggagtgcagacgggcgttggttctgttctgaacaccgcaaaagtaactcctggttcaagcgtactcgtcatgggtttgggcggtgtagggttatcggttgtccaaggagcacgtattgccaaagctgaaaggataatcgcatcggaccccgttcaagagagaagggccgcagctctcaaattgggagcaactgagattatagacccaattgataacgatcttattaacgctgtaatggaactaactcttggaaaaggagttgactacgcttttgatgctgtgggtaactccgaattgattacgcttggtctaactgtaagcaagccaggtggaagcacggtaatagtgggagctccgcctccagatgaagaactaaagtttc

SEQ ID NO: 204134 - DNA, 529 bp, Unknown
  Bacterial polypeptide expressing nucleotide sequence isolated from the Sargasso Sea
aatgaaaacaccagctgctgtcgcttttgaggcaggtaaacctttagagatatgtgatgttgacctagaaggccctaaggagggtgaggttctagtagaacttaaagctacaggtgtttgtcacacagatgcatttactttaagcggtgatgatcctgaaggtgtatttccttctattcttggtcatgaaggagcagggacagtagttgaagtaggtcctggtgtcacttctctcaagccagatgaccatgtaattcctctatatacagctgaatgtggggagtgtgaatattgtctacatcccaaaactaacttatgtcaggctgtaagggaaactcaaggtcaaggattgatgcccgatggaacgagccgtttttcaattaatggcaaacctataatgcattacatgggctgctctactttttcaaaatatagcgtcataccagagatttctttagccaaagtccgtgaagatgctccttttgataagatctgttatatcgggtgtggcgttactacaggaataggt

SEQ ID NO: 204135 - DNA, 844 bp, Unknown
  Bacterial polypeptide expressing nucleotide sequence isolated from the Sargasso Sea
gtgaccggtgctggtgggggccttggtaaaagtcatgcattggaatttgcaagacgtggtgccaaagttgtagtcaatgatttaggtggctctgtggatggctcaggcggcgccagtgatgctgccaatgctgtagtagaggagatcaaagccgaaggcggagaagcgattgcaaacggcgctagtgttgccgatcaatccggtgtgcagaacatgatcgatgaagttatgtcgaagtggggacgcatcgatgttctagttaataatgctggcattttacgcgacaagagctttcataaaattaacttagaagagtttaatgcggtgatggatgtacactttcagggcagcgtttataccagccatgccgtttatcctattatgcgtgagcaaaattttggcagaattatctttaccacttcttctggtggactgagcggtaattttggtcaagcaaattatggtgctgcaaagatggcaatgattggcctgatgaattgtttaaaaattgaaggtcaaaaatacaatgttcattcaagtgcggtggcaccggttgcgctttcaaggatgacagaaaacctttttcctgagggcattggcgaacgtttcttgcctgagtacgtcactccagcagttatttatttggccagtgatgatgctccaaacggagcgattattggagctggagcaggggtttttactcagtttagaatctttgaaaccatgggcttagcgcttggtacaggcgatgatatgacgcctgaaaacattgcagcaggatggagctcggttgaggatatggatgatgctagagaactcttcagcggacctgaacaaacaatca

SEQ ID NO: 204136 - DNA, 841 bp, Unknown
  Bacterial polypeptide expressing nucleotide sequence isolated from the Sargasso Sea
gatgatcaagtcccgtgccgccgtagccttcgaagccaagaagccccttgagattgttgaagtggatgtcgccatgcccaaggctggcgaggtgctgctgcgggtagttgcgtccggcgtgtgccataccgacgcctacaccttgtcgggcgccgacccggaaggcatttttccgtcgatcctcggccatgaaggcggcgcagtggtggaagccattggcgagggcgtgacttcggtcgctgtgggcgatcacgtgatcccgctgtacaccccggaatgcggcaagtgcaagttctgcctgagtggcaagaccaacctgtgccaggccatccgcgccacgcagggcaagggcttgatgccggatggcaccacgcgtttctcctacaagggccagccgattttccactacatgggcacctcgacgttctccgagtacaccgtgctgccggaaatctccgtggccaagattcctaaagaagcgccgttggaaaaagtctgcctgctcggttgcggtgtcactaccggtatcggtgcggtgatcaacactgccaaggtcaagccgggcgacaccgtggccgtcttcggcctgggcggtattggcctgtcggcgattatcggtgcagtcaaggccaaggccggtcgcatcattgctattgatatcaacccggccaagttcgaaatcgccaagcaactgggtgccaccgattgcatcaacccgaaagactacgaccgcccaatccaggacgtgattgtcgacctgactgacggcggcgtggacttctctttcgagtgcatcggcaatgtgcaactgatgcgtgcggcccttgagtgctgccacaaa

SEQ ID NO: 204137 - DNA, 1111 bp, Unknown
  Bacterial polypeptide expressing nucleotide sequence isolated from the Sargasso Sea
atgaaaacaagagcagccgttgcctgggaagcaggaaaaccgctagaagtcatggaaatcgatctcgaaggaccaaaagaaggcgaggtcctcattcgtaatgtagcaactggagtctgtcataccgatgcattcaccctttccggagaagatcctgaaggaattttcccatccatactgggacacgaaggtggagcagtcgtcgaagaaattggtcctggagtttcttccgtttcggttggagatcaggtgatcccgctttacactccggaatgcggaaaatgtaaattctgtacttccggcaaaacaaatctctgtcaggcgatccgtgctacccagggtcaaggtctcatgcctgatgggacttcacgtttttcttccggcgggaaacaggtgttccattatatggggacctctacgttttcggaatacacggtgcttcctgaaattgcagtggcaaagatcagctcacaagcccctttggaaaaagtctgcctgttgggatgcggaattacgaccggaatcggtgcagttcagaatactgcaaaggtagaaaaaggttctgtggtcgccatttttgggctgggcggagtaggcctgggtgcgatccagggggcagtgatggcaggggcggaaagaattgtcgccattgatgtgaatcctgataaggaggaatttgcccggtcactcggagcaaccgattttgtcaatcccaaagatcatgacgcctcgatccaggaagttgtcgtggaacttacggacggcggagtggattattcctttgaatgtgtgggcaatgttgaattgatgcgttcggctctggaatgctgccacaagggctggggagaatccgtgatcatcggggttgccggagcaggacaggaaatcactacccgtccttttcagttggtcacaggaagagtttggagaggatcagcctttggcggagtcaaaggacgttcacaacttcccggctatgtcgatcaatatctaagtggagaattgaaggtggatgaattcatcacttatacaatgccgttggaagaaatcaacaatgcttttgacctgatgcacgaagggaaaagcatccggtccgtcattcatttctgaa

SEQ ID NO: 204138 - DNA, 1129 bp, Unknown
  Bacterial polypeptide expressing nucleotide sequence isolated from the Sargasso Sea
catggcacaggttcaaagcatcaagtgtaaggccgccatcgcctggggcccgggccagcccctctccattgaagaagtcgaggtcatgccgccccaggcgggcgaagtgcgggtacgcatcgtcgctaccggcgtctgccacaccgatgccttcaccctctccggtgaagatccggaaggggtcttcccctgcatcctcggtcacgaagggggcggcatcgtcgaatccgtcggcgagggcgtcaccagcgtcaaggtaggcgatcacgtgatcccgctctacacccccgagtgcggcgagtgcaaattctgcaaatccggcaagaccaacctgtgccagaagatccgcgccacccagggcaaggggctgatgccggacggcaccacccgtttctccaaggatggccagcccatctatcactacatgggcacctccaccttcagcgaatacacggtactaccggagatctccatcgccaaggtggacccggccgccccgctggaagaggtctgtctgctcggctgcggcgtcactaccggcatcggcgccgtgatgaacaccgccaaggtgaaagagggtgagagcgtcgccatcttcgggctgggcggcatcggcctctccgcggtgatcggtgcccgtctggccaaggccggccgcatcatcgccatcgacatcaacgagagcaagttcgaactggcccgcaagctgggcgccaccgactgcatcaacccgaacgactatgacaagcccatccaggaggtgatcgtcgagctcaccgacggcggcgtcgacttctcgttcgagtgcatcggcaacgtcaaggtgatgcgtgcagcgctcgagtgctgccacaaaggctggggcgagtcggtcatcatcggcgtggccggtgccggccaggagatcagcacccgtccattccagctggtcaccggtcgtgtctggcgcggcagcgccttcggcggcgtgcgcggtcgcagcgaactgccgagctacgtgcagcgctacatgcagggcgagttcaagctggacgacttcatcacccacaccatggggcttgagcagatcaacgaggcgttcgatctgatgcacgaaggcaagagcatccgcagcgtcatccactactga

SEQ ID NO: 204139 - DNA, 1141 bp, Unknown
  Bacterial polypeptide expressing nucleotide sequence isolated from the Sargasso Sea
catgtcgaacgaaaaaccacagtttatcaagtcaaaggccgccgtggcctgggggccgggacagccactcaagattgaagaagtcgatgtgatgttacctaaagccggcgaagtattagtgcgcatcgtggcgactggggtgtgccataccgatgcgtttaccttaagtggtgacgatcctgaaggcgtgttcccagcgatcctcggccatgagggcggtggtattgttgagcaagtgggcgaaggcgtgaccagcgtgcaggtgggcgaccatgtgatccctctctacacgcctgagtgtggcgaatgtaaattctgtttatcgggtaaaacaaacctgtgccagaagatccgcgcgactcaaggcaaaggtttaatgccagatggcaccacgcgtttctataaagatggtcagccaattttccattacatgggctgttctaccttctctgagtacactgtattacctgaaatttcattggctaaggtcaataaaactgcgccattagaagagatctgtctgctaggttgtggtgtgacgacaggtatgggcgccgtaatgaacaccgctaaggtggaagaaggcgcgaccgtagcgattttcggcctaggtggtatcggtctttcggccgttattggtgcgaccatggctaaagccagccggattattgccattgatattaacgaatctaaattcgaacttgcccgtaaattaggtgcaaccgattgtattaatcctaaaaatttcgacaaacctattcaagaggtgattgtcgagatgaccgatggcggcgtggattactccttcgaatgtatcggtaatgtcaatgtgatgcgcagcgcgctcgagtgttgccacaagggctggggcgaatcagtgatcattggtgttgcaggcgcagggcaggagatttctacccgtccgttccaactggtgacaggtcgcgtatggcgaggctcagccttcggtggcgtaaaaggacgctcgcaattacctaaaatcgttgaacaatacctagcaggtgagtttaagctcgatgactttatcacccacactatgggacttgagcaagtcaacgaagccttcgacttgatgcatgaaggcaagagcattcgcagcgtgatccatttcgataaataa

SEQ ID NO: 204140 - DNA, 1120 bp, Unknown
  Bacterial polypeptide expressing nucleotide sequence isolated from the Sargasso Sea
aatgaaaatgatcaaaacgcgtgctgctgtggcctgggggccgggtcaaccattaaaaattgaagaagtggatttaatgccaccacaaaaaggcgaagtactggtacgtatagtggcaacaggtgtttgccataccgacgcttataccttgtcgggtcaggattctgaaggcaaattcccctgcattttaggccacgaaggtggtggtgtggttgaagctataggcgagggcgtcaccagcgtggctgtgggcgatcatgtgatccctttatacacgcctgaatgcggcaaatgtaaattctgtttatctggcaaaaccaacctgtgtcaggccattcgagccactcaaggtcagggtttaatgccagatggcaccactcgtttttctaaagatggccagcctatttaccactacatgggcacttctactttttctgaatacactgtgctgccggaaatttcgttagccaaaattaataaagctgcacctttagaaaaggtctgtttattaggttgtggcgtcacaacgggcatgggcgctgtgatgaataccgccaaagtgaaagagggtgatactgttgcagtctttggtttaggtggcataggtttatctgccattattggtgctgtgatggccaaagccagccgcattattgccatcgatatcaacgagtctaagtttgatattgcccgtcagctgggtgctactgatgtgattaacccaaagaatttcgacaagcctattcaggatgtcattgttgaaatgacagacggcggcgttgacttctcttttgaatgtattggtaatgtcaacgtgatgcgttcggctttagaatgctgccataaaggctggggcgagtcggtgattattggtgtggcacctgctggtgctgaaatatctacccgaccatttcaattagtcacaggtcgtgtatggcgtggtactgcttttggtggtgtcaaaggccgctctgaattaccggactacgtggagcgttatttaaaaggtgagtttgaactcgatacctttatcactcacaccatgccattggagcaaatcaacgaagcctttgatttgatgcatgaaggcaagtccatccggaccgttattcacttttaa

SEQ ID NO: 204141 - DNA, 1141 bp, Unknown
  Bacterial polypeptide expressing nucleotide sequence isolated from the Sargasso Sea
atgtcgaacgaaaaaccacagtttatcaagtcaaaggccgccgtggcctgggggccgggacagccgctaaagattgaagaagtcgatgtgatgttacctaaagccggcgaagtgttagttcgcatcgtggcgactggtgtgtgtcataccgatgcgtttaccttaagcggtgacgacccggaaggcgtgttccctgcgatcctcggccatgagggcggcggtattgttgagcaagtgggcgaaggcgtgaccagcgtgcaggtgggcgaccatgtaatcccactttacacgccagaatgcggcgaatgtaaattctgtttatcgggtaaaacaaatctgtgccagaagatccgtgcgacccaaggcaaaggtttaatgccagacggcaccacgcgtttctataaagatggccagccaattttccattatatgggctgttctaccttctctgaatacactgtattacctgagatttcattggctaaagtcaataaaaccgcgccattagcagagatctgtctgctaggttgtggtgtgacgacaggtatgggcgccgtaatgaacaccgctaaggtggaagaaggcgcgaccgtggcgattttcggccttggcggtatcggtctttcggccattattggtgcgaccatggccaaagctagccggatcattgccatcgatattaatgaatctaaattcgaacttgcccgtaaattaggggcaaccgattgtattaacccgaaacatttcgacaaacccattcaagaagtgattgtcgagatgaccgatggcggcgtggattactccttcgaatgtatcggtaatgtcaatgtgatgcgcagcgcgctcgagtgttgccacaagggctggggcgagtcagtgatcattggggttgcgggcgcagggcaggagatttctacccgtccattccaactggtgacgggccgcgtatggcgcggttctgccttcggtggtgtgaaaggacgctcgcaattacctaaaatcgttgaacaatacctagcgggtgagtttaagctcgatgactttatcacccacactatgggacttgagcaagttaacgaagccttcgacttgatgcatgaaggcaagagcattcgcagcgtgatccatttcgataaataag

SEQ ID NO: 204142 - DNA, 931 bp, Unknown
  Bacterial polypeptide expressing nucleotide sequence isolated from the Sargasso Sea
gaaggtggtggtattgtgaaaatggtgggtgaaggtgtgactagtgtagaagttggtgatcacgttattcctctttacaccgcagaatgtggcgaatgtaagttctgtaagtcaggcaaaactaacctttgccaagcagtgcgcgaaacacaaggtaaaggcttaatgccagacggcacaagccgcttctctaaagatggtgagccaatttatcattacatgggctgttcaacgttttctgagtacacggttttaccagaaatatcgctggcgaaagtaaacaaaacggccccgttagaagaagtatgcttacttggctgtggtgtgacaaccggtatgggcgccgtgcttaaaacggcgaaagtacaagaaggcgacacggttgctatctttgggttaggtggtatcggtctatctgccattattggtgcacgcatggcaggcgccggccgcattattggtattgatattaatgaaagtaagtttgacctagcaaaacagcttggtgcaactgacgtggtaaaccctcagaatttcgataagcctattcaggaagtgattgttgaaatgactgacggcggtgttgactactcgtttgaatgtatcggcaacgtcaacgtgatgcgttctgcacttgagtgctgtcacaaaggttggggcgaatctgtgatcattggtgtagcaggtgcaggacaagaaatttcaacgcgcccattccagttagtgacaggtcgtgtatggcgcggctctgcatttggcggtgttaaaggtcgttcagagctaccaggtattgtagagcaatacttaaatggtgactttggtcttcaagagtttatcactcacactatgggtcttggtgacattaacaatgcctttgatttaatgcataaaggtgaaagtatccgctctgttgtgcatatggataaataat

SEQ ID NO: 204143 - DNA, 1117 bp, Unknown
  Bacterial polypeptide expressing nucleotide sequence isolated from the Sargasso Sea
catgaaatcccgcgccgccgttgccttcaaagccggagaacccctgcagatcgtcgagatcgacgtcgccccgcccaagaagggcgaggtactcatcaagatcaccgataccggcgtgtgccacaccgacgccttcaccctgagcggtgacgaccctgagggcctgttccccgtcgtgctgggccatgaaggtgcgggcatcgtggtggaagtgggcgagggcgtgaccagcgtgaagcccggcgaccatgtgatcccgctctacaccgccgaatgcggcgaatgcttgttctgcaagagcggcaagaccaacctgtgcgtgagcgtgcgcgccacgcagggcaagggcgtgatgcccgatggcaccacgcgcttcagctacaacggccagcccatctaccactacatgggctgcagcaccttcagcgaatacaccgtggtggccgaggtctcgctggccaaggtcaaccccaacgccaaccccgagcaggtctgcctgctgggctgcggcgtgactaccggcctgggcgccgtgaagaacaccgccaaggtgcaagagggcgacaccgtggccgtgtttggcctgggtggcattggcctggccgtgatccagggcgccaagttggccaaggccgggcgcatcatcgccatcgacaccaacccctccaagttcgacctggcccgcacctttggcgccaccgactgcgtgaatcccaaagacttcgacaagccgatccagcaggtcatcgtggagatgacgacctggggcgtggaccacagctttgagtgcatcggcaacgtcaacgtgatgcgcgctgcgctggaatgcgcacaccggggctggggccagtcggtcatcatcggcgtggcgggcgcaggccaggagatcagcacccgccccttccagctcgtcaccggccgcaagtggctgggcacggcgtttggcggcgtcaagggccgcagcgagctgcctggcatggtcgaagacgcgatggccggcaagatccagcttgcgccgtttgtgacccacaccatgggcctgaaggacatcaacgaagcgtttgacctgatgcacgaaggcaagtccatccgctcggtcgtcaagtacgccgcataa

SEQ ID NO: 204144 - DNA, 967 bp, Unknown
  Bacterial polypeptide expressing nucleotide sequence isolated from the Sargasso Sea
gatggcacatcaagtaaaaggggttgtcgctgataacaaaggggagcctgtttcaatcaagacgattgaggttccaaatccaggcccaggagaggttctgatcgacgtaaaagcttgtggagtatgccatacggatttgcattacagagaaggagctatcaatgacgatttcccgtttctgttgggtcatgaagctgcaggatttgtagaagaagttggcgaaggtgttgatgacttaaatttaggagattttgtaattctaaactggcgagctgtatgtggacattgcagatcttgtcgaaggggacgaccatggaactgttttgcaactcataatgcaacacagaaaatgaaacttgatggtaaagaactctctccggctttagggatcggagcgtttgcggaaaaaactcttgttgcggcgggacaggctacaaaggtaaatcctgaagccaaaccggaagtcgctggacttataggttgtggagtgatggctggcttaggcgcagcgatgaataccggacaagttagtcgcggagattcagttgcggtttttggttgcggaggtgttggtgatgcagcaattgaaggttcgcgtttagctggagcccacaccataattgcggttgatatagatccgacaaaacttgaatgggctaaaaaatttggagctactcatgttattgattcatcaaaagttgatccagttgatgccattagagaaataacagatggtaatggggttgatgtagcaatagaagctataggtcttcctcttacttatgaacaggctttttattctcgtgaccttgccggaacagttgtattagttggagttccaaatcctgaaatgaaaatcgaacttcctatgattgaaatttttggtagaggcggaactttaaaatcttcttggtatggagattgtctaccttcacgcgattttcctatgcttatcgatctttacttg

SEQ ID NO: 204145 - DNA, 1030 bp, Unknown
  Bacterial polypeptide expressing nucleotide sequence isolated from the Sargasso Sea
tatgacccaaaccatgaaagcggccgtcgtgcacgcattcggcgaaccgctgcgcatcgaggaagtgcccgtgccgacgccggggcccggccagatcctcgtcaacatcaaggcatcgggcgtatgccataccgacctgcacgcagccgacggcgactggcccgtcaagccgacgttgccgttcattccggggcatgaaggcgtgggcatcgtcgcggcggtcggtgcgggcgtcacgcacgtgcgcgagggggaccgcgtgggcgtgccctggctctacacggcctgcggccattgcgagtactgccacacgggctgggaaacgctgtgccacggccagcagaacaccggttattcggtgaacggcagctacgcggaatacgtgctggccgatcccgactacgtcggccatttgcccgcgcaggtcgcgttcgacgagatcgcgccgatcctgtgcgcgggtgtcaccgtctacaagggcattcgcgtcaccgatacgcgcccgggccaatggctcgcgatttccggcatcggcggcctcgggcacgtggccgtgcagtatgcgcgcgcaatggggctgcacgtcgcggccatcgacatttcacccgacaagctcgcgctggcgcggcagctcggcgcggaactgacgatcgacgcgtcgaccgacgatccggccaaggtgatccagaaggagatcggcggtgcgcacggcgtgctcgtcacggccgtgtcgcgcagcgcgttcgcgcaggcgctcgggatggtgcggcgcggcggcacggtggcgctcaacggcttgccgcccggcgatttcccgttgccgatcttctccacggtgctgaacggcatcaccgtgcgcgggtcgatcgtcgggacgcggcgcgacctgcaggaatcgctcgacttcgcggccgatggcctggtgcgcgcgcatatccatcgcgaccggctcggcaacatcaacgacgtgttcgcaaagctgcgcgaaggcaaggtcgacgggcgcatcgtgctgaccgacatgcattga

SEQ ID NO: 204146 - DNA, 1033 bp, Unknown
  Bacterial polypeptide expressing nucleotide sequence isolated from the Sargasso Sea
tgatggcgaagtcctcattcgtaatgttgctactggagtctgccatactgacgcctataccctctctggatcagatccggaaggtattttcccttctatacttggccacgaaggaggttctgtagttgaggaaataggctctggagtctcttccgtttccgtaggagatcatgtcattcctctttatacaccagagtgtaaaaagtgcaaattttgtacttctggtaaaacaaacctctgccaatcaattcgagcaacccaaggacagggactgatgcctgatggtacttcgcgtttttcttcagaaggaaaaactgtatttcactatatgggtacttcaactttttctgaatacacagtgattcctgaaatagcactggcaaaaatcaactcagaagctccacttgaaaaggtatgtctactaggatgcgggattactacaggtataggagcagtaataaatacggcaaaagtagaggcaggttcagtggttgctatttttggacttggtggggttggacttggcgcaattcagggtgcagttatggcaggtgcatcaagaatagtcgcaatagatgtaaataaagaaaaggaagaatttgctagatctcttggcgcaacagatttcataaatcctaaagatcatgattctttaatccaggaagtagttgtggatctgaccgacggaggagtagattattcctttgaatgtgttggtaatgtagatttgatgaggtctgctttagagtgctgtcataaaggatggggagaatcagtcattattggagttgctggttcaggtcaggaaataagtacacgcccatttcaactagttactggaagagtctggaagggctctgcctttggaggtgttaaaggaagatctcaacttccaggttatgtagaaaaataccttcggggagagctaaaagtagatgaattcattacttacacaatgccccttgaagacattaatcaagcatttgacttaatgcatgaaggaaagagcatccgtacagtgattcatttttga

SEQ ID NO: 204147 - DNA, 319 bp, Unknown
  Bacterial polypeptide expressing nucleotide sequence isolated from the Sargasso Sea
tattggtaatactggtaatccaggacaagctaattatgctgcttctaaaggaggtatgatagcaatgtataaatctcttgctcttgaagtggctatgagaaatataaatgtaaatattatttcaccaggttttatttcaactccaatgactgacaaacttaatcaagatcaacaaaataagattatggaaaagatacctagtaaaaaatttggtgtaccttctgatattgcaaatatcgtttcttttttaatttctgacgattctaactacattaatgggcaaacttttcatgttaatggtggtatgttgatgctataa

SEQ ID NO: 204148 - DNA, 472 bp, Unknown
  Bacterial polypeptide expressing nucleotide sequence isolated from the Sargasso Sea
aatgaacggtaaaatagcgcttgtaacgggaggcagccgtggaatcggcaaagccatagcacatcgattggcacgcaaaggatgcgacactcttctagtcgccgcatccgagacaaacctaaaagctgctgctgaagaggtgcgtgctgcggggcggcgcgtaaaaacctgcgcgaccgacctccgggacagagcagggtgcgaaaaggcagcccaagcactagatcaaagctttggctgtctggacatcttaataaactgcgctggagcgacgaagggcggtttgttcctagagcagtcggatgacgtctggcaggatggatttgcgctcaagttctttggtgccgtacgaatgtcacgactgctctggccgaagctcaaagaaagacagggaaccgtcgtcaacatcatcggtggattttcccgaacgcctgatccagatttcatgataggcggtgcagtaaatgctgct

SEQ ID NO: 204149 - DNA, 628 bp, Unknown
  Bacterial polypeptide expressing nucleotide sequence isolated from the Sargasso Sea
ggtactaatgaagaaaagttaaccaaaattaaagatgaatttaaagatattcaaattgaaaaatttaatttagcagagcattctaaaatagagtcttttatagacttagcaaatgataaattaggtggactagatattttaattaataatgctggtattaattcagatagtttaacaattagacttactgaagaaaattggaaaaaggttttagatataaatctaacttcaactttttttatgtgcaaatttgcaattaaaaagatgattaaaaataaatctggaaagattataaatattacctcaattgttggtcacacaggaaattttggtcagacaaattattcagcgtcaaaagctggaatagttgcattttcaaaaagtttagctcttgaacatgcaaaaaagaatattaatataaattgtgtttccccaggttttataaaaaccgaaatgaccgataagataccagaagaatataaaacaaaattaatcagcagaattcctgcaggggacctaggaacaggtgaagatgtttcaaattgtgtagcatttttagcttcagatatggctaattacataaatggtgaaaccattcatgttaatggcggaatgtatatggcttgac

SEQ ID NO: 204150 - DNA, 628 bp, Unknown
  Bacterial polypeptide expressing nucleotide sequence isolated from the Sargasso Sea
aatgaaagacttagcaaataaaaatataatcataactggttcttcaaaaggaattggaaaaaatttagcaattaatttttttaacaataattctaatatttttcttattagtcgtaatattaaaaaattaaatgaaataaaaaaggatttaaattcaaaaaattcacataatcaaatcattaaatgttttgaaggagatattgctagcaagtcacaaatttcagaaattttcaaagaaatacacagtaatcacaatagtattgatgtactaataaataatgcaggaataacaaaagataatttaattattagaatgaaggatgaagaatgggatgatgttataaatactaatctcacaggaacatttaactgttgtaaaattgtttctaaatacatggtaaaacaaaggagcggaaagattattaatataagttcaattattgctcagataggaaatccgggacaatcaaactattctgcttcaaaagcaggtataattggattaactaaatcgctagccaaagaattggctccaaaaaacattaatgtaaatgcaattaaccctggttatattacttcagatatgaccgatattttgagtgagaataaaaaaaatgattttttaaca

SEQ ID NO: 204151 - DNA, 262 bp, Unknown
  Bacterial polypeptide expressing nucleotide sequence isolated from the Sargasso Sea
ttgggtttttcaagaatctttggctaaagagcttggatcaagaaatattacttctaacgttgttgctccaggctttattgagactgacatgacaacatttttaagtgatgatgaaaaaattgaagtcagtaagaatataccaatgaaaagatttggaactgttgaggaagtagcaaaatgcattttgttccttgcttctgataaagctaattatataactggccaaattatctctgttgatggaggcttatttatgtattag

SEQ ID NO: 204152 - DNA, 195 bp, Unknown
  Bacterial polypeptide expressing nucleotide sequence isolated from the Sargasso Sea
caggatttattaaaactgcaatgacagagaagctagatgataaatataaagatgcaataatatctaaaattccttcagcacgactaggagaaccagatgatattgcaaatgcagtgctttttttatgctcaaatcaatcaagttatattaatggagagaccttgcatgttaatgggggcatgtatatggcttgac

SEQ ID NO: 204153 - DNA, 784 bp, Unknown
  Bacterial polypeptide expressing nucleotide sequence isolated from the Sargasso Sea
ggtcgggccaatactctgatcgattggcgagaatcactcgtcgttgcttctaaacgcgattcatcggacccagagcttacatttgacgatccaatctggtgtgtagatcaatctgcatactacgtcttacacgccgcgggagtggtgcaagattcgttgttaccaaaccaaaccgtcagaacgattcttgagaccatagctgcaaagaggattcgccgtgcaagtcaaataaaacgcgtaaatggaatattgaagtgctcatcgatcgcgtcgatgactgggaatcctggacaggcgaattacgccgctgcaaacgcaatgctagacgccgagtcaagaaatcgacgtcgtgtcggcgcgcctgaaactagcgtgcaatggggtggatgggcagatataggcatggcggcgcgggatgtcctcatagtgcgaagacttgagcgcatcggtgccggagccttggatccgcgcaccggcgttgaaataattcgagccgcgttcatactaccgattcgtcgagatctcgccgtgagtccctttaactggcaacgcatctcgaaagcattaccagcttttgaagtgttcaaggacgtcgtcagagcccattctcgcaaccagcatcaaaccgcatctgcgtcgacgccaaaactctctaagtcatcgtcgcagagaacagttcaagaggtacagtcaacagtcctctccatcatccatcaactcatagggcgtgatattcccgtcaacgcaccgctcatggaagccggtttagactcccacgcggcgt

SEQ ID NO: 204154 - DNA, 739 bp, Unknown
  Bacterial polypeptide expressing nucleotide sequence isolated from the Sargasso Sea
atgattagtttaaaaaataaaaaagcagtcatcactggtgcaacaggtggtataggatactcaattttagaaaagtttcattcggcaggtgcaaccgttttgggctcaggcacaaatgaagaaaaattaagcaaacttaagagtgattttaatggaatgatattaaaaaaattcgatatatcaaaacacgatgaaatcgaaaaatttgttgaaactgtttgcaatgaactaaagggttgtccagatatactaattaacaatgcaggtgtaacgaaagataatttatccttaagaatgtcacaagctgaatggcaacaagtaatagatattaatcttacctccacttttttattatgtaagttttttttaaaaaagatgatcaaaaataaatctggtaaaataatcaacattacttctgttgttggtcatactggaaatgtaggtcaagcaaattacgccgcttccaaatctggtatcattggtatgagcaaaagtttggcactagaatatgctaaaaaaaatattaatataaattgtatatcacctggatttatcaaaacaaacatgactgaaaaaattgacccaaaatttaaggaattgatacttgcaaaaataccatcaaatagattgggagaaccatcagatgtagctaatgttgctgcttttttatcatcagaaatgtcaaattatatcactggagaaacgattcatgttaatggaggcatgtatttgggttgac

SEQ ID NO: 204155 - DNA, 474 bp, Unknown
  Bacterial polypeptide expressing nucleotide sequence isolated from the Sargasso Sea
gtataaatatggataatctctcattaagaatgaaagatgaagaatggaaaaaagttattgatgttaatttaggttcgacttttctattatgcaaacattcaataaaaaaaatgttaaaaaacaagtatggaaggattgttaatatcacttcaatagtgggtcataccggaaatattggtcaatcaaattatgctgcttcaaaagcaggaataataggaatgacaaaatccttagctattgagtatgcaaaaaaaaatattactttaaactgtgtatctccaggttttatccaaacaaccatgacagagaaaattgttgaaaatataaaagctgcattgatttcaaaaattcctatgtcaaagctaggaactggtgaggatgtggctaatacagttgcatttttatcctcagatgcagcctcatatattacaggagagacaattcatgttaatggaggcatgtatatggcttgac

SEQ ID NO: 204156 - DNA, 895 bp, Unknown
  Bacterial polypeptide expressing nucleotide sequence isolated from the Sargasso Sea
cttctgaccacgcaaagcctgttccaacgaggcgacacgccggcggtggcgtcgccctcgtggcaaacggtggcgacgctgctcgaaggtggcggttgtgcttcccctttgctgagcggcacgcgtcttgctctcggcttcgcccagcagcttgcgggtcgcgtagagctaccacgcgtgctcgtgctgacgtgcggagcgctcgctttgggcaacgcaatctcagatgcgacacacggcggcgcgtggggctttgcacgcgtgctgcgcctcgagcacgcgtcattgcgcacgctgagcaccgatgtgtcacatagcgtgaggctggttgcagctcggaggacgctcacgcccacgactgagaccgagggggcgtgggccggcaacgtgcacatggtctcgcggctgcgtgcatgcaccgcggccaacggcgtggcgactgccctcgcacgtggtccatacgcaatcacgggaggcttgggtgggctcgggctgcgtgcggccgcgatgctcgtcgagacgggtgccacatgcgttgtgatcagctcgcggcgcggtagcggtggcgtgggtgaagctatggacggtgctgcggagcgtagcgctacgatgcatgtggtggcatgcgacgtgagcgaggctgcggacgctttcgtcctgctcgctcttgcggcgccgatgggtttgcttcacgcggcgggcgtgctgcgtgacacgatgcttcgctcaatggcggcaggcggtgttgatgccgtctgtgcgcccaaggcgctctctgcgtcacacgttcaagcgatcgtgacgcgcacgcccctcgaggcgatgggcctcttctcgtcggtggcgtcgacatttggcaacgtcggccaagccaactacgcggcagccaatgcat

SEQ ID NO: 204157 - DNA, 478 bp, Unknown
  Bacterial polypeptide expressing nucleotide sequence isolated from the Sargasso Sea
gctggcataaatttagatagtttgacaattagactgacagaagaaaactggaaaaaagttctagatataaatttaacctcaacttttttaatgtgtaaatatgcaataaaaaaaatgatcaaaaataaatctggcaaaattataaatatcacatctatagttggtcatacaggaaattttggacaaacaaattactcggcatcaaaagctggcattgtagctttttcaaaaagcctagctcttgaatatgctaaaaaaaatatcaatatcaattgcgtgtcccctggttttataaaaacagaaatgacagataaaattcccgaagaatataagactaagttaataagcagaattcctgcaggagatttgggtacaggagatgatgtttcaaattgtgtagcttttttagcatcagatatggcaaattatattaacggtgaaaccattcatgttaatggcggaatgtatatggcttgac

SEQ ID NO: 204158 - DNA, 515 bp, Unknown
  Bacterial polypeptide expressing nucleotide sequence isolated from the Sargasso Sea
aatgtcgaatttacaaaaaaaagtattaatcactggagctacaagaggcataggtaaatctatggctgaaaccttgttttctcaaaattataaaataataggaactgctacttctgatgaaggagtggaaatcctcaactccaagggttttttaggaataaaactagatctaaataatgcagattctttaaatcatatttctgaaaagctaaaagaagaacataaagatatatctattctcattaataatgctgggataactaaggataatattgttcttcgcatgtctgatgatgaatggggagatgttattaatatacatctaaatggcatgtttaaactatgtaaaacagttttaaaaggcatgattaaaagcagatggggtagagtaatcaacataactagtgcttccgcctcattaggaaatagaggccaatcaaattacgctgcagctaaagctggtgttgaagccttttcaaagtctctttctaaagaagtaggacccagaggaatta

SEQ ID NO: 204159 - DNA, 340 bp, Unknown
  Bacterial polypeptide expressing nucleotide sequence isolated from the Sargasso Sea
tcaatcataaatattagctctgttgtaggcgttaaaggaaatgcagggcaatcaaattattctgcttcaaaggcaggtattataggtttttcgaaatccattgctctagaattaggttctagaaatattagaagcaatgtaattgcccctggatttatagaaactgatatgacagactctttatcagaggatgttattaactcttggaaagaaagtattccacttaaaagaggtggtaatccaagtgatgttgcaaatgcatgtgtgttttttgcatcagatttatctagttatataactggacaaactcttcatgtagatggaggaatgttaacttaaa

SEQ ID NO: 204160 - DNA, 621 bp, Unknown
  Bacterial polypeptide expressing nucleotide sequence isolated from the Sargasso Sea
atactgagaagttagatttattaaaaaaagattttccaaatataaatattataaaatttgatatttctaatcattcaaaaattgaagaatttgttgataatacctcaaatcaattaagtggattagatattctaataaataatgctggaaccaatatggataatttatctttaagaatgaaagaagaagagtggaaaaaagtaattgatatcaatctaacttcaacttttttattgagtaaatacgcaataaaaaaaatgttaaaaaataaatttggaagaatagtaaatattacatctgtagttggtcatactggaaatttggggcaatcaaactatgcagctactaaagcaggaatcataggaatgactaaatctttagctatcgaatatgcaaaaaaaaatattacattaaattgtgtctccccaggatttattcaatcaagaatgactgacaacattagcgaaagtgtaaaagctgttttaacttccagaataccaatggccaggttaggaaatggtgaagatgtggccaattcagttgcttttttatcatccgatcaagcttcatacataactggcgaaacaattcatgttaatggaggcatgtatatggcttgac

SEQ ID NO: 204161 - DNA, 256 bp, Unknown
  Bacterial polypeptide expressing nucleotide sequence isolated from the Sargasso Sea
attggatttactaaatccttgtctcgcgaggttggaactcgcgggattacagttaatgctgttgctcctggatttatcaacacagcaatgacacaagctcttaacgaaagtcagcagcaggcaattctaagtcaaattcctcttggtcgcatgggtgaggcagatgatattgccaatgcagttgtttttctagcctctgaagaggcttcgtatattactggaactgttctccatgttaatggaggtatgtactgaa

SEQ ID NO: 204162 - DNA, 373 bp, Unknown
  Bacterial polypeptide expressing nucleotide sequence isolated from the Sargasso Sea
tattaagaaaatgattaaattaaaaaagggtaaaattataaatattacttctgtcgtagggcatttaggcaacattggtcaagcaaattatgcagcatccaaggggggtattatttcaatgtccaaaagtcttgctctagaatatggaaaaaaaaatataactgtaaattgtgtatcgcctggttttattatttctgatatgacagataaaataagcgatgagcatactgagttattaaaatcaaggatttctcttaataaatttggaaaaccggaagatgtagccaatacaattgcttttttaagttcagaattatctgattatataactggtgaaacaatacatgttaatggcggtatgtattttagttga

SEQ ID NO: 204163 - DNA, 292 bp, Unknown
  Bacterial polypeptide expressing nucleotide sequence isolated from the Sargasso Sea
gtcaattattctgcaagcaaagctggtatgggaggttttacaagagctttggctaaagaagtggctgcaagaaatataacagttaactgcatagctcctggtttcatagaaaccgatatgactaatcattttcaagatgaagaattggaaaatatcttaaatcaaatccctgcaaataaaatgggtaatcctcaacaaatagctgatttagcattgtttttagcatcttcaaagggagattatattaccggtcagactatttctgttgatggtggcctttacatgagctaat

SEQ ID NO: 204164 - DNA, 766 bp, Unknown
  Bacterial polypeptide expressing nucleotide sequence isolated from the Sargasso Sea
gttgagtaaggatttcaataaaaacaaagttgcagttcttactggcgcagcaaagaaaattggaagatcaacagcaataaaattagcagagcaaggttttaatatactaattcatactggtggcaaaagtatcgaggaagctaaagatacaataaaattacttgaaaagtttaaaattaaatcaaactacgttacaggagacctagcaaatttagaaacaatcaacatcattaaagatgcagctttaaaactaggaacgccatctgttcttgtaaataatgcaggattgagaattcatgagcattttgaaaagatagattataaagattggaaaaaagttatgactgtgaatgttgatgcttcatttttatgtgctcaagctttaattaattatatggtaaaacaaaaatggggacgggtaattaatattggtggcttatcagcacatataggggcaaaagaaagagctcacgttgtaacttcaaaagcagctttagttggtttaacaaaagctattagtatggaatttatagaaaaaggtgtaacttgtaattgtgttgttcctggattcattgaagattttgatagtaaagaaactaaactaagtggtcactggttgcgccaccctcaaacacctagtttggtacaaaatagatttggaaatccagacgaagtagcggaagtcattgcaaatctttgtaagaaagaagctgattatataaatggacagactcttcatgtgaatggtggtagttatactccatga

SEQ ID NO: 204165 - DNA, 766 bp, Unknown
  Bacterial polypeptide expressing nucleotide sequence isolated from the Sargasso Sea
gtcggtagaggtgtgtcacacctcatggccgaggagggcgcctccgttgtcatatttgacctcggagtaaatgtcgatggatcaggagccgaccaatctatcgcagaacaagttgccaatgagataaaggacggcggcggtaacgctgtcgcgtgcactgagtctgttgcaaccatgcagggcggcgaaaatataatccagaccgccatagacaatttcggtaagctcgacatcgtcgtcacctgcgcgggcatattacgcgatagaatgatatttaacatgtccgaacaggaatgggacgacgtcattgccgtccacctcaagggcactttcactattgtgaagcacgcttccatcatattccgacagcaaagatcaggacgaattattacctttagctccacatccggattatatggcaattctggacaggctaattatggagcagctaaagacggtattgccggactgactcgtgtggcagcacgggatctcggcagatatggagtcactgttaactcaatagcgccaagtgccgctactcgtatgactactagcgtaccgcaggagtctcgggatttaagaaactcgcgaggcattgcagctggtgcgggattacttggtgaagctgacgacgtagccccatttgtgacttggttagcatcagatgagtctgcacacgtcaatggccacatttttcatgtgaccgaagggcttgttaccttactgaatgaaccggagccagtgcgaaccatccaaaaggata

SEQ ID NO: 204166 - DNA, 332 bp, Unknown
  Bacterial polypeptide expressing nucleotide sequence isolated from the Sargasso Sea
tattacatctgttgttggtcatacaggtaatgtaggacaagctaattatgcagcatcaaaagcaggattaatcggaatgtcaaaaagtcttgctcaggagtatggaaaaaaaaatattactgtaaattgtatatcccccggatttattaaatccgaaatgaccgacaaaataagcgaaaattttaaaaagtcattacaagaaaaaatctctttggaaagatttgggatgccagatgatgtagctaactcagtaattttcttatcttctaatttatctgactatattacaggagaaactatacacgttaatggcggtatgtattttagttgac

SEQ ID NO: 204167 - DNA, 440 bp, Unknown
  Bacterial polypeptide expressing nucleotide sequence isolated from the Sargasso Sea
aaaaaaagaatgggataaagttattgatattaatttaacttctacttttcttttgtctaaatatgtaattaaaaaaatgctcaagaaaaaatatggtaaaattattaatataacatcggttgttggccacacaggtaatttggggcaagcaaattatgcagcatcaaaaggtggaattacctctatgtctaaaagtttgtcgctagagtatgcaaaaaaaaatataactattaattgtatttctcccggctttatagatactgctatgacagaaaaaataaatgaagagttcaagaatcaacttaaatcaaaaattcctttagatagatttggtacaccacaagatatagcaaattgtgcagcttttttatgttcagacttatctaattatataactggggaaacaatacatgttaacggaggcatgtattttagttgac

SEQ ID NO: 204168 - DNA, 315 bp, Unknown
  Bacterial polypeptide expressing nucleotide sequence isolated from the Sargasso Sea
gtcatactggaaatgtaggtcaagcaaactatgctgcttccaaatctggtattattggtatgagtaaaagcttagcattagaatatgctaaaaagaatataaatataaattgtatttcacctgggtttataaaaacaaatatgacagaaaaaatagacccaaaatttaaagaactaattttagcaaaaataccttcaaataaattgggtgaaccagctgatgtagctaatgtagctgcttttttatcgtcagatatgtctaattacatcactggagaaacaatacacgttaatggaggtatgtatttgggttgac

SEQ ID NO: 204169 - DNA, 317 bp, Unknown
  Bacterial polypeptide expressing nucleotide sequence isolated from the Sargasso Sea
accagacgctggcatggctccgtactctgctgccaaactgggagttgtagggtatacccattccatcgcgttagacctcgcgcagttcggcattaccgcgaatgtaatcgcgcccggcctaatctggcacgatagacttaaagacaacccagcatatactgacgaggaacggacgaaattccgttcaagggtcccgatgaaaagagagggcgtgccaactgaaatcgccgacacggtagcgtttcttttgtcagatggggctggttacatcaccggtcagacattacatgtcaacggggggctctacatgacctaac

SEQ ID NO: 204170 - DNA, 390 bp, Unknown
  Bacterial polypeptide expressing nucleotide sequence isolated from the Sargasso Sea
tttttaacatcacccgtgcggttcttaaaacgatgatgaaacagagaagcggaaaaatcatcagtatttcctcagtggtaggattttctggcaatcccggacaggtgaactacagttccaccaaggccgccttggttggatttaccaagtctcttgctcgtgaagtcggttcccgtggaattacagtcaatgctgtagctccaggattcattgatacggcgatgacccaggctctcaacgaaacccagcaggaagaaattctcaggcagattcctttaaaacggatgggtatgccggaagacattgcccatgccgtcgattttctggcctcggaaaaagcggattacatcactggtgcggttttgcatgtcaatggtggcatgtattagt

SEQ ID NO: 204171 - DNA, 504 bp, Unknown
  Bacterial polypeptide expressing nucleotide sequence isolated from the Sargasso Sea
gaaacttagactgtattataaataatgctggtatagctcaagataatttagcaattagaatgagcttagaagaatggcaaaaagttattaatgttaatttaacatcaacttttttgatgagtaagtttgcaattaagaaaatgcttaagaacaaagctggtaaaattgtaaatataacttctgtagttggtcatactggtaatttaggacaagtaaactatacagcttcaaaagctggaattattgcgatgtctaaaagccttgcaattgaatatgcaaaaaaaaatattaacgttaattgtatctcaccaggttttattaaaactgcaatgacagataaaatagaagataagtttaaagaagcgataatatctaaaataccttcatcacgcctaggtgagcctgatgatattgcaaatgccgtactttttttaagttcaaatcaatcaaattatataaatggagagactttacatgttaatggaggcatgtatatggcttgac

SEQ ID NO: 204172 - DNA, 274 bp, Unknown
  Bacterial polypeptide expressing nucleotide sequence isolated from the Sargasso Sea
aaagcaggtataattggcatgtctaaaagtttagcaattgaatatgcaaaaaaaaatattacaattaattgcgtttctcctggatttataacttctgatatgacaatgaatattgccgaaaaaatgaaggaatatttaacctcaagaatcccaatgggaaaattggggacaggtgaggatgtgtccggctgtgttgcctttttgtcttcagattccgcatcatacattactggtgaaacaatacatgttaatggcggaatgtatatgtcttgac

SEQ ID NO: 204173 - DNA, 798 bp, Unknown
  Bacterial polypeptide expressing nucleotide sequence isolated from the Sargasso Sea
gtgtcgcggctgcgtgcgtgcaccgccgcgtcgagtgcgacgatagcgctcgcagctggcacgtatgcgatcacgggcggcttgggcggcctcgggctgcgcgcggcgtcgttgctcgtcgagggcggcgctgtgggcgttgtgctcagctcgcggagcggtcgcatgggcgggcgtgcactggaggtggcgacgagcgcggtgaagcgcgtcgcggcgtgcgacattggagatggagcggacggcctcgccctgcttgcgtttgcaccaccaactggcgtgctgcacgcggcgggcgtgctgcacgacaagatgctccgctcgatggcgacggacgacgtctgcgccgtgtttgaacccaaggcactcggcgcatcgcacgtgcacgcgatggtggcgtgcacggcactcgaggcgcttggcctgttctcgtcggtggcgtcgacgtttggcagcgtcggccaggccaactacgcggcggcgaacgcgtacctcgacacactcgcgccttcgcgtcgatggcgtggggctctcggctcgagcctgcagatcgcagcggtgagcggcgccggtatgggcgccgccacatttgacaaggagcagctcaacgcgatgggcgcgatctcgcttgacgagctcgcctcctgcctctcgattgcgctcgcgccggcccgtggtgcaacagaacgaacgcttgcaccattggctcgggctctcctcacgagcacagtgatgccggtcctctcggagctgatttgccatgaggtcgagcgcagccatgctgttcccagcgccgcc

SEQ ID NO: 204174 - DNA, 289 bp, Unknown
  Bacterial polypeptide expressing nucleotide sequence isolated from the Sargasso Sea
aattatacagcttctaaagccgggattgttgctatgtcaaagagtttggcaatagaatatgctaaaaaaaatataaatataaattgtatatctccaggtttcattaaaactgcaatgactgataagttagatgaaaaatttcaagaagctattctatcaaaaattccatcagccagactaggggaacccaatgatattgcaaatgctgtactttttttatgctcaaatcaatcaagttacataaatggtgaaaccttgcatgttaatggaggcatgtatatggcttgac

SEQ ID NO: 204175 - DNA, 722 bp, Unknown
  Bacterial polypeptide expressing nucleotide sequence isolated from the Sargasso Sea
aaataaaaaagttttaattacaggggcaacaggaggcattgggggctcattagcaaaaaagtttttgtcactcaattcagaggttttagggactggaaccaatcaatcaaaactcgaaaagcttaaatcagatttaaaagatattaaaattaaaaaatttgatatttcatctcattcccaaattgaaaaatttatagatgaagtttatcaagagcttggtggattagacgttcttattaataatgctggtgtaaatagagataatctttcacttagaatgaaagacgaagaatggcaaaaagtaattgatataaatttgacctcaacgttcttattatcaaagtatgcattaaaaaaaatgatgaaaaataacaacggaagagtaataaacataacctcaatagttggtcatactggaaattttggacaatcaaattatgcagcatctaaagcaggtataattggaatgtcaaaaagtctttcagttgaatatgctaagaaaaatattacgataaattgtgtttcacctggatttattgtttcagatatgaccaatagtatcccagaaaaaataaaatccatcctactttctaaaattcccatgggcaaaatgggttcaggcgaagatgtgtctaattgcgtagcttttttaagttctgacgaagcttcttatataacaggagaaacaattcacgttaacggtggaatgtatatggcttgac

SEQ ID NO: 204176 - DNA, 274 bp, Unknown
  Bacterial polypeptide expressing nucleotide sequence isolated from the Sargasso Sea
aaagccggtataattggtatgtcaaaaagtttagcaatagagtatgcaaaaaaaaatattacaattaattgtgtttcgccgggttttattcaatctaaaatgactgataatatagtagaaagtattaaagcagtcttaacttctagaatccctatgtcaagactgggaaccggagaggatgtatcaaatactgtagcttttttatcatctgatgccgcatcatatattaccggagagacagtacatgttaacggcggtatgtatatgggttgac

SEQ ID NO: 204177 - DNA, 340 bp, Unknown
  Bacterial polypeptide expressing nucleotide sequence isolated from the Sargasso Sea
atagtaaatattacttcagttgtaggtcatactggaaatcaaggtcaaactaattatgccgcttccaaggctgggattattggaatgtcgaagggcttggctttagaatatgcaaaaaaaaatataactgttaattgtgtgtctccaggctttatagtatctgacatgacaatgaatattgctgaaaaagttaagctatatttaacctcaagaattccaatgggtaaactaggtacgggtgaagatgtgtcaaattgcgtagcatttttatcttcagagcattcttcatatattactggagaaactatccatgtaaatggtggaatgtatatgtcttgac

SEQ ID NO: 204178 - DNA, 745 bp, Unknown
  Bacterial polypeptide expressing nucleotide sequence isolated from the Sargasso Sea
atgtatagcttagaaggacaaattgcaattattacgggaggagcccgtggaataggaaaagggatttgtgaggttttttgcaaagcaggagcaacagttgctttgtgggatgtattggatgaaggaactcagacagcagatcaaatagaaaaagatggaggatcaattttttttcaaaaagttgatataacaaataaatcttctgttgaagaagctgtttcaaaaattatttcagctcatggtaaaatagatattcttataaataatgctggtgttattcgtgaccgttcttttatgaaaatgtctgaagaagaatggaatacagttattaatattaacctaacaggaatgtttattgtaacaaaagcagtttttcctataatgaaagaagctggatatggaagaattatttcagcatcttcaattaatgcttttcaaggagcttttggtcaagcaaattattctgctactaaagcaggtatttctggttttacaagggctttatgtaaagaaggaggaaaatatggaattactgtaaatgcagttgccccgggatttataaaatcattaatgtctgattctatgcctgaagaaatcataaaagcgggaatagctcagatacctgttggaagaatagggacacctgaagacatgggttatacatatttgtttttagcttcaaaagaagcagggtttatatcaggaataactttacatgcaaatgggggtgcaatgccaatgtaag

SEQ ID NO: 204179 - DNA, 929 bp, Unknown
  Bacterial polypeptide expressing nucleotide sequence isolated from the Sargasso Sea
cgcgtggtcgctgcatgcgacggcggctgcgagcggcgcgggtgcgtttgtgctcttctcgtcggtggcggcgctgctgggcggcgcagcgcaggccaactacgccgcgaccaacgcgtgcctcgatgcgctggcgtcgtgccgtcgcgcagttggcgcggtcggcacgagcgtgcaatggggcgcgtgggcagaagtggggatggcggcgcggggtgcggcgagcgcacggatggcagcaatggaggcggcgtcgggctttgggcggatcgggctggcgcatgggctggcagcgctggggacaggagtgggccacgccgcgccgtcggtgataggcatggtgccagtgacttggagccgcttcctgggcggcgacagagaggcgcccgccttcctctcggcatttgcgccagtggtcgtcgaggcggcgttggcggccggcgaggtcaccgcgtatgcatgtggtgtctcgctggaggcggtgctggcgatcgtggggcgcacggcgggcgggacggtcgacgcggacgcgccgctgatggaggcgggcgtcgactcgctgggcgcagtcgagctgcgcaaccagctgcagcgagcggcgggcgagggcatcgcattgccgagcacgctggtcttcgattacccgacggcgcggcagctggcggtgctgctgcagccggagcaggaggcgagcgtggtggcggcgtcgctctcgagtgctcgtgcagctgctggagagggtgtggcggtcgagggtgtgagcgcgctgcttccagcgggcgcatcatcggcgcctatgacgagccgcatggtggcgtgcagctgcgacgcgatcgtcgaggtgccggtgtcgcgatgggaggtgccggcgctgcccgagccgatcgcgagtcgtgcgcggcacacgggcttcgtggtgggcgcgcagc

SEQ ID NO: 204180 - DNA, 304 bp, Unknown
  Bacterial polypeptide expressing nucleotide sequence isolated from the Sargasso Sea
tggaaatcgaggtcaatcaaattactctgcagctaaagcaggcgtagaagcttttacaaaatcacttgccagagaagtgggaaaaagaaacatcaccattaattcaattgcaccgggcttcattgaaactgatatgactcaacaaagtgatggagtaaatgcagatgaattaataaaagatatacctttaggaaggtttggaaaacctgatgaaattgctcatttagtatcttttctttgttcagatgaagcttcttatataactggacaaattgttcatattaatggtggtttatatatgtaa

SEQ ID NO: 204181 - DNA, 175 bp, Unknown
  Bacterial polypeptide expressing nucleotide sequence isolated from the Sargasso Sea
atgacagagaatataccagaaaaagtaaaattaattcttacttcaagaatccccatggggaaacttggaactaccgaagatgtctcaaattgtgtagcttttttatcatctgaagactcatcttatataacaggggaaactttacatgttaatgggggcatgtatatggcttgac

SEQ ID NO: 204182 - DNA, 634 bp, Unknown
  Bacterial polypeptide expressing nucleotide sequence isolated from the Sargasso Sea
atgattaactttaaaaataaaaaaattgttataactggtgctactggaggaattggaagagatattgttaaaaagtttgtttctttagaagcaagtgtttttgcaacaggaacaaatactgaaaaactaaatttactgaaaaaagacttccccaaaattaatattataaaatttgatatttctgaacattcaaaaatagaagaatttattgagaatgtctcaaatcaattgactggattagacatattaataaacaatgcaggaataaataaagacaacttatctttaagaatgaaagatgaagaatggaaaaaagtgattgatatcaatttaggatcaacttttttattatgtaaatacgcaataaaaaaaatgctgaaaaataaatatggaagaattgtaaatattacatccgtagtagggcatacaggaaatataggacaagcaaattatgcagcttcaaaagctggtattataggaatgacaaaatcgcttgctatagaatatgcaaaaaaaaatattacattaaattgtgtatcacctggatttattcaatcaaaaatgacagataatattattgaaagtgttagagcagtcttaacctctaaaatacccatgtcaagatggaaacgga

SEQ ID NO: 204183 - DNA, 269 bp, Unknown
  Bacterial polypeptide expressing nucleotide sequence isolated from the Sargasso Sea
aggtataattgcaatgtcaaagagtatggctatagagtatgcaaaaaaaaatataaatataaattgtatttcaccaggtttcattaaaacagcaatgactgataaattagataataaatttaaagaagctattatatcaaaaattccttcagcccgtcttggcgagccagatgatgttgctaatgcagtgctatttttgtgctcaaatcagtctgactacataaacggagagactttgcacgttaatggtggaatgtatatggcttgac

SEQ ID NO: 204184 - DNA, 244 bp, Unknown
  Bacterial polypeptide expressing nucleotide sequence isolated from the Sargasso Sea
ttggcgatagaatatgcaaaaaaaaatattaatattaattgtatttcaccaggcttcatcaaaactgcaatgactgacaaactagatgataaatttaaggaagctataatatcaaaaattccttcagcccgtcttggggacccaaatgatattgctaatgcagtggtttttttatgctcaaaccaatcaagctatataaatggagaaactttacatgttaatgggggcatgtatatggcttgac

SEQ ID NO: 204185 - DNA, 355 bp, Unknown
  Bacterial polypeptide expressing nucleotide sequence isolated from the Sargasso Sea
aataaaaaaggtaaaattattaatatcacatcagtggttggacatactggaaatttaggacaaacaaactatacagcagcaaaagcagggatagttgcgatgtctaaaagtttagcattagaatatgcaaagaaaaatatcaatgttaactgtatatcaccaggatttatcaaaactgctatgacagataaaattgatgaaaaatttaaagaagttattatttctaaaataccttctgcaaggttaggagaacccgaagatgttgctaatgcagttatttttttagcatccccacaatctgattatattaatggagaaacattacatgttaatgggggcatgtatatggcttgac

SEQ ID NO: 204186 - DNA, 592 bp, Unknown
  Bacterial polypeptide expressing nucleotide sequence isolated from the Sargasso Sea
agattttccaatgttaatgctattaaatttgatatttctgatcactttaaaattgaagaatttattgaaaatgtttcaactcagataactggattagatattctaataaataatgctggaactaataaggataatttatctttaagaatgaaagaagaagaatggaaaaaagtaattgatattaacttaacttcaacttttttattatgcaaatatgcaataaaaaaaatgttgaaaaataaatatggaagaattgtaaatatttcatctgtagttggacatacaggaaatttagggcaatcaaactatgcagcgtcaaaagcaggaattattggaatgacaaaatctttagcaatagaatatgctaaaaaaaatattactttaaattgtgtttcacctggatttatacaatcaaggatgacagataacattattgaaagtgtaaaagctgttttaacttctagaataccaatggctagattgggaaatggtgaagatgtggccaattcagtcgcttttttatcgtcagaccaagcttcgtatattaccggggaaactatacatgttaatggaggcatgtatatggcttgac

SEQ ID NO: 204187 - DNA, 199 bp, Unknown
  Bacterial polypeptide expressing nucleotide sequence isolated from the Sargasso Sea
ttctccaggttttattaaaactgcaatgactgataagatcgatgaaaaatttaaagatattttgttatcaaaaattccatctgcgaaattaggtgaaccagaagatatagctaaggctgttctttttttagcttcaaatctatcagaatacatacatggagaaacactacatgttaatggaggtatgtatatggcttga

SEQ ID NO: 204188 - DNA, 606 bp, Unknown
  Bacterial polypeptide expressing nucleotide sequence isolated from the Sargasso Sea
aatgattaattttaagaacaaaaatatattggtaacaggagcttctggtggcataggaaaagaaattgttaaaaagtttaatgatctcgatggaaatgtattagcaacaggaacaaatgttgaaagactagatttattaaaaaaagaattcccaaaaataaaagtaattaaattcgatatttctgaacatgctagaattgaagaattcatagaaagtgtaaatacccaattatctggattagatattttaattaacaatgctggaattaatatggacaatctttcacttaggatgaaaaatgaagagtgggataaagtaattaatgtaaatttgggatcaacttttttactgtgtaaatatgctttaaaaaagatgttaaaaaataaatatggaaggatcgtaaatataacttccatagtaggtcatacaggaaatttaggacaggcaaattatgctgcttctaaatctggaattattggaatgacaaaatctttagctattgaatatgcaaaaaaaaatattacaataaattgtgtatctccagggtttatacaatcaagaatgactgataaaattaatgaaagcgtaaaatcagttcttacatc

SEQ ID NO: 204189 - DNA, 357 bp, Unknown
  Bacterial polypeptide expressing nucleotide sequence isolated from the Sargasso Sea
aaaataaagaaggtaagataataaatataacttctgtcgtggggcacactggcaatttgggacaagcaaactatgctgcttcaaaagcaggattaattggaatgtctaaaagtatggctttagaatatggaaaaaaaaatatcaaaataaattgcatttctccagggtttataaaatccgaaatgactgacaaaattagtgaaaattttaaaaaaatactgcaagataaaatttctttagaaaggtttggagatccaaatgatgttgctaatgctgttctttttctatcatctggattatcagattatattactggagagacaatacatgtgaatggaggcatgtattttagttgac

SEQ ID NO: 204190 - DNA, 144 bp, Unknown
  Bacterial polypeptide expressing nucleotide sequence isolated from the Sargasso Sea
agaatttaatatcaagaattcctatggaaaaactaggtacaggtgaagacgtatcaggctgtgttgcctttttgtcttccgatttagcatcatacattaccggtgaaacaattcatgttaatggcggaatgtatatgtcttgac

SEQ ID NO: 204191 - DNA, 361 bp, Unknown
  Bacterial polypeptide expressing nucleotide sequence isolated from the Sargasso Sea
ctaaaaaacaaatttggtagagtagtcaacattacatcaatagtagggcatacgggaaatcttggtcaggcaaattattcagcttctaaagcagggataatcggaatgtcaaaaagtttagccaccgaatatgcaaaaaaaaatataacagttaactgtgtttctcctggatttatagtgtcagacatgaccatgggtatagcagaaaaagttaagttatttctgacctcaagaattcctatgggaaaacttggcacaggagaggacgtgtcaaattgtgttgcctttttgtcttctgattccgcatcatacgttaccggagagacaattcatgttaatggcggaatgtatatgtcttgac

SEQ ID NO: 204192 - DNA, 833 bp, Unknown
  Bacterial polypeptide expressing nucleotide sequence isolated from the Sargasso Sea
cgtcgtgcgccttgtggcgcgatcgacggactgtgatggcatccacgtcgtcacgggcgggacgggcgcgcttggcctcctcaccggtcggtggcttgcgcagcggggcgcacgctccctcgtactcgcttcgcgcagtggtgcgcttcaaaaggacacgggcgtcaagtggcaggcagtggaggcgagcggggtcacgccaagcctcgagcgatgcgacacgggcgaggcggtgcacgtccttcgactggtagctcgtgcgtcgtcactctccggagtgtggcacgcggcgggcgtgttggcggacgcggtgttgccaaaccaagacgcggctggctttgcccgtgtgttcgcgcccaaggcatacggggtgtggagcctgcacactgccggtgccacgagtgcgatggacgctgtcgccctcttctcgtcggtggccgccctcttcggcggcgcggggcaggccaactacgccgcggcgaacgcgtgcctcgacgccctcgccacgtcctgtcgcacgcacggcgtcgcggcggcgagcgtgcaatggggcgcgtgggcggaggtgggcatggcggcgcgcggcgcggcaagcgagcggatggcggcgatagaggctgcgtcggggttctcgcgcatcgccttggcgcaaggcttgggggcgctgggcacggcggttcagcacgggtcgtcggcggtgcttggtatggtgcctgtgacgtggagccgcttcttgggcgctggggaggtgcccgccttcctttcaacattttcgtgcaaggccaagagtgcaggcatgatgggcacaggatcggcgtctgcggcatggggcg

SEQ ID NO: 204193 - DNA, 748 bp, Unknown
  Bacterial polypeptide expressing nucleotide sequence isolated from the Sargasso Sea
tcaggagattttgatgacctcaactttagaggggatccgcgtacttataactggtgctggtggagggatgggccgaagtcatgccgtcttaatggcggaaagaggtgctgatattgtggttcacgatattaaggatgacggtgcagaagaaacggcggatatggtgcgtgcagagggaagggaggctaaaattgttatagccgacatccgagacattccggcatttacgtcagcgattcagtcggctggaccagttgatatattggtcaataatgctggtgttggtggagctagacgaagtattgaagagataaacgaaccggtttttaatcaaatgtttgaagttcacgtcaggggaacgttttttgccactcaaacggtcttgccaatgatgaaagaacgaaagaacggaaaaatcatcaacatctcttccatttacgctatggggggtagtcaattagctagccattatgctgcagccaaatctgctatctcaggttttaccaaaagttgggcaagagaattagcgccatggagaataaaagttaatgctgttgcacccggctttattgtaactgatatgactgaagcttctaatccacctgataaaattgccgagcgcgaaaaattgatgcctctcggagaattctgcaaacctattgatatttcctacgcggttgcatggcttgctagcaaagaagctaaccttgtttctggccaagttataagccccaacagtggtgaagta

SEQ ID NO: 204194 - DNA, 325 bp, Unknown
  Bacterial polypeptide expressing nucleotide sequence isolated from the Sargasso Sea
catcagttgttggtctactggcaatttaggtcaagtaaattatacggcatccaaggcaggtataattgcgatgtctaaaagtttagcaatagaatacgcaaagaaaaatataaatataaattgtatttctcctggttttattaaaacagctatgacaaataaattagatgataaatttaaagaggctataatatctaaaattccttcagcacgattaggagagccagatgatattgcaaatgcagtgctttttttatgttccaatcaatcaaattatataaatggtgaaaccttgcatgttaatggaggcatgtatatggcttga

SEQ ID NO: 204195 - DNA, 346 bp, Unknown
  Bacterial polypeptide expressing nucleotide sequence isolated from the Sargasso Sea
cggcagagttgtatttatctcatcagttgtagctcatacagggaatccaggtcaagtaaactatacagcatcaaaagcggctatttcaggaatggtaaaatcacttgctttggaattatcaacaagaaatataacagttaacagtgtggcaccaggttttatcaagtcaaatatgactgacaaacttaatgatgatcaaaaaaatactattttagagagaatcccaatgaaaaaacttggtgattctagtgatatagccaaagcagtgggttttttatgttctgaaaatgccaattatataactggccagaccttgcatgtaaacggtggattggctttaatttaa

SEQ ID NO: 204196 - DNA, 787 bp, Unknown
  Bacterial polypeptide expressing nucleotide sequence isolated from the Sargasso Sea
ctgggtggcatctggcacacggcaggcgtgctcgcggacgggctcttcacccggcaggatgccagcaatctacgccgcgcgtacggaccgaaggcagttggcgcatggaatctccatctggcacacaccagtgcacaactgcgtgcgtgcatctacttttcgtcgatagctggtctagttggtgctgctgggcaagctaattatgctgcggccaacgcttgcctcgatgcgctttccatgagcttgagcgcacggggcagcaatgcttcgagcgttgactggggcccgtgggctgaggtaggcatggcgtcgggcagcacagtaaattcacgcatgagcgcagtaggcctgggcctgattgacccttggcaagggcttgcggcgttgcaagcagcgacatcaacttatcggccagcggtggtggcgttctggctcgtccggtgggagacgatgctgggatcgggcaatggggcacccacgctacttctgcgtttggcagctcgcaccatccaatctccagctcgtgcggtccccgtcacactcacggcacttgtccgtcggaacgacaccatcgagatcgatacagtgctagacttgacgcgtcgaacagcaggtaatgcagtagatgcagacgcaccgctcatggaagcgggtctggactcgcttggcgcggtggagcttcgaaaccagctgcagcaaatggtgggcgaggctgtgctactgcaaagcacgctcatcttcgactatccaacgacgaggagtcttactgcactgcttgcaagtttgg

SEQ ID NO: 204197 - DNA, 622 bp, Unknown
  Bacterial polypeptide expressing nucleotide sequence isolated from the Sargasso Sea
taaaattgaaaaattagatattataaaaaaaaataacccgaatattaaagttaaaaaatttgatttatccgagcactcaaacatagaaaatttcataaattctgctgttagtgaattaggtgggttagatattttaattaataatgcaggtattaatgttgatactctatctttaagaatgaaagacgaagaatggaaaaaagttattgatattaatttaacatctacttttttactttctaaatatgctattaagtccatgttaaaaaataaatatggaaggataataaatataacatcaatcgttggacacacaggaaatcttggtcaggtaaattactcggcttctaaagctggtataattggtatgtcaaaaagtttagcaattgaatatgcaaaaaaaaatataactgtaaattgcgtttcacctggttttataatatctgatatgactactaatcttccagaaaaagttaagttatttttaacgtctcgaatcccaatggggaaacttggtactggagaagacgtatccaattgtgtggcttttttatcttctgaatcagcttcttatgttactggagaaacaatacatgttaatggtggaatgtatatgtcttga

SEQ ID NO: 204198 - DNA, 272 bp, Unknown
  Bacterial polypeptide expressing nucleotide sequence isolated from the Sargasso Sea
gagtgcgatcacaggttttaccaaatcgatcgccatggagcttgccaaagcccaggtgacttgcaactgtgtggccccagggtttatccaaaccgaaatgaccgacagtctaaacgagagtgtgcagtctgcaatcctagacaaaattccgctcaaacgttttggaaccgcagatgaagtagggtcggctgttgggtttttggcttccgagcaagcgtcttacattacgggctctacccttcacgtcaacggtggtatgcacactagctagg

SEQ ID NO: 204199 - DNA, 502 bp, Unknown
  Bacterial polypeptide expressing nucleotide sequence isolated from the Sargasso Sea
aatgataaactttaaaaataaaaaaatattaatcacaggagctactggtggtataggaaacgaacttattaaaaagtttgtatcattggatggtagtatagttggaacaggaacaaaagctgaaaaacttgatgaattaaaaaataaatatccaagtgttaaagtaaaaaaatttgatatatcagaacattcaagaattgaagagtttatagaggatgctgttcttgaattgggaggattggatattttaattaataatgcaggtactaatgttgataatttatccctaagaatgcaagaaaaagaatggaaaaaagtaattgacgtgaatttaacatctacttttttattaagtaaatattctattaaaaaaatgttaaaaaataaatttggtagagtagttaatataacatcagtggtaggccataccggaaatttaggacaagccaattatgcggcatcaaaagctggtataattggaatgtcaaaaaagtttagccaa

SEQ ID NO: 204200 - DNA, 580 bp, Unknown
  Bacterial polypeptide expressing nucleotide sequence isolated from the Sargasso Sea
atgggtgttttagacggaaaagttgttttagtaactggtgctgctaatggaattggtaaagaaaccgctcttctagcttcaaaagaaggagctaagttagttataaatgatttagggggatcagttgctggaggagatgaaggtgataaaaaccctatagaaattgttgctgaagaaattaaaaaagatggaggtgaagtcgtaactaattctgattcagttacttctaagaaaggtgctgaatttatgatacagcaagctttagatacttatggcaaccttcattctattgttaatccggccggaatcctcagagataaaatgtttcataaaatggatgatcaagattggggtgctgtaatagatgttcatctaaatggaagttataatatttgtagatccgctatcaattattttagagataaagaagaaggaaattttgttttatttacatcaacgactggattaattggaaatattggtcaagccaattatgcagctgcaaaacttggtattgcagggttatctaggattatagccatggagaatgaaataaaaaatgttaggtcaaaatattatg

SEQ ID NO: 204201 - DNA, 229 bp, Unknown
  Bacterial polypeptide expressing nucleotide sequence isolated from the Sargasso Sea
aatgctgatcgtgactactaatctgtttgacctgaacggaaagattgcactggtaacgggcgcaagccgcggtatcggcgaggagatcgcgaagctgctcgccgaacagggcgcgcatgtgatcgtgtcgagccgcaagctggaggattgtgaatccgttgcgcgcgagatcggcgaagcgggcgggagtgccgaagcgtatccgtgtcacgtcgggcgcgtcgaagat

SEQ ID NO: 204202 - DNA, 256 bp, Unknown
  Bacterial polypeptide expressing nucleotide sequence isolated from the Sargasso Sea
gatgtctaaaagtttagcaatagaatatgccaaaaaaaatattaatgttaattgtatatcaccaggatttattaaaacagcaatgacagataaaattgatgaaaaatttaaagaagttataatttctaagataccttccgcaaggttaggagaaccagaagatgttgctaatgcagttatttttttggcatccccacattctgattacataaatggagaaacattgcatgtaaatggggggatgtatatggcttga

SEQ ID NO: 204203 - DNA, 919 bp, Unknown
  Bacterial polypeptide expressing nucleotide sequence isolated from the Sargasso Sea
aatggcgacaccacttttgcaggataaagtcgtgattgtcactggcgctggaaggggtattggtcgcggtatcgcgctgatggcggccgcaaacggagcaaaagttgtagtcaatgaccttggtggatcagaggacggatctggagctgacagcagccctgcggacgaagttgtagatcagataaaagcttccggcggtgaggcaatagcttcatatgcaagtgttactgaatgggacgcggcccatgagattgttgaggctgccgttaattattttggtcgtattgattgtgttgtgaataatgcaggtaatctaagagatgcgatttttcacaagatgactgaagaggattttgattctgtcttaaacgtgcacttgaaaggcacgttcaacgtaagcagagccgcggcgacccattttagagctcaaaccagtggctgcttcgtaaacatgacttccacctcagggctgataggtaattttggtcaggcgaattatgcggcagcaaaattgggtatcgttggtctttctaagtccatggcattggatatggggcggttccgcgtccggtctaactgtatcgcaccatttgcgtggagtcgtttaatcggaacaattcccactaatacagatgaggagaaagcgcgagtagcaaagatacagcagatgacgccggagaaaattgcgcctttggcaattgctctttgtagcgatgcagcgcgtgaggtttcgggtcaaatatttggggtaagaaacaatgaaatttttcttttcagtcaaaatcgtcctttccgttttgcccatacccaagagggctggacagcggaagctgtcttagaccgagtcataccagcatttcagtcagatttctttcctcttgagaggtccggagatattttcagttgggacccaatctaa

SEQ ID NO: 204204 - DNA, 358 bp, Unknown
  Bacterial polypeptide expressing nucleotide sequence isolated from the Sargasso Sea
aaaactaaattttggaagaattgttaatataacatctgtagtagggcatagcggaaatgtaggacaagcaaactactcagcttctaaggcaggtataatcggaatgtcaaaaagtttagcaatagaatatgcaaaaaaaaatataacagtgaactgtgtttcacctggttttatagtgtctaatatgacgatgggtattgcagaaaaagtaaaaatggatctaacttcaagaattccaatggggaaacttggtacaggggaagacgtctcaaactgtgtggcttttttagcttctgaaaccgcttcatatgtaactggtgaaactatacatgttaatggcggtatgtatatgtcttga

SEQ ID NO: 204205 - DNA, 415 bp, Unknown
  Bacterial polypeptide expressing nucleotide sequence isolated from the Sargasso Sea
gtcattgatgtcaacctcaacggggtttttcacatcacccgttcggttcttaagacgatgatgaagcagcgtagcggaaaaatcatcagtatttcctcagtggtaggattttctggcaatcccggacaggtgaactacagttccaccaaggccgccttggttggattcaccaagtctcttgctcgtgaagtcggttcccgaggaattacagtcaatgctgtggctccaggattcatcgatacggcgatgacccaggctctcaacgaaacccagcaggaagaaattctcaggcagattcctttaaaacggatgggaatgccggaagacattgcccatgccgtcgattttctgtcctcggaaaaagcggattacatcactggtacggttttgcatgtcaatggtggcatgtattagt

SEQ ID NO: 204206 - DNA, 703 bp, Unknown
  Bacterial polypeptide expressing nucleotide sequence isolated from the Sargasso Sea
atgggtgttttagaaggaaaagttgttttagtaactggtgctgctaatggaattggtaaagaaaccgctcttctagcttcaaaagaaggagctaggttagttataaatgatttagggggatcagttgccggaggagatgaaggcgataaaaaccctatagaacttgttgctgaagaaattaaaaaaaatggaggtgaagtcgttactaattctgactcagttacttctaaaaaaggtactgaatttatgattcagcaagctttagatacttatggaagccttcattctattgttaatcctgctggaattcttagagataaaatgtttcataaaatggatgatcaagactgggatgcggtaatagatgttcatctaaacggaagttataatatttgtagagctgctattaattattttagagataaagaagaaggaaattttgtattatttacatcaactactggattaattggaaatattggtcaagccaattatgcagctgcaaaacttggtattgcaggattatctaggattatagccatggagaatgaaataaaaaatgttaggtcaaatattattgctccttttgcttggacaaggatgattgcaactatcccaattaaagatgaggcatctaaggaaagagttgaaagaatgaaaaatgctatgcgcgctgatcaagttgcacaaactgttgtcgctc

SEQ ID NO: 204207 - DNA, 712 bp, Unknown
  Bacterial polypeptide expressing nucleotide sequence isolated from the Sargasso Sea
aatgtttaaagatagaaaattattagtaacaggtggcacgggttcaattggaaattcaatatgtaagtattttaatagtaacggttgtaaggaaatttattctacaactacaaatcttaataaggtaaaatctgatcaagattatattcaattcaaagaattagatctaaataagatcgaaaaattaaatttagacgaactatttgactttgaggttgattttcttgtattaaatgcaggtctaaataaagataatatttttttgagaatgtcgtcagatgattggaatagcgttataaatgttaatttaaattcatcttttcatttacttaaacattttaccaaaaaaatggttaagaaaaggtttggaagagttgtttttatttcatcagtggtagctcatacaggaaatccgggccaagtaaactacactgcttctaaggctgccatttcaggaatggtaaaatcactagctttggaattatcaacaagaaatataacagtaaatagtgtggcaccaggttttatacagtctaatatgacagataaactcaatgtcgaacaaaagaatagtattttagagagaattcctatgaaaaaacttggtgattcgagcgatatagcaaaagcagtgggttttttatgttctgaaaatgctaattacattacaggtcagactttgcatgtaaatggtggattggctctaatttaa

SEQ ID NO: 204208 - DNA, 457 bp, Unknown
  Bacterial polypeptide expressing nucleotide sequence isolated from the Sargasso Sea
atgctggtatcacgaaaagataatttaactatcagaatggataaaaaagaatgggataatgttataaatataaatttaacatctactttcttgctttcaaaatatgtaattaaaaaaatgttaaaaaataaatttggaaagataataaacataacatcagttgttggacatactggaaatgtagggcaagcaaactatgcagcctctaaaggaggagtttcctcaatgtcgaaaagtttatcgctagaatatgcaaaaaaaaacattacaattaattgcatagctccaggatttatagatactgcgatgacagaaaaaattaatgatgattttaaaaaccagcttaagtcaaaaatacctttagatagatttggatctccacaagatatagctaattgtgtagcttttttatcttcagatctatcaaattatattacaggagaaacaatacatataa

SEQ ID NO: 204209 - DNA, 736 bp, Unknown
  Bacterial polypeptide expressing nucleotide sequence isolated from the Sargasso Sea
atgattaattttaataataaaaaagttttgattaccggagccactggaggtattggtggagctttagtaaaaaaatttttatctcttggtgcgacagttttgggaacaggaactaaaccagagaaattagatttgttaaaaaaaagtaattcaaatatgaaaattaaaaaattcaatatattagaacattcctcaattgaggaatttattgataatgttacatctgaattaggcgggctagatattttaattaataatgcaggagtaaacgttgataatctgtctttaagaatgaaagaggaagagtggaaaaaagtaattgatattaatctaacatcaacttttttattatctaaatatgcaattaaaaaaatgttaaaaaataagtttggcagagttataaatataacctctattgtaggccacacaggaaatattgggcaagtaaactattcagcctcaaaagctggaataatagggctatcaaaaagtttagcaattgaatatgccaaaaaaaatataacaattaattgtgtctcacctggattcatagtttcagatatgactacaaatattgccgaaaaaatgaaggaagttttaatttcaaggattccaatgggaaagcttggcacaggggaggacgtatctaattgtgttgcatttttgtcttcagatttggcatcatatgtaaccggtgaaacaatccatgtgaatggcggaatgtatatgtcttgac

SEQ ID NO: 204210 - DNA, 760 bp, Unknown
  Bacterial polypeptide expressing nucleotide sequence isolated from the Sargasso Sea
atgaatgaaagcctaaaagacaaagtcgcaatagtcacagggtccggtagaggcgttggaaaaggagttgcccagttgatggcacaagaaggcgctaaagttgtcgttgtggatcctggagtaaatgtggacggctctggagaagaccagtctatcgccgaaactgttgtggctgaaattaaagccgctggaggctcagcagtcgcttgtactgaatcagttgtaacaatggatggcggtgaaaaaatagtccaaacggctatagatgaattcggaaaactggacatcgttgtaacctgtgccggtattcttagagatcgaatgatctttaatatgactgagcaagaatgggatgatgttatcgctgttcatctcaaaggcactttcactgtagtaaaacatgccagcatcttattccggcagcaacggtccggcaggatcatcactttttcatcccaatcaggcttggtagggaattcaggacaagctaactacggagcagccaaatcaggaatagcgggattcacaaaagttgtcgctaaagacatgggtagatatggtgttaccgccaattctattgcccctagagctaccactcggatgataggagctataccagattctgctaatgaaattcgtgcccgcggtggtgtggcagggctagcaaacccagatgaattaaacaatttggatcccgacgacatagctccattcgtggcttatctagcgtctgattacgctcataacatcaacggacaaa

SEQ ID NO: 204211 - DNA, 501 bp, Unknown
  Bacterial polypeptide expressing nucleotide sequence isolated from the Sargasso Sea
aatgattaattttaaaaacaaaaaaatattagttacaggagccactggaggaattggaagagaaattgtaaaaaaatttatttctttggaaggaaatgttctagctacaggaactaatctagaaagattagatttgttaaaaaaagattttccaaatattaatgttttaaaatttgatatttcagatcattctaaaattgatgaatttattgataatgcttcaacacaattaagtggattagacattctaataaataatgctggagttaatatggataatttgtctttacgaatgaaatatgaagaatggaaaaaagtaattgacattaatttaaattcaacttttttattaagcaagtttgcaatcaaaaaaatgctaaaaaataaatatggtagaatagtcaatattacttcggtagtagggcacactggaaacttggggcaagcaaattatgctgcgtcaaaatcgggaataataggcatgacaaaatcacttgcaat

SEQ ID NO: 204212 - DNA, 922 bp, Unknown
  Bacterial polypeptide expressing nucleotide sequence isolated from the Sargasso Sea
atgacagatttattaaaagacaaagtcgcaatagtcacagggtccggtagaggcgttggaaaaggagttgcccagttgatggcacaagaaggcgctaaagttgtcgttgtggatcctggagtaaatgtggacggctctggagaagaccagtctatcgccgaaactgttgtggctgaaattaaagccgctggaggctcagcagtcgcttgtactgaatcagttgcaacaatggatggcggcgaaaaaatagtccaaaccgcaattaatgaattcggaaaactggacatcgtcgtaacctgtgcaggtattcttagagatcgaatgatctttaacatgtctgagcaagaatgggatgatgttatcgctgttcatctcaaaggcaccttcacaatagtaaaacatgccagcatcttattcaggcaacaacggtccggaaatattattaccttttcctcaacttctggattgtatgggaattcaggacaagctaactacggggctgcaaaagacggaatagcgggcttaacacgagtagtagctagagatatgggcagatacggagtgagagccaatgccatatcccccagtgccaacactcgaatgagcggaacagtccctgatcaagctagagaactaagagcagcaagtggtataaccatggggtctgcgcccgcacttaggggagaagcagaagatgtagctccatttgtaacctggcttgcttccgaccaatccaaacatgtgaatggaagagtttttcatgttaccggaggacttgtatctctattaaacgaaccagagcctgtaaaaacaattagcacagaagaccgatggacagtagaagaaattgcaagagtatttccttcaacgataggtatggaactttataaccccgcacctgcacccgcaccaagtgtataaa

SEQ ID NO: 204213 - DNA, 766 bp, Unknown
  Bacterial polypeptide expressing nucleotide sequence isolated from the Sargasso Sea
atggcaacgaatctgttcgacctgacgggcaagatcgcactcgtgacgggcgcgagccgcggcatcggcgaggaaatcgcgaaactgctcgcgcagcagggcgcgcacgtgatcgtgtcgagccgcaagctcgacgactgccaggccgtggccgacgagatcgtcgcggcaggcggccgcgccgaggcgctggcctgccacgtcgggcgtctggaagacatcgccgcgacgttcgagcacatccgaggcaagcacggccgcctcgacatcctcgtgaacaacgcggccgcgaacccgtatttcgggcacatcctcgataccgacctcgccgcgtacgagaagacggtcgaggtgaacatccgcggctacttcttcatgtcggtcgaggccggcaagctgatgaaggcgaacggcggcggcgcgatcgtcaacaccgcatcggtgaacgcgctgcagccgggcgaccggcagggcatctactcgatcacgaaggccgcggtcgtcaacatgacgaaggcgttcgcgaaggaatgcgggccgctcggcatccgcgtgaacgcactgctgccgggtctcacgaagacgaagttcgcgggcgcgctgttcgccgacaaagcgatctacgagacctggatggggaagatcccgctgcgccgccatgcggagccgcgcgaaatggccggcaccgtgctgtatctcgtgtcggacgcggcgagctacacgaacggcgaatgcatcgtcgtcgacggcggcctgacgatctgag

SEQ ID NO: 204214 - DNA, 430 bp, Unknown
  Bacterial polypeptide expressing nucleotide sequence isolated from the Sargasso Sea
atttccggatgttctaaactccatctcacatctgggtaccgcttaacaaaacgagcaattaaaccgatgatgaaacagagaaagggtcggatcatttttatttcctcagtagttgggacgactgggcaagcaggacaagcaaattatgccgcttcgaaagcaggtctagtaggtttagcgcgatcaattgctaaagaatttgcctctcgtaatataacggcaaacgtaattgcacctggtccggttaaaactgacatgattgacgaattaaccgaacaacagcgtgaaaatatccttgccgctgtcccattgggcaggttcgctgaaccagaggaggtagctgcaatggcagcttttttagctagtgatcaagctggattcataactggggctatcatccctgtggatggtggaatcgggatgagctagt

SEQ ID NO: 204215 - DNA, 682 bp, Unknown
  Bacterial polypeptide expressing nucleotide sequence isolated from the Sargasso Sea
ttgtcagtcttttgctgaaaatggctgtaatgttgcatttacatacaacaattcaaaagagtctgcagaaaatttagaaaatgaacttaattctttaggaattaaatcaaaggcatataaaagtgatgcttcaaatcacgatgatgctcttaagcttattgatgatgttctgagtgattttgaaaaaattgatattcttgtaaacaatgctggaattaagaaagataaccttctaatgagaatggaaaaagatgattttgatgctgtaattaatactaatctttcatcagtatttaatttaactaaagcatctataaaaacattcctgaagcaaaggagtggttcaattataaatattagttcagttgttggtgttaaaggtaatgctggacaatcaaactattcagcttcaaaagctggaattattggtttctcaaagtcagtagcactagaactgggatcaagaaatatcagaagtaatgttattgctcctggatttattgaaactgatatgacagattctcttccagaagatgtaattaagtcctggaaagaaagtataccactgaaaagaggtggtaatccaagtgatgttggaaatgcttgtgtttttctagcatcagatttatccagttatataactggtcaagttctccatgttgatggaggaatgttaacttaa

SEQ ID NO: 204216 - DNA, 652 bp, Unknown
  Bacterial polypeptide expressing nucleotide sequence isolated from the Sargasso Sea
ggagcaaatattttagcttcaggtacaagaacagaaaaattagaggaactaaaaagtaaatacggaaatattaaaatattaaagtttgatatttcccaaagcgataaaattgaggagtttgttgaaaacgcaacgaaagaacttggcggtactttagattgcatagttaataatgcaggcattacgcaagataatttagcaataagaatgagcctagatgaatggaaaaaagtaattgatgttaatctaacatcaacttttttaatgagtaaatcagcaattaaaaaaatgcttaaaaataaatctggtaaaatcgttaatattacgtcagttgtaggacatacaggtaatttaggacagaccaattatactgcttccaaagcaggtattattgcaatgtcaaagagtttggcaattgaatatgctaagaaaaatattaatataaattgcatttcaccaggttttatcaaaacagcgatgaccgataaattagatgataaatttaaagaggctataatatcaaaaattccttcagcacgtttaggagagccagatgatattgcaaatgcagtactttttttgtgctctaatcaatcaagttatattaatggtgaaactcttcatgttaatggaggcatgtatatggcttgac

SEQ ID NO: 204217 - DNA, 739 bp, Unknown
  Bacterial polypeptide expressing nucleotide sequence isolated from the Sargasso Sea
atgagtgatttaaaagaaaataacataatcttaactggtgcgacaggtggaataggaaattctataattaaaaaattatatgatgctggagctaatattttggccacaggaactaaaaatgaaaaattggaggaactaaaaaaaaaatttcaaaacatccaaatactgaaatttgatatctctaaaattgataatttagaaaattttattgaggatgctacaaaacaacttggaggcaaacttgattgtatgattaataacgcaggaattactcaagataacttagctatacggatgagcatagatgagtggaaaaaagtgatagatgttaatcttacttccacatttttgttaagcaaatttgcaataaaaaaaatgcttaaaaataaaaaaggtaaaattataaatatcacatctgtggttggacacactggaaatttaggacaagcaaattatacagcttcaaaggcaggaattgttgcaatgtctaaaagtctagcaatagaatatgcaaaaaaaaatattaatattaattgcatatcaccaggttttataaaaacagctatgacagataaaattgatgaaaaatttcaagaagttattatttctaaaataccttctgcaaggctaggagaacccgaagatgttgctaatgcagttatttttttagcttcctcgcaatctgattacataaatggagaaacattgcatgttaatggaggcatgtatatggcttgac

SEQ ID NO: 204218 - DNA, 654 bp, Unknown
  Bacterial polypeptide expressing nucleotide sequence isolated from the Sargasso Sea
caggatcaacagttatagcgacaggcacaaatgaaaaaaaattgaaattaattcaagagaaatacaaaaatttaaatgtgatgaagtttgatttatctgatcataaaaatattgataaatttgttgaggattgtagttcaattttatcaaataaaatcgatgttttaataaataacgcaggaattactcatgataatttatcaataaaaatgagagaagatgagtggaaaagagttattgatattaatttaacttcaacatttttgataagtaaaaatgtaattagaaaaatgataagatctaaaactggaaaaataataaatatcacctcagttgttggtcattcgggaaatattggccaagcaaattatgctgcttcaaaggcaggtattatagcaatgtctaaaagtttagctttagaatatggtaaaaaaaatataacaattaattctgtatctccaggcttcatattgtcagaaatgacaaataaaataagcgaagaccatacagaattgttaaaatcaaggatatcgcttaataaatttggcaaaccagaggatgtggcaaatacagttatttttttaagttctaatcttgcagattatataactggagaaactatacatgttaatggaggaatgtattttagttgac

SEQ ID NO: 204219 - DNA, 739 bp, Unknown
  Bacterial polypeptide expressing nucleotide sequence isolated from the Sargasso Sea
aatgatagatttaaaaaatttaaatataattttaactggggccacaggagttattggaaactctattcttgataaattggtttcagccggggcaaatgttttagcaacaggaacaaatgagcaaaaattaaaagaaattcaagataaatttaaagatttaaaagttacaagatttgatatgtccgaacatgaaaaaattgatcaatttatagaagattgtagcaaaaatttttcaaataaaattgatgttttaataaataatgcaggtatcaccaaagataatttatctttaaggatgaaagaggaggagtggaaaaaagtgattgatataaatttaacctcaacgtttctgattacaaagagtgtgattaaaaaaatgcttaaatcaaaaaatggaaaaataattaatgtaacttctgtagtaggacacacaggtaatattggtcaagcaaattatgctgcatcaaaagcgggcattgtggcaatgtcaaaaagtttagctcttgaatatggaaaaaaaaatatcacagtaaattgtgtatctccaggttttattgtttcagaaatgaccgctacaattagtgaagaacatacagatttaatgaaatcaaggatatcactaaataaattcggtaatccagaggatgttgctaattcaattgcctttttaagttctaatctgtcagattatatcacaggtgaaacaatacatgtaaatgggcgcatgtattttagttga

SEQ ID NO: 204220 - DNA, 713 bp, Unknown
  Bacterial polypeptide expressing nucleotide sequence isolated from the Sargasso Sea
tatcttaacaggagccacaggtgtaattggtgattcaattctagaaaagctgacttctctcgggtctaatgtgttagcaacaggtactaatgatgagaaattgaaaaaaatccaggagaaatatgataatataaaagttttaaaatttgatatttctaatcatagtaaaatagatcaatttgttgatgagtgtaataaaatgctatctaataaaattgatgttttgataaataatgcaggcattactcaagataatttatcaataagaatgaaggaggaagaatggaaaagagttattgatttaaacttaacatcaacttttttaataagtaaaaatgtactaaagaaaatgttgaaattaaaaaaaggtaaaataataaatattacctcagtcgttggtcatacaggtaatattggtcaagcaaattatgccgcatcaaaagctggaataattgcgatgtcaaaaagccttgctttagaatatggtaaaaaaaatataacagttaacagcgtctccccaggatttataaaatctgatatgactgataaaataactgaagatcacacagaattattaaaatcaaagatatctttaaataaatttggcgaacctaaagatgtggccaacacaattgtatttttaagttcaagcctatctgactatataactggcgaaacaatacatgttaatggaggtatgtattttagttgac

SEQ ID NO: 204221 - DNA, 557 bp, Unknown
  Bacterial polypeptide expressing nucleotide sequence isolated from the Sargasso Sea
taaacatgaagatattgaaaaatttatagacaaatcatccaatgaactagatggcaatgttgatattttaattaacaatgcaggaatcaatcaagacaacttgtctataagaatggatattgaagaatggaaaaaagttattgatataaatttgacttcaacttttctattatcaaaatttgctataaaaaaaatgcttaaaaataaatatggaaaaatagtaaacattacatcagtaataggacatactggaaatgtgggccagtctaattacgcagcgtctaaggcagcaattatatcgatgtcaaaaagtttagctttagaatatgcaaaaaaaaatattacagttaactgtatatctccaggctatataacaacaaatatgacagaccaaattaatgaaaaatggaaggaaattattaaatcaaaaattcccatggataagtttggtttgcctaaagatgttgcaaatacagtaatatttttgtcatctgagtcagcaagctatattacagggcaaactatacatgttaacggcggtatgtatatgggttgac

SEQ ID NO: 204222 - DNA, 724 bp, Unknown
  Bacterial polypeptide expressing nucleotide sequence isolated from the Sargasso Sea
atgggtctaagtggaaaaattgcgcttattacgggcggtgctcagggaattggccgttttataagcgaagaattggcagggcagggtgtccatgtaatcttgggggatataaatcatgaaggtgcagaaaaaacagctgccgaaataaaaagtagtggaggaaaagcttctgcagtaagaattgatgtttccagtgccacggatgttaaaggggtattcgattcaatcttaaaagagtataaacctgtcgatattgttgttaataatgctggtatcacccgtgatggtttgttggtgcgtatgaaagaggtcgactgggatttggttttaaatattaacttgaagggtagtttcctttgcagccagcaagcagctaaacaaatgatgaagcaaaaaagcggctgtattgtaaatatcgcatctattgtaggaataatgggtaattttggccagtccaactattcagcttctaaagcaggtctgattggctttaccaaaacgcttgctagagaggttgctcctcgtggtgtccgcgctaatgcagttgcgcctggttttatagatacagaaatgacccgagttttagaagattcggttcgaataaaacttattgaacaaattcctcttgctcgattaggccagcctgaagatattgcgcgttgtgtttcatttttagtttcagagaatgctagctatattacgggacaggtaataaatgtaaacg

SEQ ID NO: 204223 - DNA, 736 bp, Unknown
  Bacterial polypeptide expressing nucleotide sequence isolated from the Sargasso Sea
tttgaattctcaatatgtttttgtatctggtgcttcgagaggcattggtcaaagcatactgaagttattttcttccaaagggtttcctgtgattggaacggctacttctgaggagggcgttaattttatagatggaatcttatccgaatcatcaggaggaggctttggaatacaacttgatctctctgataagcaatcaattgaaaatttgtttgatattgtgaaggagaaagatattaatccagagattatcgttaataatgccggtatgacgagagataatatttttctgaggatgaaagatacagagtgggatgaggtaattcaggttcatcttagttctgttttttctttattgaagtttttttccaaaaaaatggtgaaaaataaatccggaagaattattaatatctcttctacttcggcagctattggaaataagggacaagctaattacgcagccgcaaaatcaggtttagaagcattttcaaggtctttagccagggaactagctccgaggaatataaccgttaattgtgttgcaccaggtttcatagagacagatatgatcaaaggtatggatgaagatactttaaagtttatgtcagaccaaattcctctgggaaggcttggctctcccgaagatgtagctgatttaatttattttctatcttcagaagaagctaattacattactggtcagaccattcatataaatggtggactttatatgtag

SEQ ID NO: 204224 - DNA, 709 bp, Unknown
  Bacterial polypeptide expressing nucleotide sequence isolated from the Sargasso Sea
tatgattgatttaaaaaatacaaatataattttgactggtgctaccggtataattggtaacgctattcttgataagttaattttaggaggttcaaatattttagcatcaggtacaaacgaagaaaaacttaaaaaaattaaagcaaaatataaaaatgtaaatatattaagattcgatatatcagatcataaaaaaatagatggttttatagaagattgtaattcaattttatcaaataaaattgatatattaatcaacaatgctggtatcactcaagataatttgtctataaggatgaaagaagaggaatggaaaaaagtaattgacattaatctctcttctacatttttaattacaaaaaatgttattaagaaaatgttaaaatcaaaaaaaggtaaaattattaacataacatctgttgttggccattcaggaaacataggtcaggcaaactatgccgcatcaaaagctggcataatcgcaatgtcaaaaagtttagcactcgaatatggtaaaaaaaatattaccgtcaattgtgtatcaccaggttttataatgtcagaaatgacagataaaataagcgatgaacatagagatttactaaaatcaagaatttcactcaataaatttggatatcctgaggatgttgcaaatacaattgcttttctttcttcgaatatgtctgactatattacgggagaaactata

SEQ ID NO: 204225 - DNA, 503 bp, Unknown
  Bacterial polypeptide expressing nucleotide sequence isolated from the Sargasso Sea
tttagagatcaggaagaggggaatttttgtattatttacatcaacaacaggattaatcggaaatattggtcaagcaaactatgccgctgcaaaacttggaatagcaggtttgtctcggattatcgctatggaaaatgaaattaaaaatgttaggtcaaatatcattgctccatttgcttggacaagaatgattgctactattccaataaaagatgaggcctctaaagaaagagtagaaagaatgaaaaatgctatgcgcgcagatcaagttgcacaaaccgtagtcgcgctttgttcgccagactgtaaactaacaggtcaaattttatctgttagaggaaatgaagtagttttatttaatcaaccaaggccaattaaaagcctggttgataaggaaggctggacaccaaagaaacttttggattcagcatttccagcatttgaagcagttggtcaggatttaggcgcaactgtaactgtatttccttatgaacctttctaat

SEQ ID NO: 204226 - DNA, 510 bp, Unknown
  Bacterial polypeptide expressing nucleotide sequence isolated from the Sargasso Sea
ttggtggtaacttagatggaatagttaacaatgcaggagtaactcaagacaatctagctataaggatgagtttagaagagtggcaaaaagtaattaatattaatttaacaggaagttttttaatgtgcaaatctgctattaaaaaaatgattaaaaataaatctggcaagattattaatattacatcagttgttggtcatactggaaatttaggtcaagctaattatacagcatccaaggctggtatcattgctatgtcaaagagtttggcgattgaatattcaaaaaaaaatataaatataaattgtatttcacctggttttataaaaacagaaatgacagataaattggatgataaatttaaagagacaattatatctaaaatcccatccgcacgtctaggagaacctgatgatatagcaaatgctgtgctttttttgtgttccaaccaatccagttatataaatggtgaaaccttacatgttaatggaggcatgtatatggcttgac

SEQ ID NO: 204227 - DNA, 353 bp, Unknown
  Bacterial polypeptide expressing nucleotide sequence isolated from the Sargasso Sea
aatgtccaataaagattcattaacaggcaaaattgctttaatcactggagctagcagaggaattggtaaagaaattgctttagaactaagccgattgggagcagaagtttttattaattactcttcttctgatgaaaaagctgaagaagttgtaaatttaataaaaaattcaggaggtaaagcgcataaattaaaatttgatgtttcaaaagaggattctgtcagttcagcttttgaagaaataatcaaaattagtggcaccattgatatcctcattaacaatgctggaattactagagatggactattgatgagaatgaaatcggaacaatgggacgatgtactaaatacaa

SEQ ID NO: 204228 - DNA, 630 bp, Unknown
  Bacterial polypeptide expressing nucleotide sequence isolated from the Sargasso Sea
caggaacaaaaacagaaaaacttgatttattaaaaaaggaatttcccgatattaatactttaaaatttgatatttctgatcattcaaagatcgaagagtttattgaaaacgcagcttctaaattagatggtatagatgtgataattaataatgcaggaattaatttggataatttgtctttaaggatgaaggaagatgaatggaaaaaagttattgatataaacttaagctctacatttttgctttgtaaatttggaataaaaaaaatgcttaaaaataaatatggaagaatagttaatgttacttcaatagtaggacacactggtaatttaggtcaagctaactatgctgcttccaaagcaggcattattggaatgtctaaaagtttagcaatagaatatgcaaaaaaaaatattacaataaactgtgtatcacctggctttatcgaaacaaaaatgacagataatattgccgaaaatatcagagccgttttaacatctaaaatacctatggccaaactaggaaaaggcgaagatgtctcaaatactgtagcttttttatgctcagaagctgcatcatatataacaggcgaaacaatacatgttaatggtggtatgtatatggcttgac

SEQ ID NO: 204229 - DNA, 736 bp, Unknown
  Bacterial polypeptide expressing nucleotide sequence isolated from the Sargasso Sea
atgattgattttaaaaataaaaaaataataattacaggtgcttctggagggataggaagatctctagttgaaaaatttgttaatttaaatggtaaagttttagctacaggaactaagattgaaaaattagaaaatttaaagaacgatttttcaaatataagtactttaaaatttgatatttctgaacattcaaaaattgaagaatttattgaaaaagcttatgaccaattgggtggtttagatattttaattaataatgctggaataaatattgataatttatctttaaggatgaaatatgaagattggaaaagagttattgatataaatttaggatcaacttttttattaaccaaatctgcaataaaaaaaatgttaaaaagtaaatatggaagaatagttaatataacttctatagttggacatactggaaatctcggccaagcaaactattctgcatctaaggctggaataataggtatgacaaaatctctagctgttgaatatgcaaaaaaaaatatcactttaaactgtgtatctcctggttttattaaaacccaaatgacagataatatatcagaaaatatgaaagaatttttatcttcaagaattcctatgtcaaaacttggcaatggagaagatgttgctaattctgtagcatttttgtcgtcagatgccgcttcctatattactggtgaaacaatacatgttaatggaggcatgtatatggcttgac

SEQ ID NO: 204230 - DNA, 748 bp, Unknown
  Bacterial polypeptide expressing nucleotide sequence isolated from the Sargasso Sea
atgtcgaagacagcattttcgggaaagcgcgcggtgataactggcgccgcgcaagggatcgggcgtgcaattgcggaacgtttgcgtgatggtggggcgcaggtttgcctatgggatgtggacaccgacctaggatcgaggatggcggagcaaatgggcaggagtgtagttgcgcgggctgtcgacgttgcggattataaggccgttgcagatgcggcaagagcaaccttcgagcaattcggcggtatcgatatcttggtaaacaatgcgggtatatcgggtccgaacgtgccaacctgggagtatccagtcgaagattggaaacaagtcctcgatattgatttaaacggcgtattctattgctgtcgttcagttgtaccgatcatgctctctggaaaatatggtcggattgttaatattgcgtcggtggcggggaaagagggaaacccaaacgcgcccgcttatagcgctgcgaaggcgggagtaattggcctgaccaagtcactcggtaaggagttggctgatacgaatgtcctggtgaattgtgtcacgcccgcagtcgccaaaacgcggatcttcgatcaaatgacggaagagcatattagctatatgctctcaaaaataccgatgggccggtttgttgatgtggcggagatagcggcacttgtcgcgtggcttagttcggacgagtgctcgttttctacaggggccgtatttgatatcacgggtggacggtcaacctattgat

SEQ ID NO: 204231 - DNA, 719 bp, Unknown
  Bacterial polypeptide expressing nucleotide sequence isolated from the Sargasso Sea
gaaaaaaattttgataacaggtgcaactggaggaataggaaggtcaattctagaaaaattcttatcgttagatgctacaattttggccactggaactaatacagaaaaattaaataatttaaaaaaagattttccaaaaattcatatttctcaatttgatatttctaaccatttagaaattgaaaaattcattgataattcttttttaacacttggtggaattgatatcttaataaataatgctggcattactcaagataatctttccttaagaatgaaagatgtagaatggcaaaaagttatagatattaatttaacctcaactttctacttatgtaaaaatgctataaaaaaaatgttaaagaataaatttggacgaattgtaaatataacttctattgttggacataccggcaatataggtcaagctaattactctgcttcaaaagcaggtattgtagctatgtcaaaaactctagccgctgaatacgctaagaaaaacataacaattaattgtgtgtcacccggttttataaaaactaacatgactgaaaatatatctgaggatatgaaaatctcacttttatcaagaatacctatgaatagactaggtactgctgacgatgtgtcaaatacggtagcttttttgtcttcagaattgtcatcatatattactggagaaactattcatgtgaatggagggatgtatatggcttgac

SEQ ID NO: 204232 - DNA, 353 bp, Unknown
  Bacterial polypeptide expressing nucleotide sequence isolated from the Sargasso Sea
aagatttggtagaataattaacattacgtcaattgttggtttaactggtaatgctggacaagcaaattatgctgcatcgaaagcaggcctaataggaatgaccaaatctatcgctaaagaagttgcatcacgaggcataacagcaaactgcattgcaccaggttggattgaaacatcaatgacagatgagttaagtgatgatgttaaaaataaatttttatcgcaaattccttctggaaaaattggtcacccaaaggatatagccaatacagtaatttttcttgcatcagatgaggcaggatatataactggacaaactatcacagtagatggtggtagaataatcaattaaa

SEQ ID NO: 204233 - DNA, 412 bp, Unknown
  Bacterial polypeptide expressing nucleotide sequence isolated from the Sargasso Sea
tataaatcttaactctactttttttatgagcaaatttgctattaaaaaaatgatgaaaaataaaaaaggcaaaattattaatataacatcggttgttggacatactggcaatttaggacaagcaaactatactgcttcaaaagctggtataattgcaatgtcaaaaagtttagctattgagtatgcaaaaaagaatataaatataaattgtatatctcccggatttattaaaactgctatgacagataaaatagatgaaaaatataagaatacgataatatcaaaaatcccgtcaggtagactgggtgaaccagaagatattgcaaatgcagttctttttttatcctcaagtttatcagattatattaatggagaaacattgcatgttaatgggggcatgtatatggcttga

SEQ ID NO: 204234 - DNA, 415 bp, Unknown
  Bacterial polypeptide expressing nucleotide sequence isolated from the Sargasso Sea
gatgtattaaatacaaacttaaagggggtttttctttgtacaaaatatgcttcaaaatttatgatgaaaaaaagaagtggcagtatcgtaaatatttcatctgttgttggaataattggtaatcccggtcaagcaaattattctgcagctaaagctggagttattggattcaccaaaacttgtgctaaagaatttgcttcaagaagtataaacgtaaatgcaatagctccaggctttatagaaacggaaatgactgaaaaacttaatactgaagaaatactcaaagttatccctttagggaaattaggaagttgtactcaaattgcaaacttagtgtcattcttagtttcaagtgatgcaggaagttacattacagggcaaacaatcagtatagacgggggtatgagtatttagt

SEQ ID NO: 204235 - DNA, 379 bp, Unknown
  Bacterial polypeptide expressing nucleotide sequence isolated from the Sargasso Sea
tatgcgataaaaaaaatgttaaaaaataaatatggtagaataataaatattacatctatagtcggtcatacaggaaatttgggtcaagcaaactatgctgcctcaaaagctggtataattgcaatgtcaaaatctttggctattgaatatgcgaaaaaaaatataactatcaattgtgtatctccaggctttatacaaactagcatgactgataatatagtagagagtataaaagctgtattaacttccaaaatacctatgtccaggttgggatcaggggaggatgtagcaaattcagttgcttttttatcatcagattctgcgtcttacattactggagagacaatacatgtcaatgggggcatgtatatgtcttgac

SEQ ID NO: 204236 - DNA, 700 bp, Unknown
  Bacterial polypeptide expressing nucleotide sequence isolated from the Sargasso Sea
atgtttagtttaaaaaatcaaatagtaattattactggaggagctagaggaataggcgaaggggtttgtgaagttttttgtaaagcaggagcaacagttgccttatgggatgtacttgatgaaggagaagaaactgctaaaaaaatttcattgaaaggaaattcaatattttttcaaaaagtggatgttactagttcagaaagtgtaaataatgcagtagagcaaataatttcaaaacatgggaaaatagatgttttaattaataatgcaggcgttattcgtgatagatcttttttaaaaatgagtccggaagaatggaatacagttataaatattaaccttaactctctttacgtaacttctaaagctgttttacctcatatgaggcaagctggctatggtagaattatatctgcatcttcgattaatggttttcaaggatcatttggtcaggcaaattatgcagccactaaggctggtgtatctggttttacaagagctttatgtaaagaggttggaaggtttggtgtcaccgtaaatgctgttgctcctggatttattaaatcattgatgtctgattctatgccagaagatattatcaaagctggagttgctcaaattccggttggaagaattggaacgcctgaagatatgggtcatgcatatttatttttagcatcaaaggaagcaagtttgtaag

SEQ ID NO: 204237 - DNA, 407 bp, Unknown
  Bacterial polypeptide expressing nucleotide sequence isolated from the Sargasso Sea
aatgtccaatacagattcattatcaggcaaagttgctttaatcactggagctagcagaggcattggtaaagaaattgctttagaactaagccgcctaggagcagaagtttttattaattactcttcttctgatgaaaaagctgaagaagttgtaaattcaataaaaaattctggaggtaaagctcataaattaaaatttgatgtttcaaaagaggattctgtcagtttagcttttgaagaaataatcaaaactaatggcaccattgatatcctcattaacaatgctggcattacgagagatggactattgatgagaatgaaatcggaccaatgggatgacgtactaaatacgaacttaaaaggagtttttctttgcacaaaatatgcttcaaaatttatgatgaaaa

SEQ ID NO: 204238 - DNA, 345 bp, Unknown
  Bacterial polypeptide expressing nucleotide sequence isolated from the Sargasso Sea
gaagggttattaatatttcatcagttgctggtcttatgggtaactctggccaagtaaattactcttcatcaaaatcagcaatggttggcttctcaagatctttagctaaagagcttgggtcttggaatattacttcaaatgttgttgcgcctggttttattgagacagatatgacaacctttttgaatgatgatgaaaaagttgaggtatgtaagaatataccaatgaaaagatttggtactgttcaagatgtagccaaatgtattgtgtttcttgcatctgataaagcaaattacataaccggccaaaccatttctgttgatggaggcttatttatgtattagt

SEQ ID NO: 204239 - DNA, 604 bp, Unknown
  Bacterial polypeptide expressing nucleotide sequence isolated from the Sargasso Sea
cttgttaaaaaaagaaaacccaagcattaaagtcaaaaaatttgatatagccgatcattcaaatatccaagaatttgtagaaaatgtttcacttgagctaggaggaatagatatattaattaataacgcaggtataaatatggacaacctttctctaagaatgaaggatgatgaatggaaaaaagttattgatattaatttaacctcaacttttttattggccaaacactcaatcaagataatgctaaaaaataaatttggaagagtggtaaatataacttccatagttggacacagcggtaatttgggtcaagcaaactattctgcttctaaagcgggtattatcggaatgtcaaaaagtttagctatagaatacgcaaaaaaaaatattacagttaactgtgtttcaccaggatttatagtttcaaatatgacaatgaatatagctgaaaaagttaagcttttcttaacctcaagaattccaatgggtaaactaggaacaggagaggatgtatcaaattgtgtagcttttttgtcttcagaatcagcttcttatattacaggagaaacagtacatgttaatggcggaatgtatatgtcttga

SEQ ID NO: 204240 - DNA, 397 bp, Unknown
  Bacterial polypeptide expressing nucleotide sequence isolated from the Sargasso Sea
tacttttttaatatccaaatatgcaatcaaaaaaatgttaaaaaataaatatggaagaatagtaaatataacttctatagtcgggcatactggtaatactggtcaagctaattatgctgcttctaaatcaggaataatagggatgactaaatctttagctattgaatatgcaaaaaaaaatataactttaaattgtgtatctccaggatttattcagtcaaatatgacagataaaattgtagagagtataaaagctgttttaacttcaaaaataccaatgtcaaaactaggaactggagaagatgtggctaatacagttgcttttttgtcatcagatgcagcatcttacattacaggagagacaattcatgttaacggaggcatgtatatggcttga

SEQ ID NO: 204241 - DNA, 721 bp, Unknown
  Bacterial polypeptide expressing nucleotide sequence isolated from the Sargasso Sea
aaaaaagctgtcattacaggtgccacaggtggtattggacactcaattttagaaaagttttattcggagggtgcgactgtgttaggttcaggtacgaacgaagaaaaattaaacaaacttaagaatgatttcaatggaataatattaaaaaaatttgatatatcgaaacatgatcaaattgaaaaatttgtagaaactgtttgcgatgaactaaagggctccccagatatactaattaataacgcaggtataacaaaagataatttatctttaagaatgtcacaaactgaatggcaacaagtaatagatgttaaccttacttccacttttttattatgtaagttttttttaaaaaagatgatcaaaagtaaatctggaaaaataataaatattacttcagttgttggtcacactggaaatgtaggccaagcaaattacgccgcttccaaatctggtattataggtatgagtaaaagtttagcactggagtatgctaaaaagaacataaatataaattgtatctcacctggatttattaaaacaaatatgactgaaaaaatagacccaaaatttaaagaattgattctcgcaaaaataccatcatatagattgggagaaccatcagatgtagctaatgttgctgcttttttatcatcagaaatgtcaaattatatcactggagaaacgattcatgttaatggaggcatgtatttaggttgac

SEQ ID NO: 204242 - DNA, 439 bp, Unknown
  Bacterial polypeptide expressing nucleotide sequence isolated from the Sargasso Sea
aacgaagagtggaaaagggtaatagatgttaatttaagttcaacattttatttaagtaaatgtgcaataaaaaaaatgttaaaaaataaatacggaagaattgtaaatataacttcagtagttggtcatactggtaatgttggacaagcaaactattctgccgcaaaagcaggcataataggaatgtcaaaatcattagctatcgagtatgcaaaaaaaaatattacgataaactgcgtatcaccaggatttattcaatcacgaatgacagataatattgtagaaagtgtcaaaaatattttacaatcaaaaattccaatgtctagacttggaaaaggtgaagatgttgcaaatagtgtcgcttttttagcatctgagtctgcttcgtatataactggagagacaatacatgttaatgggggcatgtatatggcttgac

SEQ ID NO: 204243 - DNA, 483 bp, Unknown
  Bacterial polypeptide expressing nucleotide sequence isolated from the Sargasso Sea
actgaagagaaacacggagcccctcaaatagtagttataagttccggaatacgtgcggattcaatagtgggtatgatgaaaacggaagattggaaaaatgttatcgataccaatttgacaggaacttttaatatatgcaaattggcggttcaatgtatgatgcgacaaaaatatggtcgcatcattactttaacctcccctattggtaaattcgggtttgctggacaagccaactatgcagcatcgaaagcggggcaagtggccctagtaaagtctttatccaaagaagtggcgagcagaaaaattactgtaaattgcgtatctcctggttttattgatacagatttcattgcagatttgacagatgatcaaaaggaagcctacaaaaaacaggtgcccttaaaacgattcggaacagcccaagatgttgccagtccagtactttttctttccgcaaaagaatcttcttacatcaccgggtca

SEQ ID NO: 204244 - DNA, 736 bp, Unknown
  Bacterial polypeptide expressing nucleotide sequence isolated from the Sargasso Sea
atgattgattttaaaaataaaaatattttaattacaggagcaaccggaggaattggcaatgaattagttaaaaaatttgtttcactaggtggaaatgttttagcaagtggaacgaaagcagaaaaacttgatgaattaaaaaaaaaatactcaaatattaaagtaaaaaaatttgacataatagaacatgaaagaatcgaagaatttatagataatgcccatttagaattggatggattagatattttaattaataatgccggaaagaatatggacaatctttctctaagaatgaaagatgatgaatggaaaaaagttatagacattaatttaacatcaacttttttactctcaaaacatgcaataaaaaaaatgttaaagaataagtttggaagaatcgtaaatatcacatctattgttggacacactggtaatttaggacaatccaattattcagcatctaaatctggtataattggtatgtcaaaaagtcttgcgattgaatatgcaaaaaaaaatataacaattaattgtgtttctccaggatttatagcttcaaatatgacaatgaatattgcggaaaaggttaaattatatcttacttcgaggatacccatggcaagacttggttctggagaagacgttgcaaattgtgtggcatttctgtcttctaaccaagcctcatatattactggcgaaacgttacatgttaatggaggcatgtatatgtcttgac

SEQ ID NO: 204245 - DNA, 718 bp, Unknown
  Bacterial polypeptide expressing nucleotide sequence isolated from the Sargasso Sea
atatataatagtaacaggcgctactggtggaataggaaattctataatcaaaaaattatatgatgtaggagcaaatattttagccacagggactaaagatgaaaagttacaagaattgaaaaaaaaatttcaaaatattcaaacattaaaatttgatatctcacaaactgaaaatttagaaaatttcattgaaaatgctacaaaaaaacttggaggaaaattggattgtatgattaataatgctggtattacccaggataacttggctataagaatgagcatagaagaatggaagagggtgatagacataaatctcacttcaacatttttaatcagcaagtttgcgataaaaaagatgcttaaaaataaaaaaggtaaaattataaatattacatccgtagttggacataccggaaatttaggacaaacaaactatacagcctcaaaggcaggtattattgcgatgtctaaaagtttagcgatagaatacgcaaaaaaaaatattaatattaattgtatatcaccaggctttatcacaacagccatgacagataaaatagatgaaaaattcaaagaggttataatctcaaagataccctcagcaaggttaggagaacccgaagatgttgctaatgcagttatttttttagcatcctcatattctgattacataaatggagaaacattacatgtaaatgggggcatgtatatggcttga

SEQ ID NO: 204246 - DNA, 445 bp, Unknown
  Bacterial polypeptide expressing nucleotide sequence isolated from the Sargasso Sea
gatgaatttaaaggaatggcaaaatgtaattgatattaatttgacatcaacttttctaatgagcaagtcagcaataaaaaaaatgcttaaaaataaatctggaaaaattgttaatattacatctgttgttggtcatactgggaatctgggacaggcaaattacacagcatctaaagctggtataattgcgatgtcaaagagtttagcgattgaatatgctaaaaaaaacataaatataaattgtatatctccaggtttcattaaaaccgcaatgactgataaattagatgataaatttaaagaggcgataatatcaaaaattccatctgctcgactgggagagccagatgatattgcaaatgcagtactttttttatgttcaagtcaatcaagctatataaatggagagaccttgcatgttaatgggggcatgtatatggcttga

SEQ ID NO: 204247 - DNA, 607 bp, Unknown
  Bacterial polypeptide expressing nucleotide sequence isolated from the Sargasso Sea
agaaaatttaaaaaaagattttccaaatattagtactttaaagttcgatatttctgagcattcaaaagttgatgaattcattgaaaaagcaaatgatcaattaggcggtttagatattttaattaataatgctggtataaataatgataacttatctttaaaaatgaaatttgatgaatggaaaaaagtcattgatattaatttgagttcaacatttttattaacaaaatctgcaataaaaaaaatgttaaaaaataagtatggaagagtaattaatgtaacgtcaatagttgggcacaccggaaatcttggacaggcaaattacgctgcatccaaagctggaattataggaatgactaaatcgctggccattgaatatgcaaaaaaaaatataactttgaattgcgtatctccaggctttattaaatctcaaatgacagacaacatatcggaaaatatgaaagaatttttatcttcaagaattcctatgtcaaaacttggtactggtgaagatgttgctaattctatagcatttttatcgtcagatgctgcttcttatatcactggagaaacaatacatgttaatggaggcatgtatatggcttga

SEQ ID NO: 204248 - DNA, 671 bp, Unknown
  Bacterial polypeptide expressing nucleotide sequence isolated from the Sargasso Sea
aaaaaaattatatgatgctggagctaatattttagcaacaggaacaaaaaatgaaaagttgaatgaactaaaaaaaaaattggaaaatatcaaagtattgaaatttgatatctcacaaactgataatttagaaaattttattgatgatgccacaaaacaacttggaggtaaacttgattgtttagttaataatgcaggcgttacccaagataacttagctatacgaatgaatatagatgaatggaaaaaagtaatagatattaatcttacatcgacatttttgattagcaagtttgcaattaaaaaaatgcttaagaataaaaaaggtaaaatcataaatattacatctgtagttggacatactggaaatttaggacaaacaaactatacggcctcaaaagcaggaattgttgcaatgtctaaaagtttagcaatagagtatgcaaaaaaaaatataaacattaattgtatatcaccaggttttattaaaacagctatgacagataaaattgatgaaaaatttaaagaggttattatctctaagattccttctgcaagattgggagaacctgaggatgttgctaatgcagttatttttttagcgtcttcacactctgattacataaatggagaaacattacatgtaaatgggggcatgtatatggcttgac

SEQ ID NO: 204249 - DNA, 334 bp, Unknown
  Bacterial polypeptide expressing nucleotide sequence isolated from the Sargasso Sea
ttgaatctttcaggaaaaatagctttagtgactggcgcatcaagaggtatcggtgaatctcttgctattggtttagcagatcatggaacagatgttattatttgtgacttggaaagtgaaagtaaaggattagctaatacacataaacaaatagaaaaaactggtaaaaagtgctggtcttattttcttgatgtcactaaaaaatctcaaattcaaaatatggttagcgatattctaaatgatattgggtcaattgatatccttgtaaataatgcaggtattcttactccaacatcattagaagatatagatgaagaaacttgggacagccact

SEQ ID NO: 204250 - DNA, 505 bp, Unknown
  Bacterial polypeptide expressing nucleotide sequence isolated from the Sargasso Sea
ggtgaagttgacgttttaataaacaatgctggggtaactcgagacaaccttttcatgaggatgagtgaagaagagtggaatgaagtactgaatataaatctgaatgctgctatggcactgactcgcctatgtattaaacccatgataaaaaaaaggtggggaagggtagtcaacattacctcagtggttggtgtaacaggtaatcctggtcaagcaaattatgcagcatctaaggccggtttgatcggaatgtcaaaggcaatcgctcaagaagttgctagtcgcggtattacgataaattgcgtggctccaggatttattctttcgtcaatgactgaaaacttgaaagaggaacaaaaacaaagaatcgttaataatattccgatgaaaaaaatgggatctgggcaggacgtagcatcggcagtaaaattcttagtatcggaggattcttcgtatatcactggacaaactttgcatgtaaatggtggccttacaatggtttgac

SEQ ID NO: 204251 - DNA, 511 bp, Unknown
  Bacterial polypeptide expressing nucleotide sequence isolated from the Sargasso Sea
atgattgatttgaaaggtcttaatataattgttaccggagccacaggagtaattggaaattcaattttagaaaaacttattcaagcaggttcaaatattttagcaacaggttcaaatgatgaaaaattaaacaaaattcaagatagatataaaaatatacatacattaaaatttgatatttcagatcataaaaaaattgaagaattcgtagaaaattgtaattctattatgtcaaataaaattgacgtgttaattaacaatgcaggtatcaccatagataatctctctataagaatgaaagaagacgagtggaaaagagtaattgatattaatcttacttcaacattcttaataactaagaatgttataaaaaaaatgctaaaatttaaaaatggtaaaataataaatatcacatctgtcgttggccactctggtaacataggtcaagcaaactatgccgcatcaaaagcaggaataattgcaatgtcaaaaagtttagcactagaatagg

SEQ ID NO: 204252 - DNA, 648 bp, Unknown
  Bacterial polypeptide expressing nucleotide sequence isolated from the Sargasso Sea
aaggaaatgttttagctactggaacgaatacagataaattagatgatctaaaaaaaaactttccaaatataaaggttaaaaaatttgatatatctgaacattcaagaatagaagagtttatagaaaatgtttctttggaattaggtggtctagatattctaattaataacgcaggagttaattcagacaatctatcattaaggatgaaagatgaagaatggaaaaaagtaattgatattaacttaacttcaacttttttattatcaaaaaattcaattaaaaaaatgcttaaaacaaaatatggaagaattgttaatattacatcaattgttgggcatactggaaatttaggacaagcaaattattctgcagctaagtcaggtcttataggaatgtcaaaaagtttggcaatagagtatgctaaaaaaaatattactataaattgcgtgtctccaggttttatagtttcaaatatgacatcgagtattgctgaaaaggtaaaattattcttaacctcacgaattccaatgggaaagcttggaactggagaagatgtatcaaattgtgtggcttttttatcttcagatcaagcctcatatataactggagaaactatacatgtaaatggtggcatgtatatgtcttgac

SEQ ID NO: 204253 - DNA, 490 bp, Unknown
  Bacterial polypeptide expressing nucleotide sequence isolated from the Sargasso Sea
atggaagaattaccaagaatagtattaattactggagcctcaagagggataggaagagctatagctctacgacttgcagaacaaggacataaaatagctataaattataattctcataaagaagatgctgaagaagttttaaaagaaataaataaaagaggctcttcggggatgatagtaaaagctaatgtttcaaaacttgaagaggtacaagaaatgattaaacaagtagaaaattctttaggaccagtagaaatactatataataacgcaggtattatttcagattcattactaatgagaatgaagcctgaagattttgataaagtcatagatacaaacctcaaagggacattttattgtaccaagctttgtataaacaatatgataaaaaatagatggggaagagtcataaatatttcttctgttgtaggtataagaggtaatattggtcagtcaaattattctgcttcaaaagcaggaattcatt

SEQ ID NO: 204254 - DNA, 582 bp, Unknown
  Bacterial polypeptide expressing nucleotide sequence isolated from the Sargasso Sea
ttaatttattaaagtttgatatgtccaatcatcagaacatagaaaaatttgtagaagactgcagtaacatattcaaggacaaaatagatatattaattaataacgcaggaattacccaggataatttatcaataagaatgaaggaagaggaatggagtaaagtaattgacataaatcttacctctacatttctaatcacaaaaaatgttattaagaaaatgcttaaatctaaaaacggaaaaattattaatattacatctgtagttggtcatacaggcaatattggacaagcaaattatgcagcatctaaggctggattaattgctatgtcaaaaagtttagcactagaatatggtaaaaaaaatataaaagtaaattgtgtatctccaggttttataatttcagaaatgacaaacaaaataagtgaccagcatactgagcttctaaaatcaagaatttcacttaataaatttggaaacccagaggatgtggcaaatacagttgtttttttaagttcagatttatctgattatattacaggtgaaacgatccatgtaaatggaggtatgtattttagttgac

SEQ ID NO: 204255 - DNA, 715 bp, Unknown
  Bacterial polypeptide expressing nucleotide sequence isolated from the Sargasso Sea
agtattaataactggagcttctggcggaataggtcaagaagttgcccgtcatatgtctaaacaaggagcagatataatattaactggtacaaatgaagaaaaattaaaaaaaatttcgtctgatttaggtcaaaagtctaaatatattgtagctgatttgagtaatgatcaacatatagacaatttgtctcaaaatgctgaaaattataatggtaaaattgatattttagttaataacgctggaataacttctgacaatctttttttaagaatgaaggacgaagagtgggataaggttttaaacataaatttgaattctaatgttaagttaacaaaaaaaataataagaggtatgattaaaagacgatttggaagaattatttttataacgtcaataattgggttttcaggcaacgctggtcaatcaaattatgcttcttcaaaagcagctttgtcaggattttcgaaatcaatcgcccttgaagttgctaataggggtattactagtaatttaatagcccctggatatatacaaactccaatgactgaaaaattaaatgaagatcagaaaaaaaatattctagaaaaaattccagtttctcgtttaggcgaaccacaagatatagcttcagcatgtgtgtatttagcaagtgatgaagctagttttgtcacgggttcaaccttgcatgtaaacggtggcatgggaatgttttaa

SEQ ID NO: 204256 - DNA, 739 bp, Unknown
  Bacterial polypeptide expressing nucleotide sequence isolated from the Sargasso Sea
atgaatgatttaaaagaaaataatataatcgtaactggtgcaactggtggaataggaaattctataattaaaaaattatacgatgcaggagcaaatattttagccacagggacaaaagatgaaaagttacaagaattgaaaaaaaaatttcaaaatattcaaacattaaaatttgatatttcacaaactgacaatttagaaaatttcattgaggatgctacaaaaaaacttggtggaaaattggattgtatgattaataatgctggtattaccaaggataacttagctatacgaatgagtatcgaagagtggaaaaaagtgatagatgttaatcttacttctacgtttctaattagtaagttcgcaataaaaaaaatgcttaaaaataaaaaaggtaaaattataaatattacatctgtagttggacatactggaaatttaggacaaacaaactatacagcttcaaaagctggtatagttgcgatgtctaaaagtttagcgatagaatacgcaaaaaaaaatattaacgttaattgtatatcaccaggctttatcaaaacagctatgacagaccaaatagatgaaaaattcaaagaggttataatttccaagataccttcagcaaggttaggagaacctgaagacgttgctaatgcagttatttttttagcatcctcacattctgattacataaatggagaaacattacatgtaaatgggggcatgtatatggcttgac

SEQ ID NO: 204257 - DNA, 403 bp, Unknown
  Bacterial polypeptide expressing nucleotide sequence isolated from the Sargasso Sea
aacatcaacttttttgatgagtaaatttgcaataaaaaaaatgttaaaaaataaatctggaaaaattgttaacatcacttctgttgtaggtcatacaggtaatttgggacaggccaactacaccgcatcaaaagctggaatagttgcaatgacaaaaagtttagcaattgaatatgctaagaaaaatattaatgttaattgcatatcaccagggttcattaaaactgctatgacagataaaatagatgagaaatttaaagagactataatatcaaaaataccttctgcacgacttggagaacctgatgatattgcaaatgctgtagtttttttatgctctaaccaatcaagctatattaatggggaaacattgcacgtaaatggtggaatgtatatggcttga

SEQ ID NO: 204258 - DNA, 574 bp, Unknown
  Bacterial polypeptide expressing nucleotide sequence isolated from the Sargasso Sea
ctcttaaattcgaccatctctgaacataataaaattgaagaatttatcgataatgccatttctcaattaaatggattagatatcctaataaataatgctggtataacaattgataacctttctttaagaatgaaacctgaggagtggcaaaaagtaattgatattaatttaacttcaactttttacttaagcaaacatgctataaaaaaaatgttaaaaaataaatatggaagaattgttaatgtaacatcaattgttggtcatactggaaatcttggtcaagcaaattactcagcttccaaagcaggtattgttgcaatgtcaaaaagtttagcaacagaatatgcaaaaaaaaatattactattaattgtgtatctccaggttttatacaaacaaaaatgacagatagtatagttgagagtataaaagcggtactaacctctaaaattccgatgagtaggctcgggactggagaagatgtggctaatacagtagcatttttatcatctgaacaagcttcatatataactggtgaaacagttcacgttaatggtggaatgtatatggcttgac

SEQ ID NO: 204259 - DNA, 478 bp, Unknown
  Bacterial polypeptide expressing nucleotide sequence isolated from the Sargasso Sea
aacaacgcaggcatcacccaggataacctgatgatgcgtatgaaagcggaacaatggtcgaaggtcattgatgtcaatctcaacggggtttttcacatcacccgtgcggttcttaagacgatgatgaagcagcgtagcggaaaaatcatcagtatttcctcagtggtaggattttctggcaatcccggacaggtgaactacagttccaccaaggccgccttggttggattcaccaagtctcttgctcgtgaagtcggttcccgaggaattacagtcaatgctgtggctccaggattcatcgatacggccatgacccaggctctaaacgaaacccagcaggaagaaattctcaggcagattcctttaaaacggatgggtgtgccggaagacattgcccatgccgtcgaatttctggcctcggaaaaagcggattacattactggtacggttttgcatgtcaatggtggcatgtattagt

SEQ ID NO: 204260 - DNA, 444 bp, Unknown
  Bacterial polypeptide expressing nucleotide sequence isolated from the Sargasso Sea
tgatgagaatgaaatcggaacaatgggatgacgtattaaatacaaacttaaaaggagtttttctttgtacaaaatatgcttcaaaatttatgatgaaaaaaagaagtggtagtatcgtaaatatttcatctgttgttggattaattggtaatcctggtcaagcaaattattctgcagcaaaagctggagttattggattcaccaaaacttgcgctaaagaatttgcttcaagaggtataaacgtaaatgcaatagctccaggatttatagaaacagagatgactgaaaaacttaatactgaagatattcttaaagtaattcctttagggaaattaggaagttgttctcaaattgcaaacttagtatcattcttagtttcaagtaatgctggaagttacattacaggacaaacaattagtattgacggtggtatgagtatttagt

SEQ ID NO: 204261 - DNA, 418 bp, Unknown
  Bacterial polypeptide expressing nucleotide sequence isolated from the Sargasso Sea
tattatgatgtccatctttacggaacgttccaattgagtaaaagagcattgaagatgatgctaaaaaataaatggggtcgtataatcaacatatcgtctgcctcagcttcgataggtaatagaggtcaatctaattatgcagctgctaaagcgggtgtagaagcatttactaaatctctagctaaggaagttggtaaaagggacataactataaatgctgttgctccaggcttcatttcaactgatatgactgaaaataataaaggagtaaatgcagattatttagtaaaagaaataccactggggagatttggtaaacctgaagaagtggcttctttaattagttttatatgttctgatggggcttcttatataactggacaaaccatacatattaatggtggtctttacatgtagg

SEQ ID NO: 204262 - DNA, 739 bp, Unknown
  Bacterial polypeptide expressing nucleotide sequence isolated from the Sargasso Sea
aatgattaatttaaaaaatttaaatataattttaactggtgctacaggcgtcataggaaactctattctcgacagattgattttagcaggagcaaacgttctagcaacaggtacaaatgagcaaaaattaaaaataattcaagagaagtataaagatttaaatgtagtaaaatttaatatatctgatcatgggaaaatagagcaatttgttgaagattgtggcaaaatattttcgaataaaatcgatgttttaataaacaatgcaggtatcactcaagataatttatccttgagaatgaaagaaaatgaatggaaagaagtaattgatataaatttaacttcaacgtttttaattactaaaagtatactaaaaaaaatgttaaaattaaaaaatggaaagataattaatgttacatctgtagtagggcatacaggtaatattggtcaggcaaattacgcagcatcaaaagcgggtattatagcaatgtcaaaaagcctagctcttgaatacggaaaaaaaaatattactgtaaattgtgtatctccaggttttattgtctcagacatgacagccaaaattagtgaggaacatacagatttaatgaaatcaaggatatcactaaataagtttggtaatccagaggatgtagctaattcaattgtttttctgtgttctaatctatcagattatataactggcgaaacaatacatgttaatggtggtatgtattttagttga

SEQ ID NO: 204263 - DNA, 478 bp, Unknown
  Bacterial polypeptide expressing nucleotide sequence isolated from the Sargasso Sea
atggctaatttaaatttaaaaaataagtctgctttagtaactggtgcttcaggtgcaattggcgagtctatagcaaaaaaactctattcattaggtgccaatgtaattgttactggtacaaacaaaaaaaaagttatggatttagaaaaaaaattaggatcaaaaagcctaggggtagttgcagacttatgtaatgacgacgatataaataatctttatagttcatcaattaaaaaatttaaatcattagatattttagttaataatgctggtactaaccaagatgctttgagtattagaatgactaataaacaatgggatgaagtaattaatgtaaatctttctgcaacatttaaattatctcaattggcaataaagtctatgataaaaaaaaaatggggaagaattataggtattagttctattattgggataggaggaaatattggtcaggctaactatgcagcatctaaagccg

SEQ ID NO: 204264 - DNA, 581 bp, Unknown
  Bacterial polypeptide expressing nucleotide sequence isolated from the Sargasso Sea
aaatacaaaaaattttgatatttcaaaacttaataatatcgaaaattttgtcaacgaagtttcagatatacttagtggcggacctgatatcctaataaataatgctggcattacaaaagataatttatcattaagaatgaatatgcaagaatggcaaaatgttatagatttaaatctgacatcaacttttcttctttgtaaatatactttaaaaaaaatgatgaaaaataaatacggtaaaattgttaatattacttcagtagttggtcatacaggcaatgttggtcaagcaaattacgcagcatcaaaatcgggaattataggtttctccaaaagcttagctttagagtatgcaaaaaaaaatattaacataaattgtgtatctccaggatttatagaaactaatatgactagtaaaattgatgaaaagtttaaagaacagataatttcaaaaataccatcaaataagttaggaaaacctgaagatgtagctaatgtagtagggtttttgtcatcctatctatctgattatataactggtgaaacaattcatgttaacggggggatgtatttaggttgac

SEQ ID NO: 204265 - DNA, 407 bp, Unknown
  Bacterial polypeptide expressing nucleotide sequence isolated from the Sargasso Sea
tttgacttcaacttttttattatcaaaatttgctataaaaaaaatgcttaaaaataaatatggaaaaatcgtaaacattacatcagtaataggacataccggaaatgttggtcagtctaattacgcggcatcaaaagctgcaattatttcaatgtcaaaaagtttagctttagaatatgcaaaaaaaaatattacagttaactgtatatctccaggctatataacaacaaatatgacagaccaaattaatgaaaaatggaaggaaattattaaatcaaaaattcctatggataagtttggtttgcctaaagatgttgcaaatacagtaatattcttatcatcggagtcagcaagctatattacaggacaaactatacatgttaacggcggcatgtatatgggttgac

SEQ ID NO: 204266 - DNA, 712 bp, Unknown
  Bacterial polypeptide expressing nucleotide sequence isolated from the Sargasso Sea
attgttacaggcgcttcaggtggaattggaaactcaataattgaaaaattaaatcaatctggcgcaaatattttagcctcgggcacaagaatagaaaaacttgaggaactaaaagctaaatataaaaacattaaaatattaaagtttgatatttctcaaagcgataaaatagaagagtttgttgaaaatgcgactaaacaacttggtggtagtttagattgtataatcaataatgcaggcatcacccaagataacttagcaataaggatgagcttagatgaatggaaaaaagtaattgatgttaacttaacatcaacatttttaatgagcaaatcagcaattaaaaaaatgcttaaaaataaatctggcaagatagttaatataacttctgttgtcggacatacaggtaatttaggacaaaccaactacacagcgtctaaagcaggaataattgcaatgtcaaagagcctagctatggagtatgcaaagaaaaatataaatataaattgtatttcacctggctttatcgaaacagcaatgacagataaattagataataaatataaagaggctataatatctaagattccttctgcccgactaggaaagccagatgatattgcaaatgctgtactttttttatgctctggtcattcaagttatataaatggagaaaccttgcacgttaatggaggcatgtatatggcttgac

SEQ ID NO: 204267 - DNA, 631 bp, Unknown
  Bacterial polypeptide expressing nucleotide sequence isolated from the Sargasso Sea
ctccacgaatgcaggaggtgtgcaattgatcgaccaggcgcttgggcctagtggcaaaggtatagaaatgcggatagacaatgatgaatccgtggcccaggcgttttcaaaaatggaagaactcgaagagtccccttgtattttgattaataacgctggaatcacggccgataatctcatgatgcggatgtctagcgaggaatggtccagtgtgatcgatactaatgttaacggcctttaccgagtgactaaacctcttgttaggcagatgatgaaaaatcggtggggtagaatcgtgaatataagctctgtggtggctcgtatgggtagcccgggacaaacaaactatgtggcgagcaaatcagcaattgaaggttttacgaagtccctagccttggagttggcgtcaagaaatataacggtgaatgctttggctcctgggttcatcgaaacagacatgacttccgtgctcgacgatgatcaaaaagagagaattatggaaaagatcccgttgggccgaatgggacaggccaaagaggttgcagcggctgtagcatttttgatttcagatgatgcggcctacatcaccgggcaaacactgcaaataaatggcggtctctacaattcttag

SEQ ID NO: 204268 - DNA, 499 bp, Unknown
  Bacterial polypeptide expressing nucleotide sequence isolated from the Sargasso Sea
tatgattgatttaaaaaatttaaatataattgtaactggagcaacaggagtaataggcaactctatacttgataaattagttttagctggatcaaaagttttagctacaggcacaaatgaggaaaaacttaaaatgcttcaagaaaaatataaaagtttaaccactttaaaatttgatatttctaaacatgacaaaataggggaatttgtcgaaaattgtaataaaattttatcaaataaaattgatatattgattaataacgctggtattacacaagataatttagctataagaatgagtgaggaagagtggaaaaaagtaattgatattaatctaacttcaacttttttaattacaaaaaatgttattaagaaaatgattaaatttaagaatggaaaaattattaatattacttcagtggttggacactcaggtaatattggtcaagccaactatgcagcatcaaaagctggtttaatagctatgtccaagagttta

SEQ ID NO: 204269 - DNA, 502 bp, Unknown
  Bacterial polypeptide expressing nucleotide sequence isolated from the Sargasso Sea
ggggcttgatatccttattaataacgctggaattaattctgataatttatctttgagaatgaaagatgatgaatggaaaaaagtaattgatattaatttaacttcaacatttttattatctaaaaactcaattaaaaaaatgttgaaaacaaaatatgggcgaattgttaatattacttcaatagtaggccacactggaaatttgggtcaagcaaattactctgcagccaaatcaggtctaataggcatgtcaaagagtttagccatagaatatgcaaaaaaaaatataactataaattgtgtatctcctggttttatagtttcaaatatgacttctagtatagcagagaaggttaaattattcctaacatcaagaattccaatgggtaagcttgggactggtgaagatgtatcaaattgtgtagcttttttatcttccgaacaagcttcctatataaccggagaaactatacatgtaaatggtggaatgtatatgtcttga

SEQ ID NO: 204270 - DNA, 739 bp, Unknown
  Bacterial polypeptide expressing nucleotide sequence isolated from the Sargasso Sea
tatgataaacttaaaaaacctaaatatcattttaactggcgctacaggtataataggtaactctattcttgaaaaattgattttagctggttctaatgttttagcatcaggcacaaatgagcaaaaattaaaattaattcaagataagtataaagatttaaatgtacttaagtttgatatttcaaatcacaaaaatattgatcaattcgtagagaattgtagtaaaattttttcaaataaaattgatgttttaattaataacgcaggtatcactcaagataacttgtctattagaatgaaagaggaagaatggaaaaaagtaattgatataaatctaacctcaacattcttaatcactaaaaatgttataaaaaaaatgcttaaatcaaaaagtggaaaaataataaatgtaacatctgtagtaggtcatacaggtaatattggtcaagccaactatgctgcatctaaatctggtataatagcaatgtcaaaaagtctcgctattgaatatggaaaaaaaaatattacagtaaattgtgtgtctcctggttttatagtatctgaaatgactgctaaaatcagtgaagagcacacaaatttaatgaaatcaaggatatctctaaataagttcggtagtccagaagatgttgcaaattcgattgcttttctaagttcaaatctttcagattatataactggagaaactatacatgttaatggaggcatgtattttagttga

SEQ ID NO: 204271 - DNA, 209 bp, Unknown
  Bacterial polypeptide expressing nucleotide sequence isolated from the Sargasso Sea
taattgtgtatcgccaggctatataacaaccaatatgaccaatcaaatcagtgaaaaatggaaagagattattaaatctaaaattcctatggataagtttggtttacctaaagatgttgcaaatacagtaatttttttatcttcagacgatgcaagctatataacaggacaaactatacatgttaatggaggcatgtatatgtcttgac

SEQ ID NO: 204272 - DNA, 670 bp, Unknown
  Bacterial polypeptide expressing nucleotide sequence isolated from the Sargasso Sea
tcaaaatccggggctcatgttatctgcattgcgagaactgaaaataaaattattgacctggtagagcaaatcaggaaagataatggttcagctgattatatttcatgcgatgtaagtgatagtgatgctttttcaaattctataaataccgttataaaagatcatggtaaaatagatattttaattaataatgcaggaatcactcgcgatgcattacttatgagaatgactgaagaacaatgggaaaaagtgataaatactaatctcaaaggagcattctatggtatgaaatctgtaataaggtcaatgatgaaaaataaatttggaagaataatcaatatcacttccatagttggtatcacaggcaatgctggacaggcaaattacgccgcatcaaaagcagggttgataggtatgacacaatctattgcaaaggaagtaggcagtagaggaattactgttaattgtatagctccaggctggatagatacagaaatgacagatgagttaccagaaaattcgaaaagcacgttattagatagaatccctcttgggaaaattggtaagccagaggatattgcatatacagcattatttttagcttctaaagaagcgaactacattacaggccaaactatcacagttgatggtggtcgaataataaattaaa

SEQ ID NO: 204273 - DNA, 498 bp, Unknown
  Bacterial polypeptide expressing nucleotide sequence isolated from the Sargasso Sea
gagagcgagaaaccggagcatatgtgcatatgacatccacatctggcctcataggaaactttggacaggctaactatgcagcggccaaacttggaatcgctgctctgtctaagagtatagctcttgatctcggacgttataatgtgagatcaaattgcattgctccttttgcgtggacacgaatgataggaactattccaatcacggatgaggctcaaaagcagcgaatagagcgcctaaaggccatgacaccagccaaaattgctccaatggcagtttacttgtgctcagacgttgccaaggaggtttcgggtcaaatttttgcagttcgaaataatgaaatttttctaatggggcaaaatcgacctttaaggtccatacaccgtggagaaggctggtctcccgagaccattgctgagcacgccatacccgcgtttaaacctaatttttactcattggaccgatcgcaagatatttggccatgggatccagtataaa

SEQ ID NO: 204274 - DNA, 481 bp, Unknown
  Bacterial polypeptide expressing nucleotide sequence isolated from the Sargasso Sea
attggcgggtataacaatggataacttatctttaaggatgaaagatgaagagtggaggaaagtgattgatataaatttaacttcaactttctacttatgtaagcatgctataaaaaaaatgctaagaaataaatatggaagaattgtcaatattacatctattgttggtcatacaggaaatttaggacaggcaaattattctgcatctaaagcagggatggtagcaatgtctaaaagtctagcaattgagtatgcaaaaaaaaatattacagtaaattgcgtttctccaggatttattcaatcaaagatgacagataaaattgttgaaagtataaaagctgttttaacttcaaaaattccaatgagcaagctagggacaggtgaggatgtatcaaatacagtagcttttttatcttctgatgcagcttcttatatcacaggagaaacaatacatgttaatggaggcatgtatatggcttga

SEQ ID NO: 204275 - DNA, 622 bp, Unknown
  Bacterial polypeptide expressing nucleotide sequence isolated from the Sargasso Sea
atgattgatttaaaaaatttaaatataattttgacaggtgctacaggtgtaattggaaactcaattttagacaaacttgtttcaggcggatcaaatattttagcttcaggaacaaatgagcaaaaattacaaaaaattaaagaaaagtataaaaatgttaacattctaaaatttgatatatcagatcaaagtaaaatagataagtttgtaaatgattgtggagaaattttctctgacaaaatagatatattaataaacaatgcaggcatcactcaagataatttatctattagaatgaaagaggaagaatggaaaaatgtaatcgatattaatttaacctctacttttttaattactaaaaatattataaaaaaaatgttaaaatcaaaaaaaggtaaaattattaacgtaacatcagtagtaggacacacaggaaatattgggcaagcaaactatgctgcatctaaagcaggtattgtcgcaatgtctaaaagtttggcacttgaatatgggaaaaaaaatataactgttaattgtgtatctcctggatttataatttccgatatgacagctaaaataagcgaagaacacacagaggtattaaaatctcgaatctcgtgaa

SEQ ID NO: 204276 - DNA, 369 bp, Unknown
  Bacterial polypeptide expressing nucleotide sequence isolated from the Sargasso Sea
aaaaaatgttaaagaacaagtatggaagaattgtaaacatcacatcagttgttggacatactggaaatttaggtcaatcaaactatgccgcttcaaaagctggaataattggtatgtcaaaatctttagccattgaatatgctaaaaaaaatataacaattaattgtgtttctccaggatttatacaatcaaaaatgacagacagcatcgttgaaagtattaaagctgttttaacttcaaaaattccaatgtcaaaactaggctcaggcgaggatgttgctaatacagttgcatttttagcctctgacaaagcctcatacataactggagaaacaattcatgttaatggtggcatgtatatggcttgac

SEQ ID NO: 204277 - DNA, 529 bp, Unknown
  Bacterial polypeptide expressing nucleotide sequence isolated from the Sargasso Sea
atgatagatttaaaagacttaaatgtcatcttaactggagccacaggtggtattggaaattccatattagaaaaattagttgcaggaggtgcaaatgttgtagctagtggaactaatgaaaataaattaaatttaataaaagaaaaatatcaaaaagttaatattcaaaagtttgatatatctaatcatgagcaaatagaaaattatattgataaatgtaatgaaattctagacaacagaatagatgtactgattaataatgctggcattacaagagacaatctaacaatcagaatgaaagacgaagagtggaaaaaagttatcgatgtaaatttaacttcaacttttttgttaagtaaaaacactataaaaaaaatgttaaaaaataaaaaaggcaaaataattaatattacttcagttgttggacattctggcaatattggtcaagctaattatgcagcgtcaaaatcaggaatagtggggatgtcaaaaagtttagctttagaatatggaaaaaaaaatattaaag

SEQ ID NO: 204278 - DNA, 661 bp, Unknown
  Bacterial polypeptide expressing nucleotide sequence isolated from the Sargasso Sea
atgtgtgaatttaaaaataaagttgctctcattacaggagcatctggagcaataggaaaagatattgcttctactttgaataaaagtggggcttcaattattttatgtggtactaaaatagatgttttagagaatatagctagagatctgtctggtaaagtagaaatcattactgaaaatataaacaattttgaaaattttgaaaaatcattgttagaaaaaaaacttaatgttgatattttagttaacaatgctggtattacaaaagataaccttttgatgagaatgaaggcagaagatatagatagtgttatcaatataaacctaatatcactaataaaaatttctaaatgcgtattaaaaaacatgatgaaacaaaaatttggaagaataatctctatttcatccgttgttggatttacaggtaatccaggtcaagttaattattgtgcatccaaatcaggaattattggttttactaaatctttagcttatgaggtctcttcaaggggtattactgttaatgcaattgcaccaggctacataacttctgctatgactgataaaataagtgatctaaaaagagatgccattatatcaaatatacctgttggtagaataggcataccatcagatatctcgaatgcagtattattttagc

SEQ ID NO: 204279 - DNA, 652 bp, Unknown
  Bacterial polypeptide expressing nucleotide sequence isolated from the Sargasso Sea
ctggcgccacgttgctctatcgggaacgcgcgcagagtcgttaaatgccttgttatccgaactgggcaaaaatgctcacgtggcgccggccgatctatcggacgctcagtccgtagaaggtctgatcggcttggccgaagaagttatcggtggtgttgatatacttgtaaataatgccggcttgacacgtgatatgttgtcgatgcgtctgaccgacgatgattggcagtcagttatggatgtgaatttgactgctaccttccggctttcgcgtgcggtcattcgcggcatgataaggcgccgctggggacgcattattaatattgcatccgtcgttggggttacggggaatgcaggtcaagctaattatgcagcctcaaaagcagggatgatcgggatgtcgaaatcgattgcacaagaggttgcgagccgtggaatcactgtgaattgtgtagccccggggatgattgtgacggcaatgacggatgtgctttccgataatcagaaggcccgtattcttgatgttgttccggctggtaggcttggtgaggcggaggacatcgcggcgggagtgctatatttggcaagtaaagaagcttcttatgttacaggccaaaccatccatattaacggtggaatgacgatgatttaa

SEQ ID NO: 204280 - DNA, 377 bp, Unknown
  Bacterial polypeptide expressing nucleotide sequence isolated from the Sargasso Sea
tatgtctcagatctgtctcgtcacaggcgcaagccgcggcatcggcaatgcgattgctattgaactggcaacgaaagggtacacagtaatcggcacagggacatcaatagccagcgcggagaaggtaaccaacgacttgaggaccgccggagctgagggccggggtgccgcactggacgttaacgacccagagcaagttgaatctgtcatcaaagacataaccgatgagttcggtccgattagcgtcctggtcaacaatgcgggcgtgactgaagacaacctgttgatgcgaatgaagccatcacagtggcaacgaactcttaacacgaatctcgcgtccgtcttttctcttacaaagctctgccttaaaggcatga

SEQ ID NO: 204281 - DNA, 472 bp, Unknown
  Bacterial polypeptide expressing nucleotide sequence isolated from the Sargasso Sea
tgtaattcgagacaggtcttttttaaaaatgtcacctgatgagtggaatactgtaataaatattaatctaaacgctctatatattacatccaaagcagtattgcctcatatgagagaggctgggtacggaagaattatttctgcatcctctattaacggctttcagggggcatttggacaagctaattatgcggcaactaaagcaggagtttctggatttacaagagcattatgcaaagaagttggtcgttttggagtaacagttaatgcagttgctccaggatttataaaatctttgatgtcagattcaatgcctgaggaggtaattaaagctggcatagctcaaatacctgtaggcagaataggaaccccagaggatatgggttattgttatttatttttagcttcaaaagaagcagggtttataagtggaataacccttcatgcaaatggaggagcaatgccaatgtaa

SEQ ID NO: 204282 - DNA, 445 bp, Unknown
  Bacterial polypeptide expressing nucleotide sequence isolated from the Sargasso Sea
ggaaactttggggcaggccaactatgcggcggccaaacttggaatagctgctctgtctaaaagtatagctctcgatctcggacgttataatgtgagatcaaattgcatcgctccttttgcgtggacacgaatgataggaactattccaataacggacgaagctcaaaagcagcgaatagagcgcctaaaggccatgacgccagcaaagatcgctccgatggcagtctacttgtgctcagacgttgccaatgaagtttcgggccaaattttcgcagttcgaaataatgaaattttcctgatgggtcaaaatcgacctttaaggtccatacaccgtggagaaggctggtctcccgagacgatcgctgaacacgctatacccgcgtttaaacctaatttttactcattggaccgatcgcaagatatttggccctgggatccagtataa

SEQ ID NO: 204283 - DNA, 733 bp, Unknown
  Bacterial polypeptide expressing nucleotide sequence isolated from the Sargasso Sea
atgaacttacaaaataaaaaagtattaattactggagcaacaggcggtataggaaattgtttggtgaaaaaatttcacgatcacggatcgttaataatggctactgggacaaaagaggaaaaactagaaaatcttaaaaaaaattttagtaagatagaagtagaaaaattcaaacttgatgagcacagtaaaattgaagaatttattgaaaaagtttataaaaagttaaacggtatggatatagttattaataatgcgggtataactttagataacctttctataagactttccgaagaaaattggaaaaaggtattagatgttaatttaacctccacttttttaatgtgtaaacattctataaaaaaaatgcttaaacaaaaatatggaaaaataattaatattacatcaatagttggacacacaggtaatttgggacaagctaattactcagcttcaaaagctggaattgttgccttttctaagagtcttgcaatagagtatgcaaaaaagaatattaatatcaattgcatatcaccaggttttattcaaactgaaatgacagataacattaatgaagaaatgaaaaaaagtttaattagtaaaattccttctggctcacttggatcaggcgatgatgttgctaattgcgcagtatttttagcctccgatatggcaaattatattaatggcgagaccattcatgttaatggcggaatgtatatgtcttgac

SEQ ID NO: 204284 - DNA, 487 bp, Unknown
  Bacterial polypeptide expressing nucleotide sequence isolated from the Sargasso Sea
atgaacgacatatataagaataaagttgttttagttacaggtgcaagccgtggaattggagaggcaattgcaaataaatttgccttgttgggcgcgcacgtaattggtactggaacaacaactaaatctgcacagaggattaccgataaatttgtggataaaaatctttctggcacaggtcttgtgctaaatatatttgaaaaaaaatcagttgagacgttcgctaaaattattcaagaaatggatgcaccaagtattctcattaataatgcaggcgttacaagggataatttactgatgagaatgaaagatgatgaatgggacgatgttattaatgctaatttaacaggaatgtttcgtattactagattgtgtctccgtccaatgatgaaagcaaaatatggaaaaattataaacataacatcggtggttggccttactggaaatccggggcagacaaactacgcagctaccaaggctggaatga

SEQ ID NO: 204285 - DNA, 739 bp, Unknown
  Bacterial polypeptide expressing nucleotide sequence isolated from the Sargasso Sea
atgattaatttaaaaaacttaaatataattttaactggagctacaggcgttataggaaactccatattagataaattagttatgtcaggttcaaatgttatagctacaggaacaaacgaggagaaattaaaaaaaattaaagaaaaatataaaaatataaatataattaagtttgatatatctaatcatgatgaaatcgatagttttgttgataattgtagcaaagtattttcaaataaaattgatatattaattaataatgctggtattactaaagataatttatcaataagaatgaatgaagaagaatggaaaaaagtaattaacatcaatttatcctcaacattttttattacaaaaaatgtaattaaaaaaatgttaaagttcaaaaatggtaaaatcataaacataacttcagttgttggtcattctggcaacataggacaagctaattatgcagcttctaaggcaggtattgttgcaatgtccaaaagccttgctttagaatatggaaaaaaaaatattaaagtaaattgtgtatccccagggttcattatatctgaaatgacagataaaattagtgaagaacacacagatttgttaaaatctagaatttctcttaataaatttggtaaaccagaagatgtggcaaatacgattgcatttttaagttcaaatttatccgattatatcactggggagacaatacatgttaatggaggcatgtattttagttgac

SEQ ID NO: 204286 - DNA, 333 bp, Unknown
  Bacterial polypeptide expressing nucleotide sequence isolated from the Sargasso Sea
aacataacatctgttgttgtcacacaggcaatttaggacaggctaattatactgcttctaaagcgggtatcattgctatgtcaaaaagtttggcaatagaatacgctaagaaaaatattaatataaattgtatttcaccaggatttatcaaaactgcaatgaccgataagttagatgataaatataaggatgagattatatcaaaaattccttcatctcgcctaggagaaccagacgatattgcaaatgctgtactttttctgtgctcaaatcaatcaagttatataaatggtgaaaccttacatgttaatggaggcatgtatatggcttgac

SEQ ID NO: 204287 - DNA, 580 bp, Unknown
  Bacterial polypeptide expressing nucleotide sequence isolated from the Sargasso Sea
caagacattaaaatttgatatttctcaaactgacatgatagaaacttttattgataatgcctctaaagaactcaatggtaatattgattgtttaataaataatgcgggaattacccaagacaatttagctattagaatgaatttagatgaatggaataaagttatagatataaatctaacttcgacgtttttaatgtgtaagtttgcaatcaaaaaaatgttaaaaaataaaaaaggaaaaattattaatattacatctgtggtaggtcacacaggaaatttaggtcaatcaaattataccgcttcaaaagctggaattattggaatgtccaaaagtctagcaattgaatatgctaagaagaatataaatataaattgtatttcccctggatttattaaaactgcaatgacagaaaagatagatgaaaggtataaagagagcattatttcaaaaataccctctgctagattaggagaaccagatgatatagcaaatgcagttctttttttagcatctgatcaatcagattatattaatggtgaaacattacatgtaaatgggggcatgtatatggcttga

SEQ ID NO: 204288 - DNA, 580 bp, Unknown
  Bacterial polypeptide expressing nucleotide sequence isolated from the Sargasso Sea
tttgattcctcttaagttagatgtcacttcaagagatgatattgcagagtgctttgaaatgctgaaatcaaaagatttgttacctaaaatacttataaataatgctggaatagcttcagatcagatatttctaaggatgaaaaatgaagactgggacaatgtaataaatacaaatttaaacggagtatttaatctttctaaaatttttgttaaaaatatgataaaacataaagaaggtagaattataaatatctcatctatttctggtttaatggggaatccaggacaagttaattattcgtcatcaaaagcagcattaaatggatttactaaatctttagcaaaagaattaggaacaagaaatatcacagttaactgtattgctcctggatttattgagactgacatgacctcttatattgatcagaatgaaaaaaataaacttttgaacagcattccattaaagagattaggtaaagcagaagatgttgcaaaattagtctcatttctggcatcaaataaagcttcatacataacgggtcaaacaatttcaattgacggcggtttattgatgaactaa

SEQ ID NO: 204289 - DNA, 311 bp, Unknown
  Bacterial polypeptide expressing nucleotide sequence isolated from the Sargasso Sea
aatggctgacaaaaaaaggcatgcattggttactggtgcctcaagaggaattggagaagcgattgcaattgatcttgctaaagaaggtcatttaatatcagtcaactttaattctcaccaaaatgatgccgatgaagttgttaaaaagattaaagatttaggttcagatgctcatgttgtcaaaggaaatgtatcggataaagagtcagtaaatagcatgatagaaaaatctatagataaatttggccctgttgaaatacttgtaaataatgctggaataatttctgatagcttgttaatgaggatgaagg

SEQ ID NO: 204290 - DNA, 486 bp, Unknown
  Bacterial polypeptide expressing nucleotide sequence isolated from the Sargasso Sea
ttaacaacgcaggaataactattgataatttggcaattaggatgagtttggatgaatggagaaaagttatagatataaatttaacctcaacatttttattaagtaagttctcaataaaaaaaatgttaaaaaacaaatctggaaaaattattaatattacctcggttgttggtcacacaggaaatttaggtcaaactaactatactgcttctaaagctggtattattgcaatgtcaaaaagtttagctctagaatatgcaaaaaaaaatattaatataaattgtatctcaccaggttttattaaaactgccatgacagataaaattgatgaaaaatttaaagaagctattatatcaaaaataccctcaggtagactaggtgagccagatgatattgcaaatgcggttatttttttggcatcagatcattcaaattacataaatggtgaaacgcttcatgtaaacgggggcatgtatatggcttgac

SEQ ID NO: 204291 - DNA, 430 bp, Unknown
  Bacterial polypeptide expressing nucleotide sequence isolated from the Sargasso Sea
ttgggatgatgttatagagacaaatttaaatggtttatttagagttactaaggcttttataaaacctatggtaaaaaataaatttggaagagttatcaatatttcatcagttgctggccttatgggtaactctggccaagtaaattactcttcatcaaaatcagcaatggttggtttctcaagatctttagctaaagagcttggatctaggaatattacctcaaatgttgttgctcctggttttattgagactgacatgacaacctttttgaatgatgatgaaaaagctgaggtaagtaagaatataccaatgaaaagatttggcactgttcaagatgtagccaaatgcattgtgtttcttgcatctgatgaagcaaattacataactggtcaaaccatttctgttgatggaggcttatttatgtattag

SEQ ID NO: 204292 - DNA, 328 bp, Unknown
  Bacterial polypeptide expressing nucleotide sequence isolated from the Sargasso Sea
aacgtctgtggtagggcatactgggaatttaggacaagcaaattacgcagcatctaaggcaggtataataggtttttcaaaaacactatcaatagaatacgcaaaaaaaaatattaatattaattgcgtctcaccgggtttcataaaaacagaaatgactgataaaattgatgaagaatttaaaaaaattcttgttagcaaaatacctgcgggaagtttaggttcaggagaagatgtttccaattgtgtagcttttttagcttcagatatggcaaaatatattaatggagaaactatacatgttaatggtggaatgtatatgtcttga

SEQ ID NO: 204293 - DNA, 544 bp, Unknown
  Bacterial polypeptide expressing nucleotide sequence isolated from the Sargasso Sea
tttgaattctcaatatgtttttgtatctggtgcttcgagaggcatcggtcaaagcatacttaagttattttcttccaaagggtttcctgtgatcggaacggctacctctgaggagggtgttaagattatagatggaatcttatctgaatcatctggaggaggctttggaatagagcttgatctctctgataagcaatcaattgaaaatttatttgataccttgaaggagaaagacatcaatccagagattgtcgtcaataatgctggtattacaagagataatatttttctgaggatgaaagatacagagtgggatgaggtaattcaggttcatcttagctctgttttttcattactgaagtttttttccaaaaaaatggtcaaaaataaatgtggaagaattattaatatctcttctacttcggctgctattggaaataagggacaagctaattacgcagctgctaaatcaggcttagaagcattttcaagatctttagccagggaactagcaccgagaaatataaccgttaattgcgtcgct

SEQ ID NO: 204294 - DNA, 308 bp, Unknown
  Bacterial polypeptide expressing nucleotide sequence isolated from the Sargasso Sea
catgggtaatgccggtcagtccaactacgcggcagccaaggcgggtatggagggttttacccgtgcactggcccgtgaagtcggatcgcgcgccattactgtgaacgcggttgcacctggctttattgacaccgacatgacgcgtgcgcttaatgacagccagcgttcggtcatgctggagcagattccactggcgcgcctggggcaggctgaggaaatcgctgcggcggttgctttcctggccagcgagagtgcgggctacattaccggtgctacactgccggtcaacggtggcatgtatatgtaac

SEQ ID NO: 204295 - DNA, 313 bp, Unknown
  Bacterial polypeptide expressing nucleotide sequence isolated from the Sargasso Sea
agttgggttttccgggaatgctggtcaagtcaattatagttctactaaatccggacttattggatttactaaatcattgtctcgcgaggttggaacacgcggaattacagttaatgctgttgctcctggatttatcaacacagcaatgacacaagccctaaacgaaagtcagcagcaggcaattctaagtcaaattcctcttggtcgcatgggtgaggcagatgatattgccaatgcagttgcttttttagcctctgaagaggcttcgtatattactggaactgttctccatgttaatggaggtatgtactga

SEQ ID NO: 204296 - DNA, 461 bp, Unknown
  Bacterial polypeptide expressing nucleotide sequence isolated from the Sargasso Sea
tactagagatggactattgatgagaatgaaatcagaacaatgggatgatgtattaaatacaaacttaaaaggggtttttctttgtacaaaatatgcttcaaaatttatgatgaaaaaaagaagtggtagtatcgtaaatatttcatctgttgttggaataattggtaatcccggtcaagcaaattattctgcagctaaagctggagttattggattcaccaaaacttgtgctaaagaatttgcttcaagaggtataaacgtaaatgcaatagcaccaggctttatagaaacagaaatgactgaaaaacttaatactgaagagatacttaaagttatccctttagggaaattaggaagttgtactcaaattgcaaacttggtgtcattcttagtttcaagtaatgctggaaattacattacagggcaaacaataagtatagacggaggtatgagtatttaat

SEQ ID NO: 204297 - DNA, 451 bp, Unknown
  Bacterial polypeptide expressing nucleotide sequence isolated from the Sargasso Sea
atgtccaatacagattcattatcaggaaaaatagctttaatcactggagctagcagaggaattggtaaagaaattgctttagaactaagtcgtttaggcgcagaagtttttattaattactcttcatccgatgaaaaagctgaagaagttgtaaattcaataaaacattcaggaggtaaggctcataaattaaaatttgatgtatcaaaagaggattctgtaagttcagcttttgaagaaatcataaaaattaatggcaccattgatattcttattaacaatgctggtattactaaagatggactattgatgagaatgaaatcggaacaatgggatgacgtattaaatacaaacttaaaaggagtttttctttgtacaaaatatgcttcaaaatttatgatgaaaaaaagaagtggtagtatcgtaaatatttcatctggtgttggataaa

SEQ ID NO: 204298 - DNA, 748 bp, Unknown
  Bacterial polypeptide expressing nucleotide sequence isolated from the Sargasso Sea
atgaaactacttgaatcaaaagttgcaattataaccggagggagcaggggtattggtaaatctatttgtgagacttttgctcaaaatggttgtaatgttgcatttacttataatagctctaaagaatctgcagagaatttatctaaagaacttaataaacttggagtaaaggccaaagcgtataaaagtgatgcttcaaattttgatgatgccactaaactagttgaaaatgttttaagtgattttgagaaaattgatattctagttaataatgctggtattaaaaaagataatttattaatgagaatggaaaaatcagattttgatgctgtaatcaatacaaatttatcttctgtttttaatcttacgaaggcttcaattaaaacattcttgaagcaaagaaatggttcaattataaatattagctctgttgtaggtgttaaaggaaatgcagggcaatcaaattattctgcttcaaaggcaggtattataggtttttccaaatccattgctctagaattaggttctagaaacattagaagcaatgtaattgcccctggatttatagaaactgatatgacagactctttaccagaggatgttattaattcttggaaagaaagtattccactaaaaagaggtggtagtccaagtgatgttggaaatgcttgtgtgtttttagcatcaggtctgtctagttatattactgggcaagttcttcatgtagatggaggaatgttaacttaaa

SEQ ID NO: 204299 - DNA, 685 bp, Unknown
  Bacterial polypeptide expressing nucleotide sequence isolated from the Sargasso Sea
atgaaaacagtttttgtaacaggtgcttcaagaggtattggaaaatctatagctttggaacttggaaaagattatcaagttattgtaggattctcaaattctaaagataaggctgatgaagtcgtagaagaaataaaaaaattaggtggtcaaagtcttgctgttcaattaaatattgcagatagaaattcagttgatgaggcatttaacataatagaaaaaaaatataagcatgttgatattttgataaataatgcaggaattacaaaagacaatatattaccaagaatgaaggatgatgagtggagtgatgttattcaaacaaacctaactggaaatttctatacatctcaaagagctataaaaaagatgattaaaaacaaatggggaagattaatttttatatcatctgttgtaggtatttctggcaatcaaggccaagcaaattatgctgcatcaaaagcaggtttgattggattatcaaaatcaataagtaaggaagttggaagcagaaatattacatcaaatgtcatagctccaggttatatagaaacagacatgacatcatttatagatgatgaaaataaagaaaatattatagaacaactttcaataaaacgcatgggtatgccagaagatattgcaaacatggtatcttttttatgcaaagatgagtcagaatata

SEQ ID NO: 204300 - DNA, 675 bp, Unknown
  Bacterial polypeptide expressing nucleotide sequence isolated from the Sargasso Sea
tcttaaataaacttgtctcaagcggttcaaatgtcatagctagtggaacaaacgagatcaaactaaaaaaaattcaagagaaatatagaaatgtaaacaccttgaagtttgatatctctgatcatgctggaatagaaacttttgtagataattgtaataaaattttatcaaataaaattgatatactaattaataatgctgggataacgaatgacaatttgtctataagaatgaaagaggaagaatggaaaaaagtaatagatattaatctttcatctacttttttcatgactaaaagtgttataaaaaaaatgcttaagttaaaaaatggtaaaataataaatattacctctgtagttggtcacacaggcaatataggacaagcaaactacgcagcatcaaaggcaggattaattgccatgtcaaaaagtcttgcattagagtacggaaaaaaaaatatcaaggtaaattgcgtatcaccaggttttatagcttcagaaatgactgataaaattagtgatgagcataccgagttattaaaatcaagaatttcacttaataaatttggtaatccagaggatgtggcaaatacaattgcttttttaagttcagatctttctgactatattacaggtgaaactatacatgtaaatggtggcatgtattttagttgac

SEQ ID NO: 204301 - DNA, 736 bp, Unknown
  Bacterial polypeptide expressing nucleotide sequence isolated from the Sargasso Sea
atgattaactttaaaaataaaaaaatattagtgactggcgcttcaggagggattggaagagaaattgttaaaaaatttatctccctagaaggaacagttgttgcaactggaacaaatttagagagactagatttactaaaaaaagattttccaaatgttaatgttataaaatttgatatttcagagcattctaaaattgaagaatttatagacaatgtattcagtcaattatctggattagatattttaataaataatgctggaacaaatatggacaatttatcattgagaatgaaagatgaagaatggcagaaagtaattgatattaatttaacatcaacttttctattaagtaagtatgcaataaaaaaaatgttaaaaaacaaatatggaagaatagtaaatattagttcagtagttggccatactggaaatttaggacaggcaaattattctgcttcaaaagcaggaattataggcatgacaaagtcactagcaatagaatatgcaaaaaaaaatatcacacttaattgtgtctcacctggatttattcaatcaaagatgacagataatattaacgaaagtgtaaaagccactttaacttctagaataccaatgtctagactaggaaatgctgaagatgtggctaattcagtcgcttttctgtcatctgaccaagcttcatatataacaggagaaactatacatgttaatggaggcatgtatatggcttgac

SEQ ID NO: 204302 - DNA, 448 bp, Unknown
  Bacterial polypeptide expressing nucleotide sequence isolated from the Sargasso Sea
aatgtccaatacagattcattatcaggcaaagttgctttaatcactggagctagtagaggaattggtaaagaaattgctttagaactaagcagattaggagcagaagtttttattaattactcttcttctgatgaaaaagctgaagaagttgtaaattcaataaaaaattcgggaggtaaagctcataaattaaaatttgatgtttcaaaagaggattctgtcagtttagcttttgaagaaataatcaaaattaatggcaccattgatatcctcattaacaatgctggcattacgagagatggactattgatgagaatgaaatcggaacaatgggatgatgtactaaatacaaacttaaaaggagtttttctttgtacaaaatatgcttcgaaatttatgatgaaaaaaagaagtggtaacatcgtaaatatttcatctgttgttgga

SEQ ID NO: 204303 - DNA, 739 bp, Unknown
  Bacterial polypeptide expressing nucleotide sequence isolated from the Sargasso Sea
atgatagatttaaaaaatttaaacatagtattgactggagccacaggtgtaataggtaattctattctcgataaattatttacagcaggagctaatattttagcaaccggtacaaatgagcaaaaattaaaaataattaaagaaaaatataaaaatctaaatgtattaaagtttgatatttctgatcataaaaatattgatagatttgtagaagattgtacaaaaattttatctaataaagttgatattttaataaacaatgctggaattactcaagataatttgtctatcaggatgaaagaagaagaatggaaaaaagtaattgatataaacttaacatcaaccttcttaatcactaaaaatataattaaaaaaatgttaaaattaaaaaaaggaaaaataataaatgttacatctgtagttggacatacaggtaatattggtcaagctaattacgctgcatcaaaagcaggtataattgcaatgtctaaaagtttagctctagaatatggtaaaaaaaatattactgtaaattctgtatctccaggttttataatttcagatatgactgcaaaaatcagtgaagaacacacagaattaatgaaatctaggatatcccttaacaaatttggcagacccgaggatgttgctaattcaattgcatttttaagttcaaatttgtcagactatataactggagagacaatacatgtgaacggaggcatgtattttagttgac

SEQ ID NO: 204304 - DNA, 518 bp, Unknown
  Bacterial polypeptide expressing nucleotide sequence isolated from the Sargasso Sea
tataaaagatcatggtaaaatagatattttaattaataatgcaggcatcactcgcgatgcattacttatgagaatgactgaagaccaatgggaaaaagtgataaatactaatctcaaaggagcattctatggtatgaaatctgtaataagaacaatgatgaaaaataaatttggaagaattatcaatatcacttccatagttggtatcacaggcaatgctggacaggcaaattatgccgcatcaaaagcagggttgataggcatgacacaatccattgcaaaagaagtaggcagcagaggaattactgttaattgtatagctccgggttggatagatacagaaatgacagatgagttaccagaaaattcaaaaagcgcattattagatagaatccctcttgggaaaattggtaagccagaggatattgcatatacagcattatttttagcttctaatgaagcaaactacattaccggccaaactatcacagttgatggtggtcgaataataaattaaa

SEQ ID NO: 204305 - DNA, 739 bp, Unknown
  Bacterial polypeptide expressing nucleotide sequence isolated from the Sargasso Sea
atgattaatttaaaaaatttaaatataattttaactggtgcaacaggtgtcataggacattcaatcttagataaattagtttcagcaggatccaatataatagcgacaggtaccaacgaagaaaaactcaaaaaaattcaagataagtataaaaatgtgaatatcctaaagtttgatatatctgatcattcaagaattgaagatttcgtagaaaattgtgataaagttttatcaaacaaaattgatatattaataaataatgcaggaataactgaggataatttatccataagaatgaaagaagaagagtggaagagagtgattgacataaatctttcctcaacattctttatgaccaaacatgttataaaaaaaatgcttaagtcaaaaaacggcaagataataaatgttacatcagttgtgggtcatacaggaaatattggacaagcaaattacgcggcatctaaggccggcatagtcgctatgtctaaaagccttgcaatagaatatggaaaaaaaaatattaaggttaattgtgtatctccagggtttatattgtctgaaatgactaataaaatcagtgacgagcacactgaaatattaaaatcaagaatttcactcaataaattcggtaatcctgaggatgtggcaaatacaattgcttttttaagttctgacctatctgattatattaccggagaaactatacatgttaatggaggaatgtattttagttgac

SEQ ID NO: 204306 - DNA, 736 bp, Unknown
  Bacterial polypeptide expressing nucleotide sequence isolated from the Sargasso Sea
atgattgattttaaaaataaaaaaataattataacaggtgcttcaggtggtataggaagatctttagttgaaaaatttgtaaacttaaatggcaatgtgttagcaacaggaactagaatcgaaaaattagaaaatttaaaaaatgattttccgagtattaacattttaaaatttgatatatctgaacaatcaaaaattgaagagtttatagaaaatgctaatgataagttaagtggtttagatgttttaattaacaatgctgggataaattttgacaatttatctttaagaatgaaatatgatgaatggaaaaaggtaattgatataaacttaggatctactttttttttaaccaaatatgcaataaaaaaaatgttaaaaaataagtatggaagagtagtcaatattacatctattgttgggcacacaggtaatattggtcaggctaactattcagcatctaaagctggaatagtaggtatgactaaatcattggcaattgaatatgcaaaaaaaaatattacacttaattgtgtatcacctggttttatcaaatctcaaatgacagataatatatcagataatatgaaagattttttatcttctagaattccaatgtcaaaacttggtacgggtgaagatgttgctaattctgttgcatttttgtcctcagatgcagcatcctatataactggtgaaacaatacatgttaatggaggcatgtatatggcttgac

SEQ ID NO: 204307 - DNA, 709 bp, Unknown
  Bacterial polypeptide expressing nucleotide sequence isolated from the Sargasso Sea
ttgactggagctacaggagttattggaaactcaattctcgataaattagtttcagcaggagcaaatattctagcgacaggaacaaatgagcaaaaattaaaaataattaaagataagtataaagctttaaatgcagtaagatttgatatatctgatcatggaaagattgatcaatttattgaagattgtagtaaaaatttttcaaataaaattgatgttttaataaataatgcaggtatcactcaagataatttatctttgagaatgaaagaagatgaatggaaaagagtcattgatataaatttaacctcaacatttctaatttcgaaaagtgttattaagaaaatgctgaaatcaaaaaatggtaagataataaatgtcacatctgtagtgggacatacaggaaatattggtcaagcaaattacgctgcatcaaaagcaggaattgtagcaatgtcaaaaagtttagctctagaatatggaaaaaaaaatattacagtaaattgtgtttccccaggatttatagtttcagatatgacagccaaaattagcgaagaacacacagatttaatgaaatcaaggatatctctaaataaattcggtaatccagaggatgttgctaattcaattgcttttttaagttctaatttgtcagattatatcacaggagaaacaatacatgtaaatggtggcatgtattttagttgac

SEQ ID NO: 204308 - DNA, 652 bp, Unknown
  Bacterial polypeptide expressing nucleotide sequence isolated from the Sargasso Sea
aaacgattcgcggatcaagggcacagggttgccatcactgcgcgggacccaggtgacgtcgatagccgaattttggcaataccctgcgaccagacagacgcagatgcggtcgaccgcgcttatcaagctatcgagtctgagttaggcaatgtagaggtgttagtagccaacgccggtatcaccaaagaccagttgctcttgcgaatgtcggatgatgacttttcgacggtaatcgatacaaatttaaaaggttcatatcgagtggcgcaacgagcgactagaaccatgctgcgagccaggtggggccgactaatatttgtttcatcagtcgtaggactcctcggctccgccggccaagccaactatgccgctagcaaggcaggcctagtgggtctcgctcgttcgatggctcgagaattgggctcgcggaatatcactgcgaatatagtttctccaggccccgtcgcaaccgaaatgttggatgccttgaccgaagatcagcgttcagccataactgaacaggtgccgctgaaaagggtcgctgaacctcaagagatagcagaaactatactttttctggcttctgaaggagccggatatatcacaggcgcagtaataccaattgatggcggactaggcatggggcattgac

SEQ ID NO: 204309 - DNA, 748 bp, Unknown
  Bacterial polypeptide expressing nucleotide sequence isolated from the Sargasso Sea
atgaaattacttgaatcaaaagttgcaattataacaggtggaagtagaggaattggtaaatcaatctgtgagacttttgctcaaaatggatgtgatgttgcctttacttacaataattctaaagactatgccgaggcattagcaaaagaacttaatagcactggagtaaaagcaaaatcatataaaagtgatgcctcaaattttgatgacgcaactaaactggttgaagatgtattaaatgattttggaaaaatagatattttagtcaataatgctggaattaaaaaagacagtttattaatgagaatggaaaaatctgattttgactccgtgataaatacaaatttatcctctgtttttaatcttactaaagcttcgattaaaacatttcttaaacagagaaatggttcaatcgtaaatattagttctgtggtgggcgttaaggggaatgcagggcaatcaaattattctgcctcaaaggcaggtattataggtttttctaaatccattgctctagaattaggttctagaaatattagaagcaatgtaattgctcctggatttattgagactgatatgacagactctttatctgaggatgttataaattcttggaaagaaagtattccacttaaaagaggtggtaatccaagtgatgttggaaatgcatgtgtatttttagcatcagatctgtctagttatatcactggacaagttcttcatgttgatggaggaatgttaacttaaa

SEQ ID NO: 204310 - DNA, 472 bp, Unknown
  Bacterial polypeptide expressing nucleotide sequence isolated from the Sargasso Sea
atgtccaatacagattcattatcaggcaaagttgctttagtcacaggagccagcagaggaattggtaaagaaattgctttagaactaagtcgctttggagcagaagtttttattaattactcttcttctgatgaaaaagctgaagaagttgtaaattcaataaaaaattcaggaggtaaagctcataaattaaaattcgatgtttcaaaagaggattctgtcagttcagcttgtgaagaaatcataaaaattaatggctccattgatattcttattaacaatgctggtattactcgagatggactattgatgagaatgaaatcggaacaatgggatgatgtattaaatacaaacttaaaaggggtttttctttgtacaaaatatgcttcaaaatttatgatgaaaaaaagaagcggtagtatcgtaaatatttcatctgttgttggaataattggtaatcctgtcaagcaaa

SEQ ID NO: 204311 - DNA, 739 bp, Unknown
  Bacterial polypeptide expressing nucleotide sequence isolated from the Sargasso Sea
atgattgatttaaaaaatttaaatatagttttgactggtgccacaggtgttattggcaattctattctagacaaacttatttctgcaggatcaacagttttagccacaggtacaaatgacgaaaaattgaaattaattcaagagaaatacaaaaacttaaatgtattgaagtttgatatatctgatcataaaaatattgataaatttgttgaggattgtagttcaattttatcaaataaaattgatgttttaataaataacgcaggaattactcatgataatttatcaataaaaatgaaagaagaggagtggaaaagagttattgatattaatttaacctcaacatttttgataagtaaaaatgtaattagaaaaatgataaagtctaaaactggaaaaataataaatattacctcagttgttggtcactcgggaaatattggccaagcaaattatgctgcctcaaaggcaggtattatagcaatgtctaaaagtttagctttagaatatggtaaaaaaaatataacaataaattctgtgtctccaggctttatattgtcagaaatgacaaataaaataagcgaagatcatacagaattgttaaaatcaaggatatcgcttaataaatttggtaaaccagaggatgtggcaaatacagttatttttttaagttctaatcttgcagattatataactggcgaaactatacatgttaatggaggaatgtattttagttgac

SEQ ID NO: 204312 - DNA, 718 bp, Unknown
  Bacterial polypeptide expressing nucleotide sequence isolated from the Sargasso Sea
gatgcgctcgctcgtgacgggcggcagcggcgcactcgggcaggcgatctgcgcggccctcgcgcaggccggccatgaagtgtgggtgcatgcgaaccgccatctcgcgcaggcggaggccgtcgcgcagcagatcgtcgcggccggcggctccgcgcacgcgattgcgttcgacgtgaccgacgccgatgcgacgctcgccgcgctgaagccgttcatcgacgatgcgccggtgcagatcctcgtcaacaacgcagggattcacgacgatgcgccgatggccggcatgtcgcgacaacagtggcacagcgtgctcgacgtgacgctcaacggcttcttcaacgtcacgcaaccgctgctgttgccgatgatccgcacgcggcgcggacggatcgtcaacatcgcgtcggtggccggcgtgaccggcaatcgcgggcaggtcaactacgcggccgcgaaggcggggctgatcggcgcgacgaagtcgctgtcgctcgagctcgcgtcgcgcggcatcaccgtgaacgcggtcgcgcccggcatcatcgaatcgccgatggccgagcacgcgtttcccgcggaacgcatcaagcagctcgtgcccgcgcagcgcgcgggccggcccgacgaagtcgcggcgatggtcgcgtacctggtgtccgacgccgcggcctatgtgacggggcaggtgctgtccgtcaacggcgggctcgcctga

SEQ ID NO: 204313 - DNA, 745 bp, Unknown
  Bacterial polypeptide expressing nucleotide sequence isolated from the Sargasso Sea
aatggaagaattatcaagagtagtacttattactggtgcatctagaggaataggaagggctatagctttaagacttgcagaacagggtcacagaattgctgttaattataactcccacaaagaagatgctgaaaaagtattagaagaaattaataaattaggttccagtggaataattgtaaaagcaaatgtatctgttcttgatgaagttcaagaaatgataaaaacagttgaaaattctttggggaacattgaaattctatacaataatgcaggaattatttcagattcgcttcttatgagaatgaaacctgaagactttgataaggtaatagatactaaccttaagggtactttttattgcactaagctttgtataaataatatgatcaaaaatagatggggcagagtaataaatatttcgtctgttgtaggaataagaggtaatataggtcaatccaattactcagcatcaaaagcgggaatccattcatttactaagtctgtagcaaaagaagtagcaactagaaatattacagtaaatgttattgcaccaggatatgtatcaacagctacaactaatgttctgtccgaaaaagtaaaaaaagaagttatgtcatggatacctatgcaaagatttggagaaccagaagaaattgctccgattgctgcattcttatctagagaagaagcaagatatatcacaggtgagataatcagagtagatggtggaatggctatatga

SEQ ID NO: 204314 - DNA, 739 bp, Unknown
  Bacterial polypeptide expressing nucleotide sequence isolated from the Sargasso Sea
tatgagcgatctaaaaggtaaaaatattattgtaacaggtgcttccggaggtattggaaattcgataattgaaaaattaaaccatgctggagcaaatattttagcttctggtactaaaattgaaaaattagatgtattaaaaagtaaatttgaaaatatcaaaatattaaaatttgatatttctcaaagtgataaaattgaagaatttatagaaaatgcaacaaaagaacttggtggaaacttagattgtattattaataatgcaggagttactcaagataaccttgcaataagaatgagtttagaagaatggaaaaaagtaattgatatcaatttaacatcaacttttttaatgagtaaatctgcaattaaaaaaatgcttaagaataaatcaggcaggattgttaatattacgtctgttgttggtcatacaggaaatataggacaagctaattatacagcatcgaaagcaggtatagtagcaatgtcaaaaagtttagcgatagaatatgcgaaaaaaaatataaatattaattgtatttccccaggtttcattaaaactgcaatgtcagacaagctagaagataaatttaaagaagctataatatcaaaaatcccctcagcacgtctaggagaccctgatgatgtcgctaatgcggtgctttttttgtgctcaaatcaatcaaactatattaatggtgaaacactgcatgttaatgggggcatgtatatggcttga

SEQ ID NO: 204315 - DNA, 793 bp, Unknown
  Bacterial polypeptide expressing nucleotide sequence isolated from the Sargasso Sea
tatgaataatttattttctatagaaggcaaaattgcattggtaacaggcggctcaagaggtattggcgaaatgatagcagctggttttcttgccaatggggctaaggtttatataagttctagaaaagctgaagtatgtgatgaaacggcaaatagattacaagaacaatatggaggagagtgtatttctttacctgcagatttatctaatttgaatggcattgaatctcttgtgaacagtcttcctgatggagaaaagcttgatattctagttaataacgcaggggcttcttggggagagcctatagatgaatattctgaaaaaggttgggataaggttatggacactaatgttaaaggtgtttttttccttactcagaaattactaccattattgagatcctcagcaactgcagaagacccatcaagagtaattaatattggaagtatagacggaataaaaacaggcttatttgatgctttttcttacggtccgtcaaaagctgccttacatcatttaacaagagttttagcagcttcacttgttaaggaaaatattattgttaatgcaattgcacccggaccatttccaacttggatgttaagtactggagttggaggtggaggagacctcgatattaattgggatgaggtgggtaattcgaatccaagaggaagagtaggtactcctgaagatatagcaggactagcaatctttctttgttcaagagctggcgcttatacagtaggtgaaactattacttgcgatgggggtgcagtagctagttcatag

SEQ ID NO: 204316 - DNA, 916 bp, Unknown
  Bacterial polypeptide expressing nucleotide sequence isolated from the Sargasso Sea
atgggtgttttagacggaaaagttgttttagtaactggtgctgctaatggaattggtaaagaaaccgctcttctagcttcaaaagaaggagctaggttagttataaatgatttagggggatcagttgccggaggagatgaaggcgataaaaaccctatagaacttgttgctgaagaaattaaaaaaaatggaggtgaggtcgttactaattctgactcagttacttctaaaaaaggtactgaatttatgattcagcaagctttagatacttatggaaaccttcattctattgttaatcctgctggaattcttagagataaaatgtttcataaaatggatgatcaagactgggatgctgtaatagatgttcatctaaacggaagttataatatttgtagagctgctattaattattttagagataaagaagaaggaaattttgtattatttacatcaactactggattaattggaaatattggtcaagccaattatgcagctgcaaaactaggtattgcaggattgtctaggattatagccatggagaatgaaataaaaaatgttaggtcaaatattattgctccttttgcttggacaaggatgattgcaactatcccaattaaagatgaggcatctaaggaaagagttgaaagaatgaaaaatgctatgcgcgctgatcaagttgcgcaaactgttgtcgctctctgttctcctgattgtaaattaacaggccaaattttatctgttagaggaaatgaagtagttctatttaatcagccaaggccaataaaaagtctagttgataaggagggatggacacctaaaaaacttcttgattctgcatttccggcatttgaatcagttggtcaagacttaggcgctactgtaactgtgtttccttatgagcctttctaat

SEQ ID NO: 204317 - DNA, 736 bp, Unknown
  Bacterial polypeptide expressing nucleotide sequence isolated from the Sargasso Sea
atgattaacttaaaaaataaaaaagttttaattactggagccacaggaggtataggcaaagcattagttagtaaattcagttcacttgattcaaatatattagctactggaactaagagtgaaaaactcgatttattaaagaaagaatttccaaatataaatatattaaaatttgatatttctgaacatccaaaaattgaggagtttattgaaaatgttttttctcaattaactggattagatgtactaataaacaatgcaggagttaatttggataatctttctttaagaatgacaaatgaacaatggaaaaaagttattgatataaatttaggatcaacttttttgttgacaaaatatgcaattaaaaaaatgctaaaaaataaatatggtagaattgttaatataacatcaatagtgggacatacgggtaatttagggcaagcaaattatgcggcttcaaaagctggcataataggtatgtcaaaatcattagccatcgagtatgcaaaaaaaaatataactataaactgtgtgtcaccaggatttatccaaactaaaatgacagataatatattagaaaatattaaagcagttttaacttctaaaataccaatgtccagattaggttctggcgaagatgtcgcgaatacagttgcttttttgtcatcagatgcagcatcttatattactggagaaacaatacatgttaatggaggcatgtatatgtcttgac

SEQ ID NO: 204318 - DNA, 739 bp, Unknown
  Bacterial polypeptide expressing nucleotide sequence isolated from the Sargasso Sea
tatgatgaatttagagaataaaaaaataattattactggtgcaacaggaggaattggtaactccattgtaaacagattaagtgatgctggtgccaaaatattagcaactggaacaagaattgaaaaacttgaagaactgaaatctaaatttaaaaatactgatattttgaaatttgatatttcaaaagaagatgaaattgaaaagtttatcgaaaatgcaacaaaacaacttggtggaggactagattgtttaataaacaatgctggtataactcaagataatttagctattagaatgaacattgatgaatggaaaaaagtaatagatattaatttaacttcaactttcttgttaagtaaatttgcagttaaaaaaatgcttaaaaataaatatggaaaaattataaatattacttcagttgtaggtcatactggaaatttgggacaagcaaattatactgcttctaaagcaggcattattgcaatgtcgaaaagtttagcgatagaatatgcaaaaaagaatataaatattaattgtatttcaccaggttttataaaaacagagatgacagataaaatagaagaaaaatttaaagaagcaataatatcaaaaataccttcttctcgattgggagagccagaagatgttgctaatgcagttctttttttagcctcagatcaatcgaattatatcaatggtgaaacaatacatgttaatggaggcatgtatatggcttga

SEQ ID NO: 204319 - DNA, 916 bp, Unknown
  Bacterial polypeptide expressing nucleotide sequence isolated from the Sargasso Sea
atgggtgttttagaaggaaaagttgttttaataactggcgcagctaacggaattggcaaagaaacagcgcttctagcttcaaaggaaggagctaaattagttatcaatgatttaggaggatcagtttctggaggtgatgaaggtgataaaaaccctatagagcttgtagctgaagaaattaaaaaaaatggtggtgaagtagtcactaactctgactcagttacatcaaagaaaggaactgaattcatgattcagcaggctttagacacatatggtgaattacattctatagttaatcctgctggtattctcagggataaaatgtttcataaaatggatgatcaagactgggatgctgtaatagatgttcatctcaatggtagttacaatatttgtagatcagcgatcaacttctttagagatcaggaagagggaaattttgtattatttacatcaacaacaggcttaatcggaaatattggtcaagcaaactatgccgctgcaaagcttggaatagcaggtttgtctcggattatcgctatggaaaatgaaattaaaaatgttaggtcaaatatcattgctccatttgcttggacaagaatgattgccactattcctataaaagatgaggcctctaaagaaagagtagaaagaatgaaaaatgctatgcgagcagatcaagttgcacaaaccgtagtcgcgctttgttcgccagactgtaaactaacaggtcaaattttatctgttagaggaaatgaagtagtcttatttaatcaaccaaggcccattaaaagtctggttgataaggaaggctggacaccagagaaacttttggattcagcatttccagcatttgaagcagttggtcaggatttaggggcaactgtaagtgtatttccttatgaacctttctaat

SEQ ID NO: 204320 - DNA, 769 bp, Unknown
  Bacterial polypeptide expressing nucleotide sequence isolated from the Sargasso Sea
atgacgcactcgttgaagggcaaaactgcgctcgtgaccggcgcctcaaggggcatcggccgcgccatcgccgaacgtctcgccaaggacggtgcgacagtcgcactcacctacaacgccagtcaatccggcgtggacgcggcgatcgcagccatcgagaaagcgggaggcactgcgttcgcgatccacgcggatctcgttgatccggcggccgtcccggctttgttcgagagactcgacgacgaactcacccggcggaacggaaccaaagccctcgacattctggtcaacaacgccggcaattccggctgggtcggcttcaaggacgcgacgccggagagttgggacaccctgatggcggtctacgcccgcgcgcccttcttcatcattcaggccgctctggatcgtctcgccgatggtgcccgcatcatcaacatttcttccgccgccgccacgaagcccgtgacggcagcgcccgtctactcaatggcgaaagcagccatcaataccctgacccatacgctcgccatcgagctcgggccgcgcggcatcaccgcaaacgccgtcgcgccgggcttcacgcgaacggatgccaacgccgccgttcgggagaatccggaactcgtcaaggcggccgaggcccagatcgcgttgggccgcttcggcgagccgtcggaaatcgccgccgtcgtggcgttcctggcctccgatgatggctattgggtgaccggccagacgatcgaagcgagcggtggttacaagctctgag

SEQ ID NO: 204321 - DNA, 739 bp, Unknown
  Bacterial polypeptide expressing nucleotide sequence isolated from the Sargasso Sea
tatgagcgatctaaaaggtaaaaatattatagtaacaggtgcttcaggtggtattggaaactcgataattaaaaaattaaaccaagctggagcaaatattttagcttctggtactaaaattgaaaaactagatgtactaaaaagtaaatttgaaaatattaaaatattaaaatttgatatttctcaaagtgataaaattgaggaatttatagaaaatgcaacaaaagaacttggtggaaacttagattgtattattaataatgcaggagttacccaagataaccttgcaataagaatgagtttagaagaatggaaaaaagtaattgatatcaatttaacatcaacttttttaattagtaaatctgcaattaaaaaaatgcttaagaataaatcaggcaggattgttaatataacatctgttgttggtcacacaggaaatttagggcaggctaattacactgcatcgaaagcaggcataatagcgatgtctaagagtttggcgatagaatacgcaaaaaaaaatataaatataaattgcatttcaccaggctttattaaaacagctatgactgataagttagatgaaaaatttaaagaagctataatatcaaaaataccctcagcacgtctaggcgaacctgatgatgttgctaatgcggtactttttttgtgctcaaatcaatcaaactatatcaatggagaaacattacatgttaatgggggcatgtatatggcttga

SEQ ID NO: 204322 - DNA, 471 bp, Unknown
  Bacterial polypeptide expressing nucleotide sequence isolated from the Sargasso Sea
gcattacaagggataacattattcttaggatgtctgacgaagaatggtcagacattatgaatgtacatctttacgggacattccaattcagcaaaagagcattgaaaatgatgcttaaaaataaatggggtcgaataatcaacatatcgtctgcttcagcttcgataggtaatagaggtcaatctaattatgcagctgctaaagcgggtgtagaagcatttactaaatcccttgctaaggaagtaggtaaaagagacataactataaatgctgttgctccaggattcatttcaacggatatgactgaaaataacaaaggagtaaatgcagattatttagtaaaagaaattccacttggaagatttggtaaacctgaagaagtggcctctttaataagttttatgtgttctgatggagcttcttatataactggacagaccatacatattaatggtggtctttacatgtaga

SEQ ID NO: 204323 - DNA, 599 bp, Unknown
  Bacterial polypeptide expressing nucleotide sequence isolated from the Sargasso Sea
aatgtttgatttacatgataaaatagcgattgtcacaggtgcttcccaaggcattggaaaaacaattgctctagaactatcaaaaagtggtgcctttgtttattgtattagtagaaataaagaagcaatagattctgttgtagatagtataataaagaatggtggtcaatcttcttcatatgcttgtgatatatctaattcagataattttaaagatattatagaaaaaatagtcaaaaaacataataaaatagacattttagtaaataacgccggcgttactaatgatgcccttttaatgagaatgtcaaatgaacaatgggatcaggttattgatacaaatcttaagggtgcatttacttgtataaagtccgttgtaaaatatatgatgaaaaataaatatggaagaataataaatattacttctattgtaggattaactgggaatgcaggccaagcaaattatgcagcatcaaaagcggggctcatcggaatgacaaaatctatcgcaaaggaagtggcttcaagagggattactgctaattgcatagcacctggttggattaaaacatctatgaccgatatacttactgaggaag

SEQ ID NO: 204324 - DNA, 457 bp, Unknown
  Bacterial polypeptide expressing nucleotide sequence isolated from the Sargasso Sea
tatgaaaacagcactagtaactggaggctctaggggcataggaagtgctattgcattagggcttggaaaaaattttcatgttgtagttggatatgctaattcagaagacaaagccaatgatgttgtacaagaaatcgttgctgctggtggaagtgcaaatacagttcaaatcgatatatcaaatgctgaatctgtagatactgcattttcaacagtagaaaaagaatacaactctgtagatgtcttgatcaataatgcaggaattacacaagacaatatattaccaagaatgaaagaagctgaatggcttgaagtaattcaaactaatctaacaggaagtttctatacatcgcaaagagctatcaagcttatgatgaaaaacaaatggggaagaattttatttatatcatctgtagttggattatcaggcaaccaaggtcaggcaaactatgctgca

SEQ ID NO: 204325 - DNA, 739 bp, Unknown
  Bacterial polypeptide expressing nucleotide sequence isolated from the Sargasso Sea
tatgacagatttaaatggtaaaaatattattgtcacaggagcttcaggaggcattggaaattcaataatcgagaaactaaaccaagctggagcaaatattttagcttctggtacaagaattgaaaaactagacgaattaaaaaataaatttgaaaatatcaaaatattaaaatttgatatttctcaaagtgataatattggggaatttgttgaaaatgcatcaaatgaacttggtgggaatttagattgtattgttaataatgcaggggtcactcaagataaccttgcaataagaatgagtttagatgaatggaggaaagtaattaatataaatttaacttcaacatttttaatgagtaaatttgctattaaaaaaatgcttaagaataaatctggaaaggttgttaatattacttctgttgttggtcacacaggaaatttaggtcaggctaattatactgcatccaaggcaggtatagtagcgatgtctaagagtttagcgatagaatatgcaaaaaaaaatataaatgtaaattgcatttcaccaggctttataaaatcagcaatgactgataaattagatgataaatataaagaagctataatatcaaaaattccttcagctcgtttgggtgaccctgatgatatagctaatgcagtgctttttttgtgctcaaaccaatcaaactatattaatggagaaactttacatgttaatggaggcatgtatatggcttga

SEQ ID NO: 204326 - DNA, 406 bp, Unknown
  Bacterial polypeptide expressing nucleotide sequence isolated from the Sargasso Sea
tcttacgagtgtgtttaatattactaaattatttattaaatcaatggtaaaggatcgttatggaaaaatcattaatatatccagtgttgctgggctgatgggtaatcctggtcaggttaattattccgcgagcaaggctggccttggaggctttaccagagctttagcaaaagaggttgctgcaagaaatataacagttaactgcatagctcctggtttcattgaaaccgatatgactaaccattttcaagatgaagaattggaaaatatcttaaatcaaatccctgcaaataaaatgggcaatcctcatcaaatagctgatttagcattgtttttagcatcttcaaagggagattatattaccggtcagaccatttctgttgatggtggcctttatatgagctaa

SEQ ID NO: 204327 - DNA, 775 bp, Unknown
  Bacterial polypeptide expressing nucleotide sequence isolated from the Sargasso Sea
catgtggaaccatgaaaagagagcagagatgcgcctaaaagggaaaatagcattagttacggggggaaataaaggtatcggggcggctgtcgtgagacgttttgccagcgaaggtgcaaaggtatggtcaggagatatttcgccagaccttcgacgtgagttttcggacgacctatccggtcacgaaaagaatatatctttcgaagccttggatgtaacaagtcaaaaatcatgggaaaggcttgtaaacaaaatagtaaatgaaacaggtaagattgatattcttgtaaataatgcagggatttaccaacggaaatcaattgaagaaacgaccgaagaagaatgggataaaatgcttacggtaaatacgaagggtccttttcttggaataaaggttgcactggaagcactgaaggcaagcggaaacgcctcgatagtaaacctatcctctacggccgggcttcgtggatcttttgctatccattacggcgcatccaaaggagcactgcgtctcatgacgaaatctatagccaaccgatttgcaaaagatggaattcgatgcaattccgttcacccggggccaatcgatacggaaatgggacatgctgcagttccacatgatcagttagaggagcggttgtatcaaagaataccaatgggtcgttttggcacagcagaagaagtagcaaacgtcattttattcctcgcatcagaggaatcttcattcgttactggatcagaagtggtggtagacggcggggcaacctctaaatag

SEQ ID NO: 204328 - DNA, 407 bp, Unknown
  Bacterial polypeptide expressing nucleotide sequence isolated from the Sargasso Sea
tctcaagtccgtttttcgtctgtcgcgcgcggtgctgcgcccgatgatgaaggcgaagggcggccgtattatcaacatcacctcggtggtcggctcggccggtaacccggggcaggtcaattatgccgccgcgaaagcgggcgttgcgggcatgacgcgtgcgttggcgcgggagatcggcagccgtggcatcacggtgaattgcgttgcgccgggcttcatcgataccgacatgaccaagaccctgccggaagatcagcaaaccgcgctgaaaacgcagattccgctcggccgccttggcagtccggacgatatcgcgcatgccgtggcgttccttgcatcgccgcaagctgggtatatcaccggcacgacactgcatgtgaacggcggaatgtacatgtcgtaac

SEQ ID NO: 204329 - DNA, 544 bp, Unknown
  Bacterial polypeptide expressing nucleotide sequence isolated from the Sargasso Sea
gatgacgcaactaaactagttgaggatgttttagatgattttggaaaaatagatattctagttaataatgcaggaatcaaaaaagataatttattaatgagaatggaaaaatcagactttgattccgtaatcaatataaatttatcctctgtttttaatcttactaaggcatcaattagaactttccttaaacaaagaaatggttcgatcattaatataagttctgtagtaggcgttaaaggaaatgcaggacaatcaaattattctgcttcaaaggcaggtattataggtttttctaaatccattgcactagaattaggttctagaaatattagaagtaatgtaattgctcctggatttattgagactgatatgacaaactcattatcagaggatgtcattaattcttggaaagaaagtattccactaaaaagaggtggtagtccaagtgatgttggaaatgcatgtgtatttttagcatcagatttatccagttatatcactgggcaagttcttcatgtagatggaggaatgttaacttaaa

SEQ ID NO: 204330 - DNA, 676 bp, Unknown
  Bacterial polypeptide expressing nucleotide sequence isolated from the Sargasso Sea
atgctcagctccgcctccctcgacggtcagaccgcattggtaacaggaggcggacgtggcatcggcaaagccatcgccctggccctcgccgaagccggtgctgaggtggtggtgaactacgccaattccgctggcgccgccgacgaggtggtggccagcatcaccgctgccggtgggaaggcctacgccctgaaggccaacgtctccatcgaggcggaggtggacggactgatcaaggcagtgctggagcgcagcggccgcctggacgttctggtgaacaacgccggcatcaccagggacggcttgctgatgcggatgaagaccagcgactggcaagcggtgatcgacctgaacctcagcggagtgtttttgtgcagccgcgctgtggcacggccgatgttgaagcagaaaagcggccgcattattaacatcacctccgtggtggggctgatggggaatgccggtcaggccaattacgccgccgccaaggccggtgtgatcggactaaccaaaagcaccgccaaggaactcgccagccggggcatcaccgtcaatgccgtcgcccctggcttcatcgccacggacatgaccaaagatctggatgccgacgccatcctcaaggacatcccccttggtcagtttggcacccaggagcaagtggccggagccgtgcgct

SEQ ID NO: 204331 - DNA, 736 bp, Unknown
  Bacterial polypeptide expressing nucleotide sequence isolated from the Sargasso Sea
atgattaattttaaaaataaaaaaattttaattacgggtgcaactggtggtattggaaaagctttagtagaaaaatttgtttctttggaaggcaatgtgttagctacaggaactaaaacagaaaaattagaaatgttaaaaaaagattttccaaatataagcattttaaaatttgatatatctgatcattctaaagtggaagagtttatagaaaatgtttcatcacaattaagtggtttagatattttagttaataatgctggaataaataaggataacctgtcgttaagaatgaaagaagaggaatggaaaaaagtaatagatgtaaatttaggatcaacatttttattgtgtaaacatgcgataaaaaaaatgttgaagagcaaatacggaagaatagtaaacataacttcagttgtgggtcatactggaaatttaggtcaggcaaactatgcagcatctaaagctggcataattggtatgtcaaaaagtttagcaattgaatatgcaaaaaaaaatattacaattaattgtgtttctccaggttttatacaatcaaaaatgacagaaaatattgttgaaagcattaaggctgtcttaacttccagaatacctatggcaaagcttgggacaggggaagatgtatcaaatacagtagcttttttatcatctgatgctgcatcttatattactggagaaacaatccatgttaatggtggcatgtatatgggttgac

SEQ ID NO: 204332 - DNA, 712 bp, Unknown
  Bacterial polypeptide expressing nucleotide sequence isolated from the Sargasso Sea
actggtcactggcgctagccgaggaattggcgcggctatcgctggacagctcgccgaggacggtttttttgtggtgggtacagcaacatcacaaatgggtgctgaagcgattattgagcatctggcaggcaggggtgcgggtattcggctggatgttgcagaccccgactcggttgccagcgctgtcgggcaagtgaatgaaatgggttcggtgcccttggttctggtgaacaatgcgggcatcactaaggataacctactcatgcgtatgtcagatgcggagtggtccgaggtgatcgatacaaacttgtctgggtcatttcgtgtaaccaaaccgctgcttcgcgggatgctaaaagcccgctggggcagggtgatcaacgtgggcagtgtcgtcggccggttgggcaatcccgggcaaggcaattatgtcgccagtaaggccggattagagggctttacgcgttctctggccatggaggtcgcctctcgcggtattacggtgaatgcggtagcaccaggatttattgaaaccgacatgaccgaggcgctgtcagacgaacaaagtgccgctatgttggaacgcatacccttgggccgaatgggatcaacgaaagaaatcgccgccacagtgagttttctatgttcgcaacaggcgggatacatcaccgggcagactctgcaggtgaatggcggcctattttttggctaa

SEQ ID NO: 204333 - DNA, 607 bp, Unknown
  Bacterial polypeptide expressing nucleotide sequence isolated from the Sargasso Sea
tctgggtgaactcataggagacgatagcgcaatctctgctcagttagacctaatgtcaaaagaaagcataaaaaacttgtttgcggatcttaaatctgaagatcttctaccatcagttctcgtcaataatgcaggtattaccaaagatcaattatttttgcgaatgaaagatgaagattgggatgatgttatagagacaaatttaaatggcttatttagagttactaaggcttttataaaacctatggtaaaaaataaatttggaagagttatcaatatttcatcagttgctggccttatgggtaactctggccaagtaaattactcttcatcaaaatcagcaatggttggtttctcaagatctttagctaaagagcttggatctaggaatattacctcaaatgttgttgctcctggttttattgagactgacatgacaacctttttgaatgatgatgaaaaagctgaggtaagtaagaatataccaatgaaaagatttggcactgttcaagatgtagccaaatgcattgtgtttcttgcatctgatgaagcaaattacataactggtcaaaccatttctgttgatggaggcttatttatgtattag

SEQ ID NO: 204334 - DNA, 541 bp, Unknown
  Bacterial polypeptide expressing nucleotide sequence isolated from the Sargasso Sea
atagaagattttataaacaatgttcatgaaaaattagaaggtatagatattttaataaataatgcaggtataactctagacaatttgtcgattagattgacagaggaagattggaaaaaagttttagatattaatcttacgtcaacctttttaatgtgcaaatcagtcattaaaaaaatgttgaaaaaaaaatatggaaaaataattaatattacctcaattgttggccatacaggcaatttaggtcaagctaattatgcagcctcaaaagctgggattattgcattttcaaaaagtttagctatagagtatgcaaaaaaaaatatcaacgtaaactgtgtatcgcctggttttataaaaactgaaatgacagataaaataaatgaggattttaaaaaaaatcttataagcaaaatcccttcaggaaatcttggtacaggcgaagatgtttctaattgtgtagcttttttagcttcagatatggccacttatataaatggagaaacaatacatgttaacggtggaatgtatatgtcttgac

SEQ ID NO: 204335 - DNA, 677 bp, Unknown
  Bacterial polypeptide expressing nucleotide sequence isolated from the Sargasso Sea
gatggtttttaatttaaaaggaaagtcagcacttgtaaccggcgcctcggggggaattggcagtgccgtgacaagggcactccataatcagggagcagaattgatcatcaatggaacaagatcaagtgaactagaaaaactagccgcggaactcggcgacagagttcacgttttacagagtgacctagcagatgctaatagcatcggtcatttggcagaagaagctgagaagatcagcgataatgggatcgatatactcgttaacaacgcgggtatcacgcgagataacttgcttgttagactgagtgatcaagatcttatggatgtaatcaatttaaatttgatcgcaggatttcaacttactcggaaaattattcgcggcatgatgagaagaaagtggggcagggtaataggcatttcgtctgttgtgggcataacaggaaacgctggccaaacgaattatgcggcggcaaaagctggtatgattggtttttcaaaagcactggcgcttgaagtggcaagccgaggaataacagtaaataacatagcaccggggtttataaaaacacccatgacaaaagatctatctgaggagcaagtaactcgattgcaagcgagtgtacccatagggcgtctgggagaggctgaagacgttgctgctgcagttgtttatttgg

SEQ ID NO: 204336 - DNA, 628 bp, Unknown
  Bacterial polypeptide expressing nucleotide sequence isolated from the Sargasso Sea
tatgaatcatataagtaaaaatgagcttaaagagattaaggaaaatggtacaaaatgcttttcttatcaacttgatgtgactgacttcaatgcggttgactctatagttaagaaaattattgatgaaactggaggtattcaaattttagtcaataatgcaggcatcactcaggataacctttttatgcgtatgaaaccggaacagtggttgcaagtcattgacgtcaacctcaatggagtatttcatgttaccaaagctgtaatccggacaatgattaaacaacattcaggaagaataataaacatatcttctgtagttgggttttctgggaatccaggtcaagttaattatagttctactaaatctggacttataggatttaccaaatcattatctcgagaggttgggactcgaggaattacagtaaatgctgttgctcctggatttataaacacagcaatgactcaagctcttaatgaaagccagcagcaatcaatactaagtcaaattcctatgggtcgcatgggtgaggctgtggatattgctaatgctgttgcttttcttgcctctaaagaggcttcttacattacaggaactgttcttcatgtaaatggcggtatgtactga

SEQ ID NO: 204337 - DNA, 678 bp, Unknown
  Bacterial polypeptide expressing nucleotide sequence isolated from the Sargasso Sea
tagacttagcatatagtggattaaaggttatcggcacggcaaccacaagtgagggagcatctcgtatatcgagctaccttaatgaaatggaagttcctggtatgggtatgagggttgatgttgcagacgattcatcagtggaaagtcttttctcagatattcatgagagctttggatctccaatgattctggtaaataacgcgggaattacccgagataaccttctcatgagaatgaaggtagacgaatggcaatctgtagttgatacaaatcttaactcaatgtttagagttacgaaattgtgtttaaagggaatgacaaaagcgcgttggggcaggattatcaatatttcatcagtggttggtgcaagtggaaacgcagggcaaacaaattatgctgcgtctaaagcgggcatcgagggatttactcgctcgttagcgaaagaaattggatccagaggagtgacggttaattctgtggcacccggttttatagatacagatatgacgagttcacttgcagagactcaagttgattcgctgcttgctcagattccgttaagaagattaggtacgccggaggagatcgcatctgttgtaaggtttttagtttccgaaaaagctaactacataactggtgaaactattcacgttaatggcggaatgtttatgggctaac

SEQ ID NO: 204338 - DNA, 671 bp, Unknown
  Bacterial polypeptide expressing nucleotide sequence isolated from the Sargasso Sea
agtagaaaaatttgataattttggatcaaatataattgctactggcactaatgaggaaaaactagcaaatctaaaaaaaaaattcccaaatatccatacagaaaaatttaaacttgatgaacataaaaaaattgagcaatttattgacgttatagaaaaaaaattaggtggtttggatgtgttaattaataatgcaggaattactttagataatctatcgattagactttctgaggaaaactggaaaaaagttttagatataaaccttacttcaacttttctaatgtgcaaagcctcaataaaaaaaatgcttaaaaacaaatacgggaagattattaatgttacctcaattgtagggcacacaggaaatttgggtcaagccaattatgcagcatcaaaagctggtatcgtggcattttcaaaaagtttagctattgaatatgccaaaaaaaatataaacattaattgtgtttctccaggatttattaaaactgaaatgaccgataatattaatgaggaatttaaaaaaacccttattagtaaaattccctctggtaaattaggcacaggagaggatgtttctaattgtgtagcatttttagcatcagacttatcaaattatatcaatggtgaaaccattcatgttaatggtggaatgtatatggcttgac

SEQ ID NO: 204339 - DNA, 718 bp, Unknown
  Bacterial polypeptide expressing nucleotide sequence isolated from the Sargasso Sea
aagaagattttaattactggtgccacaggaggtataggttatgctttagtaaaaaaatttgtatctttacaaggaactattgttgcaacaggcacaaaaacagaaaaattagatagtttaaaaaaagaatttcctaatattagtgttataaaatttgatatctcagatcattcaaaaatagaagagttcattgagagtgcttcatctcagctaacaggactagacgtgttagttaataatgctggaataaatatggataatttatctttaagaatgaaagatgaagaatggaaaaaagtaatagatgtaaatcttggatcaaccttttttttgtgcaaacatgcaattaaaaaaatgttaaaaaataaatatggaagaattgtaaacataacatctattgttggtcatacaggaaaccttggacaatcgaactatgcagcatctaaagcaggtatcatcggaatgtctaaaagtttagcaatagaatatgcaaaaaaaaatataaccatcaactgtgtttcgcctggatttattcagtctaaaatgacagataatattatagaaagtattaaatctgtattaacatctagaattcctatgagcaagctagggactggagaagatgttgcaaatacagtagcttttctctcttctgatgctgcatcatacattacaggtgaaacagtacatgttaatggtggcatgtatatgggttgac

SEQ ID NO: 204340 - DNA, 598 bp, Unknown
  Bacterial polypeptide expressing nucleotide sequence isolated from the Sargasso Sea
ttgtttaaactaaacaaaaaagtagcacttgtcaccggtgcctctagaggaattggcaaagagattgctaaactagtttctcaagcaggtgcccacgtagtttgtcttgcaagaagcgaaaaaaaaataaaagaattgtgcgattttattaacaataatcataatggatcagcaagctattattgttgtgacattaatgatagtgaaaaattttctgaaataatcaaatcaacagttaaaaaattcggatccttagatatacttataaataatgcaggaattacaagagattccctcttattaagattatccgaagaaaattgggacatagtgttggacactaatctaaaagcgacattccatagcataaaggcttctttaagacccatgttcaaaaataaatttggtaggattataaatataacctctattgttggtttaactggaaatcaaggtcaagctaattatgctgcatcaaaatcaggtttaattggtatgagtaaatcaattgctaaagaagtcgcttctcgcggtataactgtaaactgtattgcgccaggatggattgaaacagaaatgaccaatgaaattccataaa

SEQ ID NO: 204341 - DNA, 712 bp, Unknown
  Bacterial polypeptide expressing nucleotide sequence isolated from the Sargasso Sea
actgattactggagcaggtaggggcataggcaaaacaatcgccgaaaaattagcaaagttcggctcaaatattgcccttgctgatatgaatcctgtcagtgatgatgtgctgaaggagattgaagaaaatggcacaaaatgccttgcttataaacttgatgttacagactttgatgctgttgattcggtagttaagaagattattgatgaaactggaggcattcacattttagtcaataatgccggcatcacaaaggacaacctttttatgcgtatgaaaccagaacagtggttacaagtcattgacgtcaatctcaacggagtatttcatgtgacaaaatccgtaattcggacaatggtgaaacagcattcaggaagaattataaacatctcttctgtagttgggttttccgggaatcctggtcaagtcaattatagttctactaaatccggacttattggatttactaaatccttgtctcgcgaggttggaactcgcggaattacagttaatgctgttgctcctggatttatcaacacagcaatgacacaagctcttaacgaaagtcagcagcaggcaattctaagtcaaattcctcttggtcgcatgggtgaggcagatgatattgccaatgctgttgcttttctagcctctgaagaggcttcgtatattactggaactgttctccatgttaatggaggtatgtactga

SEQ ID NO: 204342 - DNA, 685 bp, Unknown
  Bacterial polypeptide expressing nucleotide sequence isolated from the Sargasso Sea
atgtttgatcttcacaaccaaatcgctcttgtgactggtgctagtggtggtattggtgcgcaaattgccacagcgttacatgcacagggcgcaacggtagtgttgcatgggacacgcgcctcgaaattggaagcgctgaaggcagctcttggagagcgaactgttacggttacggctaatctggcaaaccgcgatgccgtcgccggccttgttgattccgcaagcgaggccggaggcgggccaataaatattttggttaataatgcgggcataacccgtgatgggttgttgatgcgtatgaaaaatgacgattgggatgatgttctagaggtcaatttaacggcaagcatgattctgtgccgagcagcgatgcgagtaatgatgaaagcgcgctcgggcaggataatttcaatttcatctgttgtcggcgtgactggtaatccgggccaaacaaattacgcggcatcaaaagccggaatcataggatttagcaaatcactggcggctgaggtggcgagtcgcggcattaccgttaatgttgttgcacccggctttattgcaacaccaatgactgatgttttggatgaggcccagaaagcagcacttttgacaagagttccggcaggacgacttggaacagctgccgaaattgctgcttcagttcttttcttgcaagtgacgaggc

SEQ ID NO: 204343 - DNA, 584 bp, Unknown
  Bacterial polypeptide expressing nucleotide sequence isolated from the Sargasso Sea
aattaattgtcagcatcttatcgttgacgtgaatgacagagattctattgcgtctgtcatgaaggatattccgggtgaaaataatacattggattgtttagtaaataatgcaggaataactgcagatcagttatttatacgcatgaaagactctgaatgggacgatgttattaatacaaatttaacaggtatctttaatataactaaacctgttagtaagatgatgttgaagcaaaaaagcggttcaataattaatatttcaagtgtttctgggttgatgggaaatgctggtcaagttaattattcatcatcgaagtctgcgctattaggatttacaaaatccttagccaaagagcttgctccaagaggcattaatgtcaattgcatatgtccaggttttattgaaagtgatatgactaatgagcttactagtgatcagcgagatcaagcattaagccaaattcccctaggtaactttggttctgataccgatattgcaaagttaaccctatttttatcatctgacaatgctaagtacattacaggacaaagtattagcgttgatggtggaatgtatatgtaaa

SEQ ID NO: 204344 - DNA, 736 bp, Unknown
  Bacterial polypeptide expressing nucleotide sequence isolated from the Sargasso Sea
tatgaatgatttaaaagaaaaaaatataattgtaacaggagcgtctggcggaatcggaaattcaataattgaaaaattttatgaatgtggagctaatattttagcttcaggaactaaagtagaaaaacttgaactgttaaaaaaaaaatttaacaatattaaaattttaaagtttgatatttctcaaagtgaaaaaatagaagagtttatagagagcgcctctaatgaattaggaggtttagactgtattgtaaacaacgcaggaattactcaagataatttagctattagaatgagtcttgaagaatggaaaaatgtaataaatataaatttaacatcaacctttttattaagtaaatttgcaattaaaaaaatgcttaaaaataaaaaaggaaaaattgtaaacatcacatctattgttgggcatacaggtaatttaggacaagtaaattattctgcatcaaaagcaggaattgttgcaatgtccaagagtcttgcaatcgaatattcaaaaaagaatattaatgttaattgtatttcaccaggatttatcaagactgctatgacagataaaatagatgaaaaatttaaagaagttattatctcaaaaataccttcaggaagactagggactccagaagatattgcaaatgcagttctttttttagcttcaactaaatctgactatataaatggtgagactttacatgttaatggaggcatgtatatggcttga

SEQ ID NO: 204345 - DNA, 548 bp, Unknown
  Bacterial polypeptide expressing nucleotide sequence isolated from the Sargasso Sea
ccaagaggatcaggtggagcagctgatggctgccgtgctggagcgcagcggcagcctcgatgtgctggtcaacaacgccggcatcacccgtgatggcctgctgatgcgcatgaagaccgaggactggcaggcggtgctggagctcaatctctccggggtcttcctctgcacccgtgccatcacccgcaccatgctcaaacaaaagcgcggacgcatcatcaacatcacctcggtggtgggcttgatgggcaacgccggacaggccaactacgccgctgccaaggcaggtgtgatcggcttcacgcgctccacggcccgggagctggccagccgcggcatcaccgtcaatgccgtcgcaccgggcttcattgccaccgacatgaccaaggatctcaaggccgatgagctcttgaatgccattcccctggggcgctatgggcagccagaggaagtagctggtgccgtccgcttcctggctgcggatccagcagcggcctacatcactggccaagtgctgcaggtggatggcggcatggtgatggcctgag

SEQ ID NO: 204346 - DNA, 598 bp, Unknown
  Bacterial polypeptide expressing nucleotide sequence isolated from the Sargasso Sea
aaaacaagaatttccaaatattaatattttaaagtttgatatttctgatcattcaaagatagaagaatttatagaaaatacttcttctcaattagcaggcttagatgttttaattaataatgctggaataaacatggataacatatcattaagaatgaaaaatgaggaatgggaaaaagtgattgatgtaaatttaggatcaacattctatctatgtaaatatgcaataaaaaaaatgttaaaaaataaatatggaagaatagtaaatataacttctatagtaggccacaccggaaatttaggtcaagctaattactcagcttccaaagcagcgatcataggaatgtctaaaagtttagctatagaatatgcaaaaaaaaatattacaattaattgtgtttcacctggttttatccaatctaatatgacagataaaattgttgagagcatcaaagcagtattgacatctaagattcctatgtccaagctaggaaccggcgaagatgtgtcaaataccgtagcttttttatcttctgatgccgcttcatacattacaggacaaacattgcatgttaatggtggcatgtatatgggttga

SEQ ID NO: 204347 - DNA, 529 bp, Unknown
  Bacterial polypeptide expressing nucleotide sequence isolated from the Sargasso Sea
agttcagcttttgaagaaatcataaaaattaatggttccgttgatattcttattaacaatgctggtattactagagatggactattgatgagaatgaaatcggaacaatgggatgatgtattaaatacaaacttaaaaggggtttttctttgtacaaaatatgcttcaaaatttatgatgaaaaaaagaagtggtagtatcgtaaatatttcatctgttgttggaataattggtaatcccggtcaagcaaattattctgcagctaaagctggagttattggattcaccaaaacttgtgctaaagaatttgcttcaagaggcataaacgtaaatgcaatagctccaggctttatagaaacagaaatgactgaaaaacttaatactgaagagatacttaaagttatccctttaggaaaattaggaagttgtactcaaattgcaaacttagtgtcattcttagtttcaagtgatgcaggaagttacattacaggacaaacaatcagtatagacgggggtatgagtatttagt

SEQ ID NO: 204348 - DNA, 652 bp, Unknown
  Bacterial polypeptide expressing nucleotide sequence isolated from the Sargasso Sea
cttgggatctacaataatcgcaactggaactaatcaactgaaattggatgaacttaagcagaaatatagcaatattcatattgaaaattttaaattagacaaacatgatcaaatagaaaattttattgaaaaggtagacaccaaactaaataatttagaaatacttgtaaataatgctggaattaacattgacaatttatctattaggcttagtgaagaaaattggaaaaaagttttagatattaacttaacttcaacttttttgatgtgcaagtatgcaattaaaaaaatgttaaaaaaaaaatatggtaaaattattaatataacatcaatagtcggacatacaggtaatcttggtcaagcaaattattctgcatccaaagcaggaatagtcgcgttttcaaaaagtttagcgatagagtatgccaaaaaaaatataaatataaattgcgtgtctcctggttttattaaaactgaaatgactgataagattaacgaagagtttaagaacaacttaatcagtaaaataccatctgggatgcttggaacaggagaagatgtttcaaattgtgtagcttttttggcttcagatatgtctaaatatgttaatggtgaaactattcatgttaatggcggaatgtatatgtcttga

SEQ ID NO: 204349 - DNA, 607 bp, Unknown
  Bacterial polypeptide expressing nucleotide sequence isolated from the Sargasso Sea
tctgggtgaactcataggagacgatagcgcaatctctgctcagttagacctaatgtcaaaagaaagcataaaaaacttgtttgcggatcttaaatctgaagatcttctaccatcagttctcgtcaataatgcaggtattaccaaagatcaattatttttgcgaatgaaagatgaagattgggatgatgttatagagacaaatttaaatggcttatttagagttactaaggcttttataaaacctatggtaaaaaataaatttggaagagttatcaatatttcatcagttgctggccttatgggtaactctggccaagtaaattactcttcatcaaaatcagcaatggttggtttctcaagatctttagctaaagagcttggatctaggaatattacctcaaatgttattgctcctggttttattgagactgacatgacaacctttttgaatgatgatgaaaaagttgaggtaagtaagaatataccaatgaaaagatttggtactgttcaagatgtagccaaatgcattgtgtttcttgcatctgatgaagcaaattacataactggccaaaccatttctgttgatggaggcttatttatgtattag

SEQ ID NO: 204350 - DNA, 346 bp, Unknown
  Bacterial polypeptide expressing nucleotide sequence isolated from the Sargasso Sea
gatgagtgatatttataaagataaaactgttcttgtaactggcgcaagtagaggtataggtaaagcgattgcttataaatttgcaaagcaaggtgcctacgtcattgcaactgcaacaactgaaaaatctgcaaatcaaatatcagctgattttgtaaaaaataattttttaggcacagggctagtactaaatattgctgataaattatcggttgataagtttgaaaataatattaaaaatttaaattctccaaatattctagttaataatgctggtattactaaagacaatttattgatgcgcatgaaagacgatgaatgggaagatgtcattaatacaaattat

SEQ ID NO: 204351 - DNA, 664 bp, Unknown
  Bacterial polypeptide expressing nucleotide sequence isolated from the Sargasso Sea
aaatttgaaagctttggctcaaatatagtggctactggaactaatgaggaaaaattgaatattcttaaatcgaaatttaataacattcatactgaaaagtttagactagatgaacatagtaaaatcgaagattttattgatagagtggacaaaaaattagaaggtatagacattctaattaacaatgccggtattacattagataacctttcaattagactttcagaggaaaactggaaaaaggttctagatattaatttatcatcaacttttctaatgtgtaaatttgcaataaaaaagatgctaaaaatgaaacacggaaaaataataaatattacttctatcgttggacacaccggaaatcttggtcaagcgaattacgctgcatctaaagcgggtataatagctttttcaaaaagtttggctatagagtatgctaaaaaaaatatcaacattaattgtgtatcgccaggttttattaaaactgacatgacagataagattaacgaagaattcaaaaaaaatctaatcaacaaaataccttctggaaaacttgggactggagaagatgtttcaaattgtgtagcgtttttagcctcagatagtgcagattacattaatggtgagaccatacacgttaatggcggaatgtatatggcttgac

SEQ ID NO: 204352 - DNA, 559 bp, Unknown
  Bacterial polypeptide expressing nucleotide sequence isolated from the Sargasso Sea
catgtcagacaagaaagtggcactggtaaccggcgctagccggggcatcggccgggcgattgccgaacaactgattgcgaatggtttttttgtggttggcacggctactactgacaaaggggctgccgccattggcgatgcgttgggcgaaaacggtgccggcaagaggcttgatgtggcagacaagacgtcggtggacgccaccctcaagagcatcaacgaagagtttggtgctcctttggtgttggtgaataacgcgggtattacccgcgataacatcatgcttcggatgaaggaagatgaatgggatgatgtgatcaatactaatctcaattccctttatcgtgttagcaaggcatgcttgaaaggcatgacgaaagcgcgttggggccggattatcaatatcagctcggtggtcggcaccatgggtaacgcagggcaagccaattacgcggccgctaaaggcggcgtagaaggtttctcaagggcattggcccgcgagcttggctcacgtaacattacggtgaactctgttgctcccgggctttatcaaacggac

SEQ ID NO: 204353 - DNA, 505 bp, Unknown
  Bacterial polypeptide expressing nucleotide sequence isolated from the Sargasso Sea
gatggattagatatattagtaaataatgcaggtattaatttagataatctttcaattagactaaacgatgaaaattggcagaaagtgattgatattaatttaacatctacttttttaatgtgtaaacattcaattaaaaaaatgcttaagaagaaatatggtaaaattgttaatataacatctatagtaggacacactgggaatcttggccaagcaaactattctgcttccaaagccggaatagtagcattttcaaaaagtatggcaattgagtacgccaaaaaaaatataaacattaactgtgtatctccaggatttataaaaactgagatgactgacaaaattagcgatgattttaaaaaaacgttattaagtaagataccttcaggcactcttggaactggggaggacgtttcaaactgtgtggcgtttttagcttcagatatggcaaattacattaatggtgaaactttacatgttaatggcggaatgtatatggcttgac

SEQ ID NO: 204354 - DNA, 502 bp, Unknown
  Bacterial polypeptide expressing nucleotide sequence isolated from the Sargasso Sea
atgtctcccagcgcttctcttgccggtcagaccgccctggtgacaggaggaggtcgcggcatcggccgggccatcgccctagccctgggtgaagtgggtgcagaagtcgttgtgaactactccaattccgccgctgcagcggacgaggtggtcgctgcgatcactgccgcagggggccaggcctatgccctgcaagccaatgtgtctgtcgaggcagaggtggatggcctgatcaaacaggtgcttgaacgcagtgggcgcctggatgtgttggtgaacaacgccggcatcacacgggacggcctgctgatgcggatgaaaaccgacgattggcaagcagtgatcgacctcaatctcagtggtgttttcctctgcacgagggctgtggcacgcccgatgctgaagcagaaaagtggccgcatcatcaacatcacctctgttgtggggctcatgggcaacgctggccaggccaactacgccgccgccaaagccggcgttatcg

SEQ ID NO: 204355 - DNA, 802 bp, Unknown
  Bacterial polypeptide expressing nucleotide sequence isolated from the Sargasso Sea
gatgtcatccgtcgccgctcgtgccctcgcctcccgaaccgccgtcgccaagttcgccccgcgcgcgatctccgcgcggcgcgcggcgcgcgccgtgcgcggtgcggtcgcggtcccgcgcgccgaagcctcgggcccggtctgcgtcgtcaccggtgcgtcccgcgggatcggtgcggcgatcgcgctcgcgctcggttccgcgggcgcgcgcgtcgtcgtcaactacgccgcgagcgagggtccggcgaacgaggtttgcgaaaagatcaaagctgcgggcggggacgcgatcgccgtcaaggcgaacgtcgccgagccgggggaggtcgacgcgctcttcaaggcgacgatggacaagttcggtgaagtgaacgtgctcgtgaacaacgcggggatcacgagagacacgctcatgatgcgcatgaagttgaaacagtggcaagaggttatcgacctcaacctcaccggcgtcttcttgtgctcgcaagcggcgaccaagttgatgggtaagaagaagccggtctctggccgtatcatcaacatcacctccgtcgtcggtgtcaccggtaacgctggtcaagccaactatgccgcggcgaaggcgggcgtgatcggtttgacgaagacgattgcgcgcgagtacgccggtcgtaacattcagtgcaacgccatcgccccgggcttcatcgcctccgacatgacggcggttctgggtgaagagttggaaaagaagattctcaccaccatcccggccggtcgatacggccagccggaagaaattgccggcttggtgaaattc

SEQ ID NO: 204356 - DNA, 703 bp, Unknown
  Bacterial polypeptide expressing nucleotide sequence isolated from the Sargasso Sea
actgggcgcaacaggaggaataggaaattctttagttgaaaaattttataattatggctcatcaattgttgcaaccggaactaatgaggaaaaattaaataatcttaaaaaaaagtatccaaacattctaattgaaaaatttaaattagaagagcatgataagatagaaaatttcatagaaactattacaaaaaaattagatggattggatgtgttggttaataacgctggtattacttcggataatttatccataaggttaacagaggaacactggaaaaaagttttagatattaatttaacttcgacttttttaatgtgcaaatatgttataaaaaaaatgctcaaaaacaaatatggaaaaataatcaatattacttctatagttggtcatactggaaatttagggcaggccaattatgcagcatcaaaagctggcattataggtttctcaaaaagtttagccatcgagtatgcaaaaaaaaatataaatataaattgcgtttctccaggatttattaaaacagagatgacagataaaattaatgaagaatttaaaaaaattttaatcagtaaaattccatcaggtgatttaggaactggcgaagacatttctaactgcgtggcttttttagcctccgacatgtcaagatatattaatggggaaacaatacacgttaatggtggaatgtatatgtcttga

SEQ ID NO: 204357 - DNA, 660 bp, Unknown
  Bacterial polypeptide expressing nucleotide sequence isolated from the Sargasso Sea
ctttggagcagaaagtttttattaattactcctcttctgatgaaaaggctgaagaagttgtaaattcaataaaaaattcaggcggtaaagctcataaattaaaattcgatgtttcaagagaggattctgtcagttcagcttttgaagaaatcataaaaattaatggctccattgatattcttattaacaatgctggtattactcgagatggactattgatgagaatgaaatcggaacaatgggatgatgtattaaatacaaacttaaaaggggtttttctttgtacaaaatatgcttcaaaatttatgatgaaaaaaaggagtggtagtatcgtaaatatttcatctgttgttggaataattggtaatcccggtcaagcaaattattctgcagccaaagctggcgttattggattcaccaaaacttgcgctaaagaatttgcttcaagaggtataaacgtaaatgcaatagctccaggctttatagaaacagaaatgactgaaaaacttaatactgaagagatacttaaagttatccctttagggaaattaggaagttgtactcaaattgcaaacttagtttcattcttagtttcaagtgatgcaggtaggtacattacaggtcagacaatcagtatagacggaggtatgagtatttaat

SEQ ID NO: 204358 - DNA, 622 bp, Unknown
  Bacterial polypeptide expressing nucleotide sequence isolated from the Sargasso Sea
atgaattttaatggaaaaacatcactgatcactggagccggaaggggcataggcaaaacaatcgctatcaaattagcagaatttggctcagatattgccattgctgatatgaatccagtcagtaatgatcttataagagagattgaaaaaaatggtacaaaatgccttccttatcagttagatgtaacagactttgaggcagttgaatcggtggttaagaaaattatcgaggaaactggaggcatccacattttagttaataatgctggaatcacacaggataacctttttatgcgaatgaaaccagaacagtggacgaaagttattgacgtaaacctcaacggagtatttcatgtgacaaaatctgtaatccggacaatggttaaacagcattcaggaagaattgtaaacatttcttctgtagtggggttctccggtaatcctggtcaagttaattatagttctacaaaatccggactaattggatttaccaaatcattgtcgcgggaggttggaactcgcggcattacaataaatgctgttgcacctgggtttataaatactgctatgacacaatctctaaacgaaaaccagcaacaagcaattctcagtcaaattcctc

SEQ ID NO: 204359 - DNA, 571 bp, Unknown
  Bacterial polypeptide expressing nucleotide sequence isolated from the Sargasso Sea
tgaaaaatttaagttagatgaacatgataaaattgaaaaatttattgaaaatgtaaatagtagattagacggattagatgtattagtaaataatgctggtatagctttagacaatctttcattaagacttactgaggaaaactggaagaaagtactggatataaacttaacatcaagttttctaatgtgcaaatgtgcaattaaaaagatgcttaaaaataaatctggaaaaataataaatattacttctattgttggacacacaggaaacataggccaagctaattacgccgcatcaaaagctggtataatcgctttttcaaaaagtttagctttggaatatgcaaaaaaaaatattaacgtaaattgtgtctcgccaggatttataaaaacagatatgactgataagataaatgaagattttaagaaaactttaattagcaaaattccatcgggagacctaggatctggcgaagatgtttcaaactgtgtagcttttcttgcatcggatatggcaaggtatataaatggtgaaactattcatgttaatggtggaatgtatatggcttga

SEQ ID NO: 204360 - DNA, 532 bp, Unknown
  Bacterial polypeptide expressing nucleotide sequence isolated from the Sargasso Sea
atgggattattagataacaaagtgatcatcatcaccggagcctctagaggaattggaaaagcaatagcacaagagtgtgttcagcaaggagctaaagttgcatttacatatctttcatctgaagagaaagcaaaagcgcttgaaagcgaattaagtaattctgggggaacagccaaaggatttaaatcagatgcttctgtatttgatgaagcgcaatcccttgttgatgccgttgttgaagaatttggaacagtagatgttttggtaaacaatgcaggtattacaagagatacgcttttaatgcgtatgtctgaacaacaatgggatgaagtaatgaacaccaatcttaaatctgcatttaacctaacaaaggctgtacaaagaaccatgttaaaagcacgaagtggatccattatcaatatgtcttctgtagttggcgttaaaggaaatgcaggacaagcaaattatgcagcctccaaagcaggccttattggatttacaaagtcggttgctcaagagcttgggtcaagaa

SEQ ID NO: 204361 - DNA, 758 bp, Unknown
  Bacterial polypeptide expressing nucleotide sequence isolated from the Sargasso Sea
aatgaaactggatggcaaagttgccttggtgacaggagccggcaccggagtgggagctgccactgcccgcttgcttgcctccaagggttgtcgtttggcgatcaactaccggaaatccgaggcgggagcgaaggaagtggtggcatcgatcatcgaatcgggaggcgaggcattcgcttgccaggctgacgttgcggaggatgccgaggcccgcgccttggttgagtctatccgggagaagtacggttgcctggatttgttggtgaacaacgcgggaatcacggaattcatacctttcgatgatttggatgcggtcaccgacgaggcctggcatcgccttatgcaagtgaacttggttggggcctttcactgtgcccgggcggcggttgcactgatgcagaaaacggaaccagcggatggggctgaaatcgtgaacgtcggatcgatcgccggcctcaaggccaccggcagttgcatcccctatgccgccagcaaggcggccttgcacaacctgaccctggccttggcccgcaccttggctcccttgattcgcgttaatgcagtggctcccggtttcatcaccggccgttggttgcaggatggtttgggcgaagggtacgaggcgaccaaggcggctttcgagaaagcaatgcccctggaagccgtatgcgatcccgaggacgtcgccgaggccattgtctcgctggtggaagggtccgacctcgtgaccggccaaattctggcatgtgacggcggta

SEQ ID NO: 204362 - DNA, 751 bp, Unknown
  Bacterial polypeptide expressing nucleotide sequence isolated from the Sargasso Sea
atgtccaatacagactcattatcaggcaaagtggctttaatcactggagctagcagaggaattggtaaagaaattgctttagaactaagtcgcctaggcgcagaggtttttattaattactcttcatcggatgaaaaagctgaagaagttgtaaattcaataaaaaattcgggaggtaaagctcataaattaaaatttgatgtatcaaaagaggattctgtcagttcagcttttgaagaaatcataaaaattaatggcacgattgatatccttattaataatgctggtattactagagatggactattgatgagaatgaaatcggaacaatgggatgatgttttaaatacaaacttaaaaggagtttttctttgtacaaaatatgcttcaaaatttatgatgaaaaaaagaactggttgtatcgtaaatatctcatctgttgttggattaattggaaatcctggtcaagcaaattattctgcagccaaagctggagttattggcttcaccaaaacttgcgctaaagaatttgcttcaagaggtataaacgtaaatgcaatagctccaggctttatagaaacagagatgactgaaaaacttaatactgaagatattcttaaagttattcctttagggaaattaggaagttgttctcaaatcgcgaacttagtatcattcttagtttcaagtaatgctggaagttacattacaggacaaacaataagtattgacggtggtatgagtatttaat

SEQ ID NO: 204363 - DNA, 564 bp, Unknown
  Bacterial polypeptide expressing nucleotide sequence isolated from the Sargasso Sea
ataaacttgatgtgacagactttgatgctgttgacttggtagttaagaagatctttgatgaaaccggaggcattcaaattttagtcaataatgctggaatcactcaggacaacctttttatgcgtatgaaaccagaacagtggttacaagtcattgacgtcaacctcaacggagtatttaatgtgacaaaatctgtaatccggacaatggttaaacagcattcaggaagaattataaacatctcttctgtagttgggttttccgggaatcccggtcaagtcaattatagttctactaaatccggacttattggatttactaaatctttgtctcgcgaggttggaactcggggaattacagtaaatgctgttgctccaggatttatcaacacagaaatgacacaagctctgaacgaaagccagcaacaggcaattctaagtcaaattcctcttggtcgcatgggtgaggcagatgatattgccaatgcagttgcttttctagcctctgaagaggcttcgtatattactggaactgttctccatgtaaatggaggtatgtactgaa

SEQ ID NO: 204364 - DNA, 715 bp, Unknown
  Bacterial polypeptide expressing nucleotide sequence isolated from the Sargasso Sea
gctggtgaccggcgcatcgcgcggcattggcgcggccattgccctggaattggcggtgcgcggctaccaggtggtgggcacggccaccacggatgaaggcgctgcgcgcatcggccaggcgctctcggcttaccctggctgccggggtgccaacctgaacgtgaacgatgtggctgcagtcgaggccttgatggacgccatcgtcaagcagcaaggcggcctgcatgtcctggtgaacaacgccggcatcacgcgcgacaccttggccatgcgcatgaaggacgatgactgggatgcggtgctggacaccaatctcaaggccgtattccgcacaagccgtgccgctattcgcccgatgatgaagcagcgctttgggcgcatcatcagcatcaccagcgtggtgggtgcgtcgggcaatccggggcaggccaactatgctgcggccaaggcgggtgtggcgggtatgacgcgtgcactggcccgtgagctgggcagccgcaacatcaccgtgaactgcgtggcacccggtttcatcgagactgacatgacctccgtgctgcccgaagaacagcaaaaagcgctcaatgcgcagatcccgctgggtcatatgggcaagcctgcggacatcgcacacgcggtggcataccttgcctcgcgcgaggctggctacgtgacggggcaggagttgcacgtcaatggcggcatgtacatgtaa

SEQ ID NO: 204365 - DNA, 461 bp, Unknown
  Bacterial polypeptide expressing nucleotide sequence isolated from the Sargasso Sea
taatctttctttaagaatgacagatgaacaatggaaaaaagttgtagatataaatttaggatcaacttttttattgaccaaacatgcaattaaaaaaatgttaaaaaacaaatatggtagaattgttaatataacatcaatagtgggacatacgggaaacttaggacaagcaaattatgcagcttcaaaagctggcatagtaggcatgtcaaaatctttagctatagagtatgcaaaaaaaaatataaccattaactgcgtatcaccaggatttatccaaactaaaatgacagataatatattagaaagtattaaagcagttttaacttctaaaataccaatgtccagattaggttctggcgaagatgtcgcgaatacagttgcttttttggcatcagacgcagcatcttatattactggagaaacaatacatgttaatggaggcatgtatatgtcttgac

SEQ ID NO: 204366 - DNA, 736 bp, Unknown
  Bacterial polypeptide expressing nucleotide sequence isolated from the Sargasso Sea
aatgattaatttcaaagataaaaaaattttaataactggagccacaggcggtataggtaattcactcgttaaaaaatttttgtcacttgagggcactgttttagctactgggacaaatagtgaaaaattagatgcacttaaaaaagagtttcctaatattagtgttcttaaatttgatatatccgagcattctaaaatcgaggaattcattgaaaatgcaaattctcaattagttggacttgatattttagttaacaatgcaggtataactatggataacttgtctttaagaatgaaagatgaagagtggaggaaagtaattgatataaatttaacttcgactttctacttatgcaagcatgctataaaaaaaatgttaagaaacaaatatggaagaattgttaatattacatctattgttggacatacaggaaatttaggacaagcaaattactctgcttcaaaagctgggatggtagcaatgtctaaaagccttgcgattgagtatgcaaaaaaaaatattacagtaaattgcgtttctccaggatttattcaatcaaagatgacagataaaattgttgaaagtataaaagctgttttaacttcaaaaatcccaatgagcaagctcgggacaggagaggatgtatcaaatacagtggcttttttatcttctgatgcagcttcttatatcactggagaaacaatacatgttaatgggggcatgtatatggcttga

SEQ ID NO: 204367 - DNA, 588 bp, Unknown
  Bacterial polypeptide expressing nucleotide sequence isolated from the Sargasso Sea
ggcgcaccgcaacggttacagccaatctggcaaaccgcgatgccgtagctggtcttgttgactccgcaagcgaggtcgtaggcggaccgatagatattttggttaataatgcgggcatcacccgtgatgggttgttaatgcgtatgaaaaatgacgactggaacgatgttttagaggtcaatttaacagcaaacatgattctatgccgggcagcgatgcgagcgatgattaaagcacgctcgggcaggataatctcaatttcatctgttgtcggtgtaactggtaatccgggccaaacaaattacgcggcatcaaaggctggaatgatcggatttagcaaatcattggcggctgaggtggcagggcgtggtattaccgtgaatgttgtcgcgcctggctttatcgaaacaccgatgactgatgttttggatgaaggccagaaagcagcgctcttaacaagagttccggtgggacggctcggaacaactgccgaaattgctgcttcagttgtttttctcgcaagtgacgaggcggcttacatcactggcaccacgatgcatgtaaacggcgggatggctatgctataaa

SEQ ID NO: 204368 - DNA, 716 bp, Unknown
  Bacterial polypeptide expressing nucleotide sequence isolated from the Sargasso Sea
tttgaattctcaatatgtttttgtatctggtgcttcgagaggcattggtcaaagcatactgaagttattttcttccaaagggtttcctgtgattggaacggctacatctcaggaaggcgttaattttatagatggaatcttatccaagtcatctggaggaggttttggaatacaacttgatctctctgataagcaatcaattgaaaatttgtttgatactttgaaggagaaagacatcaatccagagattatcgttaataatgccggtattacaagagataatatttttctgaggatgaaagatacagagtgggatgaggtaattcaggttcatcttagttctgttttttctttactgaagtttttttccaaaaaaatggtgaaaaataaatccggaagaattattaatatctcttctacttcggcatctattggaaataagggacaagctaattacgcagccgcaaaatcaggtttagaagcattttcaaggtctttagctagggaactggcaccaaggaatataactgttaattgcgttgcaccaggtttcatagagacagatatgatcaaaggcatggatgaagatactttaaagtttatgtcagatcaaattcctctgggcaggcttggttatcccgaagatgtagctgatttaatttattttctatcttcagaagaagctaattacattactggtcagactattcatataa

SEQ ID NO: 204369 - DNA, 751 bp, Unknown
  Bacterial polypeptide expressing nucleotide sequence isolated from the Sargasso Sea
atgagcgatagtcaaaacgatgaaaagaccatagcgctcgtcaccggcgcaagccgtggtatcggcgcggccgttgcgcgggtgttagtcgagcagaacatgaccgtggtaggaacctccaccagcgaagccggtgcggccggcatcagtgaggctctcagcgggctgggcggcaccggtaaggtattgaacgtcaccgatcctaaaagtgtcgacgcgctcatctcgggtattcgcgaagatctcggcgatccgctcgtgctaattaacaacgcgggcatcacgcaggacaacatactgatgcgcatgaaagaggacgagtggcagcaagttatcgacacgaaccttacggcgctgtaccgactgagtaaggcctgcctgcgtggcatgaccaaagcgcgatgggggcgcattataaatatcacctctgtcgtcgggtcgatgggcaacgcagggcagagtaattacgcggccactaaggctggcgcggagggcatggcccgctctcttgccagggagctgggctcgcgctctgtgaccgtcaactgcattgcgcctgggttcatcgacactgacatgacccgcgtgctcgcagacgagcaaagagacgttctgcagaatcagattcctttgggtcgactcggctcagccgacgatgtggccgccgcggtggcatttctggcgagtgatgccgctcaatacattactggtgagacgctgcacgtgaatggcggcttgtacatgggctgag

SEQ ID NO: 204370 - DNA, 436 bp, Unknown
  Bacterial polypeptide expressing nucleotide sequence isolated from the Sargasso Sea
atggaagaatctagggttgccgtagtcaccggggccggtcgcgggatcggtcgagcgatcgccgagagcttggcggggcagggaatgaaagtcttttgcgtgagcaaaaccgaatcttcctgcggggccgcggcggaggcaatttgcgaaagcggggcaaaggcggttgccttgcccgtggacgtctcctccggcgatgagatccggaaagcttgcgagggcatcttggaagagcacgagtgcgtggacgtccttgtaaacaacgcggggatcacgagggacaacttgcttttccgcatggaagaggcggactggaacgacgtcctcaacaccaacctcacgagttgcttccactggatcaagatgcttgggagaccaatgacccgcaagcgatggggaagaatagtcaacgtttcctcggtggtggccttacggg

SEQ ID NO: 204371 - DNA, 609 bp, Unknown
  Bacterial polypeptide expressing nucleotide sequence isolated from the Sargasso Sea
tatgaaattacttgaaaacaaagttgctttaataactggagggggaagaggtataggtagatctatatgtgagtcttttgcggaaaatggatgtaatgttgcatttacatataatagttctaaagaagctgcagaaaatctggtcgaagaattgaaaaaatatgatgttaaagtaaagtcttataaaagcgatgcatctgatcatgacaaatcagttgagcttattgagaatgttatctcagattttgatagaatcgatgtattggttaataatgcagggataacaaaagataatttactaatgaggatgagtccgtctgattttaaagatgttgtgaatgttaatttaggatctgtctttaatttaacgaaatcatcaattagaatttttctaaaacaaaaggaaggttcaataataaatattagttctatagttggagtaaaagggaatgctggtcaatctaactatgctgcttctaaagcaggtattataggattctctaaatcaatagcattagagcttggctctagaaacattagatgtaatgttgttgctcctggttttattgaaacagatatgactgattctctttcagataatgtattaga

SEQ ID NO: 204372 - DNA, 556 bp, Unknown
  Bacterial polypeptide expressing nucleotide sequence isolated from the Sargasso Sea
tgatgttaccgatcccgaagcaattgataaaatggtcagcgaggtggttggaagtcagggaaggattgatatattggtcaacaacgctggcatcacccaggataacctgatgatgcgaatgaaagcggaacaatggtcgaaggtcatcgatgtcaacctcaacggggtttttcacatcactcgtgcggttcttaagacaatgatgaaacagcgaagcggaaaaatcatcagtatttcctcagtggtaggattttctggtaatcctggacaggtgaactacagttccaccaaggccgccttggttggattcaccaagtctcttgctcgtgaagtcggttcccgcggaattacagtcaatgctgtggctccaggtttcattgatacggccatgactcaggctctcaacgaaacccagcaggaagaaattctcaggcagattcctttaaaacggatgggaatgccggaagacattgcccatgccgtcgattttctggcctcggaaaaagcggattacatcactggtacggttttgcatgtcaatggtggcatgtattag

SEQ ID NO: 204373 - DNA, 754 bp, Unknown
  Bacterial polypeptide expressing nucleotide sequence isolated from the Sargasso Sea
atgctcagctccgcctccctcgacggtcagaccgcattggtgacaggaggcggacgtggcatcggcaaagccatcgccctggccctcgccgaagctggtgctgaggtggtggtgaactacgccaattccgctggcgccgccgacgaggtggtggccagcatcaacgctgccggtgggaaggcctacgccctgaaggccaacgtctccatcgaagaggaggtggacggactgatcaaggcagtgctggagcgcagcggccgcctggacgttctggtgaacaacgccggcatcaccagagacggcttgctgatgcggatgaagaccagcgactggcaagcggtgatcgacctgaacctcagcggagtgtttctctgcagtcgcgctgtggcacggccgatgttgaagcagaaaagcggccgcatcatcaacatcacctccgtggtggggctgatggggaatgccggtcaggccaattacgccgccgccaaagccggtgtgatcggactgaccaaaagcacggccaaggaactggccagccggggcatcaccgtcaatgccgtcgcccccggcttcatcgccacggacatgaccaaggatctggacgccgacgccatcctcaaggacatccctctgggccagttcggcacccaggagcaagtggccggagccgtgcgctttcttgcggcggatccagctgccgcttacatcaccggtcaggtgctgcaggtggatggcggcatggtgatggcctgat

SEQ ID NO: 204374 - DNA, 724 bp, Unknown
  Bacterial polypeptide expressing nucleotide sequence isolated from the Sargasso Sea
atgacaaaagtagcattagtaactggtggaacaagaggtattggtgcagcaatatccatagcgctaaagaatagtggatgtaaagttgcagcaacatacggttcaaattctgaggctgcagaaaaattttcatctgaaaatggagtagaggtctttaaatggaatgtagctgatccagctgcatgtgaagatggcgttaaacaagtagttgaaaaattaggagctgttgacatcctagtaaacaatgctggaattactaaagctgcaatgacacacaagatgacaattgagcaatgggatgatgtcatcagagttgatttagactcagttttttatatgacacgatgtgtactagatggcatgagagaaaaaggatttggaagaattatttcgatttcatcaattaatggtcaaaagggtcaaatgggtgttgttaactatagtgctgcaaaagcaggagtaattggttttactaaagcacttgcccaagagacagcaagaaagaacataaccgtcaatgctgttgcaccaggttatattagcaccgaattacttgctgataccccagaaaaagtcatggaaggaattcttgctcaaattccaataggccggttaggtacagttgatgaagtatcaagaattgttaccttccttgcaagcgatgatgctggatttataactggttcaaccatatctgcaaatggtggtcagtacttctcttaaa

SEQ ID NO: 204375 - DNA, 612 bp, Unknown
  Bacterial polypeptide expressing nucleotide sequence isolated from the Sargasso Sea
tatgagtaagattgttctagtcacaggcgcttcaagaggaatcggtcttgaagctgctaaacatttctccaaagaggggtataaggtaattggtacatcgcgaggtgattttaatctgggtgagcttataggggacgaaagcgcaatctctgttcagttagacctaatgtcaaaagaaagcataaaagacttgtttgcggatcttaaatctgatgatcttctaccatcagtgctcgtcaataatgcaggaattaccaaagatcaattatttttgcgaatgaaagatgaagattgggatgatgttattgagacaaatttaaatggcttattcagagttaccaaggcttttataaaacccatggtaaaaaataaatttggaagagttatcaatatttcatcagttgcaggccttatgggaaactctggccaagtaaattattcttcatcaaaatcagcaatgattggtttctcaagatctttagctaaagagcttggatctaggaatattacttcaaatgttgttgcgcctggttttattgaaactgacatgacaacctttttgaatgataatgaaaaagttgaggtaagtaagaatatacctatgaaaagatt

SEQ ID NO: 204376 - DNA, 733 bp, Unknown
  Bacterial polypeptide expressing nucleotide sequence isolated from the Sargasso Sea
gatgaacttaaaaaataaaaaaattttaattacaggtgctactggtggaataggcaacacacttgttaagaagttcttagagttaggtgctgaagttttagctacaggtactaatgaggaaaagttgaaaaaacttaaaaacacttatccgaatgtaaaatgcttaagatttaaactcaatgatcacgataagattgaggaatttgttaatgactgttttaatgagcttggaggattggatgttcttattaataatgccggtataactttggacaatatatcggtaagattaaatcaagatgattggaaaaaagtaatagatatcaatttaacatccacatttttaatgtgtaaattttcaataaaaaaaatgcttaaaaataaatacggcaaaattataaatattacgtcagtagtgggccatacaggcaatttgggacaagctaattatgcagcatctaaagccggaataatcggtttttcaaaaagtcttgccatcgagtatgcaaaaaaaaagataaatataaattgcgtatcacccggcttcattaggactgaaatgacagataaaattagcgaagattttaaaaaaatactaattaataagataccttcaggctatctagggtcgggagaagatgtttctaactgtgtagcctttctagcatccgacctatctgattatattaccggcgaaactatacatgttaacggtggtatgtatatggcttga

SEQ ID NO: 204377 - DNA, 736 bp, Unknown
  Bacterial polypeptide expressing nucleotide sequence isolated from the Sargasso Sea
atgaaagatctagaaaaaaaaaatataattataacaggagcatctggtggaattggaaattctatagttgaaaaacttaatgaatgtggtgctaatattttagcctcaggtacaaaaatagaaaaacttgaagaattaaaaaacaaatttaataatgttaaaattttaaagtttgatatttctcaaagtgaaaaaatagaggagtttattgaaaatgcatcaaatgaactaggtggtctagattgtatagtaaataatgctggaattacacaagacaatttagctatcagaatgagcctggaagaatggaaaaatgtcataaatataaatttaacttcaactttttttatgagtaaatatgcaattaaaaagatgcttaaaaataaaaaaggaaaaattattaatattacatctgttgtagggcatactggtaatttgggacaagctaattatactgcatcaaaagcaggaattgttgcaatgtctaaaagtcttgcgatcgaatatgcaaaaaaaaatattaatgttaattgtatttcacctggatttattaaaactgctatgactgacaaaattgatgaaaaatttaaagaagttattatctcaaaaattccttctggaagattaggaacgccagaagatattgcaaatgcagttctttttttagcatcaactaaatcaaactatataaatggtgagactttacatgttaacggaggcatgtatatggcttgac

SEQ ID NO: 204378 - DNA, 730 bp, Unknown
  Bacterial polypeptide expressing nucleotide sequence isolated from the Sargasso Sea
atgaaaacagtttttgtaacaggtgcctcaagaggtattggaaaatctatagctttagagcttggaaaaaataatcaagttgttgtaggattctcaaattctcaagataaggctgacgaagtcgtagaagaaataaaaaaattaggtggagaaagtcttgctgttcaattaaatattcaagatagagattcagttgataaggcatttaatttaatagaagaagcatataaacatgtcgatattttggtaaacaatgcaggaattacaaaagacaatattttaccaagaatgaaggatgatgagtggaatgatgttattcagacaaacctaactggaaatttctatacatctcaaagagctataaaaaagatgattaaaaataaatggggaaggttaatttttatatcctctgttgtgggtatatcgggtaatcaaggccaggcaaattatgctgcatcaaaggcaggtctgataggattatcaaaatcaattagtaaagaagtaggcagcagaaatattacgtctaatgtcatagccccaggttatatagaaacagacatgacatcatttatagatgatgaaaataaagaaaatattatagaacaactttcaataaaacgtatgggtatgccagaagatattgcaaacatggtatcttttttatgcaaagatgagtcagaatatataacaggacaagtaatacctattgatggtggtctaacaacttagt

SEQ ID NO: 204379 - DNA, 736 bp, Unknown
  Bacterial polypeptide expressing nucleotide sequence isolated from the Sargasso Sea
atggggcaggaaaaaaaattagcactgattactggggcaggaagaggcatcggcaaggtgatcgcacttcaacttgccaaatccggtgcggacattgccctcaccgatctgaatcctgaacttgaggatctaaaaagtgaattgaataagcttgggagcaaatgccttgatttccaggttgatgttaccgatcccgaagcaattgataaaatggtcagcgaggtggttggaagtcagggaaggattgatatattggtcaacaacgcaggcatcacccaggataacctgatgatgcgaatgaaagcggaacaatggtcgaaggtcattgatgtcaacctcaacggggtttttcacatcacccgtgcggttcttaagacgatgatgaagcagcgtagtggaaaaatcatcagtatttcctcggtggtaggattttctggcaatcccggacaggtgaactacagttccaccaaggccgccttggttggattcaccaagtctcttgctcgtgaagtcggttcccgaggaattacagtcaatgctgtggctccaggattcatcgatacggcgatgacccaggctctcaacgaaacccagcaggaagaaattctcaggcagattcctttaaaacggatgggtgtgccggaagacattgcccatgccgtcgattttctggcctcggaaaaagcggactacatcactggtacggttttgcatgtcaatggtggcatgtattagt

SEQ ID NO: 204380 - DNA, 710 bp, Unknown
  Bacterial polypeptide expressing nucleotide sequence isolated from the Sargasso Sea
tctgagtttagcgggcaaagttgccttagtgacaggcgcgagccgtggtattggccgcgcgattgccgaaaccttagtcgaagccggtgcgattgtggtaggaactgccacaagtgagaagggcgccgcagcaattcaagaatatctgggtgacaaaggttttggtttagtgcttaatgttaccgatagtcaatccgtcaccgatttattcgattcgatcaaagaaaaagcgggtgatgttgatattctagtcaacaacgcgggtatcacccgtgataacttgctgatgcgaatgaaagatgatgaatggaacgatatcatcgataccaacctgacatcattgttcagactatcaaaacctgtgatgcgtaccatgatgaaaaagcgcttcggccggatcatcaatattggttcagtggtaggcactatgggcaatgcaggtcaagttaactactcggctgcaaaggctggtttgatcggatttacaaaatctcttgcaagagaggttgcatctcgtcaaattacagttaatgctatcgctcctggatttatccagaccgatatgactgatgagctgaccgaagatcagcaaaaagctatcatgtctcaggttccgatggaacgattagggcaagcgcaagaaattgctaatgccgtactcttcttggcatcggattctgccgcttatatcacaggcgagaccttgcatg

SEQ ID NO: 204381 - DNA, 736 bp, Unknown
  Bacterial polypeptide expressing nucleotide sequence isolated from the Sargasso Sea
aatgattaattttaaaggaaaaaaaatactaatcacaggtgccaccggaggaataggttatgctttggttaaaaaattcttatcacttgatggaacagttttagctacaggaacaaatagtgaaaaattagattctttaaaaaaagaatttcctaatctaaatgttttaaaatttgatatttcagatcattccaaggtagaagaatttattgagaatgtagcctctcaaatggttggtttagacgttttggtaaataatgcaggtatcacaatggataacctttctttaagaatgaaagatgaagaatggaaaaaagtaattgatataaatcttagctcgacattttacttatgtaagtatgcaataaaaaaaatgctcaaaaataaatacggaagaatagtaaatattacttctatagttggtcatacaggaaacctaggtcaaacgaattactcagcttcgaaagctggtattgtggcaatgtcaaaaagtttggcaatagaatatgctaaaaaaaatattacaattaattgtgtttcacctgggtttatacaatcaaaaatgactgataagatagttgaaaacattaaagcagtattaacatctagaattccaatgagtaagcttggaacaggggaggatgtctccaatactgtagcttttttatcatctgatgcagcgtcatatattactggagaaacaattcatgttaatggtggtatgtatatggcttga

SEQ ID NO: 204382 - DNA, 748 bp, Unknown
  Bacterial polypeptide expressing nucleotide sequence isolated from the Sargasso Sea
atgtttaacctagtaaataaagttgcaatcgttactggtgcatcccgtggtattggtaaagctatagcagaggctgttgctcaagcaggagctcatgtcgtctgtgtaagtagatctgaaaatgaattaattaaaatatcaagtaatctaaatgaaaatggcatgtcttcatcttatttcgtatgcgatgtttcagatcttgaggtattcaataaattggcaaaagatacaatatcaaaatataaaagaattgatattctagtaaataatgctggcataaccaaagatggccttattatgagaatgactgagtctgattggaatactgtaatagatataaaccttaaaggcgtttttaatggggtaaaatctgtaagcagacagatgatgaaacaaaaatacggtagaataataaatatttcatcgattgttggcttaataggcaatcctggtcaagcaaattatgcagcatcaaagtctggggtaatcggtttaggtaaagctgtatcaaaagaactagcgcctagaaatattactgtaaatactatagcgcctggttatattgatacagaaatggtggaaaaaatcgatgaaaaagcaaaacataaattattaaatcaaataccattaggtcgtattggttctcctgaagatatagccactacagttgtttatcttgcttctgatgaagccggatatgtctcaggtcaaacaatcgcagttgatggtggaatgacaacaacataat

SEQ ID NO: 204383 - DNA, 751 bp, Unknown
  Bacterial polypeptide expressing nucleotide sequence isolated from the Sargasso Sea
aatgtccaatacagattcattatcaggcaaagttgctttaatcactggagctagcagaggaattggtaaagaaattgctttagaactaagccgcttaggagcagaagtttttattaattactcttcttctgatgaaaaagctgaagaagttgtaaattcaataaaaaattcgggaggtaaagctcataaattaaaatttgatgtatcaagagaggattctgtcagctcagcttttgaagaaatcataaaaattaatggttccattgatattcttattaacaatgctgggattactagagatggactattaatgagaatgaaatcggaacaatgggatgatgtattaaatacaaacttaaaaggggtttttctttgtacaaaatatgcatcaaaatttatgatgaaaaaaagaagtggtagtatcgtaaatatttcatctgttgttggaataattggtaatcccggtcaagcaaattattctgcagctaaagctggagttattggattcaccaaaacttgtgctaaagaatttgcttcaagaggtataaacgtaaatgcaatagctccaggctttatagaaacagaaatgactgaaaaacttaatactgaagagatacttaaagttatcccgttaggaaaattaggaagttgtactcaaattgcaaacttagtgtcattcttagtttcaagtgatgcaggaagttacattacagggcaaacaattagtatagacgggggtatgagtatttag

SEQ ID NO: 204384 - DNA, 748 bp, Unknown
  Bacterial polypeptide expressing nucleotide sequence isolated from the Sargasso Sea
atgaaattacttgaaaataaagttgctttaataactggagggggaagaggaataggtagatctatatgtgagtcttttgcggaaaatggatgtaatgttgcatttacatataatagttctaaagaagctgcagaaaatctagtcgaagaactgaaaaaatatgatgttaaagtaaagtcttataaaagcgatgcatctgatcatgacaaatcagttgagcttattgataatgttatctcagattttgagagaatcgatgtattggttaataatgcagggataacaaaagataacttattaatgaggatgagtccgtctgattttaaagatgttgtgaatgttaatttaggatctgtctttaatttaacgaaatcatcaattagaatttttctaaaacaaaaggaagggtcaataataaatattagttctatagttggggtaaaagggaatgctggtcaatctaactatgctgcttctaaagcaggtattataggattctctaaatcaatagcattagagcttggctctagaaacattagatgtaatgttgttgctcctggttttattgaaacagatatgactgattctctttcagatgatgtattagaaaaatggaaagaaagtataccgcttaaaagaagcggtaaaccaaatgatgttggaaatgcttgtgtgtttttagcatctgatttatccagttatataactggtcaagttctccaggtagatggaggtttgttaacttaaa

SEQ ID NO: 204385 - DNA, 745 bp, Unknown
  Bacterial polypeptide expressing nucleotide sequence isolated from the Sargasso Sea
gatgactaagcgaattgcagtagtgactggtggaatgggcggcctcggcgaagcggtcagcatcaggttgaacgacgcgggccaccgggtagtcgtcacgtattcgccgaacaacaccggtgcggaccgctggctgaccgagatgcacgcggccggccgcgcgttccacgcgtacccggtggacgtggccgatcacgattcgtgccagcaatgcatcgagaagatcgtgcgggacgtcggcccggtcgacattctcgtgaacaacgcgggcatcacgcgcgacatgacgctgcgcaagctcgacaaggtcaactgggacgcggtgatccgcaccaacctcgattccgtgttcaacatgacgaagccggtctgcgaaggcatggtcgagcgcggctggggccgcatcgtcaacatctcgtcggtgaacggctcgaagggttcggtcggtcagaccaactacgcggccgcgaaggcaggcatgcacggcttcacgaaatcgctcgcgctcgagatcgcgcgcaagggcgtgacggtgaacacggtgtcgccgggctacctcgcgacgaagatggtcacggcgatcccgcaggacatcctcgactcgaagatcctcccgcagattccggcgggccggctcggcaagcccgaggaagtcgcggcgctggtggcttacctgtgctcggaggaggccggcttcgtgacgggctccaatatcgcgatcaacggtggccagcacatgcattga

SEQ ID NO: 204386 - DNA, 730 bp, Unknown
  Bacterial polypeptide expressing nucleotide sequence isolated from the Sargasso Sea
atgaaaacagtttttgtaacaggtgcttcaagaggtattggaaaatctatagctttggagcttggaaaagattatcaagttattgtaggattcggaaattctaaagataaggctgaagaagtcgtagaagaaataaaaaaattaggtggtgaaagtcttgctgttcaattaaatattgcagatagaaattcagttgatgaggcgtttaacttaatagaaaaaacatataaaaatgttgatattttggtaaataatgcaggaattacaaaagacaatatattaccaagaatgaaggattatgagtggaatgatgttattcaaacaaacctaactggcaatttctatacatctcaaagagccataaaaaaaatgattaaaaacaaatggggaaggttaatttttatatcttctgttgtggggatatctggtaatcaaggccaagcaaattatgctgcgtcaaaggcaggtttgattgggttatcaaaatcaattagtaaagaagtaggtagcagaaatattacgtctaatgttgtagccccaggatatatagaaacagacatgacatcatttattaatgatgaaaataaagaaaatattatagaacaactttcaataaaacgcatgggtatgccagaagatattgcaaacatggtatcttttttatgcaaagatgagtcagaatatataacagggcaagtaatacctatagatggtggacttacaacttagt

SEQ ID NO: 204387 - DNA, 736 bp, Unknown
  Bacterial polypeptide expressing nucleotide sequence isolated from the Sargasso Sea
cataataaaatagcaattgttacaggagcttcccaaggtattggaaaaacgattgctctagaactatcaaaaagtggtgcctttgtttattgcatcagtcgaaataaaaaagctatagaatctgttgtagatagtataataaacaatggtgggcaatcatcttcatttgcttgtgatatatctgattcagataagtttaaagacattgtagaaaaaataattaaaaaacataataaagtagatattttagtaaataacgctggcataactaatgatgctcttttaatgagaatgtcaaatgagcaatgggatcaggttattgatacaaatcttaagggcgcatttatttgtataaagtccgttgtaaagtatatgatgaaaaataaatatggaagaataataaatattacgtctattgtaggattaactgggaatgctggccaggcaaattatgcagcatcaaaatcaggcctgattggaatgacaaaatctattgcaaaagaagtagcttcaagaggtattactgctaattgtatagcgcctggttggataaaaacttctatgacagatatacttacagaagaagtgaaaaatcaatttttatcacaaataccagttggacgtataggttctgctaatgatattgcaaatacagtaattttcttagcctctgatgaggctggatacataaccggtcaaacaattaccgttgatggcggtagaataattaattaat

SEQ ID NO: 204388 - DNA, 721 bp, Unknown
  Bacterial polypeptide expressing nucleotide sequence isolated from the Sargasso Sea
tatgagtaagattgttctagtcacaggcgcttcgagaggaattggtctagaagctgctaaacatttctccaaaaaggggtataaggtaattggtacatcacgaggtgattttaatctgggcgaacttataggaaacgaaagcgcaatctctgttcagttagacctaacatcaaaagaaagcataaaaaacttgtttgcgaatcttaaatctgaagatcttttaccatcagtgcttgttaataatgcaggaattaccaaggatcaattatttttgcgaatgaaagatgaagattgggatgatgttatagagacaaatttaaatggcttattcagagttactaaggcttttataaaacccatggtaaaaaataaatttggaagagttattaatatttcatcagtcgctggccttatgggaaactctggccaagtaaattactcttcatcaaaatctgcaatggttggtttctcacgatctttagctaaagagcttggatctaggaatattacttcaaatgttgttgcgcctggttttattgagactgatatgacaacttttttggatgatgatgaaaaagttgaggtaagtaagaatatacctatgaaaagatttggtactgttcaagatgtagccaaatgcattgtgtttcttgcatctgatgaagcaaattacataactggccaaaccatttctgtagatggaggcttatttatgtattag

SEQ ID NO: 204389 - DNA, 724 bp, Unknown
  Bacterial polypeptide expressing nucleotide sequence isolated from the Sargasso Sea
tatgacaaaagtagcattagtaactggcggaacaagaggaattggtgcggcaatatccatagcactaaaaaacagcggatgtaaagttgctgcaacatatggatcaaattctgaagctgcagataaattttcgtctgaaaatggagtagaggtctttaaatggaatgtagctgacccagctgcatgtgaagatggcgttaaacaagtagttgaaaaattaggagctgttgacattcttgttaacaatgctggcattactaaagctgcaatgacacataaaatgacaattgagcaatgggatgatgttattagagttgatttagactcagttttttatatgacaagatgcgtattagatggcatgagagaaaaaggatttggaagaatcatttcaatctcatcaattaatgggcagaagggccaaatgggtgttgtgaattatagtgcagcaaaagcaggagtaattggttttactaaagcacttgcccaggagacagcaagaaagaacataacagtcaatgctgttgcaccaggctatattagtactgaattacttgctgatactccagaaaaagtaatggaaggaattctagcacaaataccaattggtagattaggcacggttgatgaagtgtctaggattgtgacatttcttgcaagcgatgatgctggatttataaccggttcgaccatatctgcaaacggtggccagtacttctcttaa

SEQ ID NO: 204390 - DNA, 712 bp, Unknown
  Bacterial polypeptide expressing nucleotide sequence isolated from the Sargasso Sea
tatgaaaacagccttagtaacaggtgcctctagaggaataggaagggctattgctctagaatttaaagaaaaaggttattctgtcatcggtacagctacctctgaaaatggtgcctcggaactgaatgacattggaattcaagggtttgttttagatcttaattctcatgaatccataggtagtttttggcaaaaactagaagacaataatcaaaatatatctctcttagtcaacaatgccggcatcactagagataatatagtcttaagaatgtctgatgaagagtggtcagatattatgaatgttcatctctatggcacttttcaactttgtaagcgatccttgaaaatgatgctgaaatctaaatggggacgtattattaatatttcctctgcatcagcctcaatcggtaatagaggtcagtcaaattatgctgcagccaaagcaggtgtagaagctttcactaaatctctagctaaagaggtgggaaaaagagatataactatcaatgccgtagctcctgggtttatttcaacagatatgacggaaaaaaatgacggtgtaaatgaggattacctcattaaagaaataccattaggtagatttggtgagccagctgaagttgctaatttagtaactttcttatgttccgaagaagcttcatatatcactggacaaaccatacatattaatggtggtctttatatgtaa

SEQ ID NO: 204391 - DNA, 421 bp, Unknown
  Bacterial polypeptide expressing nucleotide sequence isolated from the Sargasso Sea
tatgagtaagattgttctagtcacaggcgcttcaagaggaataggtttagaagttgctaaacatttttccaaagagggatataaggtaattggtacatcacgaggtgattttaatctgggtgaacttataggagacgatagtgcaatttctgttcagttagatctaatgtcaaaacaaagcataaaaaacttgtttgcggatctgaaatctcaagatcttttaccatcagtgctcgtcaataatgcaggtattaccaaagatcaactatttatgagaatgaaagatgaagaatgggatgatgttatagagacaaatttaaatggtttattcagagttactaaagcttttataaaatccatggtaaaaaataaatttggaagagttatcaatatttcatcagttgctggcctaatgggtaac

SEQ ID NO: 204392 - DNA, 730 bp, Unknown
  Bacterial polypeptide expressing nucleotide sequence isolated from the Sargasso Sea
tatgaaaacagtttttgtaacaggtgcctcaagaggtattggaaaatctatagccttggagcttggaaaaaattatcatgttattgtaggattttcaaattctaaagataaggctgatgaggtcgtagaagaaataaaaaaattaggtggtgaaagtcttgccgttcaattaaatattgcagatagaaattcagttgatgaggcatttaatttaatagaagaaacatataaacatgttgatattttggtaaataatgcaggaattacaaaagacaatatattaccaagaatgaaggatgatgagtggaacgacgttattcaaacaaacctaactggaaatttctatacatctcaaagagctataaaaaagatgattaaaaacaaatggggaagattaatttttatatcatctgttgtaggtatttctggcaatcaaggccaagcaaattatgctgcatcaaaagcaggtttaatcggattatcgaaatcaattagcaaggaagttggtagcagaaatattacgtcaaatgtcatagcacccggctatatagatacagacatgacctcattcataaatgatgaaaataaagagaatattatagaacaactttcaataaaacgcatgggtatgccagaagatattgcaaacatggtatcttttttatgcaaagatgagtcagaatatataacggggcaagtaatacctatagatggtggacttacaacttag

SEQ ID NO: 204393 - DNA, 739 bp, Unknown
  Bacterial polypeptide expressing nucleotide sequence isolated from the Sargasso Sea
aatgtttgatcttaaaggaaaaaaagctcttgttactggtgcgtctggcggtataggcggggaaatagctaaaacgcttaatgaagctggtgccgaggttgcaattagtggaacccgattagaaagtttacaggttttatcagatttgttggacggtaacacacaaatctttccatgtaatttgagtgatcctatagctatcgaggatcttttgagagatgcttccgaaaagatgggtggtatagatattttggtaaacaacgcgggtattacgcgggataatttgttcatgcggatgtcagatgaagagtggcagacagttttggatataaatttaacagcaacaatgaaactttgtaagggcgttgtgcgtggtatgatgaaaaatcgttggggtcgcatagtcaatattagttcagtggttggttctacaggtaatcctgggcaagctaattatgcagcttccaaggctggaatggtgggaatgtctaagtcgctagcttttgaagtggcaagtcggggaattacagtcaacattattgcaccaggatttattgaaacgccgatgacggataaattgaatgaagatcagaaaactaatataatgacccagatcccagcgggaagaatggggactgccgcagaaatagcatctgccgcattatatttagcaagcccggaggcaagttatttgactggagcgacacttcatatcaatggtggcatggctatgatctaa

SEQ ID NO: 204394 - DNA, 674 bp, Unknown
  Bacterial polypeptide expressing nucleotide sequence isolated from the Sargasso Sea
cttagaacttagtaatttaggtgcagaagttataataaattattcgtcgtctgatgaaaaagctgaagaagttgtaaatctaattaaagagtctggaggcaaagttcataaattaaaatttgatgtttcaaaagaagaatctgttagtagagcttttgaagaaatcataaagataaatggtgctatagatattcttgtaaataatgctggcataacaagagatgggctcttaatgcgaatgaaatcagaacaatgggatgacgttctaaatacaaacttaaaaggggtttttctttgtacaaaatatgcttcaaaatttatgataaaaaaaagaagcggaaagataattaatatctcatctattgtcggaataattggaaatcctggacaagcaaattattctgccgctaaagcaggtgttattggctttacaaaaacctgtgcaaaagaatttgcttcaagagggataaatgttaatgctatagctccaggttttatagaaacagaaatgactgaaaaactaaataacgaagagattatcaaagccataccattaggaaaactaggtagttgttcacaaatagcaaacttagtttcattcttagtctcgagtaatgctggcagctatataacaggacaaacaataagtattgatgggggcatgagtatttaat

SEQ ID NO: 204395 - DNA, 475 bp, Unknown
  Bacterial polypeptide expressing nucleotide sequence isolated from the Sargasso Sea
ggtatcacccgtgacaacctgctgatgcggatgaaggatgatgagtggaacgagatcatcgacaccaacctcacttccctgtatcgactgagcaaaccggtgctgcgcgccatgatgaagaagcgcaatggccgcatcatcagcatcggctccgtggtgggcaccatgggcaatgccggtcaggtcaactatgcggccgccaaggcggggctggttggttttaccaagtcgctggcccgtgaagtggcctcccgcggcattaccgtgaacgcggttgcccccggtttcatcgagaccgatatgaccaaggcgctcaatgaagagcagcgtgccggcatcatgagtcaggtgcctgccgctcgtctgggcgatccaaaagaaattgccgctgctgtggtattcttggcatcggatgatgccgcctacatcactggcgaaaccctgcatgttaatggcgggatgtacatggtgtaat

SEQ ID NO: 204396 - DNA, 472 bp, Unknown
  Bacterial polypeptide expressing nucleotide sequence isolated from the Sargasso Sea
atgaaaacagtttttgtaacaggtgcttcaagaggtattggaaaatctatagctttagagcttggaaaaaattatcaagttgttgtaggtttctcaaattctcaagataaggctgacgaagttgtagaagaaataaaaaaattaggtggagaaagtctttctgttcaattaaatattgaagatagaaattcagttgataaggcatttaatttaattgaagaagcatataaacatgtcgacattttggtaaacaatgcaggaattacaaaagacaatattttaccaagaatgaaggatgatgagtggaatgatgttattcaaacaaacctaactggaaatttctatacatctcaaagagccataaaaaagatgattaaaaataaatggggaaggttaatttttatatcctcggttgtaggtatatctggtaatcaaggccaagcaaattatgctgcatcaaaggcaggttgat

SEQ ID NO: 204397 - DNA, 715 bp, Unknown
  Bacterial polypeptide expressing nucleotide sequence isolated from the Sargasso Sea
atgaaagaaattatatttgtatcaggtgcatctagaggaattgggaacagcattgcaaaatattttgctgaaaaaggccatattgttttaggtacatcaagaagtaaatttaaatttgatacacagtcagataaattaatacctatacaattggatataacctctagagaagatgtaaaaaattgttttaaatacctcaaagaacagaatctacttccatcagttttagttaataatgctggcattacatcagatcaattatttttaagaatgaaagattctgaatgggatgatgttttatcaacaaacttaactggtgtttttaacttaacaaaagtatttattaaacaaatgataaaaaacaaaaatggaagaatcataaatatttcttcagtttcaggactcatgggtaaccctggtcaagttaactattcatcatcaaaagcagcgttgaatggatttactaaatcattagcaaaagaggttggttctagaaatattactgttaacaatgttgcgccaggatttattgaaacagatatgacttcatttattgatgcagataaaaaagacgaaattattaatacaattccattaggaagatttggtaatgcggatgatgtttcagaactagtttattttttatcatcaaatgaagctgcatatataacaggtcaaactatatccgttgacggtggattattgatgtattaaa

SEQ ID NO: 204398 - DNA, 721 bp, Unknown
  Bacterial polypeptide expressing nucleotide sequence isolated from the Sargasso Sea
atgagtaagattgttctagtcacaggcgcttcaagaggaatcggtctagaagctgctaaacatttttccaaagaggggtataaggtaattggtacatcacgaggtgattttaatctgggtgaacttataggagacgaaagggcaatctctgctcagttagacctaatgtcaaaagaaagtataaaaaacttgtttgcggagcttaaatctgaagatcttcttccatcagtgctcgtcaataatgcaggaattaccaaagatcaattatttttgcgaatgaaagatgaagattgggatgatgttatagagacaaatttaaatggcttattcagagttactaaagcttttataaaacccatggtaaaaaataaatttggaagagttatcaatatttcatcagttgctggccttatgggaaattctggccaggtaaattactcttcatcaaaatcagcaatggttggtttctcaagatctttagctaaagagcttggatctaggaatattacttcaaatgttgttgcgcctggttttattgagactgacatgacaacctttttgaatgatgatgaaaaagttgaggtaagtaagaatataccgatgaaaagatttggtactgttcaagatgtagccaaatgcattgtgtttcttgcatctgatgaagcaaattacataaccggccaagtcatttctattgatggaggcttatttatgtattagt

SEQ ID NO: 204399 - DNA, 721 bp, Unknown
  Bacterial polypeptide expressing nucleotide sequence isolated from the Sargasso Sea
atgagtaagattgttttagtcacaggcgcttcaagaggtattggtttagaagctgctaaacatttctcgaaagagggatataaggtaattggtacatcacgaggtgattttaatctcggtgaactcataggagacgatagcgcaatctctactcagttagacctaatgtcaaaagaaagcataaaaaacttgttcgcggatcttaaatctgaagatcttctgccatcagtgctcgtcaataatgcaggtattactaaagatcaattatttttgagaatgaaagatgaggattgggatgatgttatagagacaaatttaaatggcttattcagagttactaaggcttttataaaacccatggtaaaaaataaatttggaagagttatcaatatttcatcagttgctggcctcatgggtaactctggtcaaataaattactcttcatcaaaatcagcaatggttggtttctcaagatctttagctaaagaacttggatctagaaatattacttcaaatgttgttgcacctgggtttattgagactgacatgacaacctttctgaatgataatgaaaaaattgaggtaagtaagaatataccaatgaaaagatttggtactgtcgaagatgtagccaaatgcattgtgtttcttgcatctgatgaagcaaattacataactggtcaaaccatttctgttgatggaggcttatttatgtattagt

SEQ ID NO: 204400 - DNA, 748 bp, Unknown
  Bacterial polypeptide expressing nucleotide sequence isolated from the Sargasso Sea
aatgtctaacttattttctttagagggcaaagttgtcctaattacaggcgcaagccgtggtattggtaaagcaattgcaactatgctggttgcacaaggcgcaaaagtcgctggtacagcaacaagcgagtcgggtgcggctaacattagtgactatttaggtgataacggtaaaggttatgcattaaacgtcaccgatcctgcttcaattgaggctactttggctgcaattaaagccgacttaggcgatattgacgtactagtaaataacgcaggtatcacgcgcgacaatttactgatgcgaatgaaagaagccgaatgggacgatattatcgacactaacctaagctctattttccgtttatctaaggcagtattacgcccaatgatgaagaaaaagaacggccgtatcattaatattggttcggtagtaggcactatgggtaatgcagggcaagctaactacgctgcggctaaagcgggtgttattggtttttctaaatcactagcacgcgaagttgcctcgcgcgggattacagtgaacgtaattgcaccgggttttatccaaacagatatgaccaacgagctaaccgatgaccaaaaagcagccactttagctaatgtgccagcgggtcgtttaggtcaacctgacgaaattgcagctgcagtgtgttatttagcatctgacgctgctgcgtatgtatcaggcgaaactttgcatgtaaatggcgcgatgtatatggtttaa

SEQ ID NO: 204401 - DNA, 604 bp, Unknown
  Bacterial polypeptide expressing nucleotide sequence isolated from the Sargasso Sea
aatgataaatttaaaaaataaaaaaattgttattactggtgctaccggaggcataggaaatagcttagtcgataagtttgataagttaggagcaaatattttagctacaggtacaaatgatgaaaaacttaataatttaaaaaaaaattatgataaaattgaaatagaaaaatttaaattagatgaacatcaaaatattgaacaatttattgataagatagataaaaaattaggtggtttagatgtacttgtaaataatgctgggatcactttggacaatttatctataagacttaccgaggaaaattggaaaagagttatagatataaacttaacttcgacttttttgatgtgtaaatattccataaagaaaatgcttaaaaaaagatatggtaaaatagtcaatattacatctatagttggtcacacaggtaatttaggccaagctaattacgctgcttctaaagctggaattatagctttttcaaaaagtttagctattgaatatgcaaaaaaaaatataaacataaattgtgtttcaccaggatttatcaaaactgaaatgactgataaaattaatgaagatttaaaaagaattaataga

SEQ ID NO: 204402 - DNA, 754 bp, Unknown
  Bacterial polypeptide expressing nucleotide sequence isolated from the Sargasso Sea
atgtctaatagagaatctttaagtggaaaagttgctttaattacaggtgcaagcagagggatcggaaaggaaatcgccttagaacttagtaattcaggagcagatgtaattatcaattattcatcttctgatgaaaaagctgaagaagttgtaaatttaatcaaaaaaaactctagtggaaaagttcataaattaaaatttgacgtctcaaatgaggaatctgtaagcaaagcttttgaagaaattataaaaatcaatggcaccatagatatccttgttaataacgctggcataacaagggatggtctattaatgcgaatgaaatcagatcaatgggatgacgttctaaatacaaacttaaaaggagtttttctttgcactaaatatgcttcaaaatttatgcttaaaaaaagaagcggaaagataataaatatctcatctattgttggaataattggaaatcctgggcaagcaaattattctgctgcaaaagcaggagttattggctttacaaaaacttgtgcgaaagagtttgcttctagagggataaatgtaaatgctatagctcctggttttatagaaacagaaatgactgaaaacctaaataatgaagaaatactaaaggctatcccattaggtaaacttggtagttgctctcaaatagcgaaattagtttcatttttagtttctagtgatgcggggaattacattactgggcagaccattagtattgatgggggaatgagtatttaat

SEQ ID NO: 204403 - DNA, 748 bp, Unknown
  Bacterial polypeptide expressing nucleotide sequence isolated from the Sargasso Sea
atgagcagtactttggaactaaagggactagttgcgatcgtaaccggtggctcgcgggggataggccgaggtattgcggaagccctcgcggatggtggagcgattgtagcggtggtggacttagaggccttgggagccgctacgtccgccgccgaacttcctggagaaggccacgagggcttcgcttgtgatgtcgcaaacgctgatcaggtgaactcatgtttagctgaaatagagcaacagctgggccccgtgtcgattttggtgaacaacgccggaataacgcgcgataacctcctcatgcggatgaaggatgaagagttcgatcaagtgcttgccgtcaatttgaaagggacatttaactttacgcgagccgccgcacgaggcatgatgaaacgcagaagtggagcgattctgaacattgcatcggtggtaggtctcacaggtaatgcaggtcaagtgaattacgccgcgtcaaaggctggagtcgtagggttgaccaaaagtgtggcgaaggagtttgcatctcgcggagtccgatgtaatgcgatcgcacctggctttatccgcacgcagatgacagatgagttgtccgaagcacagagagagccgctgatgaagcagattccactcggcacgcttggcgaagttgagcagattgctgatgtcgcgcggtttctcgttgggcctgcagcaagctacattaccggccagacattggcggtagacggtgggatggtaatgtgat

SEQ ID NO: 204404 - DNA, 751 bp, Unknown
  Bacterial polypeptide expressing nucleotide sequence isolated from the Sargasso Sea
atggacaagactctcgataaacaggttgcgatcgtcacgggcgcatcgcgcggcatcggccgctcgatcgcgctcgagctcgcgcgcctgggtgcgacggtgatcggcacggcgacgagcgaatcgggcgccgctgcgattaccgcagcgttcgcggaagcgggcgtcacgggccgcggcgcggtgctgaacgtcaacgacgcggcagccgccgaggcgctgatcgacgcgaccgtgaaggaattcggcgcgctgaacgtgctcgtcaacaacgcgggcatcacgcaggaccagctcgcgatgcgcatgaaggacgaggactgggacgcggtgatcgacaccaacctgaagtcggtgttccgcctgtcgcgcgcggtgctgcgcccgatgatgaaggcgcgtggcggccgcatcatcaacatcacgtcggtggtcggctcggccggcaacccgggccaggtcaactacgcggccgccaaggccggcgtggcgggcatgacgcgtgcgcttgcgcgtgaaatcggcagccgcggcatcaccgtgaactgcgtggcgccgggcttcatcgacaccgacatgacgaagacgctgccggaagaacagcaggccgcgctcaagacccagattccgctcggccgcctcggcagcccggaagacatcgcccatgccgtcgcgttcctcgcatcgccgcaagccggttacatcaccggtacgacgctgcacgtgaacggcggcatgtacatgtcgtaac

SEQ ID NO: 204405 - DNA, 483 bp, Unknown
  Bacterial polypeptide expressing nucleotide sequence isolated from the Sargasso Sea
ttaataatgcaggcattacaagggataacattattctcaggatgtctgacgaagaatggtcaaacattatgaatgtacatctttacgggacgttccaattgagcaaaagagcattgaaaatgatgcttaaaaataaatggggtcgaataatcaacatatcgtctgcttcagcttcgatgggtaatagaggtcaatcaaattatgcagctgctaaagcgggtgtagaagcatttactaaatctcttgctaaggaagtaggtaaaagagacataactataaatgctgttgctccaggattcatctcaacagatatgactgaaaataacaaaggagtaaatgcagattatttagtaaaagaaataccacttggaagatttggtaaacctgaagaagtggcttctttaattagttttatgtgttctgatggggcttcttatataactggacaaaccatacatattaatggtggtctttacatgtagg

SEQ ID NO: 204406 - DNA, 509 bp, Unknown
  Bacterial polypeptide expressing nucleotide sequence isolated from the Sargasso Sea
cataaaaattaatggctccattgatattcttattaacaatgctggtattactcgagatggactattgatgagaatgaaatcggaacaatgggatgatgtattaaatacaaacttaaaaggggtttttctttgtacaaaatatgcttcaaaatttatgatgaaaaaaagaagcggtagtatcgtaaatatttcatctgttgttggaataattggtaatcctggtcaagcaaattattctgcagccaaagctggcgttattggattcaccaaaacttgcgctaaagaatttgcttcaagaggtataaacgtaaatgcaatagctccaggctttatagaaacagaaatgactgaaaaacttaatactgaagagatacttaaagttatccctttagggaaattaggaagttgtactcaaattgcaaacttagtttcattcttagtttcaagtgatgcaggaaggtacattacaggtcagacaatcagtatagacggaggtatgagtatttaat

SEQ ID NO: 204407 - DNA, 886 bp, Unknown
  Bacterial polypeptide expressing nucleotide sequence isolated from the Sargasso Sea
ttgttggcaagtgtggggtgtcggtggccagttgtggttgcagaacgcaattaccctccgtcgaacccacaatcgttgatttggtcattgctgcgccgtttgttgtatccgtccgctgcattgcatgtggttcagacgcagcggattgctgactggttgcatcaattaggcctgagctccacgagtgttgtgctgccgaatccagtggtttggcccctgcccgttcaggatccgatcctgcagccagaccatttcatgtcgtctgatgttcgggttgtcctcgcgatggggaccaagccctttcaaaaaggtttcgaccgactgttgcaggcgtttcaggagcttgcaccccgctatcccgatctcgtgctggcgttggttggtgtccaccccgatcatccggatcttgctgctcccctccagcggacggggtctctgcggccaagaatcgtgctgcccggccgtgtggggaatcctgctgattggtatcaaagggctgatttgtttgtactcagctctcgatacgagggaagtcccaatgttcttctcgaagcgatggctgctggctgcccctgtctggcggtggactgcccaacaggccctcacgaggtgattcgccacggtgccaatggatggcttctcccggagaggactgatggtttcgatctcgccatggggatcgagacttgcctgaaccaaccggccgaatgtcgacgactcggtcaggccgcgcgtgaaatccgtgatcagttctcacccgccaaggttcaggccatgtttcagcggtcattggagccattgttgaagccccgggtgctggttcttgtgccaacgcgtcgttcgccgacagaaacttttgtgcgggccaatctggcgcgcatgcctt

SEQ ID NO: 204408 - DNA, 433 bp, Unknown
  Bacterial polypeptide expressing nucleotide sequence isolated from the Sargasso Sea
catagattggaattagcaaaaaaagtttgctcagctgagttattgaatccaacaaactcatcaatttcagaaaagatgaaagatatggggttaaaagagggttttgatgtaggtcttgagatgtcaggatctgaatttgcattaagagatatggtagacaatatgataatgggtggaaaagttgctcttcttggcataccaagtaaggagataaaaattgatctcaacaaaataatttttaaagctttaaatttaaaagctatctatgggagagaaatatatgaaacttggtataagggcttagcattgattgactctggtttaaaaatcgaggaaataattactcatagatttaaatttgaagattataaaaaagctttcgatctcttaaatgaaggaaaagctgggaaagtaattcttagttgggattagc

SEQ ID NO: 204409 - DNA, 324 bp, Unknown
  Bacterial polypeptide expressing nucleotide sequence isolated from the Sargasso Sea
atgtaggtcttgaaatgtcaggatcagagatagctctaaaagatatgatacagaacatgatgatgggtggtaacattgcacttcttggccttccaagcaccccaattaatttggatatttctgaaattattttcaaagccttaaatatcaaagcaatttatggaagggaaatttttgaaacttggtataaaggcttagctctacttcaatccgggcttgatataaaaaatgtaataacacatgagtttcattacagtgattatgagaaagcttttgatttgttaaatcaaggtaaagcaggaaaggttattttaaagtggtagt

SEQ ID NO: 204410 - DNA, 486 bp, Unknown
  Bacterial polypeptide expressing nucleotide sequence isolated from the Sargasso Sea
gactctttagataatttaagaagaaatgatttgctaattaaaattaattctgactttaaaaataaattagatttaaaaaaggatgaatatagattaggtggagtattaattctatttaacaatcttttacaaagtttattcaaatctcaaattttaacacttggatttgttatgcttggaatttttataatgtttataattcttttcaaaaatttaaaattagctttaataggtgtagtgccaaattttatagcagctttttttatattaggtttaattggattgttgggaattcctcttgatatgatgacaataacaattgccgcaataacaataggcatagctgtagacaacagcattcattatatttatagatttaaagaggagtatgaaaaattaagaaattataataagacattgaaattatgtcattcaacagttggtaaagatattttaaatacttcaattacaatagtttttggattt

SEQ ID NO: 204411 - DNA, 250 bp, Unknown
  Bacterial polypeptide expressing nucleotide sequence isolated from the Sargasso Sea
atgaaagcccttgttaaacattctccaaaagaaggaatttggatggaagacgtcactatccctaagtgcggtgttaacgatgtaaagatcaaaattactcatactgcaatatgtggaactgacatgcatatatataattgggatgaatgggctcaaaagaatctaaatcttcctttaactgttgggcatgaattttgtggcgttatagatgaaattggcacagcagttacccaatataaggctggagatc

SEQ ID NO: 204412 - DNA, 190 bp, Unknown
  Bacterial polypeptide expressing nucleotide sequence isolated from the Sargasso Sea
catgcgcaccctcgccaaactgaagcccgaggagggcatctggatggacgagaagccggtgcccgaaccgggctacaacgacgtgatcgtgaaaattagaaagacggcgatctgcggcacggacgtggcgatatataattggaaccggtgggcgcagggagtgattccggtgagttcgcttcacatttag

SEQ ID NO: 204413 - DNA, 889 bp, Unknown
  Bacterial polypeptide expressing nucleotide sequence isolated from the Sargasso Sea
tttaccaaatataattgaaactgtggagagttttttagcgacagcgggtattggagcaatttggtcatcttgttcacctgattttggtactaatggattaattgaaagatttggtcaaataaaaccaaaaattctaataattagtgatcgatattattacaatggaaaagaaattaatataattgaaagattgcctttcattctaaaaaaaattaaatcaataaagaacgttataattataaaatatcccggaaaaaattatctaaattataataaagttaaaggaataaattattttaaatggaatgatttattaaaaattaaatataaaaaaataatttttaagaaatatgattttgagcaagaattagcaattttatattctagtggaactactggtaaaccaaaatgtatatgtcatagagctggtggaatattactgcaacatttaaaagagcaccagcttcattgtaatataaaacccagagacaatgttttttattttactacatgtggttggatgatgtggaattggcttgtttcagctttatcttcatattcatctattgttctatttgatggatttccaatgtttaaaagaaatgatttattaataaaaattgctgaaaaagaaaaaattacactatttggagttagtgcaaaatacattgactctttaagaaaattaaattttaaagcaaagttaaaatataaacttaaatctcttaaaactatatgctctactggttcaccactatctgtagataattttaattatatctataaaaatataaaaaaaaatgttcatctgtcatcaatttctggtggtactgaaatcgtttcatgttttgtattaggtaacatttatagtcccagttttttccaggac

SEQ ID NO: 204414 - DNA, 857 bp, Unknown
  Bacterial polypeptide expressing nucleotide sequence isolated from the Sargasso Sea
gagcaccaactgcattgtgaaatagttcctggtgataatgtattttatttcacaacttgtggatggatgatgtggaattggttagtaagctctcttgcttcaaaagcttccatagtactttttgatggttttcctatgtatagaaaaaatgatttactaataaaaatagcaaataaggaaaatattacactttttggaattagtgcaaaatatattgacgttttaagaaaacttaatctatcttttttatcaaaatataaacttaagaaactaaaaactatatgttcaactgggtctccattgtcagaagatggatttaaatatatttataaaaaaataaaaacaaatgttcatctagcttcaatttcaggaggcacagatattgtttcatgttttgtgttaggaaatatttatagtccagtaatctctggccagattcaaaacagcggactaggaatgaataccgatatttttaatgaaaagggaagatcaattagaaataaaaaaggagaacttgtttgtaagtctccatttccatcaatgcctaaaaagttttggaacgataaaaataatttaaaatataaaaatgcatattttaaaagatttaaaggcgtctggcaccatggagattatgctgaaaggaaaagctctaatggttatgtgatatatggaagatcagatgccacgttaaatcctggtggtgttagacttggcacatcagaaatttattcagttgttgaaaagttcaaagaaataaaagagtctatagttgttggtcaatcttgggacaatgacataaggattgtattgtttgtagttttaggcaaccctaacaaatttaatcaaaatttattgga

SEQ ID NO: 204415 - DNA, 857 bp, Unknown
  Bacterial polypeptide expressing nucleotide sequence isolated from the Sargasso Sea
agaaagttttattgccacttcaagcataggtgctatttggtcatcttgttcgcctgattttggtacatacggagtaattgaaagatttgcacaaataaaaccaaaaattttaattatttctgacagatattattataatggcaaagaaataaatgttattgaaagactttctataattttaaaaaaaattaaatcgattaaaactgttataattgtaaattatcctggaaaaaactacctaaatcataaaaaaaaaaaaggaattacatatttgtattggaaagatttaaaaaaaataaattataaagaaattcaatttaaaaaatatgattttgataatgaattagcaatattatattctagcggaactactggcaaaccaaaatgtatatgtcatagaactggaggcgtgctgttacagcatctgaaggaacatcaacttcattgcaatataaaaccaaaagataatatattttattttactacgtgtggttggatgatgtggaattggttaattacttcattagcttcaagagcctcaattgttttgtttgatggttttccaatgtataaaaaaaatgatttgttaattaaaattattgagagagagaaaattacattgtttggtgtgagtgctaaatatattgatacattaaaaaaattaaatattaaggcaaatttaaaatataaacttaaaacattaaaaacaatctgttccactgggtctccgctatctaaagatgggtttaagtatatttataaaaatattaaaaaaaatgttcatctttcatcaatttctggaggcactgatatcgtttcatgttttgttttgagaaatatttatagtccagttatat

SEQ ID NO: 204416 - DNA, 154 bp, Unknown
  Bacterial polypeptide expressing nucleotide sequence isolated from the Sargasso Sea
aatgaaagctctaataaaaaaatatccgaaaaaaggcatatggatggaaaacgtaccacagcctaagtgcagggataatgaagtaaaaataaaaattacacacacagctatttgtggaacagatttacatatttacaattgggactcttgggct

SEQ ID NO: 204417 - DNA, 955 bp, Unknown
  Bacterial polypeptide expressing nucleotide sequence isolated from the Sargasso Sea
attactaatttttttagtaacatttcagtttcaaaccaaaatactatattttggaacaaccataataattatatttctaagtatattagggatttcaaagctcgaggttgaaaatagttttataaattattttgataaaaatactgaaatatataaaggaatgaagctcattgatgaaaagttgggtggcacaacaccgctcgaagttattttaaaatttccaaaacaaaatgaaactgatcaaaaatcagaagatgaagaggatgattggggagatgaagatgaaaatgatgaaaaatattggtttactaaagacaaaattgataaaataaaaaaggttcatagttatttagattctttagagccaattggaaaagttctctctttttcatcaataattgatgttgctactcaattaaataataataaagaacttggatctttagaaatgggtgtcttatatactaagatccctgataacataaaaaaagaaattgttgatccatatatatctataaaagactctgaggctagaataagcttaagaataaaagattcattagataatctgaggagaaatgatttacttattaaaataaattcagatcttgagaatatattaaatttaaaaaaagatgaatttaaattaggtggtgtattaattcttttcaacaatcttttacaaagtttatttaaatctcaaattttaacacttggatttgttatgcttggaatttttataatgtttataattctatttaaaaatttaaaattagctttaataggtgttgttccaaattttattgcagctttttttatattaggattgataggattgttaggaattccacttgatatgatgacgattacaatagctgccataactataggtatagccgtagataatagtattcattatatttatagatttaaagaggagtatgcaaagttaaga

SEQ ID NO: 204418 - DNA, 2077 bp, Unknown
  Bacterial polypeptide expressing nucleotide sequence isolated from the Sargasso Sea
cataatgtaatcacactattagatattccattattaagcagctctgatgagcctcttattgaaagactacaaacttactcaacactaacatcaccgaacattgataaagaaagaggatttaatgaaatattgaatagtcctgttttcagaaattttgttatcagcgaggatggtaaaacatctggtattatagtttacttaaaatcgaaagataaagttacagagtttaaaagtaaaatagaagaagaattatataaagataatttaaaaaaacaaaaccatcaaaatattttagaaataagacaaataattaaaaattttgattcaactagtaaaattcatttaggaggcattcctatgattgctgatgatatgatgacctttataaaaaatgatataatagtttttggtcttggcgtttttgtatttattgttgctactctttggtatgtatttagaaaattaatatgggtaattgtcccaattagtagttgttttttttcagtattaataatgactggacttttaggtctcttgggatggaaagttactgttatatcatcaaactttattgctttaatgttgatattgacgatggctatgaatattcacatcagtactaggtaccttcaactttcaaaacaatttcctaaattgaataaatttaagattatctcattaacaacaagtaagatgttttggcctatattatatacagccttaacaactatatttgctttcttgtctctagtgtttagtgaaataaaaccaataatagattttggatttatgatgacttttggtctaataatttcatttcttattacttttagtttattaccaacattaattaatttattaaattttaataaagtttctttaaaagaagagaaagggaccaaaataactaatttttttagcaacatttcaatttcaaggcaaaatactatatttgggtcaactttaataattatatgtctaagtatattgggaatttcaaagcttgaagtagaaaatagttttataaattattttgacaaaaaaacagaaatttacaaaggaatgaaacttattgatgaaaagctgggaggtacaactccacttgaagttattttaaaatttccaaaaaaagatgaaattgaacaaaaatcagacgatgaggaggatgattggggtgatgaagatgaaaatgatgaaaaatactggtttactaaagataaaattaataaaataaaaaaagttcataattatttagattccttggagccagttggaaaagttctttctttttcttctataattgatgttgctacacaattaaataataataaagaacttggatctttagaaatgggcgtcttatatactaagattcccgataacataaaaaaagaaattgttgatccatacatatctataaaagactctgaggctagaataagcttaagaataaaagactcattggatgatctaaggagaaatgatttacttattaaaatacattcagatcttgaaaataaattaaatttaaaaaaagatgaatataaattaggtggagtattaattctgtttaataatcttttacaaagtttatttaaatctcaaattttgacccttggattcgttatgcttggaattctaataatgtttatcattcttttccaaaatttaaaattagctttaataggtgttgtgccaaattttatagcagctttttttatattaggtttaattggattattaggaattcctcttgatatgatgacaattacaatagcagcaataactataggtatagctgtagataatagcattcattatatttatagatttaaagaggaatatgcaaaattaaaaagttatgataagacacttaaattgtgccattcaactgtcggtaaagctattttaaatacttcaattacaatagtttttggattttcaattttagtaatgtcaaattttataccaacaatttactttggtgtattcactgggattgctatgttgcttgcaatggtttcagttttaacgcttttaccttctttattgcttaagattaaaccattcaattaat

SEQ ID NO: 204419 - DNA, 872 bp, Unknown
  Bacterial polypeptide expressing nucleotide sequence isolated from the Sargasso Sea
gtttactaaagacaaaattgataagataaaaaaggttcataattatttagattcattggagccaattggaaaagttctctctttttcatcaataattgatgttgctactcaattaaataataataaagaacttggctctttggaaatgggcgtcttatatactaagattccagataacataaaaaaagaaattgttgatccatatatatctataaaagactctgaggctagaattagcttaagaataaaagactcattagataatctgagaagaaatgatttacttattaagataaattcagatcttgaaaataaattaaatctaaagaaggatgagtataaattgggtggagtattaattttgtttaataatcttttacaaagtttatttaaatctcaaattttaacacttggatttgttatgcttggaatttttataatgtttataattctttttaaaaatttaaaattagctttaataggtgttgttccaaattttatagcagctttttttatattaggattgattgggttgttgggaattccacttgatatgatgacaataacaatagctgccataactataggtatagctgtagacaatagtattcattatatttacagatttaaagaggagtatgcaaaattaaaaaattataataagacattaaaactatgtcattcaacagttggtaaagctattttaaatacttcaattactatagtttttggattttcaattttagtaatgtctaattttatacctacaatttattttggtgttttcacaggtattgctatgttgcttgcaatgatttccgttttaacacttttgccctctttactgcttaaaataaaaccattcaattaat

SEQ ID NO: 204420 - DNA, 206 bp, Unknown
  Bacterial polypeptide expressing nucleotide sequence isolated from the Sargasso Sea
aatagtttttaaatcaattacaattaaaggtatctatggaagagaaatttttgagacttggtacaaaatgatcgtgatgctggaaagaggacttgatataagtaaagtaattacaaaaaaagtagcagctgatgaataccagaatgcattcgatcttatgtcatctggccaagctggaaaaatagtcatggattggactgtttaaa

SEQ ID NO: 204421 - DNA, 184 bp, Unknown
  Bacterial polypeptide expressing nucleotide sequence isolated from the Sargasso Sea
gatgaaagcattagcaaaattaaaagcagaaccgggcatttggcaaacagaagtagaaatgccaaaagtaggcccaaatgatgtgctgattaaaatcaaaaaaaccgctatttgtggcactgacgtgcatatctacaaatgggatgaatgggcacaaaaactattcctcatggcatggtggtag

SEQ ID NO: 204422 - DNA, 184 bp, Unknown
  Bacterial polypeptide expressing nucleotide sequence isolated from the Sargasso Sea
ttgaatattaaaggtatatatggaagagagatgtatgagacctggtataaaatggatcagttactaaaaagcggtttagatatttcaaagttattgacccatgaattaccatctgatgaatacgaaaaagcttttgaaataatggagtcaggacaatgtggaaaaatcatattagaatggtaat

SEQ ID NO: 204423 - DNA, 223 bp, Unknown
  Bacterial polypeptide expressing nucleotide sequence isolated from the Sargasso Sea
atgaaagcgttatccaaactgaaagcggaagagggcatttggatgactgacgttcctgaaccggaagtcggtcataacgatttgctgattaaaatccgtaaaacagccatctgcgggactgacgttcacatttataactgggatgaatggtcgcaaaaaaccatcccagtaccgatggtcgttgggcatgaatatgtcggcgaagttgtggcatcggccagga

SEQ ID NO: 204424 - DNA, 572 bp, Unknown
  Bacterial polypeptide expressing nucleotide sequence isolated from the Sargasso Sea
tatgaaatcgttggtaaaacagcagccaacccgcggtatctggatgcttgataccgataagccggtaatgggtcataacgacctgctgatcaaaattcgtaaaaccgccatttgcggtaccgacatgcatatttaccagtgggacgactgggcgcagaaaaccattccggtgcccatggtagtgggccacgaatatgtgggcgaagtggttgacatgggtcaggaagtgcagggcttcaaagtgggcgatcgggtgtctggcgaaggccatatcacctgtggccactgccgtaactgccgtgctggccgccgtcacctgtgccgcaataccgaaggggtgggcgtgaaccgtgccggtgcttttgcagaatacctggtaatccctgcgtttaacgcgtttaaaattccggataacatcagcgacgacctggcctctattttcgacccctttggcaacgctgtgcacaccgcgctgtcgtttgacctggtgggcgaggatgtattgatcaccggcgccggcccaatcggcattatggctgctgcggtagcccgccacgtgggtgcccgccatg

SEQ ID NO: 204425 - DNA, 784 bp, Unknown
  Bacterial polypeptide expressing nucleotide sequence isolated from the Sargasso Sea
ggtgatagggtttccgctgaatctcatataacaggattgaatagtagaaacgctaaagcggggaaactccatctcgatcccgatacagtaaatattggagttgatagagatggtgcttttgctgaatttattacagtgccagcaaaaaatgttattaaattgccagatagtatatccgatgaaattggtgcaattcttgatccttttgggaatgcagtgcatgccactttatcattcgacttggtgggggaggatgtgctagttactggagctggaccaattgggattatgtctgctgcaattgcaaaacacgttggcgcccgtaatgtcttactcaccgatattaacgacaatagattaaagcttgcaaaagaggtttgtaatgttgaaactctaaacccacttaaggaagatttaaaagctaaaatgactgagatggccctaaaagagggttttgatgtaggtttagaaatgtcaggctcggagcgagctatcgaccaaatgatggaggctatgattatgggtggcaacatttccctattaggattgccttcagataaaattaaatttgatctgtcaaaagctatttttaaagccttaaacctgaaagctatttacggacgagaaatttttgaaacttggtataaaggtatggctctaatagattctggactaaatatagaaaacattatcactcataaattccattactcagatttttccgaagcatttgatttacttaattccggtaaggcaggaaaagttattcttgactggaattgag

SEQ ID NO: 204426 - DNA, 673 bp, Unknown
  Bacterial polypeptide expressing nucleotide sequence isolated from the Sargasso Sea
tttcgctgaatacatcagcatacccgccgtgaatgcctttgtagtgcccgattccatttcggatgacattgcctccatcttcgatcctttcggtaatgccacccacactacactttccttcgatcttgtaggagaagacgtgctgatcaccggagccggtcccatcggcatcatggcagtagccattgccaggcacgtcggggcccgtcatgtggtcatcagcgacatcaatgactaccgccttgatctggccaaaaaaatgggggcgacccgagcagttaatgtgggcaatgcttctatcgaaaatgtgatgatggaacttgatatgcaggagggatttgatgtcggaatggaactttcaggaaatcctaatgctcttgaaaatatgatcgaaaacatgaatcacggaggtaaagtggccttgcttggtttccaacccagagatgcccagatcgattggaaccatgtcatcctcaaggggctcaccctgaaagggatttatggcagggaaatgtttgaaacttggtacaaaatgggcagcatgcttcaaagtgacctcaacctctcaccagtgatcacccatcactaccccatcaatcagttcgaatcgggatttcaagtgatgaattcaggacaatcgggtaaggttatcttggattggaatggatgctag

SEQ ID NO: 204427 - DNA, 874 bp, Unknown
  Bacterial polypeptide expressing nucleotide sequence isolated from the Sargasso Sea
tatgaaagcactgagtaagcaatataataagccaggcatctggatggtcgatgtgcctgagcctgaatgtgggcctaatgatgtaaaaatcaaaattaacaaaacggcaatttgtggcacggatattcatatttttcaatgggatgagtgggctcaaagtactattcctgtgcccatggttaccgggcatgagtttgctggtcatgtggtcgaaatgggcagtgaggtgcgcggttttgaggtggggcagcgtgtctcgggtgagggtcatttagtctgcggtgtttgtcgaaactgtcgtgctggtaagcgacatttatgcccaaatactcaaggggttggggtcaatcgagcaggttgttttgctgagtatcttgtgatgccagctagtaatgtatttgctttgcctgatcaaatttctgatgaaatgggggccattcttgatcctatgggaaatgctgtgcatacggcattgtcatttgatcttgtgggagaagacgtgttaatcactggggcagggcccattggggcaatggctgtcgccgttgccaagcatgcaggtgctaggcatgtggtgattaccgatgtcaatgattaccgcctcgagttggctaatcatatgggcgccacgcatgcagtcaatgtggcaaagcaagatttagctgaggttattggcgctttaggcatgaaagaaggttttgatgtggggcttgaaatgtcaggcaatgggcaggcgtttaatcagatgctgtcatcgctatccaatggagccaaagttgccttgctaggcattcctcctcgtgatacaaccatcaattggcatgatgtcatttttaaaggcttaaccatcaaaggtatctacggtcgagagatg

SEQ ID NO: 204428 - DNA, 592 bp, Unknown
  Bacterial polypeptide expressing nucleotide sequence isolated from the Sargasso Sea
atgaaggcacttgtaaagcgggaagcctgtccagggttatggcttgaggacgtgccggttccggacgtaggaattaacgatgtactgatacgagtagatcgtacgggaatttgtggaacggatctccacatctacaactgggatgcctgggcacagaaaacaattcctgttccgatgactgttgggcatgaatttgttggtgagatcattgctgttggatccaatgtatatgatttttttccaggtgagattgtctctggtgaaggccatgtggtctgtgggcgttgcaggaactgtcttgctggacggcgccatctgtgcaaagacacacaaggagtaggtgtgaatcgcccaggagcctttgccgagtacattgtcttacccatgacgaatgtttggcatcatgcttctgatattgatcgagatattgcatcaatttttgacccacttggaaatgcagtacataccgcattgagctttgatgtcctcggtgaagatgtgttgattacaggtgcagggcctattggtttgatgggtgttgccgtggcgcggcacgcgggtgcacgatatgttgttattacggatgtcaacc

SEQ ID NO: 204429 - DNA, 694 bp, Unknown
  Bacterial polypeptide expressing nucleotide sequence isolated from the Sargasso Sea
aatttaggcgtcgatagggaaggggcatttgcagaatatcttatgatgccagcgtcaaatgtcgtcgcattacctgaatcagtaagcaatgaagttggaagtattttagatccatttggaaatgcagtgcatgcaacattgtcttttgacttagttggtgaagatgtattaattactggagctggaccaataggcataatgtcagcagcaattgcagaacatgttggtgcgcgaaatgtgctcataagtgatataaatgatgaaaggctcaagctcgctcaaaaagttagcaatgcacaaacatttaatccaactaaagagaatcttaaagaaaaaatgaaatctatgggtttaaaagagggctttgatataggtttagagatgtcgggttcggaagctgcacttgatcaaatggttgatgcaatgattatgggtggcaaagttgctttactgggaataccaccagaaaaaatcaattttgatttgtcaaaagttatttttaaagccttaacattaaaagcaatttatggacgggaagtttttgaaacttggtacaaaggtttagccttgctcgattcaggtttggatataaaaaatataattacacacacgttccattacacagaatttgaagaagcattcaatttattaaattctggaaaggctggaaaggttgttcttaattggcaataga

SEQ ID NO: 204430 - DNA, 265 bp, Unknown
  Bacterial polypeptide expressing nucleotide sequence isolated from the Sargasso Sea
aatgaaagcactaagcaagttaaaagccgaaaaaggcatttggttagtcgatgcgcctaagcctgaaatgggccacaacgatctgctgatcaagattaaaaagaccgctatttgtggcaccgacatgcacatctacaactgggacgaatggtcacaaaaaaccattcctgtgcctatggtggtaggtcacgaatatgtgggtgaagtggttgatatcggtcaagaagttcgtggctttaacattggtgaccgcgtttctggcgaa

SEQ ID NO: 204431 - DNA, 709 bp, Unknown
  Bacterial polypeptide expressing nucleotide sequence isolated from the Sargasso Sea
tgccgtaacaccacaggagttggtgttaatcgcgaaggcgcgtttgctgagtacttggtgatccctgcatttaatgcatttaaaattccagacaacatatctgacgaattagcctctatttttgacccatttggcaatgctgtacacacagccctttcgtttgatctagtaggagaagatgtactaattactggtgccggtcctataggtattatggctgcagctgttgcaaaacatgtaggtgcgcgtcatgtagtaattactgatgttaacgagtaccgattagagcttgcccgcaaaatgggcgcaactcgcgcggtgaatgttgcaaatgaaaagcttgaagatgttatgaccgacctaggcatgacagaaggctttgatattggtcttgaaatgtcgggtgtgccaagtgcatttaattcaatgcttaataatatgaaccatggtggcaaaattgccatgctcggtattccaccatcagacatggcagtagattggaaccaagttatttttaaaggtttagtgattaaaggtatttatggtcgcgaaatgtttgaaacctggtacaaaatggcaagtttaatacagtcaggtcttaatttaagcccaatcattacacatcaatattctgtagatgacttccaagctggctttgatatgatgatttcaggtcagtcaggaaaagtaattttaaactgggattaat

SEQ ID NO: 204432 - DNA, 665 bp, Unknown
  Bacterial polypeptide expressing nucleotide sequence isolated from the Sargasso Sea
tatgaaagcattagtaaaagaaaaatcagaagtaggtcttaagttacaagaagtagataagcctaaagttaaatctgatgaagttttaattaaggtcaaagcaacagctatatgtggaactgatttgcacatttggaattgggatacttgggcaagcaaaacaattaaacctccaatgacagttggccatgagtttatgggagaagttattgagattggagacaatgttaagggtttagaattaggtgatagagtttcggctgaatcacatatagtgggctctattagcagaaatgccagagctggaaaactacaccttgatcctgacacagttaatttaggcgtagacagagatggtgcttttgctgaatttgtttcaattccttttaggaatgtagttaaacttccggattcagtagatgatgaaatgggcgcaatacttgatccttttggaaatgcaatccatgctactttgtcttttgatcttgttggcgaagatgttttaataacaggcgcaggaccaataggcataatgtctgcagctatagccctgcatgttggcgcaagaaaagttttaattacagatatcaatgatgacagactatctcttgcaaaaactgtgtctgctgttgagacgctaaatccatcaaaagaaaatattaaag

SEQ ID NO: 204433 - DNA, 478 bp, Unknown
  Bacterial polypeptide expressing nucleotide sequence isolated from the Sargasso Sea
tgtaagttgtgggagcaaagaaatattgtcataacggatgaaaatgattttaggctaaatctggcaaaaaaatttggtgcatcaaaagctataaatgtaaaaactcaaaacataacagatcattttaaagatttaaaaataataaacggatttgatgtaggacttgagatgtcaggaaaccctaatgccttaaatgatatgcttactcatatgcaccatggaggcaaagtttctcttcttggcttattaccaaaaactacaaatattaattgggatgacgtaatttttaaaggtttaattttaaaaggaatctatggacgtgaaatgtatgaaacttggtacaaaatgacacaaatgttaaagagtggactagatgtatcacaagtcattacacacagaatatctgtggataattttgaagagggttttagagctatggaatcaggacaatgtggaaaggttattatgagatggtaga

SEQ ID NO: 204434 - DNA, 541 bp, Unknown
  Bacterial polypeptide expressing nucleotide sequence isolated from the Sargasso Sea
atggtgggcgaggatgtgctgatcactggggcgggtccaattggaataatggctgtcgctatttgtaattttgttggtgcgcgtaatgtggtcattactgatatcaatgattatcgattaagtctagcaaaagaattaggagctacaaagataattaacacctccaaaaactcaattgaagagttttatactcagttaaatatgacaaatggttttgacgtcggcttagagatgtcagggaatcctgatgcattcaatagtatgttagagcatatgtaccatggcggcgagatagcgctattaggccttctcccaaagtctacaagcatcaattgggataatattatttttaagggtctaaaagtgaaaggtatttatggtagagagatgtttgaaacatggtataaaatgactcaaatgctaaaaagtggtttagatatttctaaagtattaacacatagattctcaatagataattttgaagaagcctttgatattatcaaatctggaaattgcgggaaagtagtccttgaatggtaaa

SEQ ID NO: 204435 - DNA, 622 bp, Unknown
  Bacterial polypeptide expressing nucleotide sequence isolated from the Sargasso Sea
gaaagtatctcggatgaaattggtgctattctggatccactgggaaacgcggtgcatacagccttatctttcgatttgatcggtgaagacgttttaataacgggagcaggtcccattgggataatggctgcggctgttactagatttgcaggtgcccgaaatattgtcattactgatataaaccaagaacgactagatctcgcaaataacgttgtggatgctgtgactgtcaacgtaatgtctcagtctctaactgacactatgtccaaattgaatctaaaacagggctttgatgttggactggaaatgtctgggagttcagctgcattcaatcaaatggtaagtgcccttgtgacgggtggaaaaattgcaatgctgggcataccaccgagtaaaacagaggtcgattggagccaaatagttttcaaatcaatcataatcaaaggcatttatggaagggaaatttttgagacttggtacaaaatgatcgtgatgcttgaaagaggacttgatgtaagtaaagtcataacaaaagagataccagctaacaaatataaagaaggttttaataccatgctagcgggtggttctggtaaaataattatggattgggcgcactaat

SEQ ID NO: 204436 - DNA, 469 bp, Unknown
  Bacterial polypeptide expressing nucleotide sequence isolated from the Sargasso Sea
cggtgcccggcatgtggtggttacagacgtgaatccataccggcttgagctggcgctgaaaatgggggccactcgcgccgttgatgtcagcaaacagaacctgaaagacgtgatgcaggagctgggcatgaccgaaggttttgatgttgggttggagatgtctggcgtaccggcagcctttaacagcatgctggataccatgaaccatggcggtaagattgccatgctgggtattccgccgtcgaccatggcgattgactggaataaggttatctttaaaggcctggtaattaaaggcatctacggccgggaaatgtttgaaacctggtataagatggcgagcttaattcagtctggtctggatttaagcccgattattacccacgaaatgccgatggaaaactataaagaaggctttgagattatgtgctcaggccagtcgggtaaggtgatcctaaactggtcttaa

SEQ ID NO: 204437 - DNA, 229 bp, Unknown
  Bacterial polypeptide expressing nucleotide sequence isolated from the Sargasso Sea
caagacgtggctatcgactggaaccaggttatcttcaagggtttggtgataaaaggtatctatgggcgagaaatgttcgagacctggtacaaaatggcaagcttactacaaagcggccttgacctttcacctatcatcacccataccttttccgttgatgactttcagaaagggtttgataccatggggtcaggacattcaggtaaagttattttggattggcagtaat

SEQ ID NO: 204438 - DNA, 808 bp, Unknown
  Bacterial polypeptide expressing nucleotide sequence isolated from the Sargasso Sea
atgagagctcttgcaaaaatacactctaaaccaggaatctgggttgttgagcgtgataaacctcattgtggtgatcatgaggtcattattaaagttaaaaaaacagcaatttgtggtactgacatccacatttatcagtgggaccaatgggcacaaaataatatccccattggcaccataacaggacatgagtttgttggcatcatccatgaaaaagggtcacatgtttccgatcattttaggataggacaaagggtttcagctgaaggtcatttaacctgtggtaaatgtcgaaattgtcttgctggcatacgccacctttgtcctaacaccaccggcattggtgtgcaacataatggagcatttgccgaatacatttctgtacctgaaagcaatctataccccatccccgatgatatctccgatgatattgcagctatttttgatccactcggaaatgctgtccataccgcactaacctatgattctgttggtgaagatattctaataacaggctctggcccaattggaatcatggctgcaatgatctgccaacacattggagcacgtcatgtggtgattactgatgtgaacgaatatcgccttcaattggctcaaaaatgtggaatccgacatgcaattaatattaataatgaaaaacttaaagatgtacaaaaatcacttggaatgaccgaaggatttgatgttagcttagaaatgtctggaaccagaagtggtctgaatgatatttttgagcaaacgcgcttaggaggcagcattgctttattaggtattttcaaaagataaa

SEQ ID NO: 204439 - DNA, 723 bp, Unknown
  Bacterial polypeptide expressing nucleotide sequence isolated from the Sargasso Sea
cgtaattgcatggctggtcgaaggcatctatgtaatgatacagcggggattggagtgacccgcccgggagccttcgcagaatacatcgctcttccacaaaccaatgtctgggagcacaagccagatattgatttggaggtggcttcgatttttgaccccttcggaaatgccacacactcggccttgagttttcccgtgctgggggaggatgttcttgtgacgggcgctggcccgatagggataatgtctgcggctattgcgcgccatgcgggtgctcggcatgtggttgttaccgatgttaatgaatatcggttgaaactggccaagaaaatgggagttacgcgtgctgtgaatgtcaggcaggaatctttaagtgaagttcagagagatcttggcatggatgagggatttgacgtgggccttgaaatgagcgggaaccccgacgcctttaatgatatgctttctaatatgtgtcatggaggcaagatcgcgatgttgggtattccagaaaaagaaatggccattgattggaacaaagtagtgttcaatatgctaaccatcaaaggcatttacgggcgtgagatgtatgagacgtggtataagatgacagtgatgctcgaggcgggactggacattgcgccggttattacacatcgatttaagttttcagattttgaaaaagggtttgaaacagctttaagcggccaaagcggcaaagtgatt

SEQ ID NO: 204440 - DNA, 800 bp, Unknown
  Bacterial polypeptide expressing nucleotide sequence isolated from the Sargasso Sea
agtccgtggttttgccaaaggcgatcgcgtctcaggagaaggccatttagtctgtggtttctgccgtaactgccgcgccggtcgtgtgcatttatgccgcaacaccataggtgtaggcgttaatcgtgaaggttcttttgctgaatacctgtctattcctgcctttaacgtgtttaaaattccggacaatattccggataatatcgcggctatcttcgacccatttggtaacgcagtgcacactgctttgtcttttgatttagtaggtgaagacgtactgatcactggcgctggccctatcggcataatggctgtggccgttgcgcgccatgtcggcgcccgtcatatcgtcattaccgacgtgaacccataccgcttagagctggcgcgtaaaatgggtgcgacccgagcagtagacgtcagtaaagaagacttaaaagacgtgatgaaagagctgggtatgaccgaaggttttgacgtgggtctggaaatgtccggcgtgccttcggcgttccgtggcatgttagacacaatcaaccacggcggtaaaattgccatgctgggtattccaccttcagatatggcggtggactggaataaggttatttttaaaggcctggtgatcaaaggcatttacggccgtgaaatgtttgaaacctggtacaaaatggccagcttaattcagtcaggtctggacttaagcccaatagttacccacgaaatgccaatggaaaactacaaggaaggttttgagattatgtgctcaggccaatccggtaaagtcattctgaactggtaat

SEQ ID NO: 204441 - DNA, 1025 bp, Unknown
  Bacterial polypeptide expressing nucleotide sequence isolated from the Sargasso Sea
gatgaaagcattagcaaaattaaaagcagaacctggtatttggcaaaccgaagttgaaatgccaaaagtaggcccgaatgatgtgctgatcaaaatcaaaaaaaccgctatttgtggtacagacgtgcatatttacaaatgggatgaatgggcacaaaacactattcctcatggcatggtcgtaggtcacgaatatgtcggtgaagttgtggacatgggctctgaggtgcgtggttttgccaaaggcgaccgtgtatcaggtgagggccatttagtttgtgggttctgccgtaactgccgtgctggtcgggtgcatttatgccgcaacactataggcgtaggtgtcaaccgtgaaggctcttttgctgaatacctgtctattccggcttttaacgtctttaaaattccggacaatattccggataatattgccgctatcttcgacccttttggtaacgccgtccatactgctttgtcctttgatttagtaggcgaagacgtactgatcacaggcgctggccctatcggtattatggctgtagcagtcgcacgtcatgtgggtgcccgccatatcgtcattacagacgtcaatccataccgcttagagctggcgcgtaaaatgggcgcgacccgtgctgtggatgtcagcaaagaaaacttaaaagacgtgatgcaagagcttggcatgaccgaaggttttgacgtgggtctggagatgtccggtgtaccatcggccttccgtagcatgttagataccatcaaccatggcggcaaaatcgcgatgttaggtattcctccttcagatatggcggtggactggaacaaggtgatttttaaaggcctggtgatcaaaggcatttatggtcgcgaaatgtttgaaacctggtacaaaatggccagcctaattcaatcaggcctggatttaaccccaatagttacccacgaaatgccaatggaaaactacaaggaaggttttgagatcatgtgctcaggccaatccggtaaagtgatcctgaactggagtt

SEQ ID NO: 204442 - DNA, 880 bp, Unknown
  Bacterial polypeptide expressing nucleotide sequence isolated from the Sargasso Sea
atgaaagctttagtaaaagcagagagcgcagtcggtttaaagctgcaagatattaatgttcctgagctccattctgacgatattcttattaaggttaaaaaaacagcaatttgtggtactgatttgcatatctggaattgggacaaatgggcaagtaatacaataaaaccacctatgactattggtcatgagtttatgggtgaagtacatgaactaggttctaatgttaaaaactttaagattggtgacagggtttctgctgaatcacacataacaggtttaaatagtagaaatgccaaagcaggtaagcttcatcttgatccagatactgtaaatattggtgtagacagagatggtgcctttgctgaattcattgcagtgcctggaaaaaatgttattaagttgccagataatatctccgatgaaataggcgcgattctcgatccttttggaaatgcagtgcatgctaccttatcgttcgatttagttggagaagatgtgcttgtaaccggagcagggccaattggaattatgtctgcagcaattgcaaaacatgttggtgctcgaaacatcttacttaccgatataaataataatagattagagctcgcaaaagaggtttgtgacattgaaatcttgaatccgcttaatgagaatttaaaagaaaaaatgaatgaaatggggcttaaagagggttttgatgttggtctagagatgtccggctcagaacaagctattgatcaaatgatggacgctatgattatgggtggcaatatatctttgctaggtttgccttctgataaaattcaatttgacctttcaaaagcaatttttaaagcactaaaccataaagctatctatggcagagaaattttgaaac

SEQ ID NO: 204443 - DNA, 655 bp, Unknown
  Bacterial polypeptide expressing nucleotide sequence isolated from the Sargasso Sea
tatgaaagcattagttaaacattcagctaaagttggaatttggatggaagatgttcctgaaccagaatgtggtacaaatgaagtaaaaataaaaattactcatactggtatttgtggttcagatcttcatatatacaagtgggatgaatgggctcaacgcacattagaattaccattagtaataggtcacgaattctgtggaataattgaagagattggccctgaggtcaaacactataaagttggagatcgtgtttctggtgaaggacacataacatgtggatcttgtcgaaattgtcgcgccggaaaaagacatttgtgtcataaaacttttggagtaggaattcagacagctggatgctttgcagaatttctagtactacccgaatcgaatgtttggtctattgatgaagaagtaagttcaaaaattgcagctttttttgatccatttggcaatgctgtacatactgccctatcgtacgatattcttggagaagatgttttaataaccggggctggtcctattggaatcatgtgtgcaagcatttgcgaatttgtaggagctagaaatgtagttataacggatattaatgaatatcggctagatctagctaaaaaacttggcgcaactaaaacaataaagtctcaaaggaaa

SEQ ID NO: 204444 - DNA, 1024 bp, Unknown
  Bacterial polypeptide expressing nucleotide sequence isolated from the Sargasso Sea
tatgaaagcacttgtaaaacattcaccaaagatgggtatttggatggaagatgtcgataatccaatatgcggtaccaatgatgtaaaaataaaaataacgcatactgcaatttgtggaactgatatccatatatatgattgggatgaatgggcagagaaaaacctagaactgccgctaatagtaggtcatgaattttgcggaattattgaagaaattggaaatggtgtaactcattacgaagttggagagcgtgtatcgggagaggggcatttgacttgtgggtattgtagaaattgcagagctggaaaacgccacctttgccacaaaactaagggcgttggtattcatcgaagtggggcatttgcggaatatttagtaattcctgaatcaaatgtatggcctatccataaagatattccatccgaaattgcagctttctttgatccattcggcaatgctgtacatactgcacttacatatgatttaatcggcgaagatgtattgatttctggagcagggcccataggtataatggctgcagcaatttgtaagttctccggctcaagaaatattgtaattacagatataaatgattaccgtttaaacctagcattgaaacttggcgctacaaaagcaataaacccaataaaagagaatattaaagatgtatttaaagaattgaatattaaacatggttttgatatcggacttgagatgtcaggtaaaccggaagcatttaaccaaatgatcaatcacatgtataatggaggaagtattgcgcttttaggattgctaccagaatcaacaacaatcaattggaacgatgtcattttcaaagggctaaatattaaagggatttatggtagaaaaatgtatgatacatggtataaaatgacacagatgattagaagtggcctatcaatttctgaagttttaacccatcgttttaaggttgatgattatcaggatgcatttaaaaaattaaaatcaggaaattgtggaaaggttatcttagagtggtga

SEQ ID NO: 204445 - DNA, 1024 bp, Unknown
  Bacterial polypeptide expressing nucleotide sequence isolated from the Sargasso Sea
atgaaagcattagtaaaaaagaatccagaaaagggaatttggattgaggatgttcctgaacctcaatgtagcacaaatgatgtaaaaataaagatcacgcatacagcaatatgcggaacagatcttcatatttttaattgggataattgggcaaaaaggacacttgaactcccattgatcattggccatgaattttgtggtatcgtagaagaggttgggccaggagtaacgcactataaacctgggcaacgtgtatcaggagaaggccatattacctgcggacattgtaggaactgcagggcaggaaaaaggcatctttgtgatcaaacgattggaatagggatacatcgagatggagctttcgcagaatttttagtaattcctgaatcaaacgtttttcctatccatgatgaaattccttctgagatcgcgtctttctttgatccttttggaaatgctgttcatacttcattatcatatgaaatggtaggtgaagatgtactcataactggggccgggcccattggggtcatggcagttgctatttgtaattttgttggtgctcgcaatgttgttgtgacggatatcaatgactatcgtctagagttagcaaaagcaatgggcgctaataaagttattaatattgctaaaaactcaattaaagagttttaccctgaattaaatatgataaatggttttgatgttggcttagagatgtcaggcaatcctgatgcatttaacagtatgttagatcatatgtatcacggtggcaagatagcacttttgggccttcttccgaagtctacgaatatcaattgggataatattattttcaaggggctaaaagtgaaaggtatatacggaagagagatgtacgaaacatggtacaaaatgacacaaatgctcaaaagtggtttagatatatcaaaggttttaacacatcgaatagcaatagacgattatgaacaagcatttaagattattgaatctggagattgcgggaaagtagtccttgaatggtaaa

SEQ ID NO: 204446 - DNA, 1027 bp, Unknown
  Bacterial polypeptide expressing nucleotide sequence isolated from the Sargasso Sea
atgaagtcgctagttaaagcgaaagcagaaaaaggcatttggctacaagacacgccagagcctgaagtagggcacaatgacctactgattaaaattcgcaaaaccgctatttgcggcaccgacatgcacatttacaactgggacgattggtcacagaaaaccattccggtacctatggttgtaggccacgagtatgtgggtgaagtcgttggtatgggccaagaagtgaaagggtttaaggttggcgaccgtgtttcgggcgaaggccatattacctgtggccattgccgtaactgtcgtgcaggtcgcgtacatttgtgtcgcaacactgaaggcgtaggcgtaaaccgcccgggcgcttttgctgaatacttggtcattcctgcatttaacgcgtttaaaattccagacaacattagtgacgaccttgcgtctatctttgacccgtttggcaacgctgttcacactgcactaagtttcgacttggtgggtgaagacgtgctgataacaggtgctggcccaataggtattatggctgctgcagttgcaaagcatgtaggtgctcgtcatgtcgtggttaccgacattaacccttaccgtcttgagcttgctaaaaaaatgggggcaacccgcgccgttgacgtaagcaaggaagacttgaaagatgtaatgaacgaacttggtatgacagaaggcttcgatgtgggtctggaaatgtctggtgtgccggtggctttcagagacatgctgaacaaaatgaaccatggcggcaaaattgccatgctgggaatacctccacaagatgttgccatcgattggaaccaggttattttcaaaggcttggtgataaaaggtatctacggccgtgaaatgttcgaaacatggtacaaaatggcgagcttgctgcagagcggcttagatctatcgcctatcatcacacacaccttttctattgatgactttcagaaagggtttgataccatggggtctggacactcaggtaaagttattctggactggcaataat

SEQ ID NO: 204447 - DNA, 760 bp, Unknown
  Bacterial polypeptide expressing nucleotide sequence isolated from the Sargasso Sea
ccatatcacctgcggccactgccgtaactgccgcgctggtcgtacccatttatgccgtaacacctcaggtgtgggtgtaaaccgcgaaggttcatttgccgaatatttggttatcccggcctttaacgccttcaaaatccccgatgatatcagcgacgatttagcctctatctttgatccattcggtaacgcagtacacacagcgctgtcattcgacttagtgggcgaagacgtgttaatcactggcgcgggccctatcggtattatggctgcggccgtatgtcgccacgttggtgctcgccatgtggtcattaccgacgttaacgaataccgcttagagttggcccgtaaaatgggtgctacccgtgccgttaacgtggctcaggaaaacctgaaagacgtgatgaaagaactcggaatgaccgaagggtttgacgtgggtctagaaatgtctggcgtaccttctgccttccacgccatgttagataccatgaaccacggcggcaaaatcgcgatgctcggcattccaggtggcgaaatggcgattgattggagcaaagtgatcttcaagggtctggtcatcaaaggcatttacggccgtgaaatgttcgaaacctggtacaagatggcaagcttgatccaatctggcttagatatttcgcctatcatcacccatcactacaagattgatgatttccaaaaaggcttcgacgctatgggctcgggccaatccggtaaagtcatcctcagctgggattaa

SEQ ID NO: 204448 - DNA, 1024 bp, Unknown
  Bacterial polypeptide expressing nucleotide sequence isolated from the Sargasso Sea
atgaaagcattagttaaacattcacctaaagttggtatttggatggaagatgtccccgaaccagaatgtgggacgaacgaagtcaaaataaaaattactcatactggtatctgtggttctgatcttcatatttacaaatgggatgaatgggctcaacgcacattgaatttacctttagttattggtcatgaattttgtggaataattgaagagattgggcctggagttacgcactataaagttggtgatcgagtttctgctgagggacacataacatgtggatcttgccgtaattgtcgtgctggcaaaagacatttatgctataaaactcttggtattggcatacaaagggccggatctttcgcggaatttctagtgatacctgaatcaaatgtttggcttattgataaaaaaataaatccaaaaattgcagctttttttgacccatttggcaatgcagtacatactgctctatcatatgatattgttggagaagatgttttaataactggtgctggtcctattgggatcatgtgtgcaagtatatgcaaatttgtaggagcaaaaaatgtagtcataacagatgtaaatgaatatcgtttaggtcttgctaaaaaacttggtgctacgaaagccataaatgtatcaaaggaaaaaattgaggattgctttgatgagcttgatataatgaatggttttgatatagggctcgaagtttctggaaacccccaagcatttaaaaatcttttatcagttatgtataacggagggtctgttgctttattaggattgcttcctgattctacccaaattaattgggatgatattatttttaaaggattgaatgtcaaaggcatatatggaagagagatgtatgaaacttggtataaaatgaatcagttattaaaaagtggcttagatatctcaacaatattaacccatgaatttccagttgatcaatacgaaaaagcatttgagataatggaaacgggtcaatgcggaaaagtaatattggaatggtaac

SEQ ID NO: 204449 - DNA, 1030 bp, Unknown
  Bacterial polypeptide expressing nucleotide sequence isolated from the Sargasso Sea
atgaaagcgctctccaaactgcacaaagaagtcggcatctggatgacggacgtaccggcccccgaactcggccacaacgacctgttgatcaagatccgcaagaccgccatctgtggcaccgacatccatatctacaactgggacgagtggtcacagaagaccatcccggtgcccatggtggtcggccacgaatacgtcggggaagtggttgccatcggccaggaagtgcgcggcttcgcggtcggagaccgggtatccggtgaaggccatatcacctgcggccactgccgcaactgtcgcgccggccgcacccacctgtgccgcaacaccataggcgtcggcgtcaaccgccccggcgccttcgccgagtatctggtgatcccggccttcaacgccttcaagctgccggacaacgtccccgatgaactggccgccatcttcgatccgttcggcaacgcggtgcacaccgccctctccttcgatctggtcggtgaagacgtgctgatcaccggcgccggccccatcggcatcatggccgccgccgtctgccgccacgtgggagcccgccacgtggtgatcaccgacgtcaacgaataccggctcgagctggcccgcaagatgggtgccactcgcgccgtcaacgtggccaaggaacagctcagcgacgtgatgagcgagctcggcatgaccgaagggttcgacgtggggctggagatgtccggcgtgcccagcgccttccaggacatgatcgacaagatgaaccacggcggcaaaatcgccatgctcggcatcccccccgccaccatggccatcgactggggcaaggtgatcttcaagggactgtttatcaaagggatctacggtcgtgaaatgttcgagacctggtacaagatggccagcctgatccagtccgggctggatctctcccccattattacccaccgcttccacatcgacgacttccagcaagggttcgatgccatgcgctcaggccagtccggcaaggtgatcctcagctgggacaaataag

SEQ ID NO: 204450 - DNA, 835 bp, Unknown
  Bacterial polypeptide expressing nucleotide sequence isolated from the Sargasso Sea
catgattttgtggagttgtgaggaaattggtccaggagtgactcattataaaacaggccaacgtgtttctggcgagggacacataacctgcgggaattgtagaaattgtagagcaggcaaacgtcatttatgtcagaaaagcattggaatcgggatacaaagaagcggcgcatttgcagaatacgtagtaattcctgaatctaacgtttggccacttcatgatgacataccatctgagattgctgctttttttgacccttttggtaatgcagttcatacatcccttagttatggaatggtaggagaagacgtacttattacaggtgcaggtccaattggtctaatgtcaattgcaatatgtaattttgtgggcgcaagaaatgtggtaataacagataaaaacaaatatcgattagaattggcaaaaaaaatgggtgcctcaaaagcaatcgatattacaaaatattcaatctctgaattttatccccaattaaaaatgacaagtggttttgatatcggtttagaaatgtcaggaaacccaaaagcattttcatcaatgctagagcacatgtatcacggagcaaatattgctctcttaggactgctgccagattctactaaaataaattgggacaatatcatttttaaaggtttgaacgttaagggaatatatggcagggagatgtatgagacatggtataaaatgactcagatgttaagaggcggacttgatatttcccaagttttaactcatagaattccaatagatcaatttcaagatgcatttagaataatggagtcaggaaattgtggaaaagttgttttagaatggtaa

SEQ ID NO: 204451 - DNA, 1027 bp, Unknown
  Bacterial polypeptide expressing nucleotide sequence isolated from the Sargasso Sea
tatgaaagcattagtaaaaaaatattcaaaacctggccttattttagaagaaatgccaattcctgaattaggaacaaatgatatattaatcaaagtgctaaagacttcaatttgtggaactgatatacatatttaccaatgggacaaatgggctcaaaataatataaatactcctttaattatcggtcatgaattcatggggagagtagaagatattggtgatggcgtgactcactataaaaaaggagatattgtatccggtgaaggacatattacatgtggtaactgtagaaattgtcgggcaggcatgaggcacttatgccatagaactataggtataggaattgaccgtagtggtgcttttgcagaatatttatctttaccagaaagtaatatttggccagttcataaagatattaatatagatatagcttcttgttttgatcccttaggaaatgcagtccatagcgctctcagttattcaatggtagcagaagatgttttaattacaggtgctggtcctattggttgtatggccacagctatatgcaaaatgctgggcgcaagaaatgtggttatttctgatagcaataaattcagattaaaaattgcagaaaaaatgggcgcagatagaactataaacataacaaatgagaatattgaagattgttttcaagaattaaaaatatctaatggttttgatattggactcgaaatgtcaggcagccctgatgcattacaagaaatgataaaaacaatgtatcatggtggtaaaattgcgctactgggtattttaccaaatgatactttagtaaaatgggatgaaataattttcaaaggtttaaaaataaaagggatttatggtagagaaatgtttgaatcttggtataagatgaatcaattaattcgtagcggtctagatatatctccaatcattacgcacaaattcaaacctgatgatttccaattagcttttgaaacagctgaaagtggtcagtgtggtaaagtgattatagaatgggattga

SEQ ID NO: 204452 - DNA, 1027 bp, Unknown
  Bacterial polypeptide expressing nucleotide sequence isolated from the Sargasso Sea
atgaaagcactaagcaagttaaaagccgaaaaaggcatttggttagtcgatgcgcctaagcctgaaatgggccacaacgatctgctgatcaagattaaaaagaccgccatttgtggcaccgacatgcacatctataactgggacgaatggtcacaaaaaaccattcctgtgcctatggtggtaggtcacgagtatgtgggtgaagtggttgatatcggtcaagaagtacgtggttttaaaattggtgaccgcgtttctggcgaaggccatatcacctgcggccattgccgtaactgccgcgcgggtcgcacgcatttatgccgtaacacctccggtgtgggtgtaaaccgtgaaggttcatttgccgaatacttagtgatcccagcctttaacgccttcaaaatccccgatgatatcagcgatgatttagcctctatcttcgacccattcggtaacgcagtgcacactgcgctgtcattcgacttagtgggcgaagacgtgttaatcactggcgccggccctatcggtattatggctgcagccgtatgccgccacgttggtgctcgccatgtggttattaccgacgttaacgaataccgtttagagctggcgcgtaaaatgggcgccactcgcgccgttaacgtggctcaggaaagtctgaaagacgtgatgaaagaactcggcatgaccgaaggcttcgacgtgggtctggaaatgtcaggcgtaccttcggccttccacgccatgttagataccatgaaccacggtggcaaaatcgcgatgctcggtatcccgggtggcgaaatggcgattgattggagcaaagtgatcttcaagggtctggtcatcaaaggcatttacggccgtgaaatgttcgaaacctggtacaagatggcaagcttgatccaatctggcttagacatttcgcctatcatcacgcaccactacaagattgatgatttccaaaaaggcttcgacgctatgggctcgggccaatccggtaaagtcatcctcagctgggattaat

SEQ ID NO: 204453 - DNA, 1027 bp, Unknown
  Bacterial polypeptide expressing nucleotide sequence isolated from the Sargasso Sea
tatgaaagcattagttaaagaaaaatcagaagtcggactcaaattgcaagaagtaaagacgcctaaaataaaatctgatgaagtgctaattaaagttaagacaacagctatatgtgggactgatttgcatatttggaattgggataattgggcaagtaaaacgattaaacctccaatgaccgttggtcatgagtttatggggaaaattatagaaattggtagtgctgttgagggattaacaataggagatagagtttcagcagaatcacatatggttggacaggtaagtagaaatgctcgagcaggtaaattacatcttgatccggatactgtaaatttaggtgttgatagagacggtgcttttgctgaattcgtttcaattccatcaagaaatgtagtgcaacttccagattctgtagataatgaaatgggagcgatactagatccttttggcaatgctattcatgctactttatcttttgaccttgttggggaagatgttttgataacaggagcaggaccaataggtattatgtctgcagctattgctcttcatgttggggctagaaaagttctaataactgatattaatgatgatagattatcgcttgcaaaaactgtatgcaatgttgagacacttaatccatcaaaagaaaatattgaagataaaatgaaagatatgggcctaaaggaaggttttgatatcggattagagatgtccggttcagaagctgccctagatcaaatgattgattctatgcttatgggaggaaatatagctctactgggattgccatctgatccaattaacttggatctatctaaaataatctttaaagctctaaacttaaaagctatttatggtagagaaatgtttgaaacctggtacaaaggactagctctcatcgattctgggctagatgtaaaaaatgtgatcactcattcttttcattacactgattttgaaaaagcatttcaattattgaatgaaggaaaagctggaaaagtagttcttaattgggactag

SEQ ID NO: 204454 - DNA, 1027 bp, Unknown
  Bacterial polypeptide expressing nucleotide sequence isolated from the Sargasso Sea
tatgaaagcattagtaaaagaaaaatcagaagtagggttaaagctgcaagaggtagaaaagcccaaaattaaatctgatgacgttttaatcaaggtcaaagcaacagccatatgtggaactgatttgcatatttggaattgggatgcttgggcaagtaaaacgattaaacctccaatgactgttggtcatgaattcatgggagaagttattgaaattggagatgatgttaaggatttagcattaggagatagagtttcggctgaatcacatatagtgggctgtactagtagaaatgctagagctggaaaattacaccttgatcctgatactgtaaatttaggagttaatagggatggtgcttttgctgagtttgtttcagttccttcaagaaatgtagttaaacttccagattcagtagatgatgaaatgggagcaatattagatccttttggaaatgccattcatgctactttatcttttaatcttgttggcgaagatgttttaataacaggcgcaggaccaataggcataatgtctgcagctatagctcttcatgttggcgctagaaaggttctaattacagatatcaatgatgacagactgtctcttgcaaagactgtatgtgatgttgaaacactaaacccatctaaagaaaagatcgaagataaaatgaaatccatgggcttaaaagaaggttttgatgtaggtttagagatgtcaggttcagaagttgctctagaccaaatgatagattctatgctcatggggggtaatatagctttactaggccttccatctgataagattaatctagacctctccaaattaatttttaaagctctaaatttaaaatctatttatggcagagaaatgtttgaaacttggtataaaggattagctcttatcgactctggactagatgtaaaaaatgtaattacacattcttttcattacactgaattcgaaaaagcttttgaattattaaataaaggaaaagctggtaaagtagttctcaattgggactga

SEQ ID NO: 204455 - DNA, 1021 bp, Unknown
  Bacterial polypeptide expressing nucleotide sequence isolated from the Sargasso Sea
ctggcaaagctcgaacgcggccccggcctcacgctcacgcgcgtgaagcgccccgaagtcggccacaacgacgtgctgatcaagatccgccgcacggcgatctgcggcaccgacatccatatctggaagtgggacgattgggcgcagaagacgattcccgtgccgatgcacgtcggtcacgagtatgtcggcgagatcgtcgagatggggcaggaagtgcgcggcttcgcgatcggcgatcgcgtgtccggcgaaggccacatcacgtgcggcttctgccgcaactgtcgcgcggggcgccggcacctgtgccgcaacacggtcggcgtcggcgtgaaccgcgaaggcgcgttcgccgagtatctggcgattcccgcgttcaacgcattcaagattccgccggagatctccgacgatctcgcatcgatcttcgatccgttcggcaacgcgacgcacacggccctgtcgttcaacctcgtcggcgaagacgtgctgatcaccggcgcgggcccgatcggcatcatggccgtcgcgatcgcgaagcatgtcggtgcgcgcaacgtcgtcatcaccgacatcaacgactaccggctcgaactcgcgcgcaagatgggcgcgacgcgcgcggtcaacgtcgcgcgcgagtcgctgcgcgacgtgatgtccgacctgcacatgaccgaaggcttcgacgtcggcctcgaaatgtcgggtgtgccgagcgcgttcacgagcatgctcgaggcgatgaaccacgggggcaaggtcgcgctgctcggcattccgcccgcgcagacggcgatcgactggaaccaggtgatcttcaaggggctcgagatcaagggcatctatggccgcgagatgttcgagacctggtacaagatggtcgcgatgctgcagagcggcctcgacctgtcgccgatcatcacgcaccgctttgcggccgacgattacgagaaaggcttcgccgcgatgttgtctggtgaaagcggcaaggtgattctcgactggacggcctgag

SEQ ID NO: 204456 - DNA, 868 bp, Unknown
  Bacterial polypeptide expressing nucleotide sequence isolated from the Sargasso Sea
gaaaaacctagaactaccgctaatagtaggtcatgaattttgcggaattattgaagaaattggaaatggtgtaactcattacgaagttggagagcgtgtatcgggagaggggcatttaacttgtgggtattgtagaaattgcagagctggaaaacgccacctttgccacaaaactaaaggcattggtattcatcgaagtggggcatttgcggagtatttagtaattcctgaatcaaatgtatggcctatccataaagatattccatccgaaattgcagctttctttgatccattaggcaatgctgtacatactgcacttacatatgatttaatcggtgaagatgtattgatttctggagcagggcccataggcataatggctgcagcaatttgtaagttctccggctcaagaaatattgtaattacagatataaatgattaccgtttaaacctagcattaaaacttggcgccacaaaagctataaacccaacaaaagagaatattaaagatgtatttaaagaattgaatattaatcatggttttgatatcggacttgagatgtcaggcaagccggaggcatttaaccaaatgataaatcacatgtacaatggaggaaatattgcgcttttaggattgctaccagaatcaacaacaatcaattggaacgatgtcattttcaaagggctaaatattaaagggatttatggtagaagaatgtatgatacatggtataaaatgacacagatgattagaagtggcctatcaatttctgaagttttaacccatcgttttaaggttgatgattatcaggatgcatttaaaatattaaaatcaggaaattgtggaaaggttatcttagagtggtga

SEQ ID NO: 204457 - DNA, 971 bp, Unknown
  Bacterial polypeptide expressing nucleotide sequence isolated from the Sargasso Sea
catgcgaatcagtatcttcggtttgggttatgtaggtgccgtttgtgccggctgtttgtcggcacgcggtcacgacgtgattggcgtggatatctccgcgaacaagatcgacctgatcaacaacggcaaatcgcccatcgttgaaccgggtctggaagaactgctgcaacagggtctgcgtcagggtcgcctgcgcggtaccaccgacgtcgccgccgccgttctggaaagcgatgtgtcgttcatctgcgtcggcacgccgagcaagaagaacggcgatctggagctgaactacatcgaaggcgtgtgccgcgagatcggcatggccatgcgcgacaagaacgagcgccataccgtagtggtccgcagcaccgtgctgccaggcaccgccaagaacgtggtactgccgattctcgaagattgctcgggcaagaaggcaggcgtcgatttcggcctggcggtgaacccagagttcctccgcgaaagcaccgcaatcaaggactacgacttcccgccgatgaccgtcattggtgagctggacaaggcttccggcgatctgttggccagcatctacgaagagctcgacgcaccgatcatccgcaaggacatcgaggtcgccgagatgatcaagtacacctgcaacgtctggcatgcggccaaggtcaccttcgccaacgagatcggcaacatcgccaaggccgtcggcgtcgacggccgcgaggtgatggacgtggtttgccaggaccacaagctcaacctgtccaagtactacatgaagcccggcttcgccttcggcggctcctgcctgcccaaggacgtgcgcgcgctgaactaccgcgccggcagcctggacgtggaggcgccactgattggttcgctgatgcgcagcaacgccgcccaggtgcagaaggccttcgacatcatcgccagccacgactcgcgcaaggtcgccctgctcggcctgagcttca

SEQ ID NO: 204458 - DNA, 738 bp, Unknown
  Bacterial polypeptide expressing nucleotide sequence isolated from the Sargasso Sea
aatgaattccattaaattagagaaaaatatttccttatcaaatttcactacttggggaataggtggtcctgcagaatggattgctcaaccaaaaaatattgaagagcttaaatatgtaattaattggacaaataagaaaaaaattccttgcagtgttattggtgctggatcaaatcttttaatcaatgacaaaggaattaaaggtttaagtctatgtatgcgtaatttcaaaggaattgaaattgataaaaacaatggaattatcgaagtccttagcggtgaaatgcttcctactttggctagaaaagctgctgcaagtggacttcatggcttcgaatgggctgtaggaataccaggaacaattggtggagcagtagtaatgaatgcaggagcacaagaacattgcatatctagctatctcgagagtattacaacgctatctttgacaggtgaatacaaaaggatcaaaggaaaagatctaaactttggataccgacacagtctgcttcaaaatgaaaaattaattgtcgtgtctgctcgactcaagctggcatcaggtcatgcaaaagaaattcgacaggttacaaatgaaaacttaaatcatcgattaaaaactcaaccttatcaagctcaaacctgcggcagtgtttttcgtaatccagaacctttgaaagctgcaaaattaattgaagaacttggtttaaaaggatttcgttttggtggagctgaaatatccaa

SEQ ID NO: 204459 - DNA, 859 bp, Unknown
  Bacterial polypeptide expressing nucleotide sequence isolated from the Sargasso Sea
aattcgtggtcaatatcgatttgatgccgctttgaaaacttggtttgatgttggcggtaatgctgaaatgttatttaagccagaagatgttgatgatttggcatattttctcgcaaattgtcctgctgatgttggtattaatatcttgggagctggatctaatgtaatcattgctgataagggtgttgagggcgtggtaattagaccgggaaggggttttactgatattagttataaagatggcattttaaaagcaggatctgcagtgctgtgttcgaatttaatgcaattttgtcaaaataatggtctagctggtattgagtttttgagtggcgtgccaggttcgataggtggtgcggtagcaatgaatgccggttgttacggtaacgaagtctctaaagtgctgcaaagcgtcaaagctgttgattatagaggtaatgtagtggttttcgatgttgcagagttaggaatgtcctataggaaaaataatttatctgacaaatatatttttgttgaagctagttttagagttgagacttctgatattgtcactgttaaaaacgaagttgcaaagctttgtaaacaaagacaagagtcgcagcctataagatcgaaaaccggaggaagtacttttaaaaaccctgtaaacgaaggaggtgagcaaaaaaaggcttggcaattaatagatgaagctggtttacgaggtaaggtaattggtggtgcaaaaatatcccaaaaacactgtaattttatgattaatgagggtgatgcaaaagcgcaagatttggttgatttaggtaaccttgtacgaaaaacagtcaaaaataaatttgattgcgatctggagtgggagataagg

SEQ ID NO: 204460 - DNA, 340 bp, Unknown
  Bacterial polypeptide expressing nucleotide sequence isolated from the Sargasso Sea
atgaccccaaatgttggctccttttttaaaaacccagtggttcgaactgaagtcgcagagcgtttgaaagccgagtttccggagatgccaacgtatgcagatggggcgcaaataaaattagctgccggttggatgatcgatcatctgggacttagaggtcgtcaagtaggtggtttttcagtgcataatcgccaggcgctagtgttgaccaacgatgggactggaaatgcggatgacctgagggaattggtggctttggtccgttcttcggtcaaagccacatttgggttgagcttagcggttgaaccaactcaactgggtcatttcaaccgagcctgac

SEQ ID NO: 204461 - DNA, 830 bp, Unknown
  Bacterial polypeptide expressing nucleotide sequence isolated from the Sargasso Sea
aatgtcaaaaaaaattatagaattagctgataaacttaaaagtaaaatttactcagattataatgctggtaaacatacttggttcagaacaggaggtaatgcaaaaatatttgctatagttgaagataatttagatttagaaattatactaaatgaaataaataatgaaaatttctacataataggttcaggttcaaatcttttaattagagataatggttataatggaactcttataaaattaggaaaaggatttaatactattaatattaatgataacaaacttgaagttggtgctagtattttagatattaatttatcaaatttcgcattaagacaaaatatagagggttttgaattttatagcggtattccaggatcaataggtggagcagttaaaatgaatgctggttgttatggttcggaaactgtagatgttttaaatagtatagaaatttgtgataattttggccaaagaaaaacaattactaaagataaactaaatctaaaatatagatcttcaaaaataaataatacagatatagttacaaaagctatttttaattttaattatggaaatcaaaatttaataaaagacaagattaatgaaataaagaataaacgtttagattctcagccaataaaatataaaacttctggtagtactttcaaaaatcctaaaaatcttcatgcagcaaaactaattgatgaagcaggatgtaaaggtactagttatggagatgcatatgtgagtgataaacatgcaaattttttaataaataggggaagtgcttcagcaacagatatagaaaacctaggtaaaagtatta

SEQ ID NO: 204462 - DNA, 799 bp, Unknown
  Bacterial polypeptide expressing nucleotide sequence isolated from the Sargasso Sea
ttagacggtttagtgataaaaaataatcttttgggaatatccttccaagataattttgtaaattgtgcctctggagaaaattgggataatttagtcaagagatgtttagagcaaaagctgtatggatttgaaaatctttctggtattcctggcagcgtaggagccggacccattcaaaatattggagcttatggagttgagatttcaagttttatagagtatgtagaagtgttcaacttgataacaggaaactttgaagtgtttgacgtaaatgattgcaaatttgcttacagaaatagtatttttaaagaattacctaatcatttaattacaaacattagattttcgcttagtacaaattttcaaccaaatttatcttatgaatcaattcctcaagactcagagataagttctgctgaggagttaagaaatttaattcttagtattcgaaacgaccgacttgttaatcctaatcaagatccaaatgtgggcagttttttcaaaaatccaatagtctctaagtcaaaactaaaagagttaaagaatagtttcccggaaattaaattttatgatgtcgaacatgatctttataagatttcagctgcctggttaatagaaaatataggaatgaagggaaaacaagataaaagttgtggagtgtctaaaaagcattccttggtgctagtaaatttttccgataaatcagaaagtattatcaatttatcaaataaaataaaatctatgatcaaaagtagatttgacttagaacttgaaactgaaccgacctttgttcattaat

SEQ ID NO: 204463 - DNA, 516 bp, Unknown
  Bacterial polypeptide expressing nucleotide sequence isolated from the Sargasso Sea
aatgaaaattgaagaaaaccattctataaaagatattaattctttaagaatcaatcaactagcaaaatatttctgttcgattgaaacagtagagcaatttctagaagcgatagaattttctaagctcaaaaaccttcctatactttttattggagaaggatcaaatattgttttcactaaagattatgatggattggtgatcaaaaataatatctttggaaagattgaacatgacgaaaggatagtagaaatttcttcgggtgaaaactggcataaatttgttgattggagtttatctaatgaaaggtacggtctagaaaacctagctcttatacctgggactgtgggcgcctctccaatacagaatattggagcttatggaaaagaggtttctgcgtttattaaagaggttaaatcaattaatacacttactgcagaagaaagaatattttctaaagaggaatgcaattttggttatagatccagcgtattccagaataagaaagaatattttat

SEQ ID NO: 204464 - DNA, 580 bp, Unknown
  Bacterial polypeptide expressing nucleotide sequence isolated from the Sargasso Sea
aatgtcaaagaaaatcatagaattaggtgataaacttaaaagtaaattttattcagattataatgccggtaaacatacttggttcagaacaggcggtaatgcaaaaatatttgctatagttgaagacaatttagagttagaaattatattaaatgaaataaataatgaaaatttttacataataggttcaggttcaaatcttttaattagagataatggttataatggaactcttataaaattaggcaaaggttttaatactattaatattaatgataataaacttgaagttggtgctagtattttagatattaatttatcaaattatgcattgagacaaaatataaagggttttgaattttatagtggtattccagggtcaataggtggagcagttaaaatgaatgctggttgttatggttctgaaactgtagatgttctaaatagtatagaaatttgcgataattttggtcaaagaaaaacaattacaaaagataaactaaatttaaaatatagatcttcaaaaattaacaatacagatatagttacaaaagctatttttaattttaattatggagat

SEQ ID NO: 204465 - DNA, 310 bp, Unknown
  Bacterial polypeptide expressing nucleotide sequence isolated from the Sargasso Sea
caaaaggtaaaacaaacactattggagtgtcagcgctttaggatggagaaacaaccctacaaccagccgagctgcggatctgtttttaaaaatcctccccaggattatgcggcaaggctgattgaattaagccgattgaaaggtaaagttcgcggaagggcccaggtcagccccaaacatgcgaacttcattgtcaatctgggtgatgccgcatcagatgatattcttgggttgatggacgagatccgggagcaggtctacagggatcataagattgatttgattcctgaggtgcaaatcctgcagtaag

SEQ ID NO: 204466 - DNA, 460 bp, Unknown
  Bacterial polypeptide expressing nucleotide sequence isolated from the Sargasso Sea
tatgattgtaaataaaaatgcttcattaaaaaagctcaatacatttaatgtagatgctagttgtgatgtgttagttgagtcaagtaacactaatgatatcttagaggtattaaataacaaagagttaaataacaatctatttattcttgggggcggaagtaatatattatttacaaagcattatcaagggactattattaatctaaaagaagaaagtataaagatcttagacgaaggtcctgacaaagttcaagttgaagtatctgctggcacgaattggcatagatttgttaagtgggcagtggataaagattttggtggtattgaaaatttgtcattaattcctggtaatgttggtgcttctccaattcaaaacataggggcttatggtgttgagttagaagatgtattcgatagttgctcaggtataatgattgactctcttgataaagttacttaa

SEQ ID NO: 204467 - DNA, 458 bp, Unknown
  Bacterial polypeptide expressing nucleotide sequence isolated from the Sargasso Sea
gagtgttgaggtgatggatcgaaatggagagattcaccaactagacccaaaagaattttcaatttcatatcgatcagtgggtttcccatttcctctctggttcttatcttgcgtgatgtcttttccggaagaggggtttaccacaatagaagagttgaagagcatgagagattctagattagagcgccaaccccttactgagaatacatgcggatctgttttcaagaatccagatggaaactatgctggcgatctcatagaaagatctggcctgaaaggttttagaattggaggatgcgccgtttcagaaaaacatgcaaactttattgttaatgacaaagaggcaaccgccagtgatattgaaacactgatcaagcatattcagaaaactgttaaggatcattatgggatagacttagaaactgaggtcaggatcatcggtgagtatcatgagtgat

SEQ ID NO: 204468 - DNA, 295 bp, Unknown
  Bacterial polypeptide expressing nucleotide sequence isolated from the Sargasso Sea
ttgaaagctatgagagaccaaagaattaaaacacaacctctcactgaggatacttgcgggtcagtttttaagaatcctaaatcggatcatgcaggtgatctgattgagagagctgggctcaagggttataaaattggtggttgctccatatcgacaaaacatgcaaattttattgtcaatgaaggcgaggccacatcagcagatatagaggagcttattaagcatgttcaaaacatcgtcaaagctaagtttgatgtagacttagagactgaagttagaatcataggcgagtaaa

SEQ ID NO: 204469 - DNA, 253 bp, Unknown
  Bacterial polypeptide expressing nucleotide sequence isolated from the Sargasso Sea
cacgtgtggatctgttttcaagaatccagatggaattcatgctggcgatctaatagaaagatctggcctcaaaggttttagaattggaggatgtgccgtttcagaaaaacatgcaaactttattgttaatgacaaaaaggcaaccgccagggacattgaaatactgatcaagcatattcagaaaactgttaaggatcattatgggatagacttagaaactgaggtcagaatcatcggtgagtattgtgagtga

SEQ ID NO: 204470 - DNA, 718 bp, Unknown
  Bacterial polypeptide expressing nucleotide sequence isolated from the Sargasso Sea
gcaggctcaaatgtattatttaaagatgaaaaatatgatggcgttgtaataaaattaggtaaaaatttttcaaatataactattttaaacgaaaacaaaataatagctggtggtgctgtaactcaaaaaaagttgtcaaattttgcaatggaaaatgaaattagtggtttagaatttttgtcatgtattcctggaactgttggaggtggtataagaatgaattccggctgctttgaaagagaatttaaagatatattactatcaatacaggtgttagattttaatgggataatcagaactttgccagcagacaaaatagtttttaaatacagaaacatagaaattccaaaggatactatttttcttagcgccaccttcaaaggtataaaaaaaaacaagattgaaataaaaaattacatgaaagaattaataagaaaaaaagagatagcacaacctacgaaagtaaaaacaggtggaagtacctttataaatccaaaagggcatactgacaaaaaagtttggagattaattaaagaatcaattcctatcgatacgagttttggtgatgcaatagtatctgataaacacgcaaatttttttataaataaaaaaaatgcaaaatttaacgatatgaaatcattaattgattttgttaaaaaaaaagtaaaaataaagacaggaattgatttaacacttgaaatagtgatagtggaataat

SEQ ID NO: 204471 - DNA, 418 bp, Unknown
  Bacterial polypeptide expressing nucleotide sequence isolated from the Sargasso Sea
cttgggtctcaaggctcagtccttgctgggttgtactgttagatctgttgatgaactgaaggctgtaatggcctgccccgaatttttggatcaacagcctgttgtgatcggttcaggttcgaacgtgatcgcgatgcctttagtcgaaaaatttattattaaaatgcgtataaaaggaattcacagagttaaagaaaataaggagtttgtttggatcagagttggtgccggcgaaaattgggattcgttggtccggtctctgttagagaaaaatatatttggtctagaaaatctggctttaattccggggcgggttggagccgctccgattcaaaatataggcgcctatgggagggaggtgtcagaattcatagatgaagttgaagtgttcgataggacaggtgaggagcttatctta

SEQ ID NO: 204472 - DNA, 598 bp, Unknown
  Bacterial polypeptide expressing nucleotide sequence isolated from the Sargasso Sea
tattttagatataaatttatcaaattatgcattaagacaaaatattgagggctttgaattttatagcggtattccaggatctataggtggggcagttaaaatgaatgctggttgttacggttcggaaactgtagatgttataaatagtatagaaatttgtgataattttggtcaaagaaaaacaattacaaaagataaactaaatctaaaatatagatcttcaaaaataaataatacagatatagttacaaaagctatatttaattttaactatggagatcaaaatttaataaaacacaagataaatgaaataaaaaataaacgtttagaatctcagccaattaaaactaaaacttctggcagtacattcaaaaatcctgaaaatcttcatgcggcaaaactaattgaagaagcaggatgtaaaggaaataattacggagatgcatatgtgagcgataaacatgcaaattttttaataaatagggggagtgcttcagcaacagatatagaaaacttaggtaaaagtattattgaaaaagtatatgctaaatttaatgtaaaattggaatgggaggtaaaaataataggtgaccaataa

SEQ ID NO: 204473 - DNA, 910 bp, Unknown
  Bacterial polypeptide expressing nucleotide sequence isolated from the Sargasso Sea
tatatcgaggtaccaagcgataatgatttgatttatatagataaatcaatcgaatgcattcatattctaggagagtgcacaaatacaattattaatagcgaatcaaaaaaaacatttgttaaatatataaataatgagttaaatattcttaaaaaaactcaggactataccttcataaaagttggagcatcggtaaattggcataaatttgttttagagtgtgagaaattaaatcttcatgggctagaaaatctagcattcattcctggttcagttggtgcggccccaattcaaaatattggcgcatatggtgtagaggtatcagagtttatttctgagataacttgctatgatattgagcaccaaaagaatctagtattaaaaaagaatcaatgtagatttgcatatagacaatcagtttttcaaagaaagaaatttataataaaagatataacttttagattaaaaaattatttccatcctaatctttcttacaattcattaagaaattacattgataagaaatttaacaaaaacattaatccaattaacttaattaaaattattggtaatattcgttcaagtcgtctaccaaatttaaataagatacctaattgcggtagtttttttaaacaccccattattaaaaaagataataaatttaaaaaatatttagtctgttttgaaaatagtaaaatgaaaatttcggcaactaagcttattgagactatcgagaatgaaattaatttttatgggggcttaaaattttatgatacaaataaactcgttcttactaatacagaaaactgtagttttaaagatttaatatcaactatcgaatctataaatacattaatttccaataaatttgatatctgcttagatgttgagcctgaaataattacttgat

SEQ ID NO: 204474 - DNA, 814 bp, Unknown
  Bacterial polypeptide expressing nucleotide sequence isolated from the Sargasso Sea
aaccccatctgagtttgaaattcaaacagatacatttttctttggtagaagtggtcaatttattagtggtagtaataataatattgttattagttcatctaatttctttttaggtgatgataatggtgcttttattagtggtagtaatggaaatctaaatattagttcatccactttctttttaggtggtggtagcactttcgtaagtggttctaatgataagttagaaattagttcaagtaattttcatttagacgatgatggttcagttacattacaaggacagattacagccacattgggtggtatcataggtggattttcaattggttcagcatcattgtttaccggaactgaggcaacaccaaatttctttataagtggtagtgcaacaggaacaggatttgaaaaagcaaatttatttatatcatcaagtggattccaggtcagtggtgatggggaaatgagtgcaagtgcaggtcatattggtggattcaacatagttagagacggacttggttctgcaaatgatgcgtttcaagtaacgggttcaacaggtcaaatcactggttcaaatgttttatttagtggtggtaaagttggtggatttaacatagtgtctgatggatttagttcaataaataatgtattccaagtaacgggttcaacaggtcaaatcactggttcaaatgtattgtttgacggaggagttattggtggatttgatattaccagcactgcgatagaaacaacagatttttcaagtggagagaaaggtataagaatatctactgaccaaaacggattgatagaa

SEQ ID NO: 204475 - DNA, 607 bp, Unknown
  Bacterial polypeptide expressing nucleotide sequence isolated from the Sargasso Sea
atgtcaaaaaaaattatagaattagctcataaacttaaaagtaaaatttactcagattataatgctggtaagcatacttggttcagaacaggtggtaatgcaaaaatatttgctatagttgaagataatttagagttagaaattatactaaatgaaataaataatgaaaatttttacataataggatcaggttcaaatcttttaataagagataatggttatagtggaactcttataaaattaggtaaaggttttaatactattaatattaatgaaaacaaacttgaagttggtgctagtattttagatattaatttatcaaattatgcattgagacaaaatatagagggttttgaattttatagcggtattccaggatcaataggtggggcagttaaaatgaatgctggttgttatggttcggaaactgtagatgttataaatagtatagaaatttgtgatagtttcggtcaaagaaaaataattacaaaagacaaactaaatctaaaatatagatcttcaaaaataaataatacagatatagttacaaaagccatatttaattttaattatggagataaaaatttaataatagacaagattaatg

SEQ ID NO: 204476 - DNA, 239 bp, Unknown
  Bacterial polypeptide expressing nucleotide sequence isolated from the Sargasso Sea
agcaggctggcttatcgatcagtgccagctaaaaggtatgcgcattggtggcgcggcggtacatcagcagcaggcactggtgctgatcaatgcagataatgcgacgagtcaggatgtagtgcaacttgcacaccatgtgcgccaaaaagtcggtgagaaatttaatgtctggctcgaaccagaggtccggtttattggtccgcagggtgaaatgaatgctgtggagatcattgcatgaa

SEQ ID NO: 204477 - DNA, 404 bp, Unknown
  Bacterial polypeptide expressing nucleotide sequence isolated from the Sargasso Sea
cgcgcgggtggtagctgcgctggttatgcgcattcggcaaagcaagctgcccgatccgctgatattgcccaatgcgggcagctttttcaaaaacccggtggtgccggtagatcaggcgcagcggctcgcggagcgttttccatccatgccgcaatacgttcaggcgggcggcggggtgaagttggcagcggcctggctaattgatcaggctggctggaagggctttcgcgatggtgcagccggcgtgcatagcgagcaggcactggtgctggtcaaccatggtggcgcaaccggtgcgcagattctggcgcttgcagcgcgcattcgtgccgatgtgctgacacgttatggtgttgagctggagcaggagccgccggtggttggggctgccgctctgccatagg

SEQ ID NO: 204478 - DNA, 798 bp, Unknown
  Bacterial polypeptide expressing nucleotide sequence isolated from the Sargasso Sea
ctcgacggatttagtggagttcctggacggttgtccggaaaatatccctatttccgttataggtgtagggtctaacttgttggtcagggatggaggtattcggggagttgtcatccggcttggccgtagctttgcaaaaattaatatcgaagatgagtgtcgcattacggcgggcgctggtgctctgggtcccaagctcgctcgacttgcggcaaaagctgggataggcggcttagaattcttatcgggtgttccagggaccgtaggtggtgcaataaagatgaatgcgggggcatatggcagcgaggtcgtcgatgtcttgggtacagcttccgtgataagtcggggtggacatctcgagcaactctcggcgcgggatttaatgttgcaatataggagctcatttcttcctaacgattcaatagtattggatgcaagcttccacggtcaaaaagatgttgtgggagatatactcagtcgcatcgaggaaattaataaaagccgcaatatttctcagccaattcgagatagaacgggtggtagtacatttgcgaatccatctgaacgaagtgcatgggaactaattgaggcggctggatgcagggggctccgaattgggagagcgatggtctcaccaaggcactgtaactttcttatcaatacaggaggtgctacgtcctcggatattgaaaggcttggcgaggagttgaggcgaagggttcgcgagcaaagtggcattcagcttcgttgggagatccagcgtatagggactgccgaaaagccagcggaggaacttgg

SEQ ID NO: 204479 - DNA, 715 bp, Unknown
  Bacterial polypeptide expressing nucleotide sequence isolated from the Sargasso Sea
aattatttcgaaggatgaggttattgttggaggaggggttaattgggattattttgtaaattggtcacttgaaaataacttttacggtcttgaaaatttaaccttaatcccaggaagtgttggcgctgctccaatacaaaacataggagcatatggagttgagattagtaaatttataaagaaagttcgtttttatgattttatagataaaaaaataaaagaatttacacaaaatgactgtaatttttcatatagaaaatctatttttcaagatatggatattttaatattaagtgtttgttttaagtttgtaccaggtgatttagttactagttatgattctattaatgattatctaaacactaataacatcaaagcttcagatcttacacctataaaattatcaaatattataaaaaaaattagacttgatagattgcctgattatacaaaaatacctaatgttggaagtttttttaaaaatccaattttaaacaaagctgatttaaatttagagaagctagatattaaaaaattaattacatgggatcttggtaatggcatgattaagattggagctgcaagattaatcgaattagttaaagataaaattcctaaagatataaatgtagatctttataaaaatcatgcgttagttttaattaataaaaataatgcaactcaagatgatgtaattcaatattcaagttttatt

SEQ ID NO: 204480 - DNA, 828 bp, Unknown
  Bacterial polypeptide expressing nucleotide sequence isolated from the Sargasso Sea
aatgactaaatacgaaataaagattaaaaattctttaaatcttccctgtcatacaaatacgctatatgaaattgaatcaactgaagatcttcttgaagttgactacaacaaatatgatgaattattgattataggagaatgtacaaatttagttcttcctacaaaactaaataaaaaagtgattaaatcaaaaaatacaaatattaataaaatatcatcaaccttgtatagagttggatctgctgtaaattggaatgattttgtattaagtgttattgaaaataatagatttggtattgaaaatttaataggtattcccggatctgtaggtgcagcaccagttcaaaatataggggcatatggagttcaggtttctgattttattaaaagtattaatgtctatgactttaaagataaaacttttaaaaaacttctaaaagatcaatgtgattttggctatagatcttcaatttttcaaactaaaccatattttattattgatattgattttgaatttaatcatattgaaaaactgaatatggattatgagggtataagaaaccttattatcgctcaagacaaagatataacatctataacctcaaaagaactaggtgcgattatctgtgagctacgagattcaaagctgcctaaccctaaagtagtaccaaatgctggaagcttttttaaaaatcctataattaatgaaaagaatatttcatacaagaactttaaaaaagaagatttaataatatgggatcatgataaaccaaatgtaaaagttggagcaggaagacttattgagcttataaaaaatactctaaatca

SEQ ID NO: 204481 - DNA, 551 bp, Unknown
  Bacterial polypeptide expressing nucleotide sequence isolated from the Sargasso Sea
aatgaaaattcttgaaaatcacataatcataaattcattaaagattaaatcagtttcaagttattacatagagatagataacttaacatgtttcaataaattgcatgattttataaacataaaagatcttccagtaattattttaggtgagggaacaaatatagtccctccaaatttatttaatggtattgcggttaaaccatcttttacacaaattgattttaaagataattttgttgaggttggagcttctgttaactggaatttttttgttaatcatatgattaataaaaatataaatggatttgagaatttatcacttatcccaggttcagtaggtgctgcccccatacaaaatattggggcctatggtcaagaggtatcaaacttaatagaggaagttcattgttatgattataaaaaaaatatttttataaaattaactaatgagcaatgtaacttttcatatagagattcattattaaaaaatactaatttaataatttacaaagtagtatttagaataaataattctaataaattaaatctaa

SEQ ID NO: 204482 - DNA, 625 bp, Unknown
  Bacterial polypeptide expressing nucleotide sequence isolated from the Sargasso Sea
atgactatagaagaaaacaaatcattaaaaaacatgaatacttttggccttgatgcaaaggcaaagtatttctgcgcagttcactcttttgatgaaattagagatattttccaaagccaagtatttaataatgaaaaacacctcatacttggtggtggtagcaatatattactaaaagatgattatgatgggctggttatcaagaataatataataggcaaagaagtaataaatcaaaatgaggactatgtaacacttaaagtttatagtggtgaggtttggcatgaccttgtattacattgcgttcaaaatggatggggaggcattgaaaacctaagcttaattcctggaagtgtgggagctgcacctatgcaaaacataggcgcctacggagttgaactaaaagatgtttttgttgaactagaggccatacatatcccttcttgcaagattgaatcctttgataattcggcctgtgagtttgcttataggcaaagcatatttaagaataagctaaaaggacaatacttcatatattctattactctaaagcttagtaaaaagccaaaaataaatattagctacggagcaattaaagggacattgaatgacatgaacatcaata

SEQ ID NO: 204483 - DNA, 325 bp, Unknown
  Bacterial polypeptide expressing nucleotide sequence isolated from the Sargasso Sea
gaggagatcacccgcatcaccagcggcaacctcagccatcgcaccagcacccagccctacacacaaccgagttgcggcagcgtgtttcgcaatcctgaaccgctaaaggcaggacggctgatcgaaggtcttggactgaagggcagtcgcgtcggcggtgccgaagtctccactctccacgccaacttcatcgtcaacaccggcgctgccacagctgccgacatcgattcgctcatccaacgcgtccagcaacaggtggaagcagcccactccttgctccttcatcctgaagtgaaacgcctcggattcaccgaagccgcctaat

SEQ ID NO: 204484 - DNA, 586 bp, Unknown
  Bacterial polypeptide expressing nucleotide sequence isolated from the Sargasso Sea
cgagctgtgctggtttgagcgcgggcaatgcgactttgcctatcgtgatagccgcttcaaacgcgaggctggtcgctacgtcatcctgcgggtacgcctgcggttatggcggcaggcgcgcctggccgtggattacgcgccgctggccgaggcctggcgggcgacgggcctgcaggccgccgacgcgcgggtggtagctgcgctggttatgcgcattcggcaaagcaagctgcccgatccgctgatattgcccaatgcgggcagctttttcaaaaacccggtggtgccggtagatcaggcgcagcggctcgcggagcgttttccatccatgccgcaatacgttcaggcgggcggcggggtgaagttggcagcggcctggctaattgatcaggctggctggaagggctttcgcgatggtgcagccggcgtgcatagcgagcaggcactggtgctggtcaaccatggtggcgcaaccggtgcgcagattctggcgcttgcagcgcgcattcgtgccgatgtgctgacacgttatggtgttgagctggagcaggagccgccggtggttggggctgccgctctgccatag

SEQ ID NO: 204485 - DNA, 571 bp, Unknown
  Bacterial polypeptide expressing nucleotide sequence isolated from the Sargasso Sea
atgcgtcagccaggggtggtccgggatggaattcatgatcggtattccgggaaccatcggtggagccgtagccaccaacgcaggagcccatggtggagaaaccagcgaatttgtccaaagcatccgctggatggatctggatggcatcgtccatcaggatcaacgtaacgcttttcaattctcctaccgtttttcagaacttgacgccaaacagggccgagtcgtgatctctgcaagctttgagcttgctgaggaagaccctcaaaaggtaaaacaaacattattggagtgtcagcgctttaggatggagaaacaaccctacaaccagccaagctgcggatctgtttttaaaaatcctccccatgattatgcggcaaggctgattgaattaagccgattgaaaggtaaagttcgcggaagggctcaggtcagtccaaaacatgcgaacttcattgtcaatctgggtgatgccgcatcagatgatattttcgggttgatggacgaggtccgggagagggtctacagggatcataagattgatttgattcctgaggtgcaaatcctgcagtaa

SEQ ID NO: 204486 - DNA, 467 bp, Unknown
  Bacterial polypeptide expressing nucleotide sequence isolated from the Sargasso Sea
aatgaaaattaatgaaaatgtaatattaacaaatcacaatacttttggcattaatgtaaaagcaaaatattttactgaaataagttctgaatttgaacttagagaaattataaaatcagaaaaatttaaaaaagtgaaattattaattcttggtggaggaagtaacatcctttttacaaaagattttaatggattaattattctaaataaaataaaggggaaaaaaattatttttcaagatgaaaattatgttgatcttatgataggagctggtgaaaattggcatgaacttgtaatgtattgtgttaataataactggggaggtattgaaaacttaagcctaattcctggaaatgttggtacagctccaattcaaaatattggagcatatggagttgaacttaaagaaacttttttagaacttgaagcatttgaaatttcttcccaaaaaactgtaaaattcacaa

SEQ ID NO: 204487 - DNA, 910 bp, Unknown
  Bacterial polypeptide expressing nucleotide sequence isolated from the Sargasso Sea
atggatatcaaaaattttgaaaataagcttaaaaactttaatgggaaaatatattttaattacagtcttaaaaaacttaattggtttaatattggcggagatgcaaaaatttattttaaacctgatactcttcaaaacttagtagaatttttaaaattatataaaaaagatgaaaaattgtttgttttgggcgctggttctaatgtcctattcaaagatgatttatttgagggagcagtaataaaattaagtaaaaatttttcaagaatttcattgttaaatgaaaacaccataattgctggaagcggagcattagataaaacactgtctcaatttgctttagaaaatagtttaagtggatttgaatttttatcatgcataccaggctcgattggaggaggtataagaatgaactctggatgttttgatagggaattcaaagatattttaatttcggttcaagcagttaatagatcaggtgaaatcttaacaattccagcaaaagaaatagtatttgaatacaggtcatgtgatttaggtaaagatttaatttttttaagtgccacatttaaaggaaataaaaaaaaaaaagatgaaattgagaaagaggtaatcaatttaaaaactaaaaaagagaaggctcaaccaacaaaaattaaaacaggtggaagtacatttaaaaatccaataaaacaaactaataaaaaagtttgggaaataattaaagaatctgtgccgagtgatattcaatttggtgatgcaattatatcagagaaacatgcaaatttttttattaataaaaataatgcaagttataaagatatgaaaaaattgatagaatttgtgaaagaaaaagtaaacaacgaaactggtataaaattagatttagaaattattttagtagaataaa

SEQ ID NO: 204488 - DNA, 958 bp, Unknown
  Bacterial polypeptide expressing nucleotide sequence isolated from the Sargasso Sea
actgcatttaaagtccgaagctaaatatttttttgattttgattcgatagacgatcttaaaaaaattactgattttgctaaaaaggaaaataaaaatattcagattattggttcaggtaccaatgcaatatttcctgaatatttttctgatgttgttatcagatcaactaacaatgacttcactttagatgatacaggcgacagggttagtcttagtgttggtgcagcagtagtctgggatgacctaattgatttttgtataaataagggcttgtttgggcttggcaatctagcaggcataccaggtaccgttggtgcagctcctgtacaaaatattggcgcctatggggaagagatatctaattttatagatcacgtcgagtgtttcgatctggatacaaataaccaagtaagattaagcaaatctgagtgtaaatttggttaccgaaaaagcatctttcaagaatcagataatctaattattgtttctgttggtttatcgctgctaaagaaatttgaacctaagctacattatcaagacttaaaggatcattcgtttaaagatgaggacgaacttgtagagactgtcagaaatataagaaacaaaaagataccagatccaaaggattttcctaatttgggaagcttctttaagaacccaacaattacaaaaaaagagtacgagaaaaactctaaattacatgaactgaaaagttacgattcagataatggagatataaaactttctgcaggtgagatgcttgataagcttggcttgaagggattgcaacttaaaaatataggcttatccaataagcatgctctgatcttaattaactgtgcctaccctaatggcatatgtacggctgacgatgtcaaacatgttgagaattatctgttaaataaagtttctgactcttatggcattacgctggaaagagagccaatttatttatga

SEQ ID NO: 204489 - DNA, 994 bp, Unknown
  Bacterial polypeptide expressing nucleotide sequence isolated from the Sargasso Sea
atgaaattatcaaataaaataaaaaaatcctttagcttaaaagaaaataatcttttaaagattgattctactgcaaagttttttatagaaatctttgatcttgaagacttaaaaaacattcaaaattttacctcaacaaaaaaaattaatttttgtatcctcggagagggatccaacgttgttctgcctaatttgcttaacaagtttgtaattaaaatttcatttaatgaaatatcaatcgaagataatttaattactgttggagcgggtaaaaattgggatgattttgtgctctggtccttagaaaacggttattgtgggttagagaatttatcaggtatacccggaagcattggagctgcacctattcagaatattggagcttatgggaacgaagtatctgattttattgatgaagtcatttgttttgatatggaatcaaacagcattgttagctttactaataatgattgcaaattttcatatagaaaaagcatatttcaagataaagactctctaattgtcgtaaaagttaaattcaaattaactaaagattttcaacccaacttagagtatgaagatttaaactttttaaaagcagaagagattactccgtttatcatcagaaaacatatcctaaaaataagaaaagctaaaatatcagatccacaagaacatccaaatgttggaagcttttttaaaaatcctattatctcattggatgaattggaaaaaataaaacaaattcttccaagtattaaattttattcatacattgataataaagtaaaaatatcagcagcttttttaattgaatctctaaacctaaaaggttttgcattgaataatgcaagagtgtctgaaaaacactcgctagtgctagaaaataagtctgagaaatcggaggatattcttgatcttgcttcgtatattcaggcctctgtgttggagaattacaacattaatttagaaatagaaccccagatattttgac

SEQ ID NO: 204490 - DNA, 367 bp, Unknown
  Bacterial polypeptide expressing nucleotide sequence isolated from the Sargasso Sea
atgaaattgggaatttcaaaacaaaaaattgttagtgaaagaataaaaaacatgctaagagagcgtgcaaatcaacaacctcttggtaaattgagttgtggttcagtatttagaaatcctccaaatcagtatgctgcaaaattaattgatttatgtggccttaaaggaaaaagagttgggggtgctattatttctgataagcacagtaattttattattaatacaggaaatgctacctcatcagatatagaaaaattgattgagtttgtacaagcaactgtatacgagaagcattctataaaactagttccagaagtaaggattattggcaaaaattttacagaggtaaatgatgcaattgcctaag

SEQ ID NO: 204491 - DNA, 709 bp, Unknown
  Bacterial polypeptide expressing nucleotide sequence isolated from the Sargasso Sea
aatgaatatcttatccaatcataacatttcaaacagtttgaagattaattcaaagtgtagattttttattgaaattaatgaagttacacaatttgaaaatctgtataaatttattaatgaacaaaaattacctgtattagttataggtgagggaactaatattgttcctaaagattattttgaaggtgttgttataaagcctacatttaataaagttcaatataatacaaatgactctacagtttcagttggatcatctgttaattggcattcttttgtgaaagaaatgattaaaaataagatatatggctttgagaatttatctttaatacctggaagtgtcggagctagccctatacaaaatattggagcttatggacaagaagtctcgaatttaattgcaagggtagactgttttgattatgttaaaaataaatttttatcattatctaattctgattgtaatttctcttacaggaagtcatcactaaaagataagccgtatattatttttaatattgattttattacaaatggatttaaatctttaaatctcgaatatgagtctattcagaattatataaaagacaataacattaatctgtcatcaatatctttaaatcgtgcatcagaaattattgttgatatcagaaactctattttgcctgatccaatacaagttcccaacgtcggaagtttttttaaaatc

SEQ ID NO: 204492 - DNA, 421 bp, Unknown
  Bacterial polypeptide expressing nucleotide sequence isolated from the Sargasso Sea
ctgggtctcaaagctcagtccttgctgggctgtactgttagaactgttgatgacctgaagactgtgatgtccagccccgaatttttgaatcaacagccggttgtgatgggttcaggctcgaacgtgatcgcgatgcctgtagtcgaaaaattagtcattaaaatgtgtataaaaggaattcagagagttaaagaaaataaggagtttgtttggatcagagttggtgccggcgaaaactgggattcgttggtccgagctctgttagagaaaaatatatttggtctagagaatctggctttaattccggggctggttggagccgctccgattcaaaatattggcgcctatgggagagaggtgtccgaatttgtagatgaagttgaaacgttggataggtcaggtgaggagctaatttttaagc

SEQ ID NO: 204493 - DNA, 1000 bp, Unknown
  Bacterial polypeptide expressing nucleotide sequence isolated from the Sargasso Sea
aatgaagattgaagaaaattattctataaaagaatataattccttaagaactaatcaattttcaaaatatttttgttctattgatgctgtagaacaattgtacgaagcaatagaattttcaaagacaaaaggcatcccttgcttattcatcggcgaaggctcaaacattgtatttactgatgattttgaaggccttttaataaaaaataatatttttggaaaaactgaacacgataacaaaacagtcgaaattttttcaggcgaaaactggcataaattcgtcaaatggagtttatccaaagaaagatatggcttggagaatttagctcttataccgggtacggtgggtgcttcaccaatacaaaatattggtgcttatgggaaagaagtatcctcatttataaaagaggtaaagagcatcaacattcttacagcgcaagaaaaaatattttcaaaagatgattgcaaatttgggtatagatctagtttattccagaataataaagaattttttataacttccgtagtttttgaaactaatccagatcctcatatagatatttcttatgattctttacaaacattctttaaagctagccccaagaaaataaccaatttaactccccaagaagtttttgaaggtgtttcatctttgagaaggagagttttaccagatcataaaaaagaatttaatgctggtagtttttttaaaaacttaatccttgaaaagagtgattttagaaacctcaacaaaataatcaatgtgccttatcatgaaactaacttaaaatataaagtaccctctggctttttaatagaaaaagctggatggaaaggtaaaaggctgaagaatgtaaaggtctcacaaaaacatgcattagtcttaatagctaatggcaatcaagacggaaaagaaataattaaatttgctcaatctataattgatgatgtctacgaaaagtttaaagtcaaattagaaatagaacctaccttaatttaa

SEQ ID NO: 204494 - DNA, 925 bp, Unknown
  Bacterial polypeptide expressing nucleotide sequence isolated from the Sargasso Sea
attgaatctaattaaaaaaaatctcaaacatcaaaattcacttagattaagttcagaggcagaacttttttttgaatatgaaaatctagatgaattaaaaaaattaaatagtcattgcaaaaaaaacaacttaagaatatgtgctttaggagagggaaccaacacaatttttccaagaaacttcaaggatgttgttgcaaaatcgaaaaataaaaaatttaaagtagataaaaatactgtaaaaattggagcaggcgttaattggaacgaggcagtttttaaaacaatcaaaaatggatgttttgggctagaaaatcttgcgggcattcccggatcagttggtgctgcacccattcaaaatattggtgcatacggttcagaaatttcagaatttgtaaaaaaattagagtgttttgatattaaaaaaaataaagttgtaaattttctaaaaaaagattgtaaatttggttatagaaaaagcgtatttcaattaaataaagatctaatcataaatgaagttactctgattcttaatcagaaattttctccaaattctagctacttctctccaggaatattttctgttaaagaagattctaatgatattaaatatgcaatgaattgggctaataaaattgttgaattaagagaatctaaaattcctaatacttcagattacccaaatgttggaagtttttttaaaaatccattagtgtcagaaaaattttttcaaaataataagaaattagagaaattgaagacattcaaaagagagggagatcaaataaaactctccgctgctgaaatgattgataagtcagatctaaaaggtatgaggctaaataatttaggaatttcatcaaaacactcattggtgtttgtaaattttggaattacaacctcaagagaggtaaaaagaacttga

SEQ ID NO: 204495 - DNA, 640 bp, Unknown
  Bacterial polypeptide expressing nucleotide sequence isolated from the Sargasso Sea
aatactattactattaatgataacaaacttgaagtcggtgctagtattttagatattaatttatcaaattatgcattgagacaaaatatagagggttttgaattttatagcggtattccaggatcaataggtggagcagttaaaatgaatgctggttgttatggttcagaaactgtagatgttataaatagtatagaagtttgtgataattttggtcaaagaaaaataattacaaaagataaactaaatctaaaatatagatcttcaaaaataaataatacagatatagttacaaaagctatatttaattttaattatggagataaaaatttaataaaagacaagattaatgaaataaagaataaacgtttagaatctcagccaattaaaaataaaacttctggtagtactttcaaaaatcctgaaaatcttcacgcagcaaaactaattgaggaagcaggatgtaaaggtactaattatggagatgcatttgtgagtgataaacatgcaaattttttaataaataaggggagcgcttcggcaacagatatagaaaacctaggtaaaagtatcgttgagaaagtatatgccaaattcaatgtaaaattagaatgggaggtaaaaataataggtgagtaat

SEQ ID NO: 204496 - DNA, 1000 bp, Unknown
  Bacterial polypeptide expressing nucleotide sequence isolated from the Sargasso Sea
aatgaatttcatagaagattatccattttctaaactatcctcattaaggaccacagaaacagcatcatttttctgcgaactttccgatattaatcaaatagatgaaataatttcattttctaacgaaaagaacttaccaatactaattctaggagaggggacgaatatagttcctactaaaacatttcagggattggtagtttttaacaagctattaggaataaaagaaattgataaaatgagcattgaagttgcctctggggagaactggcatgattttgtggaatggaccataaggcacaaaatgtttggattagaaaatcttgctttgataccaggaacagttggagcaggacctattcagaatataggggcctatggatcagagatttctagctttataaaaaagataacttgttttgatctaaagacgggttcaatcaaagttttgtatgccaacgaatgcggatttggatatagaaccagtatttttaaagattgttctgattacataattttatcggtaacatttcaatttaaaacagatcctaaaatcaattattcctatggttcactcgaagatgaaattaataacaataacattaataaggacaatctaactcatggggatatatttgatttggtctcaaaaattcgaaaaaaggtcttacctgattataaagaatttcctaatgtcggaagtttttttaagaacgtagtcttaactaaagaagaattctgtaaattagatataactgaagaaataccagtctatctcgaaggagatgatataaaaatatctgctgcttttttaattgaaaagtttggatggaaaggtttcagagagggaaatgtaggaatatcagatcagcatgctcttgttctggtgacttacgaagagactccaggagatgaaattcttaaatttgctaacaaaattattaatcaaatcttttctatgactggaattaaattagaaatagagccaaccttaatatga

SEQ ID NO: 204497 - DNA, 767 bp, Unknown
  Bacterial polypeptide expressing nucleotide sequence isolated from the Sargasso Sea
aaccttgtatagagttggatctgctgcaaattggaatgattttgtattaagtgttatcgaagataatagatttggtattgaaaatttaatagggattcctggatctgtaggtgcagcaccagttcaaaatataggagcttatggagttcaagtttctgattttattaaaagtatcaatgtttatgactttgaagataaagcttttaaaaaacttctaaaagatcaatgtgattttggctatagatcttcaatctttcaaactaaaccatattttattattgatattgactttgaatttaatcatattgaaaaactgaatatggattatgagggaataagacagcttattactgcgcaagacaaagatataacatctataacctcaaaagaactaggtgtgattatatgtgagctacgagattctaagttgcctaaccctaaagtagtaccaaatgctggaagcttttttaaaaatcctataattaatgaaaagaatatttcatataacaactttaaaaaagaagatttaataatatgggatcatgataaagcaaatgtaaaagttggtgctggaagacttattgaacttataaaaagtactctaaatcaagaatctattgataatttacattcaagtcacgcactaataattaccaacaaaaacaatattagttatgatgacataataaacatctctttagacattcaatcaaaagtctataaagagtttaatattcacttagagatagaaccaacgattatataaa

SEQ ID NO: 204498 - DNA, 678 bp, Unknown
  Bacterial polypeptide expressing nucleotide sequence isolated from the Sargasso Sea
tttctatttgtaaagatgatttgggtatatctattaatgccggtgccgcagctctagatagtaatgtctcaaaaatgacgtcaagtaatggactagaaggattagagtttttatcgggtgtacctggtactatcggtggtgctttaaggatgaatgcaggagcatttggcagggagatgtctgatgtagttatttctgcaacagctatttcttctgatgggacaaagaaatatctgactaacagcgaaatgggatttagttacaggaaatgttcaatacctgaggattggatttttattgaaacaagcctcagggtaattaatggcgatcctatacttattaaaaagcggatgactgagattgcaaattatcgtgaccaatcgcaaccaattcgaacgcgaactggtggaagcacatttaaaaatcctgcaggagcaaaagcatggaaacttatcgaagaagctggttgtaggggattacaagttggtgatgcagaaatttctaagaaacattgcaattttataataaataaaaaaaatgcaacagcttcagatattgaaaaccttggggaggaagtgcgttcaagagttgaaaaaaattctggtattaaacttgaatgggaaatcaaacgaattggtagtcgaaccagatcttttggagaggtgaatataaagtgac

SEQ ID NO: 204499 - DNA, 760 bp, Unknown
  Bacterial polypeptide expressing nucleotide sequence isolated from the Sargasso Sea
tatagagttggatctgctgtaaattggaatgattttgtattaagtgttattgaagataatagatttggtattgaaaatttaataggtattcctggatctgtaggtgcagcaccagttcaaaatataggggcatatggggttcaggtttctgattttattaaaagtattaatgtctatgactttaaagataaaacttttaaaaaacttctaaaagatcaatgtgattttggctatagatcttcaatttttcaaactaaaccatattttattattgatattgattttgaatttaatcatattgaaaaactgaatatggattatgagggtataagacaccttattactgctcaagacaaagatataacatctataacctcaaaagaactaggtgcgattatctgtgagctacgagattcaaagctgcctaaccctaaagtagtaccaaatgctggaagcttttttaaaaatcctataattaatgaaaagaatatttcatacaagaactttaaaaaagaagatttaataatatgggattatgataaaccaaatgtaaaagttggagcaggaagacttattgagcttataaaaagcactctaaatcaagaagctattgataatttacattcaagtcacgcactaataattaccaacaaaaacaatattacttatgatgacataataaaaatctcacaagacattcaatcaaaagtctataaagagtttaatattctcttagagatagaaccaacgattatataaa

SEQ ID NO: 204500 - DNA, 824 bp, Unknown
  Bacterial polypeptide expressing nucleotide sequence isolated from the Sargasso Sea
taaaacatttcagggattggttgttttcaacaagttattaggcataaaagaaattgataatatgactatagaagttgcctctggtgagaactggcatgaatttgtggaatggaccataagacataaaatgtttgggttagaaaatcttgctttgataccaggaacagttggagctggacctatacagaatataggggcctacggatcggagatttctagctttataaaaaagttaacttgttttgatcttaagacgggttcaatcaaagttttatatgccaacgaatgtggatttggttacagaactagtatttttaaagattcttcagattacataattttatcggtaacatttcaatttaaaacagatcctaaaattaattactcctatagctctcttgaagatgaaattaataaaaacaacattaataaagacaatctaactcatagggatatatttgatttggtttcaaaaattagaaaaaaagtcttacctgattataaagaatttccaaatgttggaagtttctttaagaacgtagttttaactaaagaagaatttaataaattggatttaacagaagaaataccagtctatctcgaaggagatgatataaaaatatctgctgcttttctaattgaaaagtttggatggaaaggtttcagagaaggaagtgtaggaatatctgatcagcatgctcttgttctgattacttacgaagaaactccaggtgatgaaattcttaaattttctaacaaaattattaatcaaatcttttctataactggaattaaattagaaatagaaccaactttaatatgac

SEQ ID NO: 204501 - DNA, 1000 bp, Unknown
  Bacterial polypeptide expressing nucleotide sequence isolated from the Sargasso Sea
atgaagtttaaaaggaattttcctcttgcagagatatgcacattaaatattaaagaaatagcttcatattattgcgaaatatcagattttaaagatacacaagagattcgttcttttatttctcgtaaaaatattccttttttattattgggtgagggtaccaatattgttcctaccgataccttcgatggccttgtaattcaaaatcaaatcaaaggaattgaattactggatagtttcaccattaaggtctcaagcggggaaaattggcatgattttgtggaatggacggtaaaaaataaaaagtatggtttagagaacttggcattaatacccggtacagtaggtgcaggtcctatccaaaatatcggtgcttatggttctgaaattggtacttacataaaagaagtaactttctatgattttcataaggataaagtaggaactttcagtcaaaaagattgtaattttaattatcgctccagtgtttttaaggaaaagcctgagttatttatattatctgtgacctttgaattaaataatgaacccaaactcaacctttcttatgattctctgaaagaacagatatcaaaagatggattgaatgaaaaaaacctaaaacctgtcgatatatttaataccgttaaaaaaatacgtacgagggttttaccaaaccatcttaaacaaccaaatgtaggaagtttttttaagaatgtttatttgaaaaaagaggaattaaaaaaattaaaacttccttcagatattcaaacattcgagcaagatgatattgtaaaaatctcttctgcgcaccttattgaaaaatttggatggaaggggtttcggagaggaagtttaggtatttcagaacaacattctcttgttttaataacttacgaagaaacttctggagaagaaatagttacgttatctaatgaaattattaaagatatatactcaaaaacaggtctgcagttggaggtagagccaacttttgtatgaa

SEQ ID NO: 204502 - DNA, 193 bp, Unknown
  Bacterial polypeptide expressing nucleotide sequence isolated from the Sargasso Sea
atctggcctcaaaggattagaaattggaggatgttccatttcagaaaaacatgcgaattttatcgttaatgataaaggagcaactgcgagagatattgaaacactaattaatcatattcagaatactgtgaaggatcgttttggaatagacttggatactgaggttagaatcatcggggagcatgatgagtga

SEQ ID NO: 204503 - DNA, 997 bp, Unknown
  Bacterial polypeptide expressing nucleotide sequence isolated from the Sargasso Sea
attgagtcctgaagcaaaaatcttaaccaatgataatggactacatttaaagtccgaagctaaatatttttttgattttaattcgatagacgatcttaaaaaaattactgattttgctaaaaaggaaaataaaagtattcagattattggttcaggtaccaatgcaatctttcctgaatatttttctgatgttgttatcagatcaactaacaatgacttcactttagatgatgcaggcgacagggttagccttagtgttggtgcagcagtagtctgggatgatttaattgatttttgtgtgaacaagggtttgtttgggcttggtaatctagcaggcataccaggaaccgttggtgcagctcctgtacaaaatatcggtgcctatggtgaagagatatctaattttatagatcacgtcgagtgcttcgatctggatacaaacaaccaagtaagattaagcaaatctgagtgtaaatttggttaccgaaaaagcatctttcaagaatcagataatctaattattgtttctgttggtttatcgctgttaaagaaatttgaacctaagctacattatcaagacttaaaggatcattcgtttacagatgagggcgaacttgtagagactgtcagaaatataagaaacaaaaagataccagatccaaaggattttcctaatttgggaagcttctttaagaacccaacaattacaaaagaagagtacgagaaaaactctaaattacatgaactgaaaagttacgattcagataatggagatataaaactttctgcaggtgagatgcttgataagcttggcttgaagggattgcaacttaaaaatataggcttatccaataagcatgctctgatcttaattaactgtgcctaccctaatggcgtatgtacggctaacgatgtcaaacatgctgagaattatctgttaaataaagtttctgactcttacggcattacgctggaaagagagccaatttatttatga

SEQ ID NO: 204504 - DNA, 374 bp, Unknown
  Bacterial polypeptide expressing nucleotide sequence isolated from the Sargasso Sea
gctggtggtgctctccgcccggttccgccttgaccccggccatgacccggatgagatcacccgcatcaccagcggcaacctcagccatcgcaccagcactcagccctacacacaacccagttgtggcagcgtgtttcgcaatccggaacccctgaaagcaggccggctgatcgaaggtctcggcctcaagggcagccgcatcggtggcgcggaagtctccaccctccacgccaatttcatcgtcaacaccggtgctgcgacggcagccgacatcgatcaactgattcaacgcgtgctgcaacaggtggaggcagcccatgccgtacgcctgcatcccgaagtgaaacgcctcggattcaccgaagccgcttaat

SEQ ID NO: 204505 - DNA, 798 bp, Unknown
  Bacterial polypeptide expressing nucleotide sequence isolated from the Sargasso Sea
ttaacaagtttgtaataaaaatttcatttaatgaaatatcaatcgaggataatttaattacagttggagcgggtaaaaattgggatgattttgtactctggtccttagaaaacggttattgcggattagagaatttatcaggtatacctggaagcattggagctgcacctattcagaatattggtgcttatggaagcgaagtatctgattttattgatgaagtcatttgttttgatatggattcaaacagtttggttagctttactaataatgattgcaaattttcatacagacaaagcatatttcaagataaagattctctaattgtcataaaagttaaattcaaattaaccaaagattttcaacccaacttagagtatgaagatttaaactttttaaaagcagaagagattactccgtttatcatcagaaaacatatccttaaaataagaaaagctaaaatatcagacccaaaagaacatccaaatgttggcagcttttttaaaaatcctattatctcattggatgaattggaaaaaataaaacaaattcttccaaagattaaattttattcatacattgataataaagtaaaaatatcagcagcttttttaattgaatcattaagcctaaaaggttttgtattgaataatgcaagagtgtctgaaaaacactcgctagtgctagaaaataaatctgagaaatcggaggatattcttgatcttgcatcgcatatccaggcctctgtgttggagaattacaacattaatttagaattagaaccccaaatattttgac

SEQ ID NO: 204506 - DNA, 883 bp, Unknown
  Bacterial polypeptide expressing nucleotide sequence isolated from the Sargasso Sea
ttgaaactctgttcaagggtccgctggaatgaatccctgaaacgattcaatacctggagaattggcgggccttcacgtggtctggttgatgttgaaaccgaggaagacttagccagactgctcccctttttaaaaaaaaatgatattccgtggttcctgatcgggaaaggatccaacctgctgatccatgaccgaatctgggaaggggtgatccttcacctcacgggggattttaaaagctggcagccccaagagcatccgcaaaccgtctgtgccggagcagcactggctgatgtcacttttgcacaacgatgtgttagtcaggggtggtccgggatggaattcatgatcggtattccgggaaccatcggcggagccgtagccaccaatgctggagcccatggtggagaaaccagcgaatttgtccgaagcattcgctggatggatctggatggtatcgtccatcaggatcaacgtgacgcttttcaattcgcataccgttattcagaacttgatgccaaacagggccgggtcatgatctctgcaagctttgagcttgctgaggaagaccctcaacaggtaaaacaaacattattggagtgtcagcgctttagaatggagaagcaaccctacaaccagccaagctgcggatctgtttttaaaaatcctccccaggattatgcggcaaggctgattgaactgagccgattgaaaggtaaagttcgcggaagggctcaggtcagccccaaacatgcgaacttcattgtcaatctgggtgatgccgcttcggatgatatttttggcttgatggacgaaatccaggagcaggtctacagtgatcataagattaatttgattcctgaggtgcaaatcctgcagtaag

SEQ ID NO: 204507 - DNA, 784 bp, Unknown
  Bacterial polypeptide expressing nucleotide sequence isolated from the Sargasso Sea
tttgaaactccgttcaagggtccgctggaatgaatccctgaaacgattcaatacctggagaattggcgggccttcacgtggtctggtcgatgttgaaaccgaggaagacttagccagactgctcccctttttaaaaaaaaatgatattccgtggttcctgattgggaaaggatccaacctgctgatccatgacagaatctgggaaggagtgatccttcacctcacgggggattttaaaagttggcagccccaagagcatccgcaaaccgtctttgccggagcagctctggctgatgtgacttttgcacaacgatgcgtcagtcagggctggtccgggatggaattcatgatcggtattccgggaaccatcggcggagccttagccaccaatgcaggagcccatggtggagaaaccagcgaatttgtccgaagcatccgctggatggacctgaagggtatcgtccatcaggatcaacgtgacgcttttcaattcgcctaccgtttttcagaacttgacgccaaacagagtcgggtcgtgatctctgcaagctttgagcttgctgaggaagaacctcaacaggtaaaacaaacattattggagtgtcagcgctttaggatggagaaacaaccctacaaccagccaagctgcggatctgtttttaagaatcctccacaggattatgctgcaaggctgattgaattgagccgattgaaaggtaaagttcgcggaagggctcaggtcagccccaaacatgcgaacttcattgtcaatctgggtgatgcc

SEQ ID NO: 204508 - DNA, 985 bp, Unknown
  Bacterial polypeptide expressing nucleotide sequence isolated from the Sargasso Sea
atgactaaatacgaaacaaagattaaaaattctttaaatcttccttgtcatacaaatacgctatatgaaattgaatcaactgaagatcttcttaaagttgactacaacaaatatgatgaattattgattataggagaatgtacaaatttagttcttcctacaaaactaaataaaaaagtaattaaatcaaaaaatacaaatattaataaaatatcatcaaccttgtatagagttggatctgctgtaaattggaatgattttgtattaagtgttattgaagataatagatttggtattgaaaatttaataggtattcctggatctgtaggtgcagcaccagttcaaaatataggggcatatggagttcagatttctgattttattaaaagtattaatgtttatgactttaaagataaaacttttaaaaaacttctaaaagatcaatgtaattttggctatagatcttcaatttttcaaactaaaccatattttattattgatattgattttgaatttaatcatattgaaaaactgaatatggattatgaaggtataagacaccttattactgctcaagacaaagatataacatctataacctcaaaagaactaggtgctattatctgtgagctacgagattcaaagttgcctaaccctaaagtagtaccaaatgctggaagtttttttaaaaatcctataattaatgaaaagaatatttcatacaagaactttaaaaaagaagatttaataatatgggatcatgataaaccaaatgtaaaagttggagcaggaagactaattgagcttataaaaagcactctaaatcaagaagctattgataatttacattcaagtcacgcactaataatcaccaacaaaaacaatattacttatgatgacataataaaaatctcacaagacattcaatcaaaagtctataaagagtttaatatcctgttagagatagaaccaacgattatataaa

SEQ ID NO: 204509 - DNA, 889 bp, Unknown
  Bacterial polypeptide expressing nucleotide sequence isolated from the Sargasso Sea
tagaatttctagactcaagagccttcctatactttttattggagaagggtcaaatattgttttcactaaagattatgatggattggtgattaaaaataacatctttggaaagattgaacatgacgaaaggatagtagaaatttcttcgggggaaaactggcataactttgttgattggagtttatctaatgaaaagtacggcctagaaaacctagctcttatacctgggactgtgggtgcttcaccaatacagaatattggagcatacggaaaagaggtttctgagtttattaaagaggttaaatcaatcaatacacttacggcagaagaaagagtattttctaaagaggaatgtaagtttggttatagatcaagtgtattccaaaataagaaagattattttattacttcagtagtttttgagaccaatcaagatccttgtatagacattgcttacgattcattacataaattttttaaagccagttctaaagaattaaaaactttaacccctaaagatgtttttgatggcgtgtcatcattaagaagaattatcttacctgatcataacaaagaatttaatgtgggtagtttttttaaaaacttgatcctggaagaggcagattttagaaatctaaatgagataattgatgttccttattataaggataattacaaatataaagtgccctcaggctatctaatagaagtggctggatggaaaggaaaagggctaaagaacgtaaaggtgtcagaacaacatgctttagtcttaacaacaaacggcaatctagatggaaatgaaatcgttagatttgctgattcaattattgatgatatttacaataaatttaaagttaaattagaaatagaaccgacattaatttaa

SEQ ID NO: 204510 - DNA, 811 bp, Unknown
  Bacterial polypeptide expressing nucleotide sequence isolated from the Sargasso Sea
gaaggtgggaggtcctgcagatgttttctttatacctgataatcgtcaagatttgtctcagttcttaagtgaaaacaagggtaaatcagtcacctggttaggcaatggaactaacgtccttgttagggatgggggaattaggggtgttgttatttcaacaataaaatctataaataagataactatggcggcagagaattcttgtcgagcagaagtgggagcttcatgtatggatttagcgttatttgcagaaaagaatgaaataggaccagcagcattcttttcagggattcctggctcaattggcggagctcttaccatgaatgcagggtcctttggtcatgaaacttgggaattcgtagaatctgttgaggttattgacgaagctggaattatccatcacttggaacccagggaattcaaattctcgtacagatcagtcgaatttccttttcccctatggttcgtctcttgtctaatgaaatttccagaatctgaaactaccaccaaatctgaattgaaagcaatgagagaccaaagaattaaaacgcaacctctcagtgaggatacttgcgggtcagtttttaagaatcctaaaccggaccatgcgggagatctgattgagagagctggcctcaagggttataaaattggtggttgctccatatcgacaaaacatgcaaattttattgtcaatgaaggcgctgccacatcagcggatatagagaaacttattagacacgttcaaaacgtcgtcaaaactaagtttgatgtaaacttagagactgaagtcagaatcataggcgagtaa

SEQ ID NO: 204511 - DNA, 754 bp, Unknown
  Bacterial polypeptide expressing nucleotide sequence isolated from the Sargasso Sea
attagaggtattaaacaataaagagttaaataacaatctatttattcttggaggcggaagtaatatattatttacaaagcattataaaggaactattattaatctaaaagaagaaagtataaagatcttagacgaaggtcctgacaaagttcaagttgaagtatctgctggcatgaactggcatagatttgttgagtgggcggtggataaaaattttggtggtattgaaaatttgtcattaattcctggaaatgttggtgcttctccaattcaaaacataggagcttatggtgtagagttagaagatgtgttcgatagttgctcaggtataatgattgactctcttgataaagttaacttaagtaagttagattgtgaatttacttatagatcatccatttttaaaaaaaaacttaagaataaattcataataacttctgtcagatttaatctaacaaaatcaaatcatttatataatattgattatccagatttaaataatcttttagaatctggcctagatttaaaaaagatttcaaatgaggtaattaaaattaggaactcaaaacttccagatccacaacaatatggtaattgtggaagtttttttaagaaccctattgtaggctattctaaatttcaaaaacttaaagaaaaatttactgaaattcctttctttaaaactgattcaaattattttaaagttccagctgcatggttaattgataaatgtggctttaaaaaaattaatgat

SEQ ID NO: 204512 - DNA, 541 bp, Unknown
  Bacterial polypeptide expressing nucleotide sequence isolated from the Sargasso Sea
ttttctggaatacctggatcaattggaggagcgctgactatgaatgcgggttgttttggcaatgaaacatgggaatttgttaagagtgttgaggtgatggatcgaaacggagaaattcaccaactatacccagaagaattttcaatttcatatcgatcagtgggcttcccatttcctctttggttcttatcttgcgtgatgtcttttccggaagagggttttaccacaatagaagagttgaagagcatgagagattctagattagagcgccaaccccttactgagaatacatgcggatctgtttttaagaatccagatggaaaccatgctggcgatcttatagaaagatctggcctgaaaggttttagaattggaggatgtgccgtctcagaaaaacatgcaaactttattgttaatgacaaagaggcaaccgccagtgatattgaaatactgatcaagcatattcagaaaactgttaaggatcattatgggatagacttagaaactgaggtgaggatcatcggtgagtatcatgagtgat

SEQ ID NO: 204513 - DNA, 920 bp, Unknown
  Bacterial polypeptide expressing nucleotide sequence isolated from the Sargasso Sea
gctggctgccccggcagcgcattttgtgcaagccgagactgatgcgcagctgcgtgaggcgctattgctggccgagcgtgagggctggcaggtgacgctgctcggtggtggcagcaatatgatcctggcggggcccgtgtccggcctggttgtgcgcgtcgccagtcgcgggcggcgagtgctgtcgcgtggcagcgagcaggtgctgatcgaggctgaagcaggcgagagctggcaccagctggtttgttgggcgctggacctggggttgagcgggattgaaaacctggctctgatccccggcactgtcggcgcggcgccagtgcagaacattggtgcttacggcgtcgagctctgtgactgtcttgatagtgtgcaggtgctggatcggcagaccggcgagctgtgctggtttgatcgcgggcaatgcgactttgcttatcgtgatagccgcttcaaacgcgaggctggtcgctacgtcatcctgcgggtacgcctgcggttatggcggcagccgcgcctggccgtggactacgcgccgctggctgaggcttggcgggcgacgggcctgcaggccgccgatgcgcgcgtggtagccgctttggttatgcgcattcggcaaagtaagctgcccgatccgctgacattgcccaatgcgggcagctttttcaaaaacccggtggtgccggttgatcaggcgcagcggctcgcggagcgttttccatccatgccgcaatacgttcaggcgggcggcggggtgaagttggcagcggcctggctaattgatcaggctggctggaagggctttcgcgatggtgcagccggcgtgcatagcgagcaggcgctggtgctggtcaaccatggtggcgcaaccggtgcgcagattctggcgcttgcagcgcgcattcgtgccgatgtgc

SEQ ID NO: 204514 - DNA, 391 bp, Unknown
  Bacterial polypeptide expressing nucleotide sequence isolated from the Sargasso Sea
aatgaagattcaagaaaatatttctattaaagatcttaactcattaagagttaatcaattaacaagatatttttgttccattgaaactatagaagaatgtaaagaagcaattgaattctctatatctaagaaaataccttgcttatttattggagaaggctcaaacatcgtctttactaaagactatgacggtttattgattaaaaacaatatccttggaaaaaaagaatacgattctcggactattgagattttttccggagaaaattggcacaattttgttgattggactatatctaacaaccgatacggtttagaaaatctagctctaatacctggcacagttggagcagcccctatacagaatattggagcttacggaaaagaggtt

SEQ ID NO: 204515 - DNA, 754 bp, Unknown
  Bacterial polypeptide expressing nucleotide sequence isolated from the Sargasso Sea
gttgaagtatctgctggcatgaactggcatagatttgttgagtgggcggtggataaaaattttggtggtattgaaaatttgtcattaattcctggaaatgttggtgcttctccaattcaaaacataggagcttatggtgtagagttagaagatgtgttcgatagttgctcaggtataatgattgactctcttgataaagttaacttaagtaagttagattgtgaatttacttatagatcatccatttttaaaaaaaaacttaagaataaattcataataacttctgtcagatttaatctaacaaaatcaaatcatttatataatattgattatccagatttaaataatcttttagaatctggcctagatttaaaaaagatttcaaatgaggtaattaaaattaggaactcaaaacttccagatccacaacaatatggtaattgtggaagtttttttaagaaccctattgtaggctattctaaatttcaaaaacttaaagaaaaatttactgaaattcctttctttaaaactgattcaaattattttaaagttccagctgcatggttaattgataaatgtggctttaaaaaaattaatgatgaaaatgtaggagtctataagaatcagcccttagtagtaattaatctaggtaatgcatcagggaatgaaattataaattttgccaaaagaattaaggactcagtatttaatgaatttgatattgagcttcaagaagaagtaattgtaatgtaat

SEQ ID NO: 204516 - DNA, 718 bp, Unknown
  Bacterial polypeptide expressing nucleotide sequence isolated from the Sargasso Sea
ctgttacagcagctctctgctaaatcctattccacttttgcattggctacacaacttgccgaactggttgagctggactctttggctgaattaatggcttatcagcccgcagtcactcctttattgttgggtgagggcagcaacagtatttttctgagcaatcaaactcagaccgttttacgttatttagccaaaagccggactgtgttggcagaaaacgagcatcaagtacaactgcatatagaagcaggggataactggcaccaactggttagctggactgtggctcagggctggtggggattagaaaacttatcccttattccgggcagtgtaggagctgctcctgtgcaaaatatcggtgcttatggtgctgaattggccgactgctgtgattatgtcgatttttttcactggcaaagccgggacgttcagcggttaagcaaaagcgattgtggttttggctaccgtgacagtatttttaaaacggttcttgcaggtttgggtgtgatagtggctgtgggcttgacgctaaaaaaacatagccagccaaaattaggctacaaagggctggagcatttaaatcaacacagttctgtgacggaagtggcacaagctgtgattgcagtgcgtcagtcaaaattaccagaccctgcaatattgccaaactgtggcagctttttcaaaaaccctgtggtcagccagtctgtgttgaaac

SEQ ID NO: 204517 - DNA, 811 bp, Unknown
  Bacterial polypeptide expressing nucleotide sequence isolated from the Sargasso Sea
gggtggaccagcagaaatcttctttacacctgagaatcgaaatgagctttcaaaatgcttggaatcaaccgataaagatattacatggataggaaatggaacaaatgttttagttagagatggaggggtcagaggtattgttatatcgaccaaaaaatcttttaatgaaattaaattattagacgaatctagttgtatggtagaggttggtgcttcgtgttttgaattagcgatgtatgcaacaaagaataattttgggccagcagcatttttttctggaatacctggatcaattggaggagctcttactatgaatgcgggctgttttggcaatgaaacatgggagtttgttaagagcgttgaggttatagatcgaaatggagagatccaccatttggatccgaaagaattttccatatcatatagatcagtaggtttcccatttcccctctggtttatatcttgcgtgatgtcctttccagaaggagggcttaccacaatagaagagttgaagagcatgagagattctagattaaaacgccaaccacttacagaaaatacatgcgggtccgttttcaaaaatccagatggaaatcatgcaggcgatctcatagaaagatctggcttaaaaggttttagaattggaggatgtgccgtttcagaaaaacatgcaaactttattgttaatgacaaagaggcaaccgccagggatattgaaacactgatcaagcatattcagaaaactgttaaggatcattatgggatagacttaaaaactgaggtcagaatcatcggtgagtatcgtgagtga

SEQ ID NO: 204518 - DNA, 441 bp, Unknown
  Bacterial polypeptide expressing nucleotide sequence isolated from the Sargasso Sea
gctgaacaccctaggcctgccggcccgggctcaacgtttagctcgtccgactactttggatgcgttgtctcaggtcttggcagagcgaaatcccgctgagccgctttttgtgatcggcgaaggcagtaatttggtgatttgctctgatctgccgggcttgacgttaagcttagcaatcgatggcatgtccctggttaagcaagataatacgcatgtgtgggtcgctgcgggcgcgggtgtgcattgggatgatttggtggcctggaccgtggagcagggttggcaggggttggaaaacttatctctgattcccggcacggtaggggctgcgccttttcagaatattggcgcctatggtgtagagctgtcacagttgcttgagcaggtgacggtgatggatgtggttaccgctcaagtaacgcactttgctggcaatgaatg

SEQ ID NO: 204519 - DNA, 598 bp, Unknown
  Bacterial polypeptide expressing nucleotide sequence isolated from the Sargasso Sea
aagaaacttgtttgtttgactaacgcgcaatgtgagtttggctaccgcgactctgtatttaaacatggactaaaaaataaagccgttatcacacgggtattactagcattgccaaagcaatggcaacctgtactgagttatgggccattaaaacagctaacaaacgtgacaccacgcgccgtatttgaacacgttattcaaactcgtaatagtaaactgccagatccatacacgttaccaaatgcgggcagtttttttaaaaacccgataattaccaatcaacagttaacaacgttgttaaagcagtttcctgatgcgccttattacgcctatgggcaaagtgagcataaggtagctgcgggttggctaatcgataacgcaaatcttaaaggttatcgcgtagcgggtattgaggttcatagacaacaagcactggtattggttaatcatggtaacagcgaaggcgaagacttgattgctatgatcacgcatattcagcatgttgtgtattcgcgttacaacatactgcttgagcatgaagtacggttaataaacacaaccgatgaatgctacatacaaggagacgttacacagtgaa

SEQ ID NO: 204520 - DNA, 799 bp, Unknown
  Bacterial polypeptide expressing nucleotide sequence isolated from the Sargasso Sea
aatgaagattcaagaaaatttttccattaaagattttaactcattaagagttaatcaattaacaagatatttctgttccattgaaacagtagaagaatgtaaagaagctattgaattctctacatctaagaaagtaccttgcttatttattggagaaggctcaaacatagtctttactaaagactatgacggtttattaattaaaaataatatcctaggaaaaaaagaacatgattctcaaactattgagattttttccggagaaaattggcacaacttcgttgattggactgtatctaaccgacgatacggtttagaaaatctagctctaatacctggcacagtgggagcagcccctatacaaaatattggagcttacggaaaagaggtttcaagctttattaatgaaattaaaacaataaacacaattactgccgaagaaaaaatttatgccaaagaagattgtaaatttagctatagatctagtgtgtttcaaaatcaaaataatttattcattgcatctgtaatttttgaaactagcttagatgctgatgtagatatttcgtatgattccttaaaagactatattaaaactagtgctaaggaagtgaaaactttaacacccaaagatgtatttaattatgtttcagctctgagaaggaatgttttacctgatcataataaagaatttaacgtaggtagtttttttaaaaacttaactcttagggaagaagaatttaataatttaagtagcataattaaagttccattttataagagcaattctttgtacaaagtt

SEQ ID NO: 204521 - DNA, 817 bp, Unknown
  Bacterial polypeptide expressing nucleotide sequence isolated from the Sargasso Sea
actgttagaactattgatgagctgaagactgtgatggccagtcccgaatttttgaatcaacagccgtttgtgatgggttcaggctcgaacgtgatcgcgatgcctgtagtagaaaaattagtcattaaaatgtgtataaaaggaattcagagagttaaagaaaataaggagtttgtttggatcagagtgggtgccggcgaaaactgggattcgttggtctgggctctgttagagaaaaatatatttggtctagagaatctggctttaattccggggctggttggagccgcgccgattcaaaatattggcgcttatgggacggaggtgtccgaatttgtagatgaagtagagactttcgatagatcaggagagaaattaattttaaagggttctgactgcgagtttggttatcgaaccagcatttttaaaagaaaaaatgactttattattagctcggtaactttcaaactgcttaagaaaccaaacactaaaactgactacccagatttgaagaattttctgagttatcttgatttgactgagccttcccccgaggagattgccgatgccattactcaaataagaacggagaagttgccaaatcctgcgactcaccccaatctcggtagtttttttaagaacccagtggtagcaaaggatctagctgaaagtcttgctggccgaattgacagcttaaaagttttcgaagtgcctggtgggtttaaattatctgcggcccaattaatagaccttgatggctggaaaagcaaacccggagagaacgtgagctgttgggttaaacagcctgttggttctc

SEQ ID NO: 204522 - DNA, 564 bp, Unknown
  Bacterial polypeptide expressing nucleotide sequence isolated from the Sargasso Sea
ataatttcggaccagctgcatttttttctggaatacctggatcaattggaggagcgctgactatgaatgcgggttgttttggcaatgaaacatgggaatttgttaagagtgttgaggtgatggatcgaaatggagagattcatcaactagacccagaagaattttcaatttcatatcgatcagtgggcttcccatttcctctttggttcttatcttgcgtgatgtcttttccggaagagggttttaccacaatagaagagttgaagagcatgagagattctagattagagcgccaaccccttactgagaatacatgcggatctgttttcaagaatccagatggaaactatgctggcgatctcatagaaagatctggtctgaaaggttttagaattgggggatgcgccgtttcagaaaaacatgcaaactttattgttaatgacaaagaggcaaccgccagtgatattgaaacactgatcaagcatattcagaaaactgttaaggatcattatgggataaacttagaaactgaggtcaggatcattggtgagtatcatgagtgat

SEQ ID NO: 204523 - DNA, 556 bp, Unknown
  Bacterial polypeptide expressing nucleotide sequence isolated from the Sargasso Sea
gccgtcggcatccccggcacggtcggcggtgccgccgtgatgaatgcgggtgctcagggtggatgcacagctgaatcgctggaatcggttcaggtgatcccgatggccggtggtgaaagcttcgagctcacacgcgaccagctcgccttcgattaccgccacagccgcctgcagtacgaacccctgctggtgctttcggcccgcttccgactggagcccgggcacgaccctcaggaactgaggcgcatcacctcagacaacctcagcaagcgcaccagcactcagccctacacccaacccagctgcggcagcgtgtttcgcaatcctgaacccctcaaggccggtcggctgatcgaggacctgggcctcaagggaacgcggatcggtggcgctgaggtgtccaccgtgcacgccaatttcatcgtcaacaccggtgccgccacagccatggacatcgaccggttgatcagtttcgtgcaggcacgggtgcacgaacgccacgcactatctctgcatccggaagtgaaacgcctcggtttcgcaacagcggcttaat

SEQ ID NO: 204524 - DNA, 789 bp, Unknown
  Bacterial polypeptide expressing nucleotide sequence isolated from the Sargasso Sea
tttgcaaccgcattggttctatggcaaaccgcaacttggctttatgggccgagggcggggcgctgggcttcactgctatggattagcctaccagcggtcggacttggcagctttttgatatcaaccgatacgccgcttttattattcatttctctggcgttgctcgcaattgcaggatcgtcatgtaacaaaataccacccgcccatgcgatgatttacgctggctttgcccttggcttagggatgcttacaaaatatgccgcgctatacggactatttggattgctgcttatttgggcgattggccgccaccagccagaaccaataattcgcggcaaggatctcttattagccattgttgcctttttaatagccgccagcccaaatctagtttggaatatcgcgcacgatttttccaccatgcgacatcttggcgacaatgcaaatcttgccaaacaaactaataacctcaccgaaagcctgttctttttgatcagtcaggcaggagttgccggtccattggtatttgtgatgatgttcggtattttaggagcagcccgccaggaacgtcacgctggttggctgatctggatggcggttccagtgctcgttctgatgagcttgcaggcctacttaagtgaagcgaatgcgaattgggccatgaccgcttatccggcattgtgtgtttggctcagcggctggattgccggttgcaagaccgaagataacaatggaaataaaaagccaagcaaagccagaagatggtttggctatgtagccctcggcgta

SEQ ID NO: 204525 - DNA, 777 bp, Unknown
  Bacterial polypeptide expressing nucleotide sequence isolated from the Sargasso Sea
aatttaatagtatttcagttggatcatctattaattggcacgaattagtaaaaaaaatggttgaacttgatatatatggatttgagaatttatcactaataccaggtactgttggtgcagcacctattcagaatattggcgcctatggacaagagatttctaacttaattaatgaggttcattgttatgattatattgaagggaggtttgtaaaattatcaaatagcgattgtaaattttcatatagaaattcgtctcttcaataccgtaatttattaatatataaagtagtttttaaaactgatgcaccacatgtattgaacttaaactataaatctattcaagattatattgatgataataaattggataaatctaatatagatctaaatactatttcaaaaattatttgtaagattagaaataaaaatttaccggatcccaaagaaatacctaatgttggtagtttttttaaaaacccaattataaatatagaagatatcaatcttaatgcattctcagtaaatgatttaattatttggaaaataaatgacaaaactataaaagttggagctgctagattaattgatcttataaaaaataaaataaatgaagataaaaacatttctatttataaaaatcattcattagtactaactactaatgctaagagcaatcaagaagaagttttaagatttgcaaatcaaatccagatcctagtatttgatacttttaatatacatcttgaaatagaaccaacggtaataactaactaaa

SEQ ID NO: 204526 - DNA, 508 bp, Unknown
  Bacterial polypeptide expressing nucleotide sequence isolated from the Sargasso Sea
tttgcctatcgccagagccatttcaaggccgagcccggccgccatgtcatcctgtcggtcacgctcgccttgccgtgcgcctggcacccaaaacgcgattacgccggcctcgacctgttacccgagcaggcctctgcgcaggagatgctagatcacgtcgtagcgctacgcgcctcgaagcttcccgactggcgcatactcggcaatgccggctcattcttccacaatccggtcgtcagcgccgaaaaggccgccgagatcgcaggcgcgccgcgctatccccagcccgacggcacggtgaaactctccgccggctggctgatcgagcaatgcggcctcaagggcttccgtctcggccccgccggcacctacgcccgccacgccctcgtcctcgtcaaccacggcggcgccacaagcaccgacatcgccgccctggccaaccatatccgcggcaaggtgcgggagcggttcggcgtggagctggtgcaggagccgatcgcgctttaag

SEQ ID NO: 204527 - DNA, 1012 bp, Unknown
  Bacterial polypeptide expressing nucleotide sequence isolated from the Sargasso Sea
tatgtataaagttttatcaaacttctcgataaaagactacaacacatttaatatagatgttaagtcaaataaatttatttctattaacacagaagatcaacttatcaattacttgactcaaaataaaggtcaagaagatattttctttttaggtggaggaagtaatgtcttattttctaaagattacaatgggactatagtccatctttcactaaagggtaaagaaatcatagaagaatctgatgataatattattgtagaagtttgctctggagagaactggcatgaatttgtaatgtgggcaattgaaaataattatggaggaatagagaatctatctttaattcctggaaatgtaggagcagcccctattcaaaatatcggagcttacggagttgaattaaaagatgtatttgatagttgcagggttctttcaagagaatcaaatgagatagaacatttcaataaagataaatgtgaattcaattataggtcatcaatatttaaatttaatgagaagaacaaatatgtaatactatctataagactaaaattatctaaagagccacatagtttcaatctcacatatgatagtttaaaagaaagatttaatagtaaagaaataagtttatctagtatatcagaggaaataattaaaataagggagtctaagttgccaaatccaaaaaagattggaaattgtggaagtttctttaaaaatcctattataaaatcacaaaagttagaggatctcttagaaaagtatcccaagttacctcatcatgaaattgagaatggattttataaaattcctgcagcttggttaattgaaaagatcggtttcaaagataaaagcttgggagatgtgggtgtttatattcaccaacctctagtaatagtaaataatggcaatgccagtggatctgatattttaaagtttgcaaatagtataaaagattcggttagagaagtttttaatattgagcttgaagaagaggttaatataatatag

SEQ ID NO: 204528 - DNA, 1024 bp, Unknown
  Bacterial polypeptide expressing nucleotide sequence isolated from the Sargasso Sea
atgcaagaaaacatattaaagatgctactaaaagagaatcataaaatatcaaattcgttaaaaattgattccactgcaagattttatatcgaagttataaaacaagatgaactcatagatctatataaatttattaataaaaatgaaattaaatatttagttttgggagagggtacaaatttagtacctccagatttttttgatggaattgtaattaaacctaattttaatgatgttttatatgactcaaataatcaaattattaacgttggtgcatcagttaattggcataaattagtgaatatatgtatcgaaaagaatatttatggttttgaaaatttatctctaatacctggtactgttggagcagcaccaatacaaaatattggagcatatggtcaagaagtatctaatttaatagataaaattaattgttttgatattgaaaagggtgagtttaaaaccttgaataatagttcttgtaaatttaaatacagaaattctatatttaaaaacaattctttattaataatatctgttgattttaaaactgattgcaaaaaagaatttaatattgaatataactcgattattaatcatatggataaaattggttttaagaaaactaatctgtctctggaaacactttctaatttaatttgtgatattcgaaacaaaacattacctgatccaaatattattcctaatgctggaagtttttttaaaaatgcagaagtaaaaatatctgagattgatgattccgaattttctcttgatgaattaataatttgggatattggcaataataaagtgaaagtaggctctgcaagattaatcgaattagtaaaagatagaataccaaaaagtaaaaacgtagaaatatataaaaatcatgctcttgttttagttacgaatgcatatgcaacccaagctgaaattcttgattatgcaaatgcaattatcaagattgtaaaaaaggtttttaacattgaactacaaattgagccaactttagtcgaataat

SEQ ID NO: 204529 - DNA, 1006 bp, Unknown
  Bacterial polypeptide expressing nucleotide sequence isolated from the Sargasso Sea
atgaatatatttgaaaatcacaaaataaaaaattcacttcaaataaaatcatcatgtaggttttatgtagaaataaataataaaaatgaatttaatgatttacatgtttttatatctaataaaaaattaccagtatttatcttgggcgaggggacaaatatagttccgcctgaatattatgatggaattataattaaaccattatttaataatattaaatatctaaatgagacaaatattgtctctgttggagcatcaattaattggcattttttagtcaaagagatggtaagtaaaaatatctatggttttgaaaatttatccttaataccaggcacagtcggagctgcaccaatccagaatataggcgcatatggtcaggaagtttctaatcttataaataaagtagattgctttaattatgaaacaggtaagtttgtaactctaacgaaagaacaatgtaacttttcatatagagattcttcattaaaaaaaggtaatttaataatatttaatattgattttaagacagactctataaatacattaaatttagattacaagtctattcagagctacttatatcaaaataaaattgattcaaattctctgaatttagattctgtatcagatattgtttgtaagataagaaattcaatactcccaaatccagatgaagttcctaatgctggaagtttctttaaaaatcctattatggataaaaataaaatcaatactgatcatttttcattagatagattaattatttgggatattgattctgtatatgtaaaggttggtgcagcaagattaatacagctcattaaaaatgatcttattaatgataataatataaaaatttatgataaacatgctttagtattaattactaattcagaaacctcacaaactaatatattggaatatgctaatcaaattaaatctaaagtttttgaggtatttaatataccacttgaaattgaaccaactattattcctaattaaa

SEQ ID NO: 204530 - DNA, 910 bp, Unknown
  Bacterial polypeptide expressing nucleotide sequence isolated from the Sargasso Sea
atgaatttaaaagatttagaagaattttcgaaaaaaattacaggaaaattattatttgactacaatcttaataaaagcaattggtttaatattggaggaaaaactaaaatttattttaaaccagaaagcttaactgatctggtagattttttaaaactatttaataaacgaggtagaatatttgttttaggggctggatcaaatgtgttgtttgaagattcatgttttgatggagttgtgataaaattaggtaaaaatttttctaaattatcaatattaaatgatgaaatagttatagctggaagtggagcacaagataaaaaactttcagaatttgcatgcgaaaatagtcttagcggatttgaatttctttcttgtataccaggaacagttggaggcggcattagaatgaattctggatgttttgaatctgaatttaaagatattattttatccgttcagacaatcgatactttgggtaatgtgattacaattcccaggaatcagatcaaatttgattacagaaaatgtaatttaaataataatttaatttttttaagtgcatcatttaaaggttacaaaaatgacaaaaaattaatatctcaaaaaatgatatcgctaaagttcaaaaaggaacaagctcaacctacaaaaattaaaactggaggcagtacttttaaaaatccagttgatcagacaaataaaaaagtttgggaactcattaaatcatcagtaccactagacacaagatttggtgatgctactatttctgaaaaacattgtaatttttttataaataaaaacaaagcaacctgtagagatatgaaaaagcttataaattttgttaaggaaaaagtgtttgcttctacaggtgttaggcttagcttagaaattatattagttgaataaa

SEQ ID NO: 204531 - DNA, 1006 bp, Unknown
  Bacterial polypeptide expressing nucleotide sequence isolated from the Sargasso Sea
tatgattgtaaataaaaatgcttcattaaaaaagcttaatacatttaatgtagatgctagttgtgatttattagttgagtcaagtaacactaatgatctcttagaggtattaaacaacaaagagttaaataataatctatttattcttggaggcggaagtaatatattatttacaaagcattatcaaggaactattattaatctaaaagaagaaagtataaagatcttagaagaaggtgctgacaaagttctagttgaagtatctgctggcatgaactggcatagatttgttgagtgggcagtggataaaaatttcggtggtattgaaaatttgtcattaattcctggaaatgttggtgcttctccaattcaaaacataggagcttatggtgtagagttagaagatgtcttcgatagttgctcaggtataatgattgactctcttgataaagttaacttaagtaagttagattgtgaatttacttacagatcatccatttttaaaaaaaaacttaagaataaatttataataacttctgtcagattcaatctaacaaaatcaaatcatttatataatattgattatccagatttaaataatctttcagaatctggcctagatttaaagaagatttcaaatgaggtaattaaaattaggaacacaaaactaccagatccaaaacaatatggaaattgtggaagtttttttaagaatcctattataagctattctaaatttcaaaaacttaaagaaaaatttgctgaaattcctttctttaaaactgattcaaattattttaaagttccagctgcatggttaattgataaatgtggctttaaaaaaattaatgatgaaaatgtaggagtttataagaatcagcctttagtagtaattaatctaggtaatgcatcagggaatgaaattataaattttgctaaaagaattaaggactcagtatttaatgaatttgatattgagcttgaagaagaagtaatcataatgtaa

SEQ ID NO: 204532 - DNA, 749 bp, Unknown
  Bacterial polypeptide expressing nucleotide sequence isolated from the Sargasso Sea
atctgttaattggcattcttttgtaaaagagatgattgaaaataagatatatggttttgagaatttatctttgataccaggaagtgttggagctagcccaattcaaaatattggagcttatggacaagaagtctcgaatttaatcgcaaaggtagattgttttgattatgttaaaaataaatttttatcattatctaattctgattgtaatttctcatacaggaaatcatcactaaaagataagccatatattatttttaatattgattttattacaaatggatttaaatctttaaaccttgagtatgattctattcagaactatattaataacaataacattaacctctcatcaatatctttgaatcgtgcatcagaaattattgttgatattagaaattctattttgcctgatccatcacaagttcccaatgttggaagtttttttaaaaatccaacaataaataaaaatgaaataaatacttctaaatttaatttagaagatctaataatttggcattatgattcggatacagtcaaagttggtgcagcaagacttatacagcttgttaaaaatgatttaaagaattttaacaatgtatcaatttattctaatcatgccttagtattaattactaatggcaaagccacgcaaaaagagatcttaagttttgctaataatattaaaaatgttattaataaaacatttaatatttcattagatatagagccaacagtcataaattaat

SEQ ID NO: 204533 - DNA, 631 bp, Unknown
  Bacterial polypeptide expressing nucleotide sequence isolated from the Sargasso Sea
catgtcttttccatattcgctaaagccgtttaatacttttggcgtggagcaatcctgcttatccttgattgaagtccattccaaggctgagctgcaatcggcctgtttatccttatatcagtctaagcgacctatgctcgtactcggtggcggcagcaatatcgtattcaccgatgattttaatggcactgtagtgcgagttttgtctaagggcatttcctgctctgaagatgacactcacttttaccttgctgttgaggcgggtgagaactggcatgagttggttaagttcagcttaaatcagaatatgccaggacttgagaacttagcgctgatccctggcaccgttggtgcggctccgatccaaaatatcggcgcctatggcgttgagctatgcgatatttgtgattgggtcgaatatctggacctcgcgtctggtaacttgctaagacttacagtcgatgagtgtgagtttgcctatcgggagtcgatatttaagggcagcttacgcgacaaagctgtgattaccgccgtgggtttgcgcctccctaaagcttggcaacctaaattggcctatggtccgttgcaatcatttaccgctgagacagtgaccccaaggggagatttttga

SEQ ID NO: 204534 - DNA, 967 bp, Unknown
  Bacterial polypeptide expressing nucleotide sequence isolated from the Sargasso Sea
ttgaaaattaattcaaagtgtagatttttcattgaaattgacaaagttacgcaatttgaaaatctgcataaatttattaatgaacaaaatttacctgtattggtcataggcgagggaactaatatcgtacctaaagattattttgaaggcatagttataaagcctacatttaataaagttcaatataatacaaatgaatctacagtttcagttggatcatctgttaattggcattcttttgtaaaagagatgattgaaaataagatatatggttttgagaatttatctttgataccaggaagtgttggagctagcccaattcaaaatattggagcttatggacaagaagtctcgaatttaatcgcaaaggtagattgttttgattatgttaaaaataaatttttatcattatctaattctgattgtaatttctcatacaggaaatcatcactaaaagataagccatatattatttttaatattgattttattacaaatggatttaaatctttaaaccttgagtatgattctattcagaactatattaataacaataacattaacctctcatcaatatctttgaatcgtgcatcagaaattattgttgatattagaaattctattttgcctgatccatcacaagttcccaatgttggaagtttttttaaaaatccaacaataaataaaaatgaaataaatacttctaaatttaatttagaagatctaataatttggcattatgattcggatacagtcaaagttggtgcagcaagacttatacagcttgttaaaaatgatttaaagaattttaacaatgtatcaatttattctaatcatgccttagtattaattactaatggcaaagccacgcaaaaagagatcttaagttttgctaataatattaaaaatgttattaataaaacatttaatatttcattagatatagagacaacagtcataaattaat

SEQ ID NO: 204535 - DNA, 433 bp, Unknown
  Bacterial polypeptide expressing nucleotide sequence isolated from the Sargasso Sea
gatctggactacgactatcgccacagcaggcttcagagcgagcctctggtggttttatcagcacgctttcaactgcaatcgggtggtgatccgagcgaactcagtgcacgcaccagcgccaatctccacaagcggaccagcacccagccttatcagctgccaagctgcggcagcgtcttccgcaacccagaaccacaaaaagcggggcgcctgattgaagccctggggcttaagggccaccgcattggcggagcggaagtctccaccttgcatgccaatttcatcgtcaataccggaaatgcccaagcggctgatatggatgcactgattcgccacgtccaggctgtggtgcaacaggcccatggtcttcagctgcatccagaagtgatgcgcctgggttgctttgccaattcgcaggctgctgccgcctaac

SEQ ID NO: 204536 - DNA, 868 bp, Unknown
  Bacterial polypeptide expressing nucleotide sequence isolated from the Sargasso Sea
atgaggaataatattgtccttaatgagcctttatcgagacatacttcttggaaggttggtggtcctgctgatattttttttacaccaaatgatcgaaatgatctctctgattttttgaaatcaaatgattgcataatcacctggttaggaaatggaacaaatattttagtaagggatgctggcgttagaggtgcggtaatttcaacaaggaagtctcttaataaaattgaattaatagaccaatctaattatttggttgaagtcggcgtttcatgttttgagttagcgatgtatgcaacaaaaaataatttcggaccagctgcatttttttctggaatacctggatcaattggaggagcgctgactatgaatgcgggttgttttggcaatgaaacatgggaatttgttaagagtgttgaggtgatggatcgaaacggagaaattcaccaactatacccagaagaattttcaatttcatatcgatcagtgggcttcccatttcctctttggttcttatcttgcgtgatgtcttttccggaagagggttttaccacaatagaagagttgaagagcatgagagattctagattagagcgccaaccccttactgagaatacatgcggatctgtttttaagaatccagatggaaaccatgctggcgatcttatagaaagatctggcctgaaaggttttagaattggaggatgtgccgtctcagaaaaacatgcaaactttattgttaatgacaaagaggcaaccgccagtgatattgaaatactgatcaagcatattcagaaaactgttaaggatcattatgggatagacttagaaactgaggtgaggatcatcggtgagtatcatgagtgat

SEQ ID NO: 204537 - DNA, 868 bp, Unknown
  Bacterial polypeptide expressing nucleotide sequence isolated from the Sargasso Sea
atgaggaataatattgtccttaatgagcctttatcgaggcatacttcatggaaggttggtggtcctgctgatattttttttacaccaaatgatcgaaaagacctctctgattttttgaaatcaaatgattgcataatcacctggttaggaaatggaacaaatattttagtaagggatgctggcgttagaggtgcggtaatttcaacaagaaagtctcttaataaaattgaattaatagaccaatctaattatttggttgaagtcggcgtttcatgttttgaattagccatgtatgcaacaaagaataatttcggaccagctgcatttttttctggaatacctggatcaattggaggagcgctgactatgaatgcgggttgttttggcaatgaaacatgggaatttgttaagagtgttgaggtgatggatcgaaatggagagattcatcaactagatccagaagaattttcaatttcatatcgatcagtgggcttcccatttcctctttggttcttatcttgcgtgatgtcttttccggaagaggggtttaccacaatagaagagttgaagagcatgagagattctagattagagcgccaaccccttactgagaatacatgcggatctgttttcaagaatccagatggaaactatgctggcgatctcatagaaagatctggcctgaaaggttttagaattggaggatgcgccgtttcagaaaaacatgcaaactttattgttaatgacaaagaggcaaccgccagtgatattgaaacactgatcaagcatattcagaaaactgttaaggatcattatgggatagacttagaaactgaggtcaggatcatcggtgagtatcatgagtgat

SEQ ID NO: 204538 - DNA, 1003 bp, Unknown
  Bacterial polypeptide expressing nucleotide sequence isolated from the Sargasso Sea
aatgaatattttatctgatcacaatatagccaatagtttaagaattaattcaaaatgcagatattttattgaaattaatgaaatatcagaatttaaaaaactttatgattttataaatgaacaaaaaaaaccaatatttatcctaggagagggcacaaatatagttccaaatgattattatgatggcattgttataaaaccaagatttaatcatatcaagtacgataaaagtaaatgtatagtttcagtaggctcatcagttaattggcataattttgttgaagagatggttgagaataatatatacggttttgaaaacttatcccttattcctggaagtgtaggagcatctccaattcaaaatattggtgcatatggtcaagatgtttctgagttaatttcaaaaatagattgttatgattataaaaaaaacaagctaataagtttatctaattcagattgtaacttttcatatagaaattcttctttaagagacaaaccttatattatttataatattgattttcatacaaacaggcctaaattattgaatcttaaatatgagtcactacaaaattacattaaaaaaaataatcttaatgcatcaaaactatctcttagggatacttcaaaaataattattaatataagaaactctattttgccagatcctaattcaattccaaatgctggaagtttttttaagaacccaacaataagagaagaaaacatcaatacaaatcaattctcattggatgaattaattatttggaaccgcaattctaataatgtaaaagttggcgctgctagattaatacaacttattaaagatgatttaaataatcataacaatgtgtctatttattctgagcatgcactaatactaatttctaatggaaaagcctcacaaaaagatattttaaattttgcaaataacataagagaagttgttatgaaaacttttaatatttcactagatatcgaacccacggtaattaactag

SEQ ID NO: 204539 - DNA, 901 bp, Unknown
  Bacterial polypeptide expressing nucleotide sequence isolated from the Sargasso Sea
gcgcaacggctggccgctgacgttaatgggtgggggcagtaatctgatactggcgggcgcggtatccggcctggtggtacgcatggtcagtcgtggtcgacgggttttgtctcgtgacgccgagcaggttgtgatcgaggctgaggcgggagaaaactggcaccagctggtgtgctggagtctcgatctcggcctgagcggccttgagaatctggccttgataccggggacggtgggtgctgcgccggtgcagaatatcggcgcttatggtgtcgagctgtgcgattgttttgacagcttgcaggcactggaccgtgaaaccggtgagttgtgctggttcgatcgcgagcagtgcagcttcgcctatcgggacagtcgttttaagcgcgagactggccgatatgtgatcttgcgggttcgtctgcggctatggcgccgggcgcggctgagggtggggtatgcgcccttggctgcagcctgggcggcgaccggcctgggcgagcctgatgcgcgagtagtggctgcgctggttgtgcgcattcgtcaaagcaagttgccagacccacagatcctgccgaatgctggcagcttcttcaagaacccggtggtgagtgtggggcaggcgcgacagttgcttgagcgttatccttcgatgccgcagttcacgcaggccgatggcacggtcaaactggctgccgcctggttgattgatcaggcgggctggaagggctttcgcgatggggcggctggcgtgcataacgagcaggcgctggtgctggtcaaccatggcggcgcaaccggtgcgcagattctcgagcttgcggcgcgcattcgtgccgatgtgctggcacgttacggtgttgagctggagcaggagcctccggtgatcggtctgccttaa

SEQ ID NO: 204540 - DNA, 460 bp, Unknown
  Bacterial polypeptide expressing nucleotide sequence isolated from the Sargasso Sea
tatggcccactggccgcgctcggtgagcagcccacggccgcaggccatcttcgataccgtctgcgccacccgcatggccaagctgccggatccggccgtgctcggcaatgccggcagcttcttcaagaaccccgtggtgacggcggcgcaagccgaccggctcaagcagcaatatcctcacatgccctgttacccgaccgctgacgggcaggccaagctggccgcgggctggctcatcgatcagtgcggcctcaaggggtttgccatcggccgcgctgccgtgcatcaggagcaggccctggtgctggtcaacctgggcggtgccagcgccatggagctgatcgccctggcggctcacgtacgcgacagcgtggagcagaagttcggcgtgctgctggaacacgaggtgcgtttcatggggcgcagcggtgaaacttggctcgacgaggtgctctcatga

SEQ ID NO: 204541 - DNA, 175 bp, Unknown
  Bacterial polypeptide expressing nucleotide sequence isolated from the Sargasso Sea
tgccacccgcatggccaagctgccggatccggccgtactcggcaatgccggcagcttcttcaagaaccccgtggtgacggcggcgcaggccgaccagctcaagcagcaatatccgcacatgccctgttacccgaccgctgacggccaggccaagctggccgcgggctggctcatc

SEQ ID NO: 204542 - DNA, 969 bp, Unknown
  Bacterial polypeptide expressing nucleotide sequence isolated from the Sargasso Sea
tatgaattttcagtcaaattttcaattaaaagagtataatacgtttggcatttcggctacagccaaagaatttgtagcggtttcaaatgttgctgaattagccaatgttttacaacttcatcaagatatttttgttcttggtggaggaagtaatatgcttttgactcaaaatattgaaaaactagttgtacacattaattttaaaggaattgaagttgtaaaagaagatgacaatcatgtttgggtaaaagctcaagctggtgaaaattggcataattttgtgctttggtgtattgaacataactttggtggcattgaaaatttatcactcattccaggaaatgttggcacgacacccattcaaaatattggagcttatggagtagaaataaaagatacttttgacaattgtacagccatgaaaatttctacacaagagttaaaatcatttgataaaactgcttgtcattttggttatagagaaagtgtttttaaaaacgatttgaaaaatcaatatataattaccgatgttacttttaaattaaccaaaaaaaatcacaaaatcaatacatcttatggagcaattgatactgaattagaaaaagacaacatcacaaatccaactttaaaacaaattagtaatgctgtgattgcaattcgtcaaagtaaattgccaaatccaaaagaacttggaaatagtggaagttttttcaaaaatccaatcatttcaaaagctgattataacaaaatcaagcaaaaccatccagaaatgcctcattatgtagtttctgaaactgaagtaaaagttcctgcaggatggttaattgaacaagctggttttaaaggaaaacgttttggtgatgctggaattcataaaaaccaagctttagttttagttaattatggtaacgcaacaggtcaagagattttagccgtttcaaaaaatattcagcaaacaatctttgaaaa

SEQ ID NO: 204543 - DNA, 1027 bp, Unknown
  Bacterial polypeptide expressing nucleotide sequence isolated from the Sargasso Sea
atgtcttttccatattcgctaaagccgtttaatacttttggcgtggagcaatcctgcttatcattgattgaagtccattccaaggcagagctgcaatcggcctgcttatccttatatcagtctaagcgacctatgcttgtactcggtggcggcagcaatatcgtattcaccgatgattttaatggcactgtagtgcgagttttgtctaagggtatttcctgctctgaagatgacactcacttttaccttgctgttgaggcaggtgagaactggcatgagttggttcagttcagcttaaatcagaatatgccaggacttgagaacttagcgctgatccctggcaccgttggtgcggctccgatccaaaatatcggcgcctatggcgttgagctgtgcgatatttgtgattgggtcgaatatctggaacttgagtctggtaacttgcgaaggcttacagtcgatgagtgtgactttgcctatcgggagtcgatatttaagagcagcttacgcgacaaagctgtgattaccgccgttggtttgcgtctccctaaagcttggcaaccgaaattggcctatggtccgttgcaatcatttaccgctgagacagtgaccccaagggagatttttgaccgggtctgtgaagtgaggagcgaaaagctacctaatccagaagtgctagggaatgcaggcagtttctttaagaatccaatcgtaagcgcggcgacatatatgcagcttgcggcgcgtttcccgagtatcgtcggttatgctcaacccaatggagaggttaaactggctgcgggttggctaatcgagcatgctggtcttaagggttttgctcttgggaatgcgggagtgcatgcgaagcaagcccttgtattagtaaacttaggccatgcgactggccaagatatttgtcgattagcattgcatgtgattgcgcgagttaatgaggtttttggtgttaagctcgaagccgagccaagaattatgggattaacaggggagacgagtcttgatgtctgat

SEQ ID NO: 204544 - DNA, 1084 bp, Unknown
  Bacterial polypeptide expressing nucleotide sequence isolated from the Sargasso Sea
tatgccttcattacaaagttacagcacgtttggtctttcagcatcgtgtaattctattgagtcgtttgtcgacgtcccttcttttttatccctatacaactcaataaaacaaagcgccgatagcgcggtttacatattaggcggtggaagcaattctatttttacaaaagacttcgacggtactgtactggttaatgaaataaagggtattagtcacttcgatactgaaagtcaccattatctaagggtaggcgcaggcgaaaactggcatgagtttgtaacgctttgtatggaagaaaagtggtatggattcgaaaacttagcgctgataccaggctcagtaggggcatgtcctattcagaacatcggtgcttacgggcgagaggttaatgccctcattgataaagtagaatgtgtattattagaaacgggtgagcaagttctgcttaacaaagaagattgccagtttggctacagagatagcgtgtttaaacatgcattagccaataaagtgcttattacccatgttaattttaagcttccgaaagactatgaacttgaaactagctacggcgaattggccgcactttccgagcctacgcctgaaaaggtgtatagtaaggtaatagagataagaaagagcaagttgcccgacccaaacgttttaggtaatgcaggaagtttcttcaagaaccccgtagtaccgacgtcggtatttcacagtattcaaaaagattacgacgttgtcccgcactttgttataactaataaggtaacgccgccaattgaaacgagtgatttaggcgttaccctaaaacagcaagaaaacactaagcaaaacgaagaattgataaaaattcctgcagcgtggcttatcgaccaagcaggatttaaaggcaagacgttaaataaagtacgctgccaccctacacagccattggtactaactaacttaggtggtgccaccggagaagatttaattaccatggcaaaaaatatcatagcaagcgtacatgataagtttggcgttacgctcgaaccagaagtgcgtttattaggaagcaaaggacttatttcgctatga

SEQ ID NO: 204545 - DNA, 1027 bp, Unknown
  Bacterial polypeptide expressing nucleotide sequence isolated from the Sargasso Sea
catgtcttttccatattcgctaaagccgtttaatacttttggcgtggagcaatcctgcttatccttgattgaagtccattccaaggctgagctgcaatcggcctgtttatccttatatcagtctaagcgacctatgctcgtactcggtggcggcagcaatatcgtattcaccgatgattttaatggcactgtagtgcgagttttgtctaagggcatttcctgctctgaagatgacactcacttttaccttgctgttgaggcgggtgagaactggcatgagttggttaagttcagcttaaatcagaatatgccaggacttgagaacttagcgctgatccctggcaccgttggtgcggctccgatccaaaatatcggcgcctatggcgttgagctatgcgatatttgtgattgggtcgaatatctggacctcgcgtctggtaacttgctaagacttacagtcgatgagtgtgagtttgcctatcgggagtcgatatttaagggcagcttacgcgacaaagctgtgattaccgccgtgggtttgcgcctccctaaagcttggcaacctaaattggcctatggtccgttgcaatcatttaccgctgagacagtgaccccaagggagatttttgaccgggtctgtgaggtgaggaacgagaagctacctaacctagaagtgctagggaatgcaggcagtttctttaagaatcctatcgtgagcgcagcgacttatatgcagcttgctgcgcgtttcccgagtatcgtcggttatgctcaacccaatggagaggttaaactggctgcgggttggctgattgagcacgcgggtcttaaggggtttgttcttgggaatgcaggcgtgcatgcgaagcaagccttagtattagtcaatttaggtcatgcgactggccaagatatttgtcgattagcattgcatgtgattgcgcgagtaaatgaggtttttggtgttaagctcgaagccgagccaagaattatgggattaacaggggagacgagtctcgatgtctga

SEQ ID NO: 204546 - DNA, 1018 bp, Unknown
  Bacterial polypeptide expressing nucleotide sequence isolated from the Sargasso Sea
gctgcttcccgaccacccgctcgccgcgcacaacacgttcggtatcgccgcgactgcgcgctttgccgcgcgcatcacgcatgcgtcgcagttcgaggcgctctatcgcgacccacgtgtcgcgaacctgccgcagctcgtgctcggcggcggcagcaacgtcgtgttcacgcgcgatttcgacggcgtcgtgctgctcgacgagatcgccggccgccgcgtcgtgcgggaggacgacgacgcgtggtacgtcgaggccggcggcggcgagaactggcacgcattcgtcgcatggacgctcgagcacgggatggcgggcctcgagaacctcgcgctgattcccggcacggtcggcgccgcgccgatccagaacatcggcgcatacggcctcgagatgaaggcgtatttcgactcgctggtcgcggtcgagctggcgacggggcgcagcgagcgtttcgacgccgcgcgctgcgcgttcggctatcgcgacagcttcttcaagcgggaagggcgcggccggttcgcgatcgtgtcggtcacgttccggttgccgaagcaatgggcaccgcggctcggctacgtggacgtcacgcgcgaactcgacgcccgcggcatggcacccgatgcggccacggcatgcgacgtgttcgacgcggtcgtcgcgatccgccgcgcgaagctgcccgatccgctcgtcctcggcaacgcgggcagtttcttcaagaatccggtgatcgatgccgcgcagttcgatgcgctgcgcgcccgcgcgccggaagtcgtgtcgtatccgcagccggacgggcaggtcaagctcgcggccggctggctgatcgaccgctgcggctggaaggggcgcgcgctgggcgcggcggccgtgcacgaccgccaggcgctcgtgctcgtcaatcgcggcggcgcaacgggtgcggacgtgcttgcgctggcgcaggcgatccaggccgacgtgcgcgcacagttcggcatcgagctggaggcggagccggtctgcctgtaa

SEQ ID NO: 204547 - DNA, 665 bp, Unknown
  Bacterial polypeptide expressing nucleotide sequence isolated from the Sargasso Sea
ccaaaacatcggcgcctatggcgtagagctttgcgatatttgtgattgggtcgaatatctggatctcgagtctggtaacttgctaagtcttacagccgatgagtgtgagtttgcctatcgggagtcgatatttaaaggcggcttacgtgacaaagctgtgattaccgccgttggtctgcgtctccctaaagcttggcaaccaaaattggcctatggtccgttgcaatcatttaccgctgagacagtgaccccaagggagatttttgaccgggtctgtgaggtgaggagcgaaaagctacctaacccagaagtgctaggaaatgcaggcagtttctttaagaatcctatcgtaagcgcggcgacttatatgcagcttgctgcgcgtttcccgagtatcgtcggttatgcacaacccaatggagaggttaaactggctgcgggttggctgattgagcacgcgggtcttaagggctttgccctcgggaatgcgggagtgcatgcgaagcaagccttagtattagtcaatttaggccatgcgaccggccaagatatttgccgattagcattgcatgtgattgcgcgggtgaatgaggtttttggcgttaagctcgaagctgagccaagaattatgggattaacaggggagacgagtctcgatgtctgat

SEQ ID NO: 204548 - DNA, 924 bp, Unknown
  Bacterial polypeptide expressing nucleotide sequence isolated from the Sargasso Sea
tctgcagagcgacgtgtcgctcaaggccttcaacagctttggtgtcgatgtgcatgcacggcgtttcgctgaagcccgcgatgatgacgatgtgcgcgaggcgctgaacctggcaaatcagcagggcttgccgctgctggtgatcggcggtggcagcaacctgctgctgacccgcgatgtcgaggcgctggtgctgcgcatggccagccgtggtattcgtattctggaggacgacggcgagcaggtgctggtggaggccgaagccggtgagccctggcatccgttcgtgcaatggagcctgacgcagggcctcaatggcctggaaaacctcagcctgattcccggtaccgtgggtgccgcgccgatgcagaacattggcgcctatggtgtggagatcaaggatctgttcgccggcctgaccgctctggatcggcacaccggcgagctgcgcgacttcgcgctggaagaatgcgccttcgcctaccgcgacagtctgttcaaacgcgaagccgggtgctggttgatcctgcgcgtgcgctttcgtctgagtcgcctggcttcgctgcgtctggattatggtccggtacgtcagcgtctggctgagatgggcatcgaggcaccgactgcaagcgatgtcagtcgagctatctgcgccattcgcagcgagaagctgccagatcccgccgagctgggtaacgccggcagcttcttcaagaatccggtggtgccattcgaactggccgagcgcattcgcgccgagcatgccgatctggtcagctatccggctggagctggcctggccaagctggctgccggttggctgatcgagcgggcagggtggaagggggcgcgtgagggcgatgctggcgtgcatcgtttgcaggcgctggtgctggtcaactacggcaacgccacgggcgcgca

SEQ ID NO: 204549 - DNA, 566 bp, Unknown
  Bacterial polypeptide expressing nucleotide sequence isolated from the Sargasso Sea
gagttcggctatcgcgacagcatcttcaagcacgcctgtcaggacagccacttcatcaccgccgtcgggctgcgcctcgccaaggcctggcagctcggtggcgggttatggtccgctggccgcgctcggtgagcagcccacggcgcaggccatcttcgacaccgtctgtgccacccgcatggccaagctgccggatccggccgtactcggcaatgccggcagcttcttcaagaaccccgtggtgacggcggcgcaggccgaccagctcaagcagcaatatccgcacatgccctgttacccgaccgctgacgggcaggccaagctggccgcgggctggctcatcgatcattgcggcctcaaggggtttgccatcggccgcgccgccgtgcatcaggagcaggccctggtgctggtcaacctgggtggtgccagtgccatggaactgatcgccctggcggctcacgtacgcgacagcgtggagcagaaattcggtgtgctgctggagcacgaggtgcgcttcatggggcgcagcggtgaaacttggctcgacgaggtgctctcatgac

SEQ ID NO: 204550 - DNA, 1006 bp, Unknown
  Bacterial polypeptide expressing nucleotide sequence isolated from the Sargasso Sea
ttgaaaaaaatctccttaaggccgtataactcatttggcgtagacgcttatgctaaagattttgtaagtattgaatctgagaaggagattgtagaatttcttgaaaaaaataaaagtaaaaatttattaattcttggtggaggtaccaatatattatttaaaaaagatcttgattatcctgtacttaaaattgatataaagggaattgaaataataaatgaggatgataatgaggttttaatttcagttggtgccggagaaaactggaatgaactagtatggtggtgtattgaaaatgattttggtggtatagaaaatttggtatcaattccaggtaatgttggaagtgctccaattcaaaatattggagcctatggtaaagaaattagagaagtaatggaaaattgtagaggtgttttcatagacaattgttcattaaaaatatttaaaaatgaagaatgcaatttttcataccggagttcaattttcaaagaagatttaaaaaataaatttattattaccaatgttacacttaggctaacgaaaaaaaatcacaaaataaactccgaatattattcactaaaaaatgatttagaggaaaacggaataaaaaatccaacaataaaaagaatagctcaatctgttagcaatattagaaaagaaaaacttcctgattatgaaaaaatcggcaatgcaggtagtttttttaagaatccaataattgataaatccaaattaaaaaaaattaaatctttatatccagatatcattagctataatattggaaaatcaaattataaaatacctgctggttggttgattgaaaaatgtggttttaaggatataaaacagaaaaaagtttcagtttatgaaaaacaggcattagttattataaacttaggagatgcaaaaggaattgacatatatgctttttctcaaaaaattaaagaaactgttagagaaaaatttgatatattgcttgaagaagaggtgagtattatttgac

SEQ ID NO: 204551 - DNA, 1042 bp, Unknown
  Bacterial polypeptide expressing nucleotide sequence isolated from the Sargasso Sea
atgtctctatccgactccgccgcgttcgttgccggctatccgctgaaggcgcataacaccttcggtttcgatgttcgcgcgcacttcgcgtgccggatcgagcacgaagcgcaactgatggctgccgtgcgcgatccgcgcggcgccggtttgccgcggttggtgctgggcggcggcagcaacgtcgtgctgacggacgacttcgctggactggtgctgctagtggcgctgcgaggccgccgcgtcgtgcgtgaggacgatgacgcctggtacgtcgaggcggccgccggcgagccgtggcacgagtttgttgcatggactttgtcgcaagggctgcctggattggagaacctcgcgctgattcccggcacggtgggcgcggcgccgattcagaacatcggcgcgtacgggctggaaatgtgcgagcggtttgcctcgctgcgagcggttgagctggaaacgggtgccgtggtcgaactcgatgccgccgcttgccgattcggctaccgtgacagttttttcaagcgggaagggcgtgaccgttttgtgattacttcggtcacgttccgcttgccgaaggtttggcagccgcgcgccggctatgcggatatcgcgcgcgaactggctgcgggcggccatgccgcggccgcgccgagtgcacaggcgattttcgacgcggtggtcgcggtgcggcgcgccaagctgcccgacccgcttcagcttggtaacgcggggagtttcttcaagaatccggtcgtggaggcggcgcagttcgaggcgctgaagctcaaggagccagagatcgtgtcttaccttcaatcggacggccgggtgaagctcgctgcgggctggttgatcgatcgatgtggctggaaaggccgtgcgatgggcgcggcggcggtgcatcagcggcaggcgctggtactggtgaatctcggcggcgcgagcggggcggaggtattggcgcttgcaaaggcggtgcagcgggacgtgctggcacggtttggggtggagctggaggcggaaccggtttgtttgtgat

SEQ ID NO: 204552 - DNA, 661 bp, Unknown
  Bacterial polypeptide expressing nucleotide sequence isolated from the Sargasso Sea
gcaattctgcctgaaaccacgccaattctgcttattcacaacggcatggggacgattgaagagttacatacatttaagcaacccttgctgatgggaaccaccacccacgcagcacgccgtgacgggaacgtcatcattcatgtcgctcagggaacaacgcgtattgggccggcgcgtgagcaagacggcgatttcagctatctggctgaaaccctgcaagaggtgctgccggacgtcgcctggcacaacactattcgcgccgagctatggcgcaagctggccgtcaactgcgtcattaacccgctgaccgcattatgggattgcccaaacggtgagctacgccatcatcccgaaaaaatagcgctcatctgtgaggaagtggcagcggtgatcgaacgcgaaggccaccacacatcagcggatgatttacgctattatgtcgagcaagtgattgacagtacggcggaaaatatctcatctatgctgcaggacattcgcgccatgcgtcataccgagatcgactacattaccggttatttgttaaaacgtgcacgcgcgcacggcatcgccgttccggaaaatgcccgtctgtttgaaatggttaaaagaaaggaaagtgagtatgagcgctcaagcactggtatgtctcgcccctggtagt

SEQ ID NO: 204553 - DNA, 376 bp, Unknown
  Bacterial polypeptide expressing nucleotide sequence isolated from the Sargasso Sea
ggtgtttcaggtagacagcaatggactgtcactgtgtcaggaagaagtcttcggccccgtggtcagcattcaggtttttgaggacgatggcgaggcgctatccctggccaacgacagccgctttggcctagtgggttactgctggaccaacagtctggctcgggcacaggcatttcagcagttggttgacgccggcacgttatggattaacacacccctcgcacgggatttgcgcgcgcctttcggtggcttcaaagagtcgggcgttggccgcgacggcccgcgccaagcagccgatttctttacggaggaaaaagcgacgatcactgccgtcggcgcgccacctatccgcaagttaggaacagcagcggactag

SEQ ID NO: 204554 - DNA, 1147 bp, Unknown
  Bacterial polypeptide expressing nucleotide sequence isolated from the Sargasso Sea
catgaaaacattgcattttggtgccggcaacatcggtcgcggcttcatcggaaaactgctggctgacgccagccaccaggtcactttcgccgacgtcaacgagaccctgatcgaccagctcaaccaccgccaggagtacaaggtgcacgtggtgggggcggatcagaagctggacgtggtgcgcaacgtggcggcggtgagctccgccggccacgaggtgatcgcccgcatcatcaccgccgatctggtcaccaccgcggtcggccccaacattctggacaagattgccagcaccctggccaaggggctgcaggcccgcttcgatgccggcaacctgacgccgctcaacgtcatcgcctgcgagaacatggtgcgcggcaccagccatctcaagcaggaggtactcaagtacctgccggtcgcgtatcatgccaccctcgacgcctgcatcggcttcgtcgactcggcggtagaccgcatcgttccgcccgcggcggccaacgacgatccgctggaagtgacggtagagagcttcagcgaatggatcgtcgaccagacccagttcaagggcgagctgccgcaggtggcgggcatggagcccaccgacaacctgatggccttcgtcgagcgcaagctgttcaccctcaacaccggccacatcgtcaccgcctacctcggcaagctgaggggctatcgcaccatccgcgaggcgatcgaggatccgctgatccgcagcaaggtgcgccgcgccatggaggagagcggcgccgtgctggtgcaacgctacggtttcgacccgcgtctgcacgccgcctacatcgagaagatcctggcccgcttcgccaacccctatctggtggacgagattgaccgggtcggtcgtcagccgctgcgcaagctggcggcgggggatcggctggtgaagccgctgctcggcaccctggagtacggcctgccgagcgatcacctgcaggaggggatcgccgcggcgctgcactatcgcaacgccgatgacccgcaggcagtggaactacaacagctgctggcggagctgggcccggcccaggctctggctcgcatcaccggcctggctgccgacagcgacatcgtcagcgccatcgtcacccgttatggcaatttgaagtga

SEQ ID NO: 204555 - DNA, 408 bp, Unknown
  Bacterial polypeptide expressing nucleotide sequence isolated from the Sargasso Sea
gtggcatggctgatgggcatatatttaaagcttatcaaccgggtgggccgtcctctggtattttgccagctagcctaaacgatgtaccgttggattttgatacattgcaaccgcatggcagctttattggatcagccgctgttgtggtgttgtctgacaaggaccgggtgcgcgatgcggcattaaatatgttgcgtttttttgaagatgaaagctgtggccaatgtacgccatgccgaacgggatgcagcaaagcggtacaattgatgcaacaagaggtatgggaccaaacgctattgaacgacctttgtgatgtaatgcacgacgcctccatttgtgggcttgggcaggccgcaccaaatcctatccgtctgaccatcaaacatttttcccacgaaatcagctgag

SEQ ID NO: 204556 - DNA, 598 bp, Unknown
  Bacterial polypeptide expressing nucleotide sequence isolated from the Sargasso Sea
gttgcttattggaggaggaggacactgtcgatcttgtatagatgtcatcgaagctcaaaatgaatatgagattgctggtattattgtttctaatacttctgggttagagttagtacagggctatcctgtactaggtgtcaatgaagatttggaaaatataataccacaaactccaaactcgcttatcaccgttgggcaaatcaaaactccagatattcgaattcatctttataaagaattaaaaaaactaaaagccaaacttccgactattattgcccctactgcttactgctcaaaatacgctcttgttggtagcggcacgattctcatgcacggtgctttggttaatgcatcagctaaaattggagaaaactgtattatcaatagccaagccctgatagagcatgatgtgcacatagaatctcattgtcatatttcaacgggtgttcgtatcaacggtggtgtgcatattggtatgggaagctttatcggtagtggtgcaattattcgtgagggagttcatatcggttcacgggtagtaattggtgctggccaggttattctaagaaatgtctctgaaggtaaagtggttaaatga

SEQ ID NO: 204557 - DNA, 205 bp, Unknown
  Bacterial polypeptide expressing nucleotide sequence isolated from the Sargasso Sea
ttgacaataagagaaggattcacttttgatgatgttctccttgtacccaaattttcagatataactagtcgttcacaaactgatctctcgacaaatctttctcgaaatatcaaactcaatattcctttagttagtgcaaacatggataccgtgacagaatctaacatggcaacaacaatggctagacaaggaggaattggaataa

SEQ ID NO: 204558 - DNA, 799 bp, Unknown
  Bacterial polypeptide expressing nucleotide sequence isolated from the Sargasso Sea
tatggaaaaggttcttacagaagcattaacttttgatgatgtattggtattaccaatgcactctgatgtcctaccaaaagaagtttctcttaaatcaaaattcactaaaaacattagtttaaatttacctttctgttctgctgctatggatacggtcactgaatctaaaatggcaattgcattagcatctttgggaggtataggaataattcataagaataacactcctgaagagcaagcaattcaagttcgacaagtaaagaaattcgaaagcggtatagttcgagacccaattagcattagatcaaacaatacaattggagagctcaaacagcttacttcagaattaaagatatcaggtatgccagttgttgatgatgatgaattaaaaggaattgtaacaggcagagattttagatatgccagagatatggaacagactgtttcagaaatcatgactccaagagaaaaattaatcacagtcaaagaaggggagacccaggatgttgttaaatcattaatgtataaacatagaattgaaaaaattcttgttcttgatgataaagataagttagttggcttaatgacaatgaaagatattgaaaaatcaattgattatcctttagcttctagagattcagaaggcagattaattgttggggcagctataggtgtaggcaaagatcttatggatagagcaaaagcattagttggagctggtgtagatgtttttgttcttgatagcgctcatggtgattcaaaacgtgttattgatgcaataaaacaagttaaaaagaaa

SEQ ID NO: 204559 - DNA, 781 bp, Unknown
  Bacterial polypeptide expressing nucleotide sequence isolated from the Sargasso Sea
ttaactaccaaatttaccttaaaaaatttcaaacaagtttttaatgaaaatgaatttttagatttattactaactactttttattttactttttttggaacagttggtgcaatcatttttggtatctttgcagcacaattagtaaatcaaaagttttatggtagaacttttatgaggagtattctgctgtttccatatgtcggacctgttgttgcgttagcatacacgtggactttattgttagatccaaatagtgggactttaaatgctctgttagtcaattttggaattattgataaaccgataaatttattaggtcaaaagtatatgacactaaatcttttaggttttgacattaaattaaggttagcgctaactacagtaataatgtttgagatttggagatattttcccctagctttcttgtttattcttgcgagattacaagcggtaccaaaagatttgtatgaagctgctgaggttgatggcgctagaccactaagaaaatttattaatattactctgccacaaataacagcaattttatctattttatttatgattaggtttatttggaattttaataaatttgaagatatttttcttttaactggcggtgcatcaggaacaagaactttgccaataaatgtttaccaacaaggttttgctgtttctaacataggaatggggtcagccgtttcaattgtaatagtaatgttattgataatttttatgattatttatttcaaattaattggaaagcgtgcaaatgagatataaa

SEQ ID NO: 204560 - DNA, 88 bp, Unknown
  Bacterial polypeptide expressing nucleotide sequence isolated from the Sargasso Sea
gtaaaagttactggtgctgggttaaaagaaagtcatgtccacgacgttcaaatcacgagagaaagtccaaattacagggtaatttagc

SEQ ID NO: 204561 - DNA, 610 bp, Unknown
  Bacterial polypeptide expressing nucleotide sequence isolated from the Sargasso Sea
tatgcgaggtattttacttttcccttatgtgggtcctgtagttgctttagcctatacttggaccctattgttggatcctaatagcggaactttaaatgcattattggttaatttcaatatcatagaacagccaataaatttattgggtcaaaaatatataacaatgagtattttaggttttgaatttaaattaagattagctttaactacggttatattttttgaaatttggcgctatttcccactcgcttttctttttattttagcaagattgcaagcaatcccacaaagtttgtatgaagcagctgatgtggatggagcaagtccaatccaaaaatttattcatatcactctacctcaaattacagccattatttcaattttatttatgattaggtttatttggaactttaataaatttgaggatatctttttattaactggtggtgcatcaggcacaagaactttacctattaatgtttatcaacaagggtttgcggtatcagatatcgggatgggttctgctgtttcaatagtaattgtaatgttgcttcttagtttcatggttatttattttagattaattggaaagagggctaatgaagtttaa

SEQ ID NO: 204562 - DNA, 388 bp, Unknown
  Bacterial polypeptide expressing nucleotide sequence isolated from the Sargasso Sea
tatgataaattcaaaatttgtcggagaaggattaacctatgaagatgtacttctagtcccggcttattcaaaaatacttccctctgatgtatccctagaaactagatttagtagaaatattagtttaaatgtcccaattgtttccgctgctatggatacagttactgaaagtaaaatggcaattgctattgctagtgagggaggaattggcgttattcataaaaatatgtcaatcgaggatcaagctaatgaagttagattagttaaaagagctgaatcaggaatgattattgatccagtaacattagatactgattctttagtaatagatgcaaaaaataacatgaaaaaatataaaatcggaggaataccgattgtctcaaaaact

SEQ ID NO: 204563 - DNA, 361 bp, Unknown
  Bacterial polypeptide expressing nucleotide sequence isolated from the Sargasso Sea
tttctttttattttagcaagattgcaggcaataccacaaagtttgtatgaagcagcagaggtggatggagcaagcccaattcaaaaatttatccatattacattgccacaaattacagcaatcatttcgattttgtttatgattaggtttatttggaactttaataaatttgaagatatctttttattaacaggcggggcatcaggtacaagaactttacccataaatgtttatcagcaagggtttgctatatcagatattgggatgggctctgcagtttcaatcgtcattgtcatgttacttattagttttatggttatttattttagattaattggaaagagggctaatgaagtttaaa

SEQ ID NO: 204564 - DNA, 139 bp, Unknown
  Bacterial polypeptide expressing nucleotide sequence isolated from the Sargasso Sea
tatggaaccaataaaagaagctcttacatttgatgacgtgttattgataccacggttttcatcaataatcccagcaaatacaaatttaaatactaatttatcaaaaaatattaatttaaaaattccctttatatcatca

SEQ ID NO: 204565 - DNA, 451 bp, Unknown
  Bacterial polypeptide expressing nucleotide sequence isolated from the Sargasso Sea
catggttcctataaaagaagcgcttaccttcgatgatgttacacttgttccgaagtattctgaaatattaccaacagaagtggatacgagtataaaattaactagttacttaaaacttaaaatccctcttttatcttctgcaatggatacagttacagaaagtagaatggcaatagctttagctagagcaggaggattaggagtaattcacagaaatttggatataaaaactcaaattcaagagatcagaaaagttaaaaataaaaaacttctagtaggagccgctgtaggggctggaccacaggaatttaaaagggcagaaatgattttaaaagagaatataaatattattgttgttgatacagctcatggtcatactaaaaaagtttcagaaatgatcaaatttattaagaaaaaaaaaagtaaaaaaactgcattatgtgctggaaat

SEQ ID NO: 204566 - DNA, 255 bp, Unknown
  Bacterial polypeptide expressing nucleotide sequence isolated from the Sargasso Sea
aagaggatattgaatcagaaaaattagttccagagggaattgaaggtagagtcccatataaaggactcgttgccaatgtaattaatcaacttgagggtggtttaaggcaatgtatgggatatataggatgtaaaaatattaaagatatgcaaaaaaatagcgagtttattgagattacaaatgcaggcatgaccgaaagtcatgttcacgatgtgatgattacgaaagaggcacctaattaccaaagaagttaat

SEQ ID NO: 204567 - DNA, 103 bp, Unknown
  Bacterial polypeptide expressing nucleotide sequence isolated from the Sargasso Sea
caccaaggccgaattcgtgcgcatctcgggcgccgggatgaaagagtcccacgttcacgacgtgaccattaccaaagaagcccccaactatcggatgggctga

SEQ ID NO: 204568 - DNA, 349 bp, Unknown
  Bacterial polypeptide expressing nucleotide sequence isolated from the Sargasso Sea
aaaaaatttaaaattaaaaataaattttataaaaagtatagaggcatggggtctattggagcaatgtccgcaggatcctccaatagatattttcaaaaaaatcataaggataaatcaaaatttgttcctgaaggagtagatgggagagtagagtataagggaaacgtttcaaaaattatatatcaactaaaaggtggtttgaaatcttctatgggatatataggagctgaaaaaattagtgaaataaagagaaatgctaaatttattaaaattactaaagctggattttacgaaagcatggtacatagtgtagagatgattgaaccaacactaaattataaactataat

SEQ ID NO: 204569 - DNA, 688 bp, Unknown
  Bacterial polypeptide expressing nucleotide sequence isolated from the Sargasso Sea
tttggaacagttggagctattgtttttggtatgttgcgggctcagttagttaatcaaaaattttatggcaggacttttatgagaagtattctcctttttccatatgttggacctgtagttgcattagcttacacgtggactttattacttgatccaaatagcggtacattaaacgctttgttggttaattttggtgtcctggataaacctataaatttattgggacagaaatacattgaattaaatctcatggggtttgacattaaattaaggttggcactaacaacggtaataatgtttgagatttggagatattttcccctagccttcttgtttattttagcaagattacaagctgtaccaaaagatttatatgaagctgctgaagtcgacggtgctggaccattgcgaaagtttgtaaatattacacttccacagataacagcaattttatctattttattcatgattagatttatttggaactttaataaattcgaagatatttttcttttaactggtggggcatctggaacaagaactttaccaataaatgtttaccaacaaggctttgctgtttcaaacatcggaatggggtctgcagtttcaatagttatagttgtgttgttaataatttttatgattgtttactttaaattaattgggaagcgtgcaaatgaaatataaa

SEQ ID NO: 204570 - DNA, 727 bp, Unknown
  Bacterial polypeptide expressing nucleotide sequence isolated from the Sargasso Sea
ctggtggtggatgatgaagaccgcctgtccggactgtttactctcagcgatgtggaaaccatcacgcaggaagccaacgcgcaggttaagccggcgcgtgaccgcgagtttcagctgctttgcggcgccgcagtttccgtaccgcgcaccgatgccggcgagctggaccgcgacaaactcaccggccatgtcggcgcgctggtggatcgaggactggacaccgtggccatttccacggcgcacggccacaccgccggtgttggcgaagcggtccggcaaattcgggacgccttccccactctgcccatcatcgccggcaacgtgaccagtgctgccggcgtggagtaccttgctgattgcggcgcgaacaccatcaagatcggccagggccccggttccatttgcaccacgcgcattgtggccggcgtgggcatcccgcagctgactgcactgtacaccgcttctcaaggggccgccgccaagggcgttaccattgtggccgatggcggcatcaccaagagtggcgacatcgtcaaggctcttaccctagcccacggtgtaatctgcggcggcctgttggccggttgtcaggaatcgcccggagacatcgtcgagattagcggcaaacgctataagcaataccgcggcatgggcagcctcgccgcgatgaaagccggcagtgctgcgcgttacggacacaccaccaagatcaaccgcggcaaagtag

SEQ ID NO: 204571 - DNA, 313 bp, Unknown
  Bacterial polypeptide expressing nucleotide sequence isolated from the Sargasso Sea
atggggtcgctgggagcgatggctcagcgcgaaggttcatctgatcgatactttcaggacataaattcgggtaccgagaagttggttccagagggtgtcgagggtaggattccctgcaagggaccgctttccggaatcctacatcagatgatgggagggcttcgagcagcgatgggctacaccggttgcgcaacgattgaagaaatgcgctcagccccgagcttcgtgaaaatctcaggcgccggtgttaaagagtcgcatgtacacgacgtcgcgattacaaaagaagcaccgaattaccgagttaaataat

SEQ ID NO: 204572 - DNA, 546 bp, Unknown
  Bacterial polypeptide expressing nucleotide sequence isolated from the Sargasso Sea
tatggttcctattaaagaagcacttacctttgatgacgttactttagcaccaaagtattcagaaatattgccttcagatgcagacactagcgtatcattaacaaagcatttacaacttaaaattccacttttatcatctgcaatggatactgtaacggagagtagaatggctatagctattgcaaaagctggtggtataggagtaattcacagaaacctcgatatacaaaaacaattatcagagataagaaaagttaaaaaccaaaaactgatagttggagcagctgtaggcgcagcaccaaatgaatttattagagttaaagaaataattaaagaaggtgtaaatctaattgtagtggacacagcacatggccatacaaagaaagttgctcaaataatcaaatatataaaaaaaataaaaagcaacaaaattgctttatgcgcaggaaatattgcaacaccagaagctgcaaaattcctaataaagttaggtgtagatataattaaaattggtataggaccaggttctatttgcacaacaagatt

SEQ ID NO: 204573 - DNA, 358 bp, Unknown
  Bacterial polypeptide expressing nucleotide sequence isolated from the Sargasso Sea
aggccccccggggagtacttcttcgttgacggcgtgagggtgaagaagtaccgcggcatgggctcgctggacgcgatgaagcaaggctcggacacgcggtacctgagcgagtccggccaccttaaggtggcgcagggcgtctcgggcacggtcaaggacaaggggagcgtgtgcaagatggtgccctacctcatccacggcgtcaagcagggattccaggacatgggcgccaagtccatggcgcacgcgaccgaactgaggaacggaggggagatgaggatggagaccaggacgggcgccgcgcagaaggagggcggcgtgcacgacatgcactcgtacaagaaggtgctctggtgag

SEQ ID NO: 204574 - DNA, 787 bp, Unknown
  Bacterial polypeptide expressing nucleotide sequence isolated from the Sargasso Sea
attttattgacgactaaatttactttaaagaactttaaacaggtttttaatgaaaatgaatttttaaatttgttactaactactttttattttactttctttggtacggtaggagctatcatttttggagtatttgcagctcagttagttaatcaaaaattttatggaagaacttttatgaggagtattctactttttccttacgtcggtcctgtggttgcattagcttacacttggacattattacttgatccaaatagtggaacattaaatgcattgttagttaattttggtattttagataaaccaataaatttattgggccaaaaatatatgacattaaatcttttaggtttcgatattaaattaaggctggctttaaccacagtaataatgtttgagatttggagatattttccgctagccttcctatttattctagctagattacaggcagtaccgaaagatttgtatgaagctgctgaagttgatggtgcaggaccattaaaaaaatttattaatattactcttccacagataacagcgattttatctattttatttatgattagatttatttggaattttaataaatttgaagacatttatctattaacaggtggtgcatcaggaacaaggacattgccaataaatgtttatcaacaaggttttgctgtttctaacataggaatgggatcagcggtttcgatagttatagttatgttgttaataatttttatgattatttatttcaaattaatcgggaagcgcgcaaatgagatataaa

SEQ ID NO: 204575 - DNA, 376 bp, Unknown
  Bacterial polypeptide expressing nucleotide sequence isolated from the Sargasso Sea
gctgtgggcgcaagctctaaagaatttaaaagagcctgaagtgatcttaaaagaagatattgatatgattgttgttgatactgcacatggtcatactaaaaaagtatcagaaattataaagtttataaaaaagataaaaaataaaaaaactgcattatgtgcaggaaatattgcttcacccgaagcagcaaaatttctattaaaattgggtgtcgatattattaaagttggtattggtcctggctcaatttgtaccacaagattagtggctggtattggtgtacctcaactaagtgcaattcttaatgttagaaatggaattaaaaataaaaatataaaaattatttctgatggtgggatcataatattctggaga

SEQ ID NO: 204576 - DNA, 430 bp, Unknown
  Bacterial polypeptide expressing nucleotide sequence isolated from the Sargasso Sea
tgaattgaaacttagattagcattaacgacagtaatattttttgaagtctggcgatattttcctttagcttttttatttatactagctagactacaagctattccaaaggatctctatgaggctgcggatgtagatggtgcagggccatttagaaaatttttttatattactcttccacaaattacagcgattttatcaatattatttatgattagatttatttggaactttaataaatttgaagatatatttttattaacaggcggtgcttcgggtactttaacattaccaataagtgtgtatcaacaaggcttttcagtatcaaatattggcatgggttcagcagtttcaatagtaatcgtattattattaataacttttatgattatctatttcaaattaattggaaaaaaggcaaatgaaatttaa

SEQ ID NO: 204577 - DNA, 415 bp, Unknown
  Bacterial polypeptide expressing nucleotide sequence isolated from the Sargasso Sea
aaagcatttgcagctggagctgatgcagttatgataggatcattatttgccggcacagatgaggctccaggcaaaattataaaaaaaggtggtaaattatttaaaagttttaggggcatgggttcagttggtgcaatgaacaaaggatctgctgatcgttattttcaatctaaacaaaaagattcctcaaaatatgttccagaaggcgtggaaggattagcaagatataaagggaaagtagatagtataatttttaaattagtaggtggtttaagatcatctatgggttatcttggatctaaacaaataaaatacttaagaaataagcctcaatttgttaaaattactaaggcaggattttatgaaagtatggttcataatgtggatatagtaaaaagagatgcaaaatattaat

SEQ ID NO: 204578 - DNA, 285 bp, Unknown
  Bacterial polypeptide expressing nucleotide sequence isolated from the Sargasso Sea
aaagaaaaaattgatttaatcgtagttgatactgctcacggacatacaaaaaaagtagctgaaataattaaaaaaattaaaaaattaaaatcaaaacaaactacactatgcgctggaaatatagcaaccactgaagccgctaaatttttgtgtaagctaggtgttgatgtaattaaagtaggtattggtcctggatcaatttgtacaaccagacttgttgctggaatcggagttcctcaattaagtgcaattatagctgtaaaaaaaggtataagtaaaaaaaat

SEQ ID NO: 204579 - DNA, 556 bp, Unknown
  Bacterial polypeptide expressing nucleotide sequence isolated from the Sargasso Sea
tatggttcccataaaagaagcactaacctttgatgatgtaacgttagcgccaaaatattcagaaatattacctactgaagtagatactactgtaaaattaactaataatttaaagcttaaaataccacttttatcatcagcaatggatacagtaacagaaagtagaatggcggtagctattgctaaagccggagggataggagttattcatagaaatttaaatattaaaaaacaaatcacagaaattaaaaaggtaaaaaaacataaactaatagttggtgctgcagtgggtgctggatcgcacgaatttaaaagagcaaaagagataattaaagagggggttgatttaatagttgttgatacagctcatggacatactaaaaaagtatctgaaataattaaatatataaaaaaaataaaaaataaaaatattgctttatgtgccggtaatattgcaactccagaagctgcaaaatttttaattaaattaggtgttgatattattaaaataggaataggacctggttctatttgtactactagattagttgcaggt

SEQ ID NO: 204580 - DNA, 312 bp, Unknown
  Bacterial polypeptide expressing nucleotide sequence isolated from the Sargasso Sea
ccctcggtgccatgaaagaaggaagcaaagaccgttatttccagacgggagttcaggaagttcagaaattggttcccgaaggaatcgaaggacgggttccctacaaggggcctttggcagaatccatttttcagttcactggaggtttacgggccgggatgggctacaccggctgcgcaagcatcgatgagcttcagaacaaagccagttacgtccgcatttccaatgctggcctcagggaaagccacgtgcatgatgtctacatcactgaggaagccccgaattatccatcgtttaaacctgatgcctgat

SEQ ID NO: 204581 - DNA, 724 bp, Unknown
  Bacterial polypeptide expressing nucleotide sequence isolated from the Sargasso Sea
cgctgactctctttttgtcgatattgcccacggccactcactcgtgatgcagcaggggatcgaacgcctgcgtgcagaattccccgaggtcccgcttatctgcggcaatgtcgctaccggtgccggcgcgcgctttatgtacgagctgggcgccgatgcggtcaaggtgggagtcggacccgggcggggatgccggacgagactggaaaccgctgccggggtaccgcagctccaggcgatccgcgaagcctggtgcgaggtaggcggggaaatcagcatcatggccgatggcggcgttcgcttcgacaaggacatcttcctggcactcgcctgcggtgcagataccgtcatgctgggcagcgcgctttctggaacggacgaagccccgggacgggtcatcgaggacccggccacacacaccaagaaaaagatttaccgtggcatgacttcccccgaggccgtgatggaatccctctatgattcagaggactcggacgcggtcgatgccgctttggcaacgccgcccgaaggacaggaaatccaggtgccctatcgcggcagtgtcgtcgacatcctgcactgcattcgcggccaccttcgctcggccgtgagctatgccggatgtgattctctggagaaggccagggaggctattctgcctgaccctctggagtacctgattgcactttccgaagcctctcgaaaagagtcctacgaacgctaa

SEQ ID NO: 204582 - DNA, 244 bp, Unknown
  Bacterial polypeptide expressing nucleotide sequence isolated from the Sargasso Sea
atggccgctaaagttaaaagttctaccgatattcgagaagctctgacatttgatgatgtcttacttgttcccgctgaatccagcgttcagcctcacgaagtgtcgacgacaacgcgcctgacatcaaaaatttccttaaatgtaccgattatgtctgccgcgatggacaccgttagcgaagccaacatggcgattgcgatggcgcaaagtggtggtttgggtgttttgcaccgtaacccatgag

SEQ ID NO: 204583 - DNA, 245 bp, Unknown
  Bacterial polypeptide expressing nucleotide sequence isolated from the Sargasso Sea
aaacgtcgacaagctcgtgccggaaggcatcgagggccgcgtgccttacaagggctctgcgttgccgatcgtgcatcaactcacgggcggtgttcgctcgtcgatgggctactgcggttgcgcatcgattgccgaatggcacgagaagagccagtttgtggagatcacggccgcaggcatgaacgaatcgcacgtgcacgacgtgcagatcacgaaggaagcgccgaactatcaccgcgactgat

SEQ ID NO: 204584 - DNA, 597 bp, Unknown
  Bacterial polypeptide expressing nucleotide sequence isolated from the Sargasso Sea
tatggaaaaggttcttacagaagcattaacttttgacgatgtattggtattgccaatgcactctgatgtcctgccaaaagaagtttctcttaaatcaaaattcactaaaaacattagtttaaatttacctttctgttctgctgctatggatacggtcactgaatctaaaatggcaattgcattagcatctttgggaggtataggaataattcataaaaataacactcctgaagagcaagcagtccaagttcgacaagtaaagaaattcgaaagcggtatagttcgagacccaattagtattagatcaaataatacaattggagagctcaagcagcttacttcagaattaaagatatcaggcatgccagttgttgatgacgatgaattaaaaggaattgtaacaggcagagattttagatatgccaaagatatggagcaaactgtttcagaaatcatgactccaagagaaaaattaatcacagtcaaagaaggggaaacccaggatgtcgttaaatcattaatgtataagcatagaattgaaaaaattcttgttcttgatgataaagataagttagttggcttaatgacaatgaaaga

SEQ ID NO: 204585 - DNA, 228 bp, Unknown
  Bacterial polypeptide expressing nucleotide sequence isolated from the Sargasso Sea
tatgggaataataaaagattcgcttacctttgacgatgttactctaataccaagtttttcatcgattttaccctcagaagccataactactactgatttaggccaaaaattaagattaaaaataccattaatgtcatcagccatggacactgtaacggaagcaaaaatggcaataacactctcaaaagcgggtggtctaggagtaatacatcgaaatttatcaatcga

SEQ ID NO: 204586 - DNA, 760 bp, Unknown
  Bacterial polypeptide expressing nucleotide sequence isolated from the Sargasso Sea
aaagctttaattaatgaaggcgtagatttaatagtcgttgatacagcacatggtcacacaaagaaagttgcagaaattatcagatttataaagaggattaaaaataaaaaggttgcattatgtggaggtaatattgctacaccagaggctgcaaaatttttaatcaaacttggagttgatataattaaaattggaataggaccaggctctatttgcactacaagactagttgcaggtattggtgtacctcaattgagtgcgatattatcggttagaaacggaattaaaaacaaaaatataaaaattatttctgatggtggaattaaatattcaggagatttagcaaaagcttttgcagctggtgcagatgcggtaatgataggttcattgtttgctggtactgatgaaacaccaggaaaattaataaaaaaaaatggaaaattgtttaaaagctttagaggaatgggatctgttggtgcaatgaataaaggatcagcagacaggtattttcaaaacaaacaaaaagacgcatcaaaatatgtacctgaaggagttgaaggatttgcaaagtataaaggtgatgtaggtagtattatatacaaattgattggagggctcaaatcttctatgggttaccttggatctaaagacattttaaaactcagaaataaacctaattttgtaaaaattactaaggctggtttttatgagagtatggtacataacgttgatgtaataaaaaacgataataaatattaat

SEQ ID NO: 204587 - DNA, 493 bp, Unknown
  Bacterial polypeptide expressing nucleotide sequence isolated from the Sargasso Sea
atggcgcagattgagacggcactcagttacgacgacgttctactcctgccagcagagtcagcagtacttccagccgaggtggatttgtccactaggctgaccaccgagataaccctcaacgcgccgattgtgtcggctgcaatggacacggtcacagaagcagagatggcgatagcaatggcccagagcgggggtatcggcgtgatacacaggaacatgccgatagaggaacaggctgtcgaggttgacaaggtcaagaggttcgagtccgggctggtcctggagcctgtaactgtcgatcccgaaatgaccgtgggtgagctgcgctctctgaaggaccagtacggtttctccggtttcccagtgatagctggggacgggagcattgtggggatggtgaccaacagggacatcagattcgtcgaggatcccggtacagaggtttccaaggtgatgacgaccgatctggtcacggtccccgagcatgtgacag

SEQ ID NO: 204588 - DNA, 787 bp, Unknown
  Bacterial polypeptide expressing nucleotide sequence isolated from the Sargasso Sea
tgtgggagctggcccagaagaatttaaaagagcaaaagcgattttaaatgaaaatattgatttaattgttgtggatactgctcacggccatacaaaaaaagtttcagaaatcattagatatataaaaaaaattaaaaataaaaaaacaactttatgtgctggtaatatagcaacacctgaggcagcaaaatttttagcaaatttaggcgtagatgtaattaaagtaggcataggtccaggctctatttgtactacaagactggttgcgggtataggtgtgccacaattaagtgcaattttgtcagtttgcaaaggattaaaaaaaaataatataaaaataatttctgatggaggaattaagtattctggtgatttagcaaaggcactagctgcaggggcagatgcaataatgataggatctttatttgctgggacaaaagaagcaccaggaaagttgattaaaaaaaatggaaaactttttaaaagttttagaggaatgggatcagtgggtgcgatgaataaaggatcagctgatagatattttcaaaaaaaacaaaaagatttatcaaaatatgttccagaaggagtagaaggatttgttaaatacaagggtaatattgacaaaacaatatttaaattggttggaggattaaagtcttcaatgggatatttgggttcaaaaaaaatatctggtttaaaaattaatcctaattttgtaaaaattactaaagctggtttttatgaaagtatggtacacaatgttgaccaaattaaaaaagaaaaataa

SEQ ID NO: 204589 - DNA, 112 bp, Unknown
  Bacterial polypeptide expressing nucleotide sequence isolated from the Sargasso Sea
tagagatgaggaagactgtcggtttgttaaaataacaggagcaggactgaaggaaagtcatgtgcacgacgtccaaattacaagagaaagtccaaattatcgtatcatttga

SEQ ID NO: 204590 - DNA, 500 bp, Unknown
  Bacterial polypeptide expressing nucleotide sequence isolated from the Sargasso Sea
ttttaaaataatagagcaaccaataaatttattaggccaaaaatacataaccatgagtattttagggtttgaatttaaattaaggttggctttaacgacagtcatcttttttgaaatttggcgctattttcctctcgcttttctttttattttagcaagattgcaagcaatacctcaaagtttgtatgaagcagcagaggtggatggagcaagcccaatccaaaaatttatccatattacactgcctcaaattacagccatcatttcaattttatttatgattaggtttatttggaactttaataaatttgaagatatctttttattaacgggtggggcttcaggcacaagaactttgcctattaatgtttatcaacaagggtttgcggtatcagatattggaatgggttctgctgtttcaatagtcatcgtgatgttacttcttagtttcatggttatttattttagattaattggaaagaaggctaatgaagtttaag

SEQ ID NO: 204591 - DNA, 370 bp, Unknown
  Bacterial polypeptide expressing nucleotide sequence isolated from the Sargasso Sea
tcctctcgcttttctttttattttagcaagattacaagccattccacaaagtttgtatgaagcagctgatgtggatggagcgagcccaatccaaaaatttatccatataacgctgcctcaaattacagcaatcatttcaattttatttatgattaggtttatttggaactttaataaatttgaagatatctttttattaacgggtggcgcatcaggaacaagaacactccctattaatgtttatcaacaagggtttgctgtatcagatatcggaatgggctcggctgtttcaatagtaattgtaatgttgcttcttactttcatggttatttattttagattaattggaaagaggggtaatgaagtttaa

SEQ ID NO: 204592 - DNA, 844 bp, Unknown
  Bacterial polypeptide expressing nucleotide sequence isolated from the Sargasso Sea
attaataaaaatactataaaatctcaaaaacctaaactatctggtgatgctgataatattttattaactagcaaatttactttaaaaaattttaaacaagtttttagtgaaaatgaatttttagatttattactaactactttttattttactttttttggaacaattggtgcaatcatttttggtatgtttgcagcgcaattagtaaatcaaaaattttatggtaggacttttatgagaagtattctactatttccatatgtcggacctgtagttgcattagcatacacgtggactttattgttagatccaaatagcgggactttaaatgctttgttagttaattttggaattattgataaaccgataaatttattaggtcagaagtatataacactaaatctattgggttttgatattaaattaaggttggccctaactacagtaataatgtttgagatttggagatattttcccctagccttcttattcattctagctagattacaggcggtccccaaagatttgtatgaagctgctgaggttgatggtgctggaccattaagaaaatttattaatattactctgccacagataacagcaattttatctattttatttatgattaggtttatttggaactttaataaatttgaagacatttttcttttaaccggaggagcatcgggaacaagaacattgccaataaatgtttaccaacaaggttttgctgtttctaacataggaatggggtcagcggtttcaattgttatagttatgctattaataatttttatgattatttatttcaaattaattgggaagcgtgcgaatgagatataaa

SEQ ID NO: 204593 - DNA, 322 bp, Unknown
  Bacterial polypeptide expressing nucleotide sequence isolated from the Sargasso Sea
atatcgtggtatgggctcattgggagcaatggctcaacaacacggctccaaagatcgatatttccaaagcgatgttgaggaggcagaaaaattggtcccagaaggcattgaaggaagggtgccttataaagggaagctttccaaaatcatcgaacagcttgttggcggattgcgacagtcaatgggatacacaggatgtaaagatatccaggaactccagacaaaaactgagtttgtcagaatcacagattctggaaaaagagaagggcatgttcacgatgtcagcatcaccaaagaagcacccaattactctgtcgattag

SEQ ID NO: 204594 - DNA, 193 bp, Unknown
  Bacterial polypeptide expressing nucleotide sequence isolated from the Sargasso Sea
gttgcaatctttatcagagaaattagttttaacctcggcatatacctttgatgatgttttattggttcctgccgccagtgatgtgattccagcagagataaatctgagcacccatttaacctccaatattacactgaatttaccattatgttcatcggccatggatacggtgactgaagcaaatatggcaatt

SEQ ID NO: 204595 - DNA, 700 bp, Unknown
  Bacterial polypeptide expressing nucleotide sequence isolated from the Sargasso Sea
aaaaaaagttggagaaattattaaatatattaaaaaaagtaaaaacaacaaaatcgctttgtgtgctggcaatattgcaactccagaagctgcaaaatttttaataaagttaggagtagatataattaaagttgggattggtccaggctcaatttgtactactagattagttgcgggcattggggttccacagctaagcgcaattttggcagtaagaaatggtataaaaaataaaaaagttaaaattatttctgatggaggaataaagtattctggtgatttagcaaaagcatttgcagcaggagcagatgctgtaatgataggatcattatttgcaggaacaaatgagactcctggaaaattaataaaaaaaaatgggaaattatttaaaagctttcgtggaatgggttctgtaggagctatgaaccaaggttcggctgatagatattttcaaaaaaaacaaaaagatatttcaaaatatgtgccagagggtgttgaaggttttgtaaagtataaaggtgatgttggaagtataatatataaattagttggtggcttaaaatcttctatgggatatttaggttctaaaaatattattggtctcagaaataaacctcattttgtaaaaattactaaagcaggtttttatgagagcatggttcataatgttgatgttattaaaagtgatagtaaatattaa

SEQ ID NO: 204596 - DNA, 492 bp, Unknown
  Bacterial polypeptide expressing nucleotide sequence isolated from the Sargasso Sea
gttctacaagaattacaactggtcatggagtaccaacattccagtctatattggattgtagtcagtctgatcgcgatgctctcatcattgccgatggcggcataaagaacagcggcgatcttgttaaggcgtatggagcaggcgctgattttgtgatgctagggtctctactagccggcaccgacgaggcacctggagacatcacaacgaatgtctctggtgaaaaatataaatactttagaggcatggcttcccgtaaagcgcaagttgaatggcgaggttggtcttcgacgccagaaggtgtctccacaatgattccatacaagggtcctgtcggtgacatattggcagaccttcgaggcggcatcgccagtggcatatcgtactctggcgcgtttggtttgaaagatctacgaggaaatgttgaattcatcaagcaaacagcggccggcatgtcagagagcagagcacacattcttgggggtggctaat

SEQ ID NO: 204597 - DNA, 245 bp, Unknown
  Bacterial polypeptide expressing nucleotide sequence isolated from the Sargasso Sea
aatgattgcagaaggaggaataagggatacaggtgaaatacccaaggccatagcagctggagctgaatctgtaatgttaggtggaatgattgctggaactcaagaatcaccgggtgaaacaattatttttgaagggagaaaattcaagtcttatagaggaatgggttctgtggaagccatgaaaaagggaagtaaagaacgatattttcaagatgttgaagatgatataaaaaaattggttccag

SEQ ID NO: 204598 - DNA, 436 bp, Unknown
  Bacterial polypeptide expressing nucleotide sequence isolated from the Sargasso Sea
tatgattaaatccaaatttgttggagaaggattaacttacgaagatgttcttcttgtccctgctttttcagaaattctcccttcagatgtatctcttcaaacaaaattcagtaagaacataaacttgaatgttccaattgtttcagctgcaatggataccgtaactgaaagtaaaatggctattgctattgcaagtgaaggaggtattggtgttattcataaaaatatgtctgttgaagaacaagcaaatgaagttagattggttaagagagctgaatcaggtatgataattgatccagttacattaaattcaaattctttggttatcgatgctaaaaattctatgaaaaagtacaaaataggaggtattccaattgtttcaaaaacaggaaaattaattggaatagtaactaatagggatttaagattgaaaaag

SEQ ID NO: 204599 - DNA, 832 bp, Unknown
  Bacterial polypeptide expressing nucleotide sequence isolated from the Sargasso Sea
gatatttcaccaataaatctagatccaagatgtaattttcaatctaaaaaggtgatttgtaattttggaaattgggatgcaaaatatagagaaaattttgagataactataaagaatattaatggagaaataattgataaaaaaacaattaaatctcaaaaaccaattttaagtggaaaagcagataatccactattatctacaagttttactttagaaaattttaaaaaagtcttttatgaaaataattttgttgaattgcttttaactacattttacttcactttttttggcactgtaggtgcaattatttttggaattttagcagcacaactagttaaccagaacatacaaggtcgaacttatatgcgcggcattcttctttttccttatgtagggcctgttgttgctttagcttatacttggacattattactagatcctaatagcggaactttaaatgcattattggttaattttaacatcttagaatcaccggttaatttattaggccaaaaatatattacaataagtattctaggacttgagtttaaattaaggttggcattaacgacagttatatttttcgaaatttggcgttatttcccgctagcttttctattcatcttagccagattacaagctattccaaaaagtttgtatgaagcagctgaagtagatggagcaagtccagttcaaaaatttatacatataacacttcctcaaattacagcgataatttctattttgtttatgattagatttatttggaactttaataaatttgaagatatttttttattaactggtggagcatccggaacaagaacgt

SEQ ID NO: 204600 - DNA, 710 bp, Unknown
  Bacterial polypeptide expressing nucleotide sequence isolated from the Sargasso Sea
tactactttttacttcacattttttggaactgttggcgctattatttttgggatgtttgctgctcaattagtaaatcaaaagttttatggcaggacttttatgagaagtattttactttttccatacgtaggtccagtagttgcattagcttacacttggacattaatgcttgatccaaatagcggaactttaaatgctctactggttaatttcggtattattgataaaccaatcaatctattaggtcagaaatatttaatattaagtctttttggttttgaaattaaattaagattagcattaacaaccgtaattatgtttgaaatttggagatactttcccctagccttcttgtttattttagcgaggctgcaagctgttcctaaagatttgtatgaagctgcggaagttgatggtgctggaccatttagaaaatttataaatattactcttccacagataacagcaattttatctattctgtttatgataaggtttatttggaattttaataagtttgaagatatttttcttttaactggtggagcatcgggaacaagaacattgccaattaatgtatatcaacaaggttttgctgtttcaaacataggaatgggatctgctgtttctatagttatagttatgttgctgataatttttatgattatttactttaaactaattggaaagagagcaaatgaagtataaa

SEQ ID NO: 204601 - DNA, 639 bp, Unknown
  Bacterial polypeptide expressing nucleotide sequence isolated from the Sargasso Sea
attgacaacagattttactctcaaaaattttaaaaatgttttcataaataacaatttttttgagcttttaacgacgactttttactttactttttttggaacacttggagctattatacttggtatctttgctgctcaacttgtaaaccaaaaattttatggaagaacttttatgcgaagtatattgctttttccttacgtaggaccagtagttgctttggcttatacctggactttactcttagatcctaatagcggtacaataaattctcttcttgttaattacggagtcattgaaaaacctataaatttacttggacaaaagtatttaatcattaatattttaggatttgagttgaaacttagattagccttgactacagtcatattttttgaaatatggcgatattttcctttagcttttttatttatattagctagattacaagctattcctaaagatctttatgaggctgcggatgttgacggtgctgggccatttagaaaatttttttatattacccttccacaaattacagcaattttatcaattttattcatgattagatttatttggaacttcaacaaatttgaagatatatttttattaactggcggcgcttcgggtactttgacatt

SEQ ID NO: 204602 - DNA, 879 bp, Unknown
  Bacterial polypeptide expressing nucleotide sequence isolated from the Sargasso Sea
gaaatatttaccttctgatgcagacactagtgtatctttaacaaagcatttgaagcttaaaattccacttttatcatctgcaatggatactgtcacagagagcagaatggcaatagctatagctaaagctggtggtattggagtaattcacagaaaccttgatataaaaacacaattatcagagataaaaagagtaaaaaaacaaaaactaatagtaggagcagctgtaggtgcagcaccaaatgaatttattagagctaaagaaataattaaagaaggtgtagatttaatcgtagtagatacagcacatggccatacaaagaaagttgctgaaataattaaatatattaaaaaaataaaaactaacaaaattgctctgtgtgcaggaaatattgcaacaccagaagctgcaaaattcctaataaagctaggagtagatataattaaaattggtatagggccaggttctatttgtacaacaagactggttgctgggataggagttcctcaattaagcgcaattttagctgtaagaagtggtttaaagaataaaaatattaaaataatttcggatgggggaataaaatattctggtgatttagcaaaagcttttgctgcaggagcagatgcagtaatgattggttcattatttgcaggcacaaatgaaaccccaggtaaattaattaaaaaaaatggacagcttttcaaaagttttagaggaatggggtctgttggagctatgaacaaagggtcagctgatagatactttcaaaaaaaacaaaaagactcctcaaaatatgtacctgaaggtgttgaaggttttgtaaaatataaaggagatgttgggagtattatttacaaattaattggtggattgaa

SEQ ID NO: 204603 - DNA, 241 bp, Unknown
  Bacterial polypeptide expressing nucleotide sequence isolated from the Sargasso Sea
caaacaaaattggtaccagaaggaattgaaggaagagttccatataaaggattggttatcaatgtcatagatcaattaattggtgggcttaggcagagtatgggatacattggttgcaaaaatatcgcagcaatgcaaaaagatagtcagtttgttgaaattacaaatgcaggtatggctgaaagtcatgttcatgatgttatgattaccaaagaggcgcctaactaccaaagaagctaat

SEQ ID NO: 204604 - DNA, 362 bp, Unknown
  Bacterial polypeptide expressing nucleotide sequence isolated from the Sargasso Sea
tatggtaacaattaaagaatctttaacatttgatgacgtattattgcttccgcagtactcagatgttttaccttctgaaacagatgtttccttaaaattaacgaccaaaattaacttgggagtaccgtttttgtcttcagcaatggatacggtgaccgagtctacaatggctattgctatagctaaagccgggggtattggaataattcatcgaaacctcaatattaaagaacaaacaaaagaaataatcaaagttaagaaaaaaaaattgtttgttggagctgcagtcggcacaaacaaagaggacgttgatagaactaaatctttaatagctaatggatgtgatttaattgtgatcgaca

SEQ ID NO: 204605 - DNA, 187 bp, Unknown
  Bacterial polypeptide expressing nucleotide sequence isolated from the Sargasso Sea
tatgtctaaatcaaaatttgtaggtgaaggtctaacatacgatgatgtacttcttgtccctgcttactcagaaattcttccatcagaagtttccctaaaaacaaaattcagtagaaatattaacataaatattccgatagtttctgctgcaatggatacagttactgaaagtaaaatggctattgca

SEQ ID NO: 204606 - DNA, 217 bp, Unknown
  Bacterial polypeptide expressing nucleotide sequence isolated from the Sargasso Sea
atggaaatccgcgacgcgctgactttcgacgacatacttctggtacccgcggaatccgccgtcctcccttacgaagccgaaacacgtacacgactgacgcgctcgatcagccttggtatcccgctgatctcggcggcgatggatacggtcacggaatcgaacatggcaatagcgatggcgcaggctggtggcatcggcgtgctcacaagaacaggat

SEQ ID NO: 204607 - DNA, 364 bp, Unknown
  Bacterial polypeptide expressing nucleotide sequence isolated from the Sargasso Sea
gcattcttgtttattcttgcgagattgcaggcggtacccaaagatttgtatgaagctgctgaggttgatggcgccggtccactaagaaaatttattaatattactctgccacaaataacagcgattttatctattttatttatgattagatttatttggaattttaataaatttgaagacatttttcttttaaccgggggtgcatcaggaacaagaactttgccaataaatgtttaccaacaaggttttgctgtttctaacataggaatggggtcagcggtttcaattgttatagttatgttattaataatttttatgattatttatttcaaattaattgggaagcgtgcaaatgagatataaa

SEQ ID NO: 204608 - DNA, 430 bp, Unknown
  Bacterial polypeptide expressing nucleotide sequence isolated from the Sargasso Sea
tctggttaaaaaaccagccataataatgagggagtacaacacaatgactaacatcactaaaaaaagtttagtagctgcggggatcttaactgcgctagtcgctggaaatgttgccacggcggcagtagtgccagcgggtgtgcagcttgctgaaaagcagactctggtgcgtaataacggttcggaagtgcagtcactcgatccccacaaaatcgaaggtgtacctgaatccaacattaaccgtgacctgtttgaaggtttattaatcagtgatctcgatggcaaaccatcgcctggcgtggctgaaaaatgggaaaataaagattttaaagtctggacattccatctgcgtaaagatgctaagtggtctgacggcacgcctgttaccgcgcaagatttcgtgtatagctggcaacgttggctaatccaa

SEQ ID NO: 204609 - DNA, 673 bp, Unknown
  Bacterial polypeptide expressing nucleotide sequence isolated from the Sargasso Sea
tttggaactgttggcgctattatttttgggatgtttgctgcgcaattagtaaatcaaaagttttatggtaggacttttatgagaagtattttactttttccatacgtaggtccagtagttgcattagcttacacttggacattaatgcttgatccaaacagtggaactttaaatgctttactggttaacttcggtattattgataaaccaattaatctattgggtcagaaatatttaatactaggtctttttggttttgaaattaaattaagattagcattaacaactgtaattatgtttgaaatttggagatactttcccctagccttcttgtttattttagcaaggctgcaagctgttcccaaagatttgtatgaagctgcggaagttgatggtgccggaccatttagaaaatttataaatattactcttccacagataacagcaattttatctattctgtttatgataaggtttatttggaattttaataaatttgaagatatttttcttttaactggtggagcatctggaacaagaacattgccgattaatgtatatcaacaaggttttgctgtttctaacataggaatgggatctgctgtttctatagttatagttatgttgctgataatttttatgattatttactttaaactaattgaaagagagc

SEQ ID NO: 204610 - DNA, 676 bp, Unknown
  Bacterial polypeptide expressing nucleotide sequence isolated from the Sargasso Sea
tatttaatttcaaaggaatatgcagacataagaagaaaagagataaattctgacaattcagcttcaactgttttacctggcgatattgagaacggtgatacaatatacttaacaacagctgatagcgaaggaaatatggtttcattaattcaaagtaattacagaggtatggggtctggaatggttcctaataaccttggatttatgcttcaagataggggtgagcttttctctttagatgaaaatcacttcaatgtatatgctccaaaaaaaagaccctttcacacaattattcctgcatttattactaaagatgggaatccattaattagttttggtctaatgggtggagctatgcaacctcaaggtcatgcacaaattgtaataaatataattgactttgatatgaatcttcaggaagcaggtgatgcaccaagaattagacaccaatctaatcaacaaccaacaggaggagaaatgactgatgggggagaagttgccttagaaaaaggttttaattataaacaaatccgtgaactaatgaagaaaggacataaagttatatatgatttaggttcatttgggggataccaagctattatgattgactatataaacaaggtatactatggcgcttcagaatcgcgtaaagatggaagtgcgattggctattaaa

SEQ ID NO: 204611 - DNA, 576 bp, Unknown
  Bacterial polypeptide expressing nucleotide sequence isolated from the Sargasso Sea
ctgtagttgcattagcttacacgtggactttattacttgatccaaatagcggtacattaaacgctttgttggttaattttggtgtcctggataaacctataaatttattgggacagaaatacattgaattaaatctcatggggtttgacattaaattaaggttggcactaacaacggtaataatgtttgagatttggagatattttcccctagccttcttgtttattttagcaagattacaagctgtaccaaaagatttatatgaggctgctgaagttgatggcgccggaccattaaggaagtttgttaatattacacttccacagataacagcaattttatctattttattcatgattagatttatttggaactttaataagttcgaagatatttttcttttaactggtggagcatctggaacaagaactttaccaataaatgtttaccaacaaggttttgctgtttcaaacatcggaatggggtctgcagtttcaatagttatagttgtgttgttaataatttttatgattgtttactttaaattaattgggaagcgtgcaaatgaaatataag

SEQ ID NO: 204612 - DNA, 268 bp, Unknown
  Bacterial polypeptide expressing nucleotide sequence isolated from the Sargasso Sea
tatgggaacaataaatgagtctctaacctttgacgatgtattacttcttccgagatattccaatatcttgccgtctgagactgacataacgttaaatttatcaaaaaaaatttcacttaaagtaccttttttatcttctgcaatggacacagttaccgagtctaaaatggcaattgcaatggcagatgcaggagggattggaataattcacagaaatttaaatattaaaaatcaaacaaaagaaataataaaggttaagaaaaaaaaa

SEQ ID NO: 204613 - DNA, 527 bp, Unknown
  Bacterial polypeptide expressing nucleotide sequence isolated from the Sargasso Sea
tatgggtcctataaaagaatcactcacatttgatgatgtaatgcttatgccaagatactcagatgtattaccatctgaagtaagcactacgaccaaacttcaaaaaaatttaaaacttaaaattccattaatgtcttctgctatggatactgtaacagaatcaaaaatggctatagaaataggtaaacttggaggaattggaataattcacagaaatctatcaataaaaaaacaaattcaagaaattaaaaaagttaaatcaaaaaaaatattagtaggcgcagccgtaggtgcaagtgaacaagagatgattagagctaaaactattttaaaagaaaatctagatattatcgtagttgatacagctcatggacatagtaaaaaagttgcagatatagttaaaatgataaaaaagattaaacctaagaaaacatctctatgtgctggcaatattgcatctcctgaagctgcaatttttttatcaaaaattggagtggatataattaaaagttggaattggtcctgga

SEQ ID NO: 204614 - DNA, 415 bp, Unknown
  Bacterial polypeptide expressing nucleotide sequence isolated from the Sargasso Sea
gggctggagccatactgtaatgttaggcagtgtttttgctggcacagaagaagctccaggagaaatagaacttttccaaggcagaagttttaagacttatagaggtatgggttcattaggagcaatgtcaaaaagagctgatgctgaaagatatatgcaaggtgaagacacagatgcagaaaaacttgttccagaaggtattgaaggaagagtgccttttagaggctggttaaaagatgttgtttatcaattagaaggtggattaaggcaaggtatgggttatacaggctcaaaagatataaaagatttacaaaaaagagttcaattccaaaaaattactagatcaggtatgactgaaggccatgttcatgatgtcagcataacgaaagaagcaccaaactatagagtggattaa

SEQ ID NO: 204615 - DNA, 471 bp, Unknown
  Bacterial polypeptide expressing nucleotide sequence isolated from the Sargasso Sea
gatgaaattagatgaagctttaacttttgatgatgttttaataagaccaggctactcatcggttttaccaagagatgttagtaccaaaacttatttttctagagaaataaaaataaatattcctcttgtttctgcagccatggatactgtaactgaagctaaaatggctattgctattgcacagggaggaggaataggagttattcataaaaataattctatagatcaacaaatttcagaagtagtaaaggttaagaaatatgaatcgggaatggtagttgatccaattactataagagataactcatctctaaaaaacttaatttctttaaaggaaaaatttaatatatcaggatttccagttgtcaatagaaataataaggtagtaggaattattactaatagagatgtcaggtttgcacagaatatgtcacaaccaattagcgaattaatgacaaaaacaaatttaat

SEQ ID NO: 204616 - DNA, 756 bp, Unknown
  Bacterial polypeptide expressing nucleotide sequence isolated from the Sargasso Sea
caattattaatgagggtattgacttgattgtagtcgatacagctcatggacatacaaaaaaagtaggagagattattaaatatataaaaaaaaataaaaacaataaaactgcattatgtgcaggaaatattgcaacaccagatgctgcaaaattcttaatcaaactaggagtagatataattaaagtcggaattggtccaggctcaatttgtactactagactggttgcaggtatcggggtcccacagttaagtgcaattttgtctgtaagaaatggaataaaaaataaaaaagtaaaaataatttctgatggaggaataaaatattctggtgatttagcaaaagcatttgcagcaggtgcagatgtagtaatgattggatcattatttgcaggaacaaatgaaacgcctgggaaattaataaaaaaaaatggaaaattatttaaaagttttcgtggaatgggctctgtaggagctatgaacaaaggttcggcagatagatatttccaaaaaaaacaaaaagatatgtctaaatatgtaccagagggggttgaaggttttgtaaagtataaaggtgatgttgaaagcattatatataaattagtcggagggttgaaatcttctatgggatatttaggttcaaaaaatattattgggctcagaaacaaacctcattttgtaaaaattaccaaggcaggcttttatgaaagtatggttcataatgttgatttaataaaaagtgatagcaaatactaat

SEQ ID NO: 204617 - DNA, 373 bp, Unknown
  Bacterial polypeptide expressing nucleotide sequence isolated from the Sargasso Sea
atgggatcaattaaagaatctttaaccttcgatgatgtattattacttcctcagtactcagacgtgttgcctaatgaaacagacatctcgttaaatttaacaaaaagaattattttaaaagtccctttcttatcttccgcgatggatactgtaacagagtctagaatggcaatagcaatagctaaagaaggaggaattggagtaatacatagaaatttggatataaaaagacaatctaaacaagttgccatagtaaagaataaaaaactttatgtaggcgccgctgttggtacaaataaagaggatctagatagatctaaatctttgattgctaatggatgtgatatgatagttttggacactgcccatggtc

SEQ ID NO: 204618 - DNA, 407 bp, Unknown
  Bacterial polypeptide expressing nucleotide sequence isolated from the Sargasso Sea
aggtgccaattgcgctatggttggttcaatgttagcgggtaccgatgaagcgcctggggagcttatcctttatcaaggaagaagttttaagacttacaggggtatgggctctcttggtgcaatggcaagaggttcggctgatagatattttcaacaagaagttcaaaatgataaacttgttccggaaggagttgaggggcaggtgccttataagggttccgtttttaacgttttgcatcaattagttggtgggttaaaggctgctatgggctatacgggaaacgataccatagccaagatgagaacctcgtgcgaatttatcaaaattagtggcgctggctttgacgaaagtcatattcataacgttgaaattactagagagtctcctaactatcgaggtcgataga

SEQ ID NO: 204619 - DNA, 829 bp, Unknown
  Bacterial polypeptide expressing nucleotide sequence isolated from the Sargasso Sea
actaaaacaagttgaattagtaaaaaaaaaacatttgaaggtagcagctgcgattggcgttggaattaatgaagttgaaagagcagaaggactgctagagaaaaatattgatttaatagttattgatacggcacatggccatactaaaaaagtaaaagatacattaaaaaaaataacaaaattaagaaaaaaaacttctatatgtgtcggaaatgtagccacaccagaagcagctaaattcttaattagtaacggagcagatattattaaaataggcattggccctggttcaatttgcaccactaggatggttgctggaattggagtgcctcaattaagtgcaatattagatataaaaaaaaaaattaaaacaacaaaaattagtttcatttctgacggaggaattaagttttcgggcgatttggctaaagcattttcagcaggtgctgatgcaatcatgattggatctctgtttgctgggactaatcaggctccaggaaagattataaaaaaaaatggaaaattatataaaaaatttagaggtatgggatcgataggagccatgtcacaagggtctgctgacagatataatcagcaaaacatttctaaaaaaacaaagtttgttgctgagggcgttgagggttttattaaatataagggagatgttaataaaattatatatcaacttataggtggtttaaaatcgtcaatgggttatttaggatgttcaaatgtaaaaagtcttagaataaaaccaaaatttattacgataacaaaagctggtttctatgaaagtatggtacataatattgatttagtgaaaggttag

SEQ ID NO: 204620 - DNA, 661 bp, Unknown
  Bacterial polypeptide expressing nucleotide sequence isolated from the Sargasso Sea
ttgtctacaagttttactttagaaaattttaaaaaagtcttttatgaaaataattttgttgaattgcttttaactacattttacttcactttttttggcactgtaggtgcaattatctttggaattttagcagcacaattagttaatcaaaatattcaaggtcgaacttacatgcgaggtattttactttttccttatgtaggtcctgtggttgctttagcttatacttggactttattgttagacccaaatagcggaactttaaatgcattattggttaattttaatattatagagaaaccaataaatttactgggccaaaaatacataacaatgagtattttaggttttgaatttaaattaagactagctttaaccactgttatattttttgaaatttggcgttattttcctctcgcttttctttttattttagcaagattacaagccattccacaaagtttgtatgaagcagctgatgtggatggagcgagcccaatccaaaaatttatccatataacgctgcctcaaattacagcaatcatttcaattttatttatgattaggtttatttggaactttaataaatttgaagatatctttttattaacgggtggcgcatcaggaacaagaacactccctattaatgtttatcaacaca

SEQ ID NO: 204621 - DNA, 263 bp, Unknown
  Bacterial polypeptide expressing nucleotide sequence isolated from the Sargasso Sea
tatggtaacaattaaagagtctttaacatttgacgacgtattattgcttccgcaatactcagacgttttaccttctgaaacagatgtttccttaaaattaacaaccaaacttaatttgggagtaccgtttttgtcttcagcgatggatacggtgaccgagtctacaatggctattgcgatcgctaaagccgggggtattggaataattcatcgaaacctcaatattaaagaacaaacaaaagaaataatcaaagttaagaaaa

SEQ ID NO: 204622 - DNA, 316 bp, Unknown
  Bacterial polypeptide expressing nucleotide sequence isolated from the Sargasso Sea
tatgaagctgcagaagttgatggagcagggccgcttaaaaagtttattcatattacacttccgcaaataacagcaatcatatcaattttatttatgattagatttatttggaattttaataaattcgaggatatttttttattaactggtggtgcatctggaactaggacattaccgataaatgtttatcaacaaggttttgcaatatcagatattggtatgggatctgctgtctctatagtaatagtcttattacttattatttttatgtttatttattttaaattaattggaaaaaaggcaaatgaaatttaag

SEQ ID NO: 204623 - DNA, 154 bp, Unknown
  Bacterial polypeptide expressing nucleotide sequence isolated from the Sargasso Sea
aaggcttctatggggtacactggttcaaaagatatagtagaatttaaaaagaatgttaagtttatagaaattacaggagcaggtctgaaggaaagccatgtacatgatgtcgatatcacaagagagtcaccaaattatccgacaaacatataaa

SEQ ID NO: 204624 - DNA, 391 bp, Unknown
  Bacterial polypeptide expressing nucleotide sequence isolated from the Sargasso Sea
tttgagatttggcgatattttcctttagcttttttatttatattagctagactacaagctattccaaaggatctttatgaggccgcggatgtagatggtgctgggccatttagaaaattcttttatattactcttccacaaattacagcaattttatcgatattattcatgattagatttatttggaactttaataaatttgaagatatatttttgttaacaggcggtgcttcaggtactttaacgttaccaataagtgtgtatcaacaaggatttgcagtatcaaatattggcatgggctcagcagtttcaatagtaatcgtattattattaataacttttatgattatttatttcaaattaattggaaaaaaggcaaatgaaatttaaa

SEQ ID NO: 204625 - DNA, 714 bp, Unknown
  Bacterial polypeptide expressing nucleotide sequence isolated from the Sargasso Sea
taatgacgactttttattttactttttttggtactcttggcgctattttgttgggtatatttgctgcacaattggtaaatcaaaaattttatggacgatcttttatgagaagtatattgctctttccttatgttgggcctgttgtggctttggcctatacatggactttgctcttagatccaaatagcggtactttaaattcacttctggtcagttttggaattattgaaaaacctataaacttacttggtcaaaagtatttaataataaatattttaggttttgaattaaaacttagattagcattaacaacagttatattttttgagatttggcgatattttcctttggcttttttgtttatcttagcaagattacaagctattcccaaagacctttatgaggctgcagatgttgatggagctgggccttttagaaaattcatttctataacacttccacaaatcacggcaataatatcaattctgtttatgattagatttatttggaattttaataaatttgaagatatttttttactaactggtggtgcttcaggtactcttactttacctataagcgtttatcaacaaggatttgctatatcaaatattggcatgggatcagcaatttcaatagtaatagtattattattgattatatttatgcttatttattttagattaataggaaagagggcaagtgaaatataga

SEQ ID NO: 204626 - DNA, 283 bp, Unknown
  Bacterial polypeptide expressing nucleotide sequence isolated from the Sargasso Sea
agatggttctaaagatagatattttcaagatgataatgatgaaaaagataagcttgttccagagggaattgaaggaagggtgccctataaagggccattaagtagtattttatatcaattagttggcggcttaagatcaagtatgggctacattggatgtaaaaatattaatgaaatgcataataaagctaaatttgtgagagtaacagatgctggggtaaatgagagtcacgttcatgacgtcagtattacaaaagagcctcctaactatcaaaaaagttaa

SEQ ID NO: 204627 - DNA, 396 bp, Unknown
  Bacterial polypeptide expressing nucleotide sequence isolated from the Sargasso Sea
tagctgctggtgctgatgcagttatgatagggtcattatttgcaggaacagacgaagcacctggaaaaaaaattaaaaaaaaaggtaaattttacaaatattttaggggtatgggatcaataggtgcaatgaataaaggatcagcagacagatattttcaatctaaacaaaaagatacatcaaaatatgtagctgagggggttgagggatatattaaatataagggtaaagttgataaaataatttacaacttggttggaggtttaaaatcttcaatgggctatatgggagcaaaaaaaataatcgacttaagaaaaaaaccaaaatttttaaaaataactaaagcaggtttttatgaaagtatggtacataatatagatgtagttaaaaaataat

SEQ ID NO: 204628 - DNA, 166 bp, Unknown
  Bacterial polypeptide expressing nucleotide sequence isolated from the Sargasso Sea
ttgagcataagagaaggagtaacgtttgacgatgtgctcctagtacccaaattttctgatattagtagtagaacacaaactgacttatcaacaaagttatcaaaaaatatcacattaaacattccactaatcagtgcaaacatggatactgtaacagaatcgacta

SEQ ID NO: 204629 - DNA, 781 bp, Unknown
  Bacterial polypeptide expressing nucleotide sequence isolated from the Sargasso Sea
ctgtctacaaattttactttagaaaattttaaaaaagtcttttatgaaaataattttgttgaactgcttttaactacattttatttcactttttttggcactgtaggtgcaattatttttggaattttagcagcacaattagttaatcaaaatattcaaggtcgaacttacatgcgaggtattttgctttttccttatgtgggtcctgttgttgctttagcttatacttggactttattgttagacccgaatagtggaactttaaatgcattattggttaattttaatattatagagaaaccaataaatttattgggccaaaaatacataacaatgagtattttaggttttgaatttaaattaagactagctttaactacagttatattttttgaaatttggcgttattttccactcgcttttctttttattttagcaagattgcaagcaataccgaaaagtttatatgaagcagctgatgtggatggagcaagcccaatccaaaaatttattcatataaccctacctcaaatcacagcaataatttcgattttattcatgattaggtttatttggaactttaataaatttgaggatatttttttattaacgggtggcgcatcaggaacgagaacacttccgattaatgtttaccaacaagggtttgctgtatcagatattgggatgggctcagctgtctctattgtgattgtgatgttgcttattagttttatggttatttattttagattaattggaaagagggctaatgaagtttaaa

SEQ ID NO: 204630 - DNA, 418 bp, Unknown
  Bacterial polypeptide expressing nucleotide sequence isolated from the Sargasso Sea
catggatcctataaaagaagcacttaccttcgacgatgttaccttagcgccgcaatactcaaaagtcttaccgtccgatgtgtccacagcaactgtattatcaaatcaattaaaactagatatcccaattctgtcatctgcaatggataccgttacagagtcaaagatggctattgctttagctaaacaaggaggaataggtgttattcatagaaatttaaccatatctcaacaaattaatgaaataaaaaaagtaaagtcaaaaagttttaaagtaggggctgctgtaggtacaaatgagagtgaattaaatagaataaagaatattttaaaacttaatatcgatctaattgtagtagatacagctcatggacatagtcaaaaagttgcagatacaattttaaaaattaaaaaaatt

SEQ ID NO: 204631 - DNA, 99 bp, Unknown
  Bacterial polypeptide expressing nucleotide sequence isolated from the Sargasso Sea
gatgcagattcgtgaggcgctaacttttgacgacgttttattggttccagctcagtcttctattttaccgtcagatgccgatacgcggactcaagtcac

SEQ ID NO: 204632 - DNA, 426 bp, Unknown
  Bacterial polypeptide expressing nucleotide sequence isolated from the Sargasso Sea
tatggttcctataaaagaagcactcacctttgatgatgttacacttgttcctaagtattctgaattacttccttccgaggtagatactagtattaagctaaccaataatttaaaattaaaaattcctcttttatcttctgcaatggatactgttactgaaagcaagatggcaattgccatagcaaaagctggaggattaggagtaatacacaggaatttagatattaaaactcaactattagaaattaaaaaagtaaaaattaaaaaacttttagttggtgctgctgtaggtgcaggcccaaatgaatttaaaagagcagatgctattctaaaagaaaatgtagacatgatcgttgttgatactgcccatggtcatactaaaaaagtttcagaaataatcaaatttataaaaaaaaagaagaataa

SEQ ID NO: 204633 - DNA, 703 bp, Unknown
  Bacterial polypeptide expressing nucleotide sequence isolated from the Sargasso Sea
tttatttttactttttttggaacggttggtgctatcatttttggaatgtttgctgcacagctagttaatcaaaaattttatggcaggacttttatgagaagtattttactgttcccttatgttggaccggtggttgcgttagcatacacgtggactttattgttagatccaaatagtgggactttaaatgcattgctagttaattttggtattattgataaaccaataaatttgttaggtcagaaatatatgacactaaatcttttgggttttgatattaaattaagattggccttaaccactgtaataatgtttgagatttggagatattttccccttgccttcttattcattttagcaagattacaagcagttccaaaagttttgtatgaagctgctgaagttgatggagccggtcctttaagaaaatttattaatattacactcccgcagataacagcaattttatctattttatttatgataagatttatttggaattttaataaatttgaagacatttttcttttaacaggcggggcgtctggaacaagaacattgcctataaatgtttaccaacaaggttttgcagtttctaacattggtatgggatcggcagtttcaatagtgatagttatgttattaataatttttatgattatttacttcaaattaattgggaagcgtgcaaatgagatataaa

SEQ ID NO: 204634 - DNA, 670 bp, Unknown
  Bacterial polypeptide expressing nucleotide sequence isolated from the Sargasso Sea
agtacagtaaaaaatattaaaaaagcatttcctgactgtgaactaattgctggaaatgtagcaactgctcaaggtactgaagatttgattaaagctggagttgatgcagttaaagttggtgttggttcggggtcaatttgtattacacgagtaattactggttccggtgtgcctcaattaacagctgtaatggattgtgctgaaattggtaaacaatatgatataccaattatttctgatggtggaacaagaacatcaggcgatgcaactaaagcattagctgctggtgcgtcatctgttatgttaggaagtatgttaggtggaactgatgaaagtcctggctcaacaatcacaaaaaatggaaaaagatacaagttttacagtggaatggcatctcttggtgctgcacgaagaagaaaatcaaaggaagctacacaaaccgataatgaagatgatctaaatgattatgttgctgaaggagtggaggcaatggttccatacaaaggcactgtgattgatattcttgttcagattactggtggaatacgttctggtttgagttattgtggtggacatgatattaaacaaatgcaaaataatgctgaatttatcaaaatgtcacgtgctggatttgcagaaagtcaacctcatgatgttgacgtactatagc

SEQ ID NO: 204635 - DNA, 368 bp, Unknown
  Bacterial polypeptide expressing nucleotide sequence isolated from the Sargasso Sea
cgatgagtcaccaggggaggtttttctttttcaaggtagatcctataaatcttatcgtggcatgggttcgttaggtgctatggctagagggtctgctgatagatattttcaagacgaaataaatgaagccattaaattagttcctgagggaatagagggaagaattccttataaaggccaggtatctaatgtgttatttcaactaactggaggtttaagatctgggatgggatacacgggatcaaaaaatcttacaacactgaaaaagaatgcaaaatttgttcgattgactaattctggtatcaacgaaagccatgttcatggtgtgcaagtgaccaaagaagctccaaactatcgttccaattgag

SEQ ID NO: 204636 - DNA, 839 bp, Unknown
  Bacterial polypeptide expressing nucleotide sequence isolated from the Sargasso Sea
ccagctcactcagaagtcttaccgaatgaagttactttaaagaccagattaaccaagaaacttaatctaaatatacctcttgtgtccgctgccatggacacagttacagaatctcgcatgagtatcgctttaagtgaattgggtggaattggcattattcataaaaacttatcgattgatgctcaagcttctgaagtcaagaaagtaaaaaaatacgaaagcggaatagttagagacccaataaccatcagatctgacaaagaagtaggcgaactaatacaactaaccaatgagcttaatatttcaggaatgccagttgttgataatgataatttagtaggaattgttacaagcagggattttagaaatgaacaaaatttctctgccaaagtatctgaaataatgacccccaaagagaaactcgttacagcaaaagaaggggaagatttagaggtaattaagaaactactccaagacaacagaattgaaaagatccttttagttgattcttcttttagtttgacaggccttgtaactcttaaagatataaataagtcattagattttccagatgctgccagagatgaagagggaagattgttggtaggtgctgccataggaactaaatcggataccatgcaaagatgtgaatctttagttcaagcaggagtcgatgtcttagtgcttgatagtgctcatggtcactctgaaggagtgctttctcaaataaaagaagtgaaaaatgcttttaaggatattcaagttataggaggcaatatagccacaggggatggagctttggctctagtgaaggctggtgcagatggagttaaagtagg

SEQ ID NO: 204637 - DNA, 398 bp, Unknown
  Bacterial polypeptide expressing nucleotide sequence isolated from the Sargasso Sea
tatattttttgaaatttggcgttattttccacttgcttttctttttattttagcaagattgcaagcaataccgcaaagtttatatgaagctgcggatgtagatggagcaagtccaatccaaaaatttattcatataactctgcctcaaatcacagcaataatttcaattttattcatgattaggtttatttggaattttaataaatttgaggatatctttttattaacgggcggcgcatcaggaacaagaacacttcccattaacgtttatcaacaagggtttgctgtatcagatattgggatgggttcagccgtatctattgtgattgtgatgttacttatcagttttatggttatctattttagattaattggaaagagggccaatgaagtttaaa

SEQ ID NO: 204638 - DNA, 265 bp, Unknown
  Bacterial polypeptide expressing nucleotide sequence isolated from the Sargasso Sea
tagatatctacaggaagacgttgatgctgataaacttgttccagaaggcattgaaggtagagttccatataaaggattagttattaatgtaattaatcaacttataggcggtttaagacaaagcatgggatacgttgggtgtaagacaatcaaagaaatgcaagaaaatagtcaatttattgaaattacaaatgctggtatgactgaaagtcatgttcacgatgtgatgattacaaaagaggctcctaactaccaaagaagctaa

SEQ ID NO: 204639 - DNA, 380 bp, Unknown
  Bacterial polypeptide expressing nucleotide sequence isolated from the Sargasso Sea
gggcatggatgaaagccctggtgaatttatattatttgaaggtcggcagtataaatcttatagaggaatgggatctcttggagcaatgcaagatggcggcggagaacgatattttcaaaatgatactgaagataaaaaactcgtacctgaaggcattgaaggtatagttccttatagaggaagtgtaaaaaataccatccatcagctaatgggtggattgagatcttcgatgggatattgcggcggggaaaatatattagattttcagaaaaaagctgaatttattcagtcaactcaagctggcgttaaagagagccaccctcatgaagttaaaataacaaaggaagctcctaactatcagatttcagatactaaataga

SEQ ID NO: 204640 - DNA, 418 bp, Unknown
  Bacterial polypeptide expressing nucleotide sequence isolated from the Sargasso Sea
aaggttagcactaactacagtaataatgtttgagatttggagatattttcctctagccttcttgtttattcttgcgagattgcaggcagtacccaaagatttgtatgaagctgctgaggttgatggtgctggcccactaagaaaatttattaatattactttgccacagataacagcaattttatctattttatttatgattaggtttatttggaattttaataaatttgaagatatttttcttttaaccgggggcgcatcaggaacaagaactttgccaataaatgtttaccaacaaggctttgctgtttctaacataggaatggggtcagcggtttcaattattatagttatgttgttaataatttttatgattatttatttcaaattgattggaaaacgtgcaaatgagatataa

SEQ ID NO: 204641 - DNA, 298 bp, Unknown
  Bacterial polypeptide expressing nucleotide sequence isolated from the Sargasso Sea
ttcgataggcgcaatgtcatcaggatcttcagacagatattttcaaaaaaattataaagataagtctaaattcgttcctgaaggagtggaaagtcgagtattatttaaaggtaaaatttcaaaaataatttatcaattacaaggaggtctaagatcttcaatgggatatataggtgcacaaacaattaatgaagtaagaaaaaaatccaagtttattaaaattacaaaagccggcttttacgaaagtatggttcacagtgttgaagcaataaatagtacagcaaattacaaattatga

SEQ ID NO: 204642 - DNA, 508 bp, Unknown
  Bacterial polypeptide expressing nucleotide sequence isolated from the Sargasso Sea
gttggttaattttaatattttagagtcaccaataaatttattaggccaaaaatatataacgatgagtatcttaggttttgaatttaaattaaggctagctttgactacagtaatattttttgaaatttggcgttattttcctttagcttttctatttatcttagcaagactacaagctattccacaaactttgtatgaagcagcagatgtagatggagcaagtccaattcaaaaatttatccatatcacattacctcaaattacagcaataatttcaattttattcatgattaggtttatttggaactttaataaatttgaggatatctttttattaacgggtggggcgtcaggcactagaactttacctataaatgtttatcaacaaggatttgctatatcagatattgggatgggctctgcagtttcgatagttattgtgatgttgcttcttagtttcatggttatttattttaaattaattggaaaaaaagcaaatgaagattaa

SEQ ID NO: 204643 - DNA, 431 bp, Unknown
  Bacterial polypeptide expressing nucleotide sequence isolated from the Sargasso Sea
aatggtctaccaaataaatactaattattccgttacttttgatgatgttttgctttcgccagcatattctgaaattaagcccaaagacgtagatacatctattacaattggaaaagtaaaattacacattccaatactctcctctgctatggataccgtgactgaaaataagatggctatcaatttagcactacatggtggtcttggcgtgattcaccgtaatatgccaattgataaacaagcaagtgaagtcaaaaaagttcataactttaaagttaattcaaaaaaatttgaaaacgccgtaattaattctaataaacagatagctgtgggagctgcaattggtgttgaaaataatgcttacttacgactattagacttattaaaagtcggcgttgatatagtctttattgatgttgctcatgcgcaca

SEQ ID NO: 204644 - DNA, 571 bp, Unknown
  Bacterial polypeptide expressing nucleotide sequence isolated from the Sargasso Sea
tatgcgaggtattctactttttccttatgtgggccctgtagttgctttagcttatacttggacattattgttagatccaaatagtggaactttaaacgcattattggttaattttaacatcatagagcaaccaataaatttattaggccaaaaatacataaccatgagtattttaggttttgaatttaaattaaggttggctttaaccacagttatcttttttgaaatttggcgctattttccactcgcctttctatttattttagcaagattgcaagcaatatcacaaagtttgtatgaagcagcagaggtggatggagcaagcccgattcaaaaatttatccatattacactgcctcaaattacagccatcatctcaattttatttatgattaggtttatttggaattttaataaatttgaagatatctttttattaaccggtggggcatcaggcacaagaactttacctattaatgtttatcaacaaggttttgcagtttcagatattgggatgggctctgctgtttcaatagtcattgtcatgttacttcttagtttcatggttatt

SEQ ID NO: 204645 - DNA, 535 bp, Unknown
  Bacterial polypeptide expressing nucleotide sequence isolated from the Sargasso Sea
ccaaacagtggaactttaaatgctctactggttaacttcggtattattgataaaccaattaatctattaggtcagaaatatttaatattaagtctttttggttttgaaattaaattaagattagcattaacaactgtaattatgtttgaaatttggagatactttcccctagccttcttgtttattttagctaggctgcaagctgttcctaaagatttgtatgaagctgcggaagttgatggtgctgggccatttagaaaatttataaatattactcttccacagataacagcaattttatctattctgtttatgataaggtttatttggaattttaataagtttgaagatatttttcttttaactggtggagcatcgggaacaagaacattaccaattaatgtatatcaacaaggttttgctgtttcaaacattggaatgggatctgctgtttctatagtcatagtcatgttgctaataatttttatgattatttactttaaattaattggaaagagagcaaatgaagtataaa

SEQ ID NO: 204646 - DNA, 205 bp, Unknown
  Bacterial polypeptide expressing nucleotide sequence isolated from the Sargasso Sea
tttgacaataagagaaggattcacttttgatgatgttctccttgtacccaaattttcagatataactagtcgttcacaaactgatctttcaacaaaactttctcgaaacatcaaactcaacattcctttagttagtgcaaatatggatactgtgacagaatctactatggcgacaaccatggctcgacaaggaggaattggatta

SEQ ID NO: 204647 - DNA, 265 bp, Unknown
  Bacterial polypeptide expressing nucleotide sequence isolated from the Sargasso Sea
atattttcaatctaaatcaaataataagaaattagtacctgaaggtatcgaggggatggttccatataaaggtcctgtaggagatacagttcatcaattgatgggtggtatcaaatcttctatgggttattgtggagcaagagaaattaaagattttcctaaacaagcggaatttataaagattacctcatcaggaatagtagagagtcatcctcatgatataaaaatcacaaaagaatctccaaattatcataaaccaaaataa

SEQ ID NO: 204648 - DNA, 640 bp, Unknown
  Bacterial polypeptide expressing nucleotide sequence isolated from the Sargasso Sea
gtaaatcaaaaattttatggaagaacttttataagaagtatattactttttccttatgtaggacctgttgttgctttggcttatacctggactttactcttagatcctaatagcggtacaataaattctcttcttgtgaattatggagtcatcgaaaagcctataaatttacttggacagaaatatttaattatcaatattttaggatttgagttgaaacttagattagcattgaccacggttatattttttgagatttggcgatattttcccttaacttttttatttgtattagctagactacaagctattcctaaagatctttatgaggcagcggaagttgatggtgctgggccatttagaaaatttttttatattacccttccacaaataacagcaattttatcaattttattcatgattagatttatttggaacttcaacaaatttgaggatatatttttattaactggcggcgcttccggtacattgacattaccaataagtgtgtatcaacaaggatttgcaatatcaaatattggtatgggttcagcagtttcaatagtaatcgtattattattaataacttttatgattatttatttcaaattaattggaaagaaagtaaatgaaatttaaa

SEQ ID NO: 204649 - DNA, 508 bp, Unknown
  Bacterial polypeptide expressing nucleotide sequence isolated from the Sargasso Sea
tttggttaattttaatattatagaacaaccaataaatttattaggccaaaaatacataaccatgagtattttaggatttgaatttaaattaaggttggctttaaccacggttattttttttgaaatttggcgctattttccactcgcttttctttttattctagcaagattgcaggcaataccacaaagtttgtatgaagcagctgaggtggatggagcaagcccgattcaaaaatttatccatattacacttcctcaaattacagcaatcatctcgattttatttatgattaggtttatttggaactttaataaatttgaagatatctttttattaaccggcggggcatcaggtacaagaactttacctattaatgtttatcaacaagggtttgcagtatcagatattggaatgggctctgctgtttcgatagtcattgtgatgttacttcttagtttcatggttatttattttagattaattggaaagagggctaatgaagtttaa

SEQ ID NO: 204650 - DNA, 388 bp, Unknown
  Bacterial polypeptide expressing nucleotide sequence isolated from the Sargasso Sea
ttgaaaattttccaaatgcctcaaaagataaagaaaggtagaccacttgttggagctgcggttggggtaaaaggtgactttttagatagaactgaagcattacttggtgctggtgcagatgcaattgtagttgatattgcgcacggtcacagcgaaaatgcaatcagtacagtaaaaaatattaaaaaagcatttcctgattgtgaactaattgctggaaatgtagcgacagctcaaggtactgaagatttgataaaagctggagttgatgcagttaaagttggtgttggttcgggttcaatttgtattacacgagtcattaccggttctggtgtgccccaattaactgctgtaatggattgtgctgaaattggcaaacagatatgat

SEQ ID NO: 204651 - DNA, 505 bp, Unknown
  Bacterial polypeptide expressing nucleotide sequence isolated from the Sargasso Sea
tatggaaaaggttcttacagaagcattaacttttgacgatgtattggtattgccaatgcactctgacgtcctaccaaaagaagtttctcttaaatcaaaattcactaaaaacattagtttaaatttacctttctgttctgctgctatggatacggtcactgaatctaaaatggcaattgcattagcatctttgggaggtataggaataattcataagaataacactcctgaagagcaagcaattcaagttcgacaagtaaagaaattcgaaagcggtatagttcgagacccaattagcattagatcaaacaatacaattggagagctcaaacagcttacttcagaattaaagatatcaggtatgccagttgttgatgatgatgaattaaaaggaattgtaacaggcagagattttagatatgccagagatatggaacagactgtttcagaaattatgactccaagagaaaaattaatcacagtcaaagaaggggaaacccaggat

SEQ ID NO: 204652 - DNA, 517 bp, Unknown
  Bacterial polypeptide expressing nucleotide sequence isolated from the Sargasso Sea
atggacaaagtaaaatcaaaagcattcacattcgatgacgtgctactcttacctcgttatagcaactttgtgcctagtgaggcagatacagaaacaagacttactaaaagtattaaaataaaaatgcctttaatttctgctgcgatggatacagtaacagaatcaaggatggctattgccttggccgaagctggtggactaggaataattcataaaaacaattctattgaagagcaagctgctattgtaaaggctgttaaaaagcatgaaagcggtatagttagagacccaaccacaattcgatcttcaaaaacaattggtgaattaaaacaattaactgctgaattaagtatttctggaatgccagtagttgatgatggggatttaaaaggtattgttaccagtagagattttaggtatgcagatgatatggatgcagatgtagcttcaatcatgactcctttagataaattagttactgttagtgaaggaacatctcaagatgaagtaaagaaat

SEQ ID NO: 204653 - DNA, 657 bp, Unknown
  Bacterial polypeptide expressing nucleotide sequence isolated from the Sargasso Sea
tatggaaaaggttcttacagaagcattaacttttgacgatgtattggtattgccaatgcactctgacgtcctacctaaagaagtttctcttaaatcaaaattcactaaaaacattagtttaaatttacctttctgttctgctgctatggatacggtcactgaatctaaaatggcaattgcattagcatctttgggaggtataggaataattcataagaataacactcctgaagagcaagcaattcaagttcgacaagtaaagaaattcgaaagcggtatagttcgagacccaattagcattagatcaaacaatacaattggagagctcaaacagcttacttcagaattaaagatatcaggtatgccagttgttgatgatgatgaattaaaaggaattgtaacaggcagagattttagatatgccagagatatggaacagactgtttcagaaatcatgactccaagagaaaaattaatcacagtcaaagaaggggaaacccaggatgttgttaaatcattaatgtataagcatagaattgaaaaaattcttgttcttgatgataaagataagttagttggcttaatgacaatgaaagatattgaaaaatcaattgattatcctttagcttctagagattcagaaggcagattaattgt

SEQ ID NO: 204654 - DNA, 832 bp, Unknown
  Bacterial polypeptide expressing nucleotide sequence isolated from the Sargasso Sea
tttgacaataagagaaggatttacttttgacgatgttctccttgtacccaaattttcagacattactacccgctcacaaactgatctatccacaaacctgtcacgaaatattaaactcaatattcccctagttagtgcaaatatggatactgtaactgagtctattatggctacgacaatggctagacaaggaggaatcggaatcattcatagatttttaacaattgaagaagaagttaatcagatcctaaaagtaaaacgttctggtagtgtgatgattgataatccatatcaaatttctagtgaaaaatccattgaacaggctattgacttaatgggtgaaaaagaagtttctggattattggtagtagattctgactctaaactagttggtattcttactgaacgtgatgttctttttgaatctctagattctaaaaaatcagtatctgaattaatgacaaaagatgtaatctctgctactgaaaatacttcgttagaagaagcaaaagatatacttaaaaaacaaagaattgaaaaattacctcttttgaatgataaaaaacagattgttggattatacactactcaagatataatgaatattgagaattttccaaatgcctctaaagataagaaaggtagacctcttgtaggtgctgcagtaggggtaaaaggtgacttcttagatagaactgaagcgttgctaacagctggtgcagatgctattgttgtagatattgcacatggtcacagtgaaaatgctatcactactgtaaagaacataaaaaaagcatttcctgattgtgaattgatagctgggtatgtagcg

SEQ ID NO: 204655 - DNA, 712 bp, Unknown
  Bacterial polypeptide expressing nucleotide sequence isolated from the Sargasso Sea
aatgactactttttactttactttttttggaacacttggagctattttacttggcatatttgctgcccaacttgtaaatcaaaaattttatggaagaacttttatgcgaagtatactgctttttccttatgtaggtcccgtggttgctttggcttatacttggactttactattagatcctaatagcggtacaataaattctcttcttgttaattatggagtaatcgaaaaacctataaatttgcttggacaaaagtatttaattattaatattttaggatttgagtttaaacttagattagcattaactacggttatattttttgagatttggcgatatttccctttagcctttttatttatattagctagactacaagccattcctagggatctttatgaggcagcggatgtagatggtgctgggccatttagaaaattcttttatattactcttccacaaattacagcgattttatcaatattattcatgattagatttatttggaactttaataaatttgaagatatatttttattaacaggcggtgcttcgggtactttaacgttaccaataagtgtgtatcaacaaggatttgcaatatcaaatattggcatgggttcagcagtttcaatagtaatagtattattattaataacttttatgattatttatttcaaattaattggaaaaaaggcaaatgaaatttaa

SEQ ID NO: 204656 - DNA, 1972 bp, Unknown
  Bacterial polypeptide expressing nucleotide sequence isolated from the Sargasso Sea
ttgggtcaaccgcgcagctatccatccagcggactgatgtccatcctctcaaaggacgacaactacgagttccatctgaagcccaacggcacgattaactggtggtggcagaccaccacaggggccacacgagagtttgatagcacctcgagtgttgcgcttggtcaatggagccacgtgctgatccactatacggccagtgagcagcgcatctacatcaacggtaccccggccggaacggcaaacctctccggtatgccaagagccaacgtcgatccattgcagctgggctgggatcagatcgccggtcgtcatttcgacggcgatctggacgaactccgaatctacaagggcgcgctcagccacgagcagatcacagccttggtgaatgaacgccacccctgtgaaaccgaactgcagtgctatagcaacttcttggagcccagtactttcgcctccaactgggcggtgtccagcagagggctggcccacttcgtaccgcagttggtggacggccgcctgcgcctgaccagcaacgcaggcaacgtggcgaccgctgcagccttgcaacgcctctttccagccgaagggcagttcattcaggtttcctttcgccactatgcctacgacggtaacggcgcggacggcattgcgatgatcctttcggacgcatcggtcacgcctcaacccgggggctatggtggatccctaggctatgcgcagctcaacggccagagcgggtttgccggcggttggttaggcgtggcgatagacgagtatggaaatttctctacgcatacggaggggcgtgtcggtgggctgggcagggatccggtccccgatacggtgtctgtgaggggcccagggacaggaataattggctatgaatacctgactggtactgcttctgcgcttgcccctgaaatcgacgcaactaacagccggtatcccgcgcccggccatgtctatcgcatcaccatagatggtcgcaccacgaatcaggccaggctaactgtggagcgcgataccggctcgggattccgggtgctgccgaatttggatgcggtagatgtgctgagcctgaacgggcagacggcactgccgcagaacctatacctgtctttcaccgggtccacaggggggcagaacaacattcacgagattgaagagctggaggtgtgtgcggccgacatccgtccgttgaccgcacgcatccatcacttcgaactcaattacgcgcccactgcgctgacctgtagcccgcatgccgtgacgattcgggcttgcatggacgacgcctgctcggcgacctatcaggagcccgtgagcgccacattgcagccggtgggcgactggaccgcaggtaatccagtgagattttccggtggcagcaccatcctccatctccgctcgaacaactcaggtaccgtgcaactcggtgtgtcggagtccaccccgcaaactcagtcattcagccaaaccgtttgctcgaccgccaattgcgaagtggtcttcgctgacagcggattcgtcttcgatgtgcccaacatgatcgcagcgcgccctgagagcggaatcgcgttgcaggcggtcaagaaagacgaccgcacgcaggcctgcgttccgggcttcgacgatgggggcaagcgaacgctgcagttcagttcgtcttacgtgaatcccgataccggcacgcggcaagtagtggtcaacggcacaccggtcggtgccagccctacagatatcgaactgacgttcgacagcgaggcgcgtgcttcgttggaggtcagctacgccgacgccgggctgatcgacctgttcgcccgctatgcgcctgccgctggtgaggaaaagggcctggtgatgaccggttccgaccagttctccagccgaccatacggcctgtgcctgctaaccgaagccgatcaggcggatggcggcgctgcgtgcgaatcggacgatctcgattgcc

SEQ ID NO: 204657 - DNA, 492 bp, Unknown
  Bacterial polypeptide expressing nucleotide sequence isolated from the Sargasso Sea
ttatcgaaaaacctattaatttactaggacaaaagtatttaattttcaacattttagggtttgatttaaaacttagattagcattgaccacagttatattttttgaaatctggcgatactttccattagctttcttatttatattagcaagattacaagccattcctaaggatctttatgaagctgctgacgtagacggcgctggtccttttaaaaaatttttttatatcacacttccacaaattacagcaattttatctattttatttatgattagatttatttggaatttcaacaaatttgaagatatttttttattaacaggaggtgcttcagggacgttaactttaccaataagtgtttatcaacaaggatttgctgtatcaaatattggaatgggctcagcagtctctatagtaatcgtattattattaataacttttatgattatttattttagattaattggaaaaaaggctaatgaaatttaaa

SEQ ID NO: 204658 - DNA, 681 bp, Unknown
  Bacterial polypeptide expressing nucleotide sequence isolated from the Sargasso Sea
tatggaaaaggttcttacagaagcattaacttttgacgatgtattggtattgccaatgcactctgacgtcctacctaaagaagtttctcttaaatcaaaattcactaaaaacattagtttaaatttacctttctgttctgctgctatggatacggtcactgaatctaaaatggcaattgcattagcatctttgggaggtataggaataattcataagaataacactcctgaagagcaagcaattcaagttcgacaagtaaagaaattcgaaagcggtatagttcgagacccaattagcattagatcaaacaatacaattggagagctcaaacagcttacttcagaattaaagatatcaggtatgccagttgttgatgatgatgaattaaaaggaattgtaacaggcagagattttagatatgccagagatatggaacagactgtttcagaaatcatgactccaagagaaaaattaatcacagtcaaagaaggggaaacccaggatgttgttaaatcattaatgtataagcatagaattgaaaaaattcttgttcttgatgataaagataagttagttggcttaatgacaatgaaagatattgaaaaatcaattgattatcctttagcttctagagattcagaaggcagattaattgttggggcagctataggtgtaggcaa

SEQ ID NO: 204659 - DNA, 1261 bp, Unknown
  Bacterial polypeptide expressing nucleotide sequence isolated from the Sargasso Sea
atgagtgatactttatctaaaatagaaaaaagaactgcatatacattacttttaccagcagtttttttagttttttctataatattatttcctattttcgcaaatatttggattagctttaaagaagttagtttaaaagatattagaattccagaaccaagggcaaaaaaaattgtaaaaagcatatcagataataattctgaattaaaaattgtttataaattaagaaatagctctttaattcaaaaaatatcagatgttgaatttaaggataaacttccgagcaatgtaatacctgtagatctagattctagatgtgaatttaaatcaaagataattaaatgtcagtttggtgaatggaaagctaaatatagagaaaattttgaggtattaattaaagatgaaaataataatgaaatagataaagaagtaattaaatctcaaaaaccgtctttaagtggaaaagctgacaacattcttctaactacaaattttacattaaagaacttcaagaaagttttttatgaaaatgattttcttgatttacttttaactacattttacttcactttttttggtacaattggagcaatattctttggaattttagctgcgcagctagttaatcaaaatttttatggcagatcatttatgagaagtattttgctttttccatatgttggacctgtggtagctttagcttacacttggactttattacttgatccaaatagcggtacttttaatgctttgatggtgaattttaatattttcgatgaaccaattaatttactgggtcaaaaatatatagtgatgaacgtttttggctttgaattaaaattaagattagctttaaccacagttatattttttgagatttggcgatattttcctctagcttttttatttattcttgcgaggctgcaagctgtacctaaggatttatatgaagctgcagaggttgatggagcagggccacttaaaaagtttgtacacattactcttccacaaataacagcaatcatatcaattttatttatgattagatttatttggaattttaacaaattcgaggatatttttttattaactggcggtgcatctgggactaggacattaccaataaatgtttaccaacaaggttttgcaatatcagatataggcatgggatctgctgtctctatagtaatagtcttattacttataatttttatgtttatttattttaaattaattggaagaaaggcaaatgaaatttaag

SEQ ID NO: 204660 - DNA, 1078 bp, Unknown
  Bacterial polypeptide expressing nucleotide sequence isolated from the Sargasso Sea
tatggttcccataaaagaagcacttacctttgatgatgttacattagctccaaagtattcagaaatattaccttctgatgcagacactagtgtatctttaacaaagcatttgaaacttaaaattccacttttatcatctgcaatggatactgtcacagagagcagaatggcaatagctatagctaaagctgggggtattggagtaattcacagaaaccttgatataaaaaaacaagtatcagagataaaaaaagtaaaaaaacaaaaactaattgttggagcagctgtaggtgcagcaccgaatgaatttattagagctaaagaaataattaaagaaggtgtagatttaatcgtagtagacacagcacatggccatacaaagaaagttgccgaaataatcaaatatataaaaaaaataaaaactaataaaattgctttatgtgcgggaaatattgcgacacctgaagctgcaaaattcctaataaaattaggagtagatataattaaaattggtatagggccaggttctatttgtacaacaagactggttgctggaataggagttcctcaattaagcgcaattttagctgtaagaagtggtttaaaaaataaaaatgttaaaataatttcagatggtggaataaaatattctggtgatttagcaaaagcttttgctgcaggagctgatgctgtaatgatcggttcgttatttgcaggtacaaacgaaactccagggaaattaattaaaaaaaatggacagcttttcaaaagttttagaggcatgggttctgttggagctatgaacaaagggtcagctgatagatactttcaaaaaaaacaaaaagactcctcaaaatatgtaccagaaggtgttgaaggttttgttaaatataaaggagatgtggggagtattatttataaattaattggtggattaaaatcttctatgggctatcttggatcaaaaacaatcattaaactaagaaataaaccgcaatttgtgaaaattacaaaagctggattttacgaaagtatggttcataatgtagatgtggtaaaaaacgatagtaaatattaa

SEQ ID NO: 204661 - DNA, 394 bp, Unknown
  Bacterial polypeptide expressing nucleotide sequence isolated from the Sargasso Sea
aatgtttgagatttggagatattttcccctagccttcttgtttattcttgcgagattgcaggcggtacccaaagatttgtatgaagctgctgaggtggatggtgctggtccactaagaaaatttattaatattactctgccacagataacagcaattttatctattttatttatgattaggtttatttggaattttaataaatttgaagacatttttcttttaaccgggggtgcatcaggaacaagaactttgccaataaatgtttaccaacaaggttttgctgtttctaacataggaatggggtcagcggtttcaattgttatagttatgttattaataatttttatgattatttatttcaaattaattgggaagcgtgcaaatgagatataa

SEQ ID NO: 204662 - DNA, 320 bp, Unknown
  Bacterial polypeptide expressing nucleotide sequence isolated from the Sargasso Sea
aacttacagaggaatgggctctattggagcaatgagtgaaagaaatgatacaaacagatactctcaagatggcataagcaatgaaaagatggttcccgagggagttgagggaagagtgccgtttaagggttgggttgtaaatgtaattgatcaattgattggaggtataagacagagcatgggatatgttggatgtaaaacaattgaggatatgcatcaagagactcaatttgttgagattacaaacgctggaattactgaaagtcacgttcacgatgtgatgatcacaaaagaagctccaaattaccaaagaagctaac

SEQ ID NO: 204663 - DNA, 781 bp, Unknown
  Bacterial polypeptide expressing nucleotide sequence isolated from the Sargasso Sea
ctgactacaaattttaccttagaaaattttaaaaaagttttttatgaaaataattttgttgaattacttttaacaacattttactttactttttttggcactgtaggtgctattatctttggaattttagcagctcaattagtaaatcaaaatattcaaggtcgaacatacatgcgaggtattttactttttccttatgttggtcctgtggttgccttagcttatacttggacattattgttagatccaaatagtggaacattgaatacactattagttaattttaatattatagagacaccaataaatttattaggccaaaaatatataacaattagtattttaggttttgagtttaaactaaggcttgctttaactactgtaatattttttgagatttggcgttattttcctttagcttttctatttattttagcaagattacaagcaatacctcaaagtttgtatgaagcagcggaggtggatggagcaagtccaatacaaaaatttatccatatcaccctgcctcaaattacagcaatcatttcaattttatttatgattaggtttatttggaactttaataaatttgaggatatctttttattaacgggaggtgcatcaggaacaagaacactccccattaatgtttaccagcaagggtttgcggtatcagatattgggatgggttctgctgtttcaatagtaattgtaatgttacttcttagttttatggttatctattttagattaattggaaagagagctaatgaagtttaaa

SEQ ID NO: 204664 - DNA, 538 bp, Unknown
  Bacterial polypeptide expressing nucleotide sequence isolated from the Sargasso Sea
atggttcctataaaagaagcacttacctttgatgatgttactttagttccaaagtactctgaaatattaccctcagaagttgatacgagtataaaattaacagagtcattaaaacttcaaattccacttttaacatcagcaatggatacagtaactgaaagcaaaatggccatagctattgcaaggtctggtggattaggaataatacacagaaatttagatatcaaaaaacaagttcttgaagttaaaaaggtaaaaaaacaaaagttactagtaggtgctgctgttggggcagggcctattgaattcaaaagagctggagcacttttaaaagaaaaattagatatgattgttgtagatactgctcacgggcacactaagaaagtttccgaaataattagatttattaaaaaaaataaaaacaaaaaaacagccttatgtgctggaaatattgcaacaccggatgcagctaaatttttacttaaattgggtgtagatataattaaggttgggattggtccaggttcaatctgcacaa

SEQ ID NO: 204665 - DNA, 988 bp, Unknown
  Bacterial polypeptide expressing nucleotide sequence isolated from the Sargasso Sea
taaatttccaaaaaatatttcacctattgatcttgatccaagatgtttttttaaatctaaaaagattatttgtgattttggaaactgggaggcaaagtatagagaaaactttgaagtaataataaaaaatactaatgatgaaaaaattgataaaaaaataataaaatcacgaaagccaatattaagagggacagcaaacaatccattactgactacaaattttacattaaaaaattttaaaaaagttttttatgaaaataattttgttgaattgctttcaacgacattttacttcactttttttggcactgtaggtgcaattatctttggaattttagcagcgcaattagttaatcaaaaaattcaaggtcgaacatatatgcgaggtattttactttttccttatgtaggtcctgtagttgctttagcttatacttggactttattgttagatccaaatagtggaactttaaacgcattattggttaattttaatattatagataagccaataaatttattgggtcaaaagtatataacaatgagtattttaggttttgaatttaaattaaggttagctttaaccacagtgatattttttgaaatttggcgctattttccattagcttttttatttatcttagcaagactacaagctattccacaaactttgtacgaagcagccgaagtagatggagcaagtccaatacaaaaatttatatatattacgctacctcaaattacagcaataatttctattttatttatgattagatttatttggaactttaataaatttgaagatatttttttattaacgggtggagcatcagggacaagaacattaccaattaatgtttaccaacaaggttttgctgtatcagatattgggatgggctctgcagtttcgatagttatagtgatgttacttatctcttttatggttatttattttagattgattggaaaaaaagcaaatgaaatttag

SEQ ID NO: 204666 - DNA, 1099 bp, Unknown
  Bacterial polypeptide expressing nucleotide sequence isolated from the Sargasso Sea
gtaaaaaaaattgtaaaaaatatacaagatagcaattctgaattaaaaattatttataaattaagaaatagttctttaatccaagatattagagaagttaaattttcagataaattaccaaaaaatattgaaccagttaatttggacagaagatgtgaatttaagtcacaaaaaattaaatgtttttttggaaattgggaggcaggctatcgtgaaaatttggaaatttttgtaaaagatgtgaataacaatgctattaacagtaagtatattaaatctagtaagccagatttgaatggaaaatcaaataatattttattgactactgattttactctcaaaaattttaaaaatgttttcataaataacaattttgttgagcttttaatgacgactttttactttactttttttggaacacttggagctattttacttggcatattcgctgcccaacttgtaaatcaaaaattttatggaagaacttttatgcgaagtatactgctttttccctatgtaggacctgtggttgctttggcttatacctggactttacttttagatcctaatagcggtacgataaattctcttcttgttaattacggagtcattgaaaaacctataaatttacttggacaaaagtatttaatcattaatattttaggatttgagttgaaacttagattagcattgaccacagttatattttttgagatttggcgatattttcctttagcttttttatttatattagctagactacaagctattccaaaggatctttatgaggctgcggatgtagatggtgctgggccatttagaaaattcttttatattactcttccacaaattacagcgattttatcaatattattcatgattagatttatttggaacttcaataaatttgaagatatatttttattaacaggcggtgcttcgggtactttaacgttaccaataagtgtgtatcagcaaggatttgcagtatcaaatattggcatgggctcagcggtttcaatagtaatcgtattattattaataacttttatgattatttattttaaattaattggaaaaaaggcaaatgaaatttaaa

SEQ ID NO: 204667 - DNA, 958 bp, Unknown
  Bacterial polypeptide expressing nucleotide sequence isolated from the Sargasso Sea
ttggataaaagatgcgaattcaagtcacaaaaagttaaatgcttttttggaaattgggaagcaggttatcgtgaaaattttgaaatttttgtaaaagaggtaaataacgatgctattaataaaaatgatgtaaaatcttataatccagatttgaatggaaaatcaaataatatcttattgactacagactttactcttaaaaattttaaaaatgttttcataaataataatttttttgagcttttaatgacaactttttactttactttttttggaacaattggagctattttacttggcatatttgctgcccaacttgtaaatcaaaaattttatgggagaacttttatgcgaagtatactgctttttccttatgtaggccctgtggttgcattggcttatacttggactttactcttagatcctaatagcggtacaataaattctcttctagttaattatggagtcatcgaaaaacctataaatttacttggacaaaagtatttaattattagtattttaggatttgagtttaaacttagattagcattaactacggttatattttttgagatttggcgatatttccctttagcctttttatttatattagctagactacaagctattcctaaggatctttatgaagcagcggatgtagatggcgctgggccatttagaaaattcttttatattactcttccacaaattacagcgattttatcaatattattcatgattagatttatttggaattttaataaatttgaagatatatttttgttaacaggcggtgcttcgggtactttaacgttaccaataagtgtataccaacaaggatttgcaatatcaaatattggtatgggctcagcagtttcaatagtaatcgtattattattaataacttttatgattatttatttcaaattaattggaaaaaaggcaaatgaaatttaaa

SEQ ID NO: 204668 - DNA, 1261 bp, Unknown
  Bacterial polypeptide expressing nucleotide sequence isolated from the Sargasso Sea
tatgagtgattcattatcaaaattagaaaaaaaaactgcttacactttagttttacctgcagtcctcttagtttttgcaattgtattatttcctatatttgcaaatgtgtggatcagttttaaagacattgaattaaaagacatcagaattccagaaccaagagcaaaaaaaattgttaaatcaatttctgaaaatgaatcagaattaaaagtggtttataaattacgaaatagttcattaatacaggaaataagaaatgttcaattccaagataaatttccaaaaaatatttcacctattgatcttgatccaagatgtaattttaaatctaaaaagatcatttgtgattttggaaactgggaggcaaagtacagagaaaactttgaagtaataataaaaaatactaatgatgaaagaattgataaaaaaataataaaatctcgaaagccaatattaagcgggacagcaaacaatccattactgactacaaattttacattaaaaaattttaaaaaagtcttttatgaaaataattttgttgagttgcttttaacaacattttacttcactttttttggcactgtaggtgcaattatctttggaatattagcagcgcaattagttaatcaaaatattcaaggtcgaacatatatgcgaggtattttactttttccttatgtaggtcctgtagttgctttagcttatacttggactttattattagatccaaatagtggaactttaaacgcattattagttaattttaatattatagagaagccaataaatttattgggccaaaagtacataacaatgagtattttaggttttgaatttaaattaaggctagctttaactacagttatattttttgaaatttggcgttattttcctctagcctttctttttattttagcaagattgcaagcaataccgcaaagtttgtatgaagcagctgatgtggatggagcaagtccaattcaaaaatttatccatatcacactgcctcaaattacagccatcatttcaattttatttatgattaggtttatttggaactttaacaaatttgaagatatttttttattaaccggtggtgcatcaggaacaagaactttacctattaatgtttatcaacaagggtttgcggtatcagatattgggatgggttctgctgtttcaattgttattgtaatgttgcttcttagtttcatgattatttattttagattaattggaagaaaagcaaatgaagattaa

SEQ ID NO: 204669 - DNA, 519 bp, Unknown
  Bacterial polypeptide expressing nucleotide sequence isolated from the Sargasso Sea
aatggtagcaagatcacatcaatcgagatctaaagtattttccgatgaagctctagcgtttgatgacattctacttgttccagcttattccgatatacttccagtcaacgttgatttatctacccagcttaccagagagataggccttaaaatccctattttatctgctgcgatggatacagtgactgagtcacaaatggcgattagtctagcaagcgagggcggggttggtattatccataaaaatttatctgttgaagatcaggcaaagcaagtaaggtttgtaaaaaaatatgagagtggagtgattaatgaccccataactgcatcggccgaatctaccgtacaagagataaataatattactgaaaaatatggaatttctggtgtaccaatcgtagataaagacaagctaattgggattgtcacaaatagagatctaagatttgttgagaatatcaacactaaagtgacatccataatgacacctaaagaaagactggtgactgtcaatgaaaa

SEQ ID NO: 204670 - DNA, 973 bp, Unknown
  Bacterial polypeptide expressing nucleotide sequence isolated from the Sargasso Sea
aaaaagcgtaacattcgatgacgtattacttttaccaagctacagtgactttctgcccagtgatgcaaatactgaatcaaaactctctaaaaacatctcactgaaaatacctttgatttctgcagccatggatactgttacagaatcaagtatggctattgcacttgcagaggcaggaggtataggaattattcacaaaaataattcaattaaagaacaggctagtcttgtgaggtctgtaaaaaaatatgaaagcggtattgtaagggacccagtcacaataagttcaaagaaatcaattggagagttaaaacaactgacatctgaactaagcatttcaggaatgccagttgttgatgacggtgaattaaagggaatcgttacaagtagagattttcgttatgcggaaaatatggaatcagatgtttctactattatgacgccgctagaaaagctggtaacagtaaaagagggagtttctcaaacagaagtaatgcaattaatgtataaaaatagaattgaaaaagttcttgttctagatgataaggacaagttatctggccttgtaacaatgagagacattgaaaataccgctaaaaaccctgatgccactaaagataattttggtagattaatagttggagcagccttgggaactgataaagatacttttgatagagccgaagcattatttcatgagggtgtagatgtcttagtaatagatagcgcacacggccactctaaaaatgttattgaaaccatcaaagcagttaaacaaaaatttccaagcgttgatgttattggaggcaatattgcgactgcagatgcagctatggagttagtcaaagcaggagcagatgcagtgaaggttggaatgggtccaggctcaatttgtaccacaagaattatcgcaggtattggtgtaccacaaatttcagcgatatttgatgtaagtacagctctaaaaaatact

SEQ ID NO: 204671 - DNA, 595 bp, Unknown
  Bacterial polypeptide expressing nucleotide sequence isolated from the Sargasso Sea
tatggatcctattaaagaagcacttactttcgatgatgtcacattagcacccaggtattctgagattttgccatcgcaagttgacacatctacttatttaagaaatgattttaaaattgatatacccttattgtcatcagcaatggatacagtgacagagtctaaaatggctatcgcattagctagagcaggtggaattggtattatacatagaaattttaccattgataagcaagtaagggaaataagaaaagtcaaatctaaaaattataaagtaggtgcagctgtaggcgctggggatttagagtcaaaaagagctttagcaataattaaagaaaaaattgatatgattgtagtagatactgcgcacggtcatacaaaaaaagtaaaagatataataaaaattataaaaaaaaataaaaataaaaaaacactcttatgcgcaggaaatattgctactgcggaggctgcaaattttttggccaatctaggtgtagacataattaaagttggcattggtccaggttctatctgcacgacaagacttgttgcaggaataggtgttccacaattaagtgcaattattaaatgttaa

SEQ ID NO: 204672 - DNA, 482 bp, Unknown
  Bacterial polypeptide expressing nucleotide sequence isolated from the Sargasso Sea
catggataaattaaaacaaaaagcgttaacattcgatgacgtattacttttaccaagctacagtgactttctgcccagtgatgcaaatactgaatcaaaactctctaaaaacatctcactgaaaatacctttgatttctgcagccatggatactgttacagaatcaagtatggctattgcacttgcagaggcaggaggtataggaattattcacaaaaataattcaattaaagaacaggctagtcttgtgaggtctgtaaaaaaatatgaaagcggtattgtaagggacccagtcacaataagttcaaagaaatcaattggagagttaaaacaactgacatctgaactaagcatttcaggaatgccagttgttgatgacggtgaattaaagggaatcgttacaagtagagattttcgttatgcggaaaatatggaatcagatgtttctactattatgacgccgctagaaaagctagtaacag

SEQ ID NO: 204673 - DNA, 1032 bp, Unknown
  Bacterial polypeptide expressing nucleotide sequence isolated from the Sargasso Sea
ctggatctatcaacaaaccttttctcgaaatattaaactcaacattcctttagttagtgcaaatatggatactgtaactgagtctaccatggcaacaacaatggctagacaaggaggaattggaataattcatagatttttgaccatagaagaagaagctgaacaagttctcaaagtcaaacgctctggaagtgtaatgattgataatccgtatcaaatattttctgaaaaatctgttgaagaagctattgatctaatgaatgaaaaagaagtatcaggattacttgtggttgattctgattctaaacttattggtgtcttaactgagcgtgatgtactttttgaatcaatcaattcaaaaaaatctgtatccgaattaatgactaaagatgtaatttcttcaaatgaaaatacaactttagatgaagcaaaagatattctaaaaagtcatagaattgaaaaattacctcttgtaaatgataaaaatcacattgttggtctttataccactcaggatattttgaatattgaaaatttcccaaatgcgtcaaaagataagaagggcagaccacttgttggagccgcagttggagttaaaggtgactttttagatagaactgaagcattacttggtgctggtgcagatgcaattgtagtggacattgcacatggtcacagtgaaaatgcaatcagtactgttaaaaatattaaaaaagcatttcctgattgtgaactaattgctggaaatgtagcgacagctcaaggtactgaagatttgattaaagctggagttgatgcagttaaagttggtgttggttcgggttcaatttgtattacacgagtcattactggttctggtgtgcctcaattaactgctgtaatggattgtgctgaaattggtaaacaatatgatattccaattatttctgacggtggaacaagaacatcaggtgacgcaactaaagcactagctgctggtgcatcttctgtttatgtaggaagtatgttgggtggaactgatgaaagtcctgg

SEQ ID NO: 204674 - DNA, 564 bp, Unknown
  Bacterial polypeptide expressing nucleotide sequence isolated from the Sargasso Sea
catggatactattaaagaagctttaacatttgatgatgttactttagctccaaattactcagaaattctgcctagtgaagtaagcacttcagtcaatttgacagatcaattaaagatagaaataccgcttttatcatctgcaatggacactgtcacagagtcatcaatgagtgttgcaatggcaaaagctggaggattaggaataattcatagaaatttaaatattgaggaacaaatcaaggaaattagaaaagtaaaatcaaaaaataaactcgtaggtgcagcagttggagcaagtgaaaaagaattaaaaagagctgaaaaaatattgaaagagaatcttgatataatagttatagatactgcacatggtcataccaaaaaagttggagatgcaataaaaaagatcaaaaaattacgtccaaaaaaaacagcaatttgtgctggaaatatagctactgaggaaggtgcaaggtttttagttggattaggtgtagatattataaaagttgggattggtccaggatctatttgcacaacaagacttgtagcaggaattggagt

SEQ ID NO: 204675 - DNA, 874 bp, Unknown
  Bacterial polypeptide expressing nucleotide sequence isolated from the Sargasso Sea
ttaactgagcgtgatgtactttttgaatcaatcaattcaaaaaaacctgtgtctgaattaatgactaatgatgttatttcctcaaatgaaaataccacattagacgaagcaaaagatatcctaaaaagtaacagaattgaaaaactacctcttgtaaatgacaaaaaccaaattgttggtctttacactactcaagacattcttaatattgaaaattttccaaatgcatcaaaagataagaagggtagaccacttgttggagctgctgttggagttaaaggtgactttttagatagaactgaagcattacttggagctggtgcagatgcaattgtagttgatattgcgcatggtcacagcgaaaatgcaatctctactgtaaaaaatattaaaaaagcatttcctgactgtgaattgattgctggaaatgtggcaactgctcacggtacagaggatttgataaaagctggagttgatgctgttaaagttggtgttggttcgggttcaatttgtatcacacgagttattaccggttctggtgtgcctcaattaacggctgtaatggattgtgctgagattggtaaaaaatacgacattccaattatttctgatggtggaacaagaacctctggtgatgcaactaaagcactagctgctggtgcatcgtctgtaatgttaggaagtatgttgggtggaaccgatgaaagtcctggttcaacaatcacaaagaatggaaaaagatacaagttttacagtggaatggcttctcttggcgctgcacgaagaagaaaatcaaaagaagctacacaaagtgatagtggggatgatctaaatgattatgttgctgaaggcgtagaagcaatggttccataca

SEQ ID NO: 204676 - DNA, 346 bp, Unknown
  Bacterial polypeptide expressing nucleotide sequence isolated from the Sargasso Sea
catggaaaaattaaaacataaagcgttaacgttcgatgatgtcttactcttaccaagatatagtgattttcttcctagcgaagctgatatagagtcacatctaacaaaaagtatttctttaaaaatgccattgctatctgcagcaatggatactgtaactgagtctaggatggcaatctccttggcagaagctggagggattggcattattcataaaaataattctatagacagccaagctgctgaagtgcgagcggtaaaaaaatatgagagcggaattgtaagagatcctgtaactataaattctcaaaaaacaatttggagaattaagacagctaacaagtga

SEQ ID NO: 204677 - DNA, 623 bp, Unknown
  Bacterial polypeptide expressing nucleotide sequence isolated from the Sargasso Sea
aggaaatatttcaacaatcgatgcggccaaatttttatccaaactaggagtagacgcaattaaagttggcattggaccggggtcaatttgcacaactagacttgttgctggaattggagttcctcagttgagtgcaatcatggctgcaagaaaaggattaggaaaaaaaaaaattatgcttgtcgcagatggtggaattaaattttcaggtgatatatctaaagcgttagcagcaggtgcagatgctgtaatgattggatcactatttgctggaacaaatgagtctccaggaaaaataataaaaaaaaatggaaaatattttaaaagttttagaggcatggggtcagtaggtgcaatgaacaaaggttcagcagacagatattttcaaaaaaaacaaaaagatccatctaagtatgtgcctgagggtgtagaaggcttggtaaaatacaaaggaccaattgaaaaaattgtttatcaattaattggcggcttgaagtcatcaatgggatacttaggatcaaaaaatataaaagatctaagaaataaaccgaagtttgttaaaataacaaaagctggcttttatgaaagtatggtacataatatagatcaagttttaaaataaa

SEQ ID NO: 204678 - DNA, 631 bp, Unknown
  Bacterial polypeptide expressing nucleotide sequence isolated from the Sargasso Sea
atgagaataactaatgaggcgcttacatttgatgacgtcctcctgcggcccgcatattctgacgtcttgcctaaagatgtcgatatcacaacagcactaactaccgatattaaactaaatatcccacttttatctgcggcaatggacacagttacagagtctgcgatgtctattgcattagctcaggaagggggaatgggcattatccacaagaatatgtcaatttctgatcaagccaaagaagttttgaaagtaaagaaatttgagagtggtattgttaaagacccaatcactgtatcttcaaatacaacgatacaagaagtaattgatcttaccaaagcaaagggtatttctggtgtaccggtggttgataataacgaaactgttgggatcgttacacacagagactggcgatatgaaaatgaccttaatgcatcggtttcaaagattatgacaccgaaggaaaagctggttaaggtttcagaagatgcatctgaggaagaggttttatcccttctacataaacatcgaattgagaaagtgctcgtggtcgataatgacttttcacttaaaggcttaattactgccaaagatttccaaaaggctaccgatttccaaatgcatgcaaaga

SEQ ID NO: 204679 - DNA, 520 bp, Unknown
  Bacterial polypeptide expressing nucleotide sequence isolated from the Sargasso Sea
aatgatccgcgatcgaattttcgatggtctgacctttgatgacattcttctggttccgggttatgcagagattcatccatccgaggtttccctgaaaagcaaactgacgctcaaacttgagtgcaacattccccttctcagcgcggcgatggatacggttacggaggctgacacagcgatctgcatggcccaggaaggcggtctcggggtgattcataaaaacctctccattgaggaacaggcgaatcaggtcaatcgagttaaacgctctgaaagcggaatgatcaccaatccgatcaccatcgaaccagaccaaccgatcagcgaagccctgaagctgatggagcgttatcggatttccggagtccctgtcatccgaaggacggaactggtgggcatcctcaccaatcgtgaccttcgcttcgaaccaatcatgaaaacccgtctcgaattgatgacggaggcgggacaactcgtcaccgtgctccgggatcgagatggagcagccaaacgctgctgc

SEQ ID NO: 204680 - DNA, 496 bp, Unknown
  Bacterial polypeptide expressing nucleotide sequence isolated from the Sargasso Sea
gttgcaggagccgggatgccacaaatcacagcaattactgatgtcgcaaatcagcttaagggaactgatacatgcataatctcagacggaggtattcgttattcaggagatatcgcaaaagccatcgcagctggtgctaatagtatcatgctcggcagcctatttgctggaacagaagagtctcccggtgagattgagctgtatcagggcagaagttttaaatcatatcgtggcatgggctcacttggagcaatggctcagcaacatggttccaaagatcgatactttcaaagcgatgttgaagaaccagaaaaactagttcctgaaggcattgagggaagggttccttataaaggaaaactttcaaaaattattgagcagcttgttggcggtttacgtcagtcgatgggatatactggctgcaaagacatcactgagcttcaaactaaaactgagtttgtgagaattactgactcgggaaaaagagaaggacatg

SEQ ID NO: 204681 - DNA, 310 bp, Unknown
  Bacterial polypeptide expressing nucleotide sequence isolated from the Sargasso Sea
catggacaaagtaaaagctaaagcactcactttcgatgatgtacttcttgttccttcctattgcgactttcttccaagccaggcatctgtaaagacatctcttacaagaaatattgatattaatttaccgttattatctgctgcaatggatacagttacagaatatagaatggcaattgctcttgcagaagcaggaggtataggaattcttcacaaaaattgctcgattcaggagcaatcaaatgctgttaggaatgtaaaaaaatatgaaaagtggtgttgtacgcgatccaatcacaataagctctaa

SEQ ID NO: 204682 - DNA, 805 bp, Unknown
  Bacterial polypeptide expressing nucleotide sequence isolated from the Sargasso Sea
attattcatagaaacttgagtataaataaacagtgcaatgaagttaagaaagttaaaaataaaaaacttttagttggggcggctgttggaacatcaaaagaagatattatcagagctaataaattgatagataatggtattgaccttatagttattgatacagctcatggtcatagtaaaaaagtacttttaacattaaaaaaattaaaaaaaattaaaagcaaagtaaaaatatgtgctggaaatatagctacatctgagtctgcaagattactctcaaatgaaggcgccgatatactaaaagttggaattggtccaggatctatatgcacaactagaattgtttcaggcataggtgttccgcaaataagtgcagtaatggatgtaaaagaaggcataaaaaaaaataaaaaaattaaaattatatctgatggaggaataaaatttttaggagatgcagcaaaagctttagctgctggggcagatgctgtaatgatgggatctgtttttgctggaaccgaagaaagtcctggaaaaaaatttaaatataaaaacaaaatatataagtcttttaggggaatgggttcaattggagcaatgatggatggctcagccggaagatactttcaaaaaaactttaaagataaatcaaaatttgtgccagagggggtcgaggggagagtcctttacaaaggaaaagtagaaaaaattatttatcaacttaagggaggattaaaatcatcaatgggttatattggcgcaaagaatattattaatttacaaaaaaaatcaaaatttgtaaaaa

SEQ ID NO: 204683 - DNA, 696 bp, Unknown
  Bacterial polypeptide expressing nucleotide sequence isolated from the Sargasso Sea
aagttgctgagattattaaatatatcaaaaaaattaaaagtaaaaaagtggctctctgtgcaggaaatatcgcaaccccagaagccgcaaagtttttgataaaacttggtgtagatatcataaaagttggaatagggcctggatctatttgcacaacaagattagttgccggtataggagttcctcaattaagtgcaataatatctgtaagaaatggacttaagaacaaaaaagtaaaaattatatctgatgggggaataaaatactcgggggatcttgcaaaagcttttgccgcaggtgccgacgcagtaatgataggttctttatttgcaggtacagacgaaacacctggaaaattaataaaaaaaaatggaaaattttttaaaagttttaggggcatgggatctgttggtgctatgaacaaaggttcagcagacagatactttcaaaaaaaacaaaaagatatttcaaaatatgttcctgagggagtagagggatttgtgaaatacaaaggcggtgttgaaagaattatttataaattaatcggaggtttaaaatcttcaatgggttatctaggttctagtgaaataataaaattaagaaacaatccacattttgttaaaattaccaaggctggattttatgaaagcatggttcataatgttgatgtggttaaaaatgaaagtaaatattaat

SEQ ID NO: 204684 - DNA, 251 bp, Unknown
  Bacterial polypeptide expressing nucleotide sequence isolated from the Sargasso Sea
aactgagagcaataagcatgttcctgagggaatcgaaggaagagttccctacaaaggacctatatcgccaatcatataccagcttgttggcggcttaaaggcttctatgggatacactggttcaaaagatatagtagaatttaaaaagaatgttaagtttgtagaaattacaggagcaggccttaaggaaagccatgtacatgatgtcgatattacaagagagtcaccaaactatccgacaaacatataga

SEQ ID NO: 204685 - DNA, 667 bp, Unknown
  Bacterial polypeptide expressing nucleotide sequence isolated from the Sargasso Sea
atggttcctataaaagaagcactcacctttgacgacgtcacattagcgccaaattactcagaaatattaccctctgaagttgatacaagtgtgtcattaacttctcgacttaaactaaaagtaccacttttatcttcagcaatggacactgttacagagagcaaaatggctatagcaatggcaaaggctggtggtatcggagtaattcatcgtaatcttaatattaaacaacaaattttagaaattaaaaaagtaaaaaaactctctttaaaagttggagcagcaataggtgcttcagaaaaagagtttattagagcaaaagaaattattaaagagggtgttgatcttattgtaattgatactgcacatgggcattcaaaaaaagttggtgacataattaaatacgtaaaaaatataaaaagtaataaaacagccttatgtgcgggtaatatagctactcctgaggcagcaaaattcttaattaaattaggtgttgatattataaaagttggaattggacctggatctatttgcactacaagattggtagctggaattggagtccctcaattgagtgcaattttgtcagtaagaaatggagtaaaaaataaaaaagtgaaaataatttcagatgggggaattaaatactcaggtgatttagcaaaag

SEQ ID NO: 204686 - DNA, 676 bp, Unknown
  Bacterial polypeptide expressing nucleotide sequence isolated from the Sargasso Sea
gttgataaggaaaataaaggataaaaaaactgctttatgtgcaggatatatagcaactccaggggcagctaagtttttattaaaattaggtgtagatatattaaaagttggaataggacctggttcaatttgtacaacacgactaattgcaggcataggtgtaccacagttgagtgcaattctttcagttagaaatggaataaaaaataaaaatgttaagatcattgctgatggaggaattaagtattcaggagatttagcaaaagcatttgctgcaggagctgatgcagtgatgataggatctttatttgctggtagtgatgaggcacctggaaaaataattaaaaaagatggaaaactttttaagagctttagaggaatgggttcagttggcgcaatgaacaaaggatcagcagacaggtattttcaattaaaacaaaaagatatatcaaaatatgttccagaaggagtggagggttatgctaaatataaaggaaatgtaagcgacatcatatacaaactaataggtggattaagatcttctatgggctatttaggatctaaacaaataaaatatttaagagataaaccaaaatttgtaaaaataactaaagcaggtttttatgaaagtatggttcataatgttgatatagtaaaaagtgactcaaaatactaa

SEQ ID NO: 204687 - DNA, 664 bp, Unknown
  Bacterial polypeptide expressing nucleotide sequence isolated from the Sargasso Sea
cagtttattgaaaaagcaaaaaaagttttaaagaaaacccctctcattgttggaaacattgctacaaaaaaagctgcatcagatttaattagtgctggtggtgatgctattaaagtaggtattggaccaggatcaatttgtactacaagagttgtaacaggtgtcggtattcctcaactttcagctgtaatggatacatttcaagttgccaaaaaatttaaaattcctgtgatcgcagatggaggaataaaaacatctgctgatattgcgaaagctatagcaggcggtgcgagtgcctgcatgatagggtctttatttgctggcactgaagaagcaccaggaaaattattaacgattaaaggcaaaaagtttaaatcatatagaggtatgggttctgtaggagcaatgcaaaaaggttcttttgatcgatactcccaagaagaaacaaagaatgcaaaaaaattagtggcagaaggtgttgaagggatggttccatataaaggtaaaatagaagatgtagcctatcaacttgttggtggtttaaaatcttctatgggttatacaggtcataaaacgattaaaaaaatgcaaggcaattgtaaatttgtgtttatttctaaagcaggagcccgcgaaagtaatgtccatgatgtcattatgtaat

SEQ ID NO: 204688 - DNA, 652 bp, Unknown
  Bacterial polypeptide expressing nucleotide sequence isolated from the Sargasso Sea
catgattccttcaaatcaaaaatttatcgaaactggcctaacgtttgacgatgtgcttttagttcccgcatattctgaactattacctaatgaggtaaacctgcattctaaattttctaaaaacttatcaatgaaagtaccaattgtttctgctgcaatggatacagtgacggaaagtaaaatggcaattgctatggcacaagagggtggaattggagtaattcacaaaaacctatcaattgaagatcaaagcaataaggtaaggaaagttaaaagatctgaatctggaatgattttagatccaattactctttccaaaaatgaaactgttaaggatgcattaaactgcatgagtgagtatagcattggtggcattcctattgttgataaagcaggaaaattaattggaattgttacaaatcgtgatttacgttttgaaaaagacatgaacaaaaaactcgacaatgttatgtcttcggaaaatttaattactggctcaaaggaattaacattaaaagaggctgaatcaatcttgcaaaaaagtaaaattgaaaaacttccaattattgacaacaataataaattaatcggattaataacatttcgtgacattcaaaaaataacactcaaactttcatcaaacaaaggatga

SEQ ID NO: 204689 - DNA, 389 bp, Unknown
  Bacterial polypeptide expressing nucleotide sequence isolated from the Sargasso Sea
tggaggcttatttgctggtacagaagaagcacctggaaaagttgagcttttccaaggaagaagttttaaaacgtatcgaggtatgggttctattggcgctataacagaaagacaagacgctaatagatacatgcaagaagatttagatgctgaaaaattagtacctgagggcattgaaggaagagttccatataaaggccttgtcataaatgttataaatcaactaattggaggactgagacaatcaatgggctatattggttgtaaaactattcaagatattcataacaaaagtgagtttgttgaaatcacaaatgcagggatgaccgaaagccacgttcatgatgtaatgattaccaaggaagcaccaaattaccaaagaagttgat

SEQ ID NO: 204690 - DNA, 376 bp, Unknown
  Bacterial polypeptide expressing nucleotide sequence isolated from the Sargasso Sea
atggcccaagttaaagaatatttaacatttgatgacgttctattaaaaccccaagcatcaacaattcttccgaataacgtcgatatttcaacaaatctaacaaaagaaataaaactaaatattcctatcatatcagcagctatggacactgtaacagagtctaaaatggcaatatcaatgtctcaaaatggtggacttggtgtaattcataaaaattacgatattgagacgcaaagttatgaagtaaaaaaggttaaaagatacgaggcagggattgtttataatccaataacaatgagtcctaacaatacaatagaagatgttttaaatgttatggaaaaacaaaatatattctggttttcccagtggtcgataa

SEQ ID NO: 204691 - DNA, 398 bp, Unknown
  Bacterial polypeptide expressing nucleotide sequence isolated from the Sargasso Sea
cgcagtaatggttggctctttacttgcaggaacagatgaaactcctggagaggtatttttgtttcaaggtagatcatacaaatcttatagaggaatggggtctttaggagctatggccagaggatctgctgataggtattttcaagcagaaatagaaactttaaaactagttcctgagggtattgaaggtcaagtaccttacaaaggtccagctcagaacgtaattcatcaattagtaggtggcctaaaatcagctatgggttacactggtaatataaatattaatgaaatgcagcaaaaatgtatttttaaaagaataagtaatgctggtctaaaagaaagtcacgtccatgatgtaactatcactagagaagcgcctaattatcgtccttcttgat

SEQ ID NO: 204692 - DNA, 487 bp, Unknown
  Bacterial polypeptide expressing nucleotide sequence isolated from the Sargasso Sea
gcattatctggtacaggtgttcctgttattgcagatggtggtattcgttataccggagatgtggttaaagcgctagctgctggtgcagattcggtgatgttaggttccatgtttgcaggagtggaagaatctcctggagaaacaattatttatgaaggaagaaaattcaaatcgtatagaggaatgggatctattgaagccatgcaaaaaggatctaaagaccgctattttcaggatgccgaagatgacattagtaaactagtcccagaaggaatttcaggcagagtaccttacaaaggaaatttagtggaagtcatgcatcaaattattggaggattaaaagcaggaatgggttattgtggatcaggaacaattgcaaaattaaaagaaagcgattttgtaagaataacttctgcaggagttagggaatctcatccgcatgatgtaaggatttctcgagaagctcctaactatagtataaaataat

SEQ ID NO: 204693 - DNA, 847 bp, Unknown
  Bacterial polypeptide expressing nucleotide sequence isolated from the Sargasso Sea
taatctgtcaatcgagaaacaggtaaaagaagtcaaaaaggttaaaagaaataaatgtatcgtaggagcagctataggggttggtgaaaaagatcttgatagagcaatagaacttaataaagcgaatgtagacttattaattatagacacagcacacggtcacaccgaaaaagtttctaaaatgatcaataaggttaaaaaaaagattagcagtcgcattctttgtgctggcaatattgcaaccggtaaagcagcaaaatttctagctgataatggggcagatattgtaaaagttggaattggtcctggatctatttgtacaacaagattagttgcaggtattggtgtaccccaattaagtgcgataattgatgtcaaaaaatctttaagggactacaaaactaaaataatttctgatggtggtattaagttttccggagacttagcaaaagctttagctgctggagcagactgtataatgattggatcattattttctggtacaaatgaaagtccaggaaaaataattaaggttaaaggaaagctttataaaaacttcagaggtatgggctcagtaggagcaatgtctgttggatcatcagacagatattatcaaaaaaaatacaaagatatatcaaaatatgttccagaaggtgttgaaggattggtcaagtataaaggccaagtttctaaaattatctataatcttgttgggggattaaagtcttcaatggggtatttaggatcaaaaaaaattaaagatctacaaagaaatggtgaatttgttaaaattacaaaagcaggtttttacgaaagtatggttcataatgttgatcatataaaacaa

SEQ ID NO: 204694 - DNA, 325 bp, Unknown
  Bacterial polypeptide expressing nucleotide sequence isolated from the Sargasso Sea
atcgtatagaggcatgggatctataggcgccatgtccggtgatcaaggttcttcagatcgttattttcaagatagtgctgaagctactgaaaaattagtaccagaaggaattgaaggaagagtgccatataaaggttggttgcaagctgttattcatcaaatgataggtggccttagacaaagcatgggatataccggttcacatgatattgcgactatgagaacaaaacctaaatttgttcaaataacttctgcgggtgttaatgaaagtcacgttcatgatgtaagcgtcaccaaagaggcacctaactacagaatgagctaa

SEQ ID NO: 204695 - DNA, 265 bp, Unknown
  Bacterial polypeptide expressing nucleotide sequence isolated from the Sargasso Sea
atgatccgcgatcgaattttcgatggtctgacctttgatgatattcttctggttccaggttatgcagagattcatccctccgaggtttccctgaaaagcaaactgacgcgcaaacttgagtgcaacattccccttctcagcgctgcgatggatacggttacggaggctgacacagcgatctgcatggcccaggaaggcggtctcggggtaattcataaaaacctctccattgatgaacaggcgaatcaggtcaatcgggttaaac

SEQ ID NO: 204696 - DNA, 458 bp, Unknown
  Bacterial polypeptide expressing nucleotide sequence isolated from the Sargasso Sea
ttctgacggaggaattaaattttctggcgaccttataaaagcaatagcagctggtgcagatgcaataatgatgggatcgatatttgcaggaaccgaagaaagccccggtaaaaaatttaaaattaaaaacaaattatataaagtttatagaggaatggggtctattggagcaatgtcatccgggtcttcacaaagatacttccaaaaaaattataaagataaatcaaaatttgttcctgagggagttgagagccgagtattatataaagggaaagtttcagatataatatatcaattgcaaggaggcttgagatcatcaatgggttatataggcgctcaatatattgacgatgtgattaaaaaatcaaggtttgtgaagataactaaagcaggtttttatgaaagtatggtacatagtgttgaagcaattaaaaatagtgctaattataaattatgaa

SEQ ID NO: 204697 - DNA, 961 bp, Unknown
  Bacterial polypeptide expressing nucleotide sequence isolated from the Sargasso Sea
aatgaaaaagaagtattctggattactagtagttgattctgattctaaacttgttggtgtcttaactgagcgtgatgtactttttgaatcaatcaattcaaaaaaatctgtatctgaattaatgactaaagatgtaatttcttcaaatgaaaataccacattagacgaagcaaaagatattctaaaaagtcatagaattgaaaaactacctcttgtaaatgataaaaatcagattgttggtctttataccactcaggatattttgaatattgaaaatttcccaaatgcgtcaaaagataagaagggcaggccacttgttggagctgcagttggagttaaaggtgactttttagatagaactgaagcattacttggtgctggtgcagatgcaattgtagttgatattgcacatggtcacagcggaaatgcaatctctactgtaaaaaatatcaaaaaagcatttcctgactgtgaattgattgctggaaatgtagcaactgctcaaggtacagaggatttgataaaagctggagttgatgctgttaaagttggtgttggttcgggttcaatttgtatcacgcgagttattaccggttctggtgtgcctcaattaacggctgtaatggattgtgctgagattggtaaaaaatacgacattccaattatttctgatggtggaacaagaacctctggtgatgcaactaaagcactagctgctggtgcatcttctgtaatgttaggaagtatgttgggtggaaccgatgaaagtcctggttcaacaatcacaaagaatggaaaaagatacaagttttacagtggaatggcttctcttggcgctgcacgaagaagaaaatcaaaagaagctacacaaagcgatagtgaagatgatctaaatgattatgttgctgaaggcgtagaagcaatgggttcatacaaaggcactgtcattgatattctcgtt

SEQ ID NO: 204698 - DNA, 509 bp, Unknown
  Bacterial polypeptide expressing nucleotide sequence isolated from the Sargasso Sea
gatgttgcgtattgcaaaccaagctcttacctttgatgacgtccttttagtgcctgatcactctgacgtgcttcctaaagatgtagaattaaagactcgtcttactaaaaatttaaatctcaatatacctcttttgtctgcagccatggacaccgtaactgagtctcgtatgggaattgctttaagtgaattaggaggaattgggattattcataaaaacttttcaatagaggaccaagctattgaagttaagaaggtcaaaaagtacgaaagcggtattgtaagagatccaatcactattaggtctgataacgaagtaggtgagctgatacaactcactaaagagttaaatatttctggaatgccagtcgtagatgacggaaatctagtaggaatagtcactagtagagactttaaatatcaagaaaattttacagctaaagtttctgagatcatgactacaaaagataaattggtcactgccaaagagggagagagtccagatttaa

SEQ ID NO: 204699 - DNA, 493 bp, Unknown
  Bacterial polypeptide expressing nucleotide sequence isolated from the Sargasso Sea
aagaaatcattatataaaaagaaaattaaaattatctcagatggaggtataaaattttcaggagatttagccaaagcattggcagcaggtgcagatgctataatgatgggttcaattttcgctggaactgaggaaagtccaggaacaaaatttaaatataaaaacaaatggtacaaagcttacaggggtatgggttcgataggcgcaatgtctgcaggctcagcagaaagatatttccaaaaaaaacaaaaagataaatcaaaatttgtcgctgaaggtgtagagggaagagtagtttataaaggttttgttaaaaatattatatatcaattacaaggtggattgagatcatcaatggggtatattggatcaaaaaatatagtagacatttataaaaaagcaaaatttgttaaaattacaaaggcaggtttttatgaaagcatggtacatagtgtagagcaaactgacaaagtacttaacttcaaattatgaa

SEQ ID NO: 204700 - DNA, 803 bp, Unknown
  Bacterial polypeptide expressing nucleotide sequence isolated from the Sargasso Sea
ggctaaagagatgatgtcgctatataaaattagcggactacctgttgttgaaaatgaaaaacttatcggaataattactaatagagatattaggtttgaaaccgatgaaactcttcaagtaacagaaagaatgacaacagaaaaacttgttaccgttccacagggaactacgcttgatcaggctaaaaaagttttgcaagaacatagaattgaaaagcttctagttgttgataagactggaagcctcgctggacttataacagttaaagacattcaaaaaaaagaagattttccacatgcgtgtaaagataaaagtggaagattaagggtaggagcagccttaagcgtaactagcgattttcttgagagagctcaagaacttcacttaaaagaggttgatgtaattgttgttgacacagctcatggtcactcagccggagtattaaatcaaattagaaatataaaaaaatctataccggatttgcaaataattggtggaaatattgcaacatctgatggaacaaaagcattgattgatgctggtgttgactgtgttaaagttggtatcggagctggtgcaagttgcacaacaagaatagtagctggaataggagttcctcagctcacagctataatggattgtgttgatgtagcaaaaaaatcaaacattcctgtaattgcagatggtggaatacgttacagcggcgatatatcaaaggctatagctgctggggctgatacagtaatgctgggaagtatattagctggaatggatgaaagccctggagagtttattttatttg

SEQ ID NO: 204701 - DNA, 557 bp, Unknown
  Bacterial polypeptide expressing nucleotide sequence isolated from the Sargasso Sea
ttgctacacctggctgcagcaaaatttttgttaaagcttggggttgatgttattaaagttgggattggacccggatcaatatgtactacaagattagttgcaggtattggtgtcccacaacttagtgcaatactagaagttagaaatggaataaaaaataagaatgtaaaaattatttctgatggtggaataaaatactcaggtgatttagcaaaagcattcgctgctggagcagatgcagttatgatcggttcattatttgcagggacagatgaagcaccaggaaaattaattaggagaaatggtaaactatttaaaaattttagaggcatgggttcagttggtgctatgaacaaaggatctgcagatcgatactttcaatcaaagcaaaaagactcgtctaaatatgttccagaaagagtagaaggatttgcaaaatataaaggcaaagttaataatataatttttaaattaattggtggattaagatcatctatgggatacttaggatcaagacaaattaaatatctaagagataaaccacaatttgttaaaat

SEQ ID NO: 204702 - DNA, 665 bp, Unknown
  Bacterial polypeptide expressing nucleotide sequence isolated from the Sargasso Sea
tatggttcctataaaagaagcacttacctttgatgatgtaacacttgctccaaaatattctgaaataatgccttcagaggcagataccagtattcagcttacaaatcatttaagattaaaaataccactcttatcatcagcaatggacacagttacagaaagtaaaatggcaatagcaatagctaaagcaggtggtttaggcattattcatagaaaccttgatataaaaaaacaaattatagaaattaaaaaagttaaaaaagaaaaattattagtaggtgcagctgttggagctggcccaaaagaacatgaaagagcaaaaaaaatattaaaagaaaatttggacatgattgttgttgatacagcccatggtcataccaaaaaagtttcagaaataattagatttattaaaaagataaaaaagaaaaatactgctctttgtgctggtaatattgcaactccagaagcagctaaatttttacttaaattaggtgtcgacgttattaaagttggaataggaccaggatcaatttgcacaactcgattggttgctggaatcggtgttccacaattgagtgcaattttaaatgttagaaatgggataagaaataaaaatgttaaaattatttctgatggaggtattaaatattctggggatttagcga

SEQ ID NO: 204703 - DNA, 721 bp, Unknown
  Bacterial polypeptide expressing nucleotide sequence isolated from the Sargasso Sea
atggacaaagtaaaagctaaagcactaactttcgatgatgtacttcttgttccttcttattgtgactttcttccaagccaagcatctgtaaagacatctcttacaaaaaatattgatattaatttgccgttgttatctgctgctatggatacagttacggaatatagaatggcaattgcccttgcagaagcgggaggtataggaattctgcataaaaattgttcgatccaagagcaatcaaatgctgtcagaaatgtaaaaaaatatgaaagtggagttgttcgaaatccatccacaataagctctaaacaaacaattggccaattaaagcaactcacaggggagttgaatatatctggtatgcctgtggttgataatggaatggtaaaaggaattgttaccagtagagactttagatatgcggataatatggatggcctggttgagtcgattatgacgcctagtgaaaaattaataaccgtgctcgaaggcacttctcaagaagtagttaaaagaatgatgtatgaaaataggattgaaaaagtccttgtccttgatgaaacagaaaagttaactggtttagtaacaatgaaagatatagaaaagtccgaaaagcatccaaatgctactaaggatgatgcaggccaactaagagttggagcagctataggaactggatctgaaactttagatagagctaagtctctatttgattcaggtg

SEQ ID NO: 204704 - DNA, 793 bp, Unknown
  Bacterial polypeptide expressing nucleotide sequence isolated from the Sargasso Sea
tgtaggggcgtcagataaagaatttaatagagtaaaagaaattattagggaaggagtagacttaattgtagtggatacagcacatggacatactagaaaagttggagaaattattaaatatataaaaaaatttaaaaataataaaattgcattatgcgcaggaaatattgcaacaccggatgctgcgaaatttttaatcaaattaggcgtggacataattaaagttggaattggtccaggctctatttgtactactagattggttgcaggtattggggttccacagcttagtgcgattttgtcagtgagaaatggagttaaaaacaaaaagattaaaataatttctgatggaggaataaaatattctggggatttagcaaaagcatttgctgctggcgcagatgccgtaatgataggatcattatttgctggaacagatgagacgcctggaaaattaataaaaaaaaatggtaagatatttaaaagttttcgtggaatgggctctgtaggtgctatgaataagggttcagcagatagatattttcaaaataaacaaaaagatatgtctaaatacgtaccagagggtgttgaaggttttgtaaagtacaaaggagacgttggaaggattatttataaattagttggaggcttaaaatcttctatgggatatttaggttcaaaaaatattgttggacttagaaacaagcctcattttgttaaaattaccaaagcaggtttttatgagagtatggttcacaatgttgatgtaataaaaagtgatggtagatactaa

SEQ ID NO: 204705 - DNA, 283 bp, Unknown
  Bacterial polypeptide expressing nucleotide sequence isolated from the Sargasso Sea
atgggtataataaaagaagctctcacatttgatgatgtcttattactacctcaatattcttctgtcttgccttcggaaacttcaatagatactcaactgacaaataaaattcatttaaaggttccttttatgtcagcagcaatggacacagtaaccgagtcgaaaatggctataggaatggctaaaaacggtgggatcggagtcatacatagaaacctcactataaaagatcaaagtgaagaagttaaaaaggttaagtcaaaacaacttttagtggagctgc

SEQ ID NO: 204706 - DNA, 385 bp, Unknown
  Bacterial polypeptide expressing nucleotide sequence isolated from the Sargasso Sea
atggcctaccagataaatactaattattacgtcacctttgatgatgttctgctttcaccatcgtattctgagataaaaccaaaagatgtagatacatcgattaccattggaaaagtcaaattacatattccaatactctctgctgcaatggataccgtgacagagaacaagatggctattaatctggcactaaatggtggtctaggtgttattcaccgtaatatgccaattgataaacaagcaagtgaagttaacaaagttcatagctttaaagttaacgtaaaaaaatttcaaaatgctgtaattaatactaacaaacagattgcggtgggagctgctattggtgttgaaaataatgcgtacttacgactattagaattattaa

SEQ ID NO: 204707 - DNA, 685 bp, Unknown
  Bacterial polypeptide expressing nucleotide sequence isolated from the Sargasso Sea
tatggttcctataaaagaagcacttacctttgacgatgttacgcttgtacctaaatattcggaaattttaccttctgaagtagacacaagtataaaattaaccaaaattttgaaattgaaaattcctcttttgtcttcagccatggataccgttacagaaagtaaaatggcgatagctattgctaaagctggaggtttaggaataattcatagaaatttagaaattaaaaagcaagttttagaaattaaaaaagttaaaagacaaaaatttttagttggagctgctgttggtgccggaccaagtgaattcaaaagagcgcaatcaattttaagagaaaatatagatatgattgtcgtagatacagctcacggacatactaagaaagtttctgacataattaaatatattaagaaaatcaaaaataaaaaaactgctttatgcgctggaaatattgcttcaccagaggctgcaaaatttcttattaaactgggggtagatataattaaagttggaataggaccaggttctatttgtactacaagattagttgctggtatcggagtacctcagttaagtgcaattctaagtgtaagaaatggaattaaaaacaggaatgtaaaaataatttctgatggaggtatcaaatattcaggagatctagctaaagcgttgcagcaggagcgg

SEQ ID NO: 204708 - DNA, 613 bp, Unknown
  Bacterial polypeptide expressing nucleotide sequence isolated from the Sargasso Sea
gattgatgctggtgccgattgtgttaaagttggtattggagctggagcaagttgcactacgcgcattgtagcgggcataggagttccgcagcttactgctgtgatggattgtgttgatgaggtaaagaaaattggtatacctgtgatagcggatggagggattagatatagtggagatatcgcaaaggcaattgcagctggagctgacactgtaatgcttggcagtattttagcaggtatggatgaaagtccaggagaatttattttatttgaagggcgtcaatataagtcatacagaggcatgggctcgcttggcgcaatgcaagatggagatggtgctagatattttcaagatgacactgaggataaaaaactcgttccggaaggaattgaaggaatagttccctatagaggaagcgtaaaaaataccatacatcaattaatgggaggattgcgatcatccatggggtattgcggaggaaaagatattttagattttcaatcaaatgcggaatttattcaaaatacacaagcgggagtaaaagaaagccatccgcatgaggtaaaaattacaaaagaggcaccgaactaccagatctcagatactaaatga

SEQ ID NO: 204709 - DNA, 633 bp, Unknown
  Bacterial polypeptide expressing nucleotide sequence isolated from the Sargasso Sea
gaaatattgctacaccttctgcagcaaaatttttgttaaagcttggtgttgatgtaattaaagttgggattggaccaggatcaatatgcactacaagattagtagcaggtattggtgtcccacaacttagtgcaatactagaagttagaaatggaataaaaaacaagaatgtaaaaattatttctgatggtgggataaaatattcaggtgatttggcaaaagcattcgcagctggagcagatgcggtcatgattggttcattgtttgcagggacagatgaagcaccaggaaaactgataaagagaaatggtaaactttttaaaaattttagaggtatgggctcagttggtgccatgaacaaaggatctgccgatcgatactttcaatcaaaacaaaaagatacatctaaatatgtgccagagggagtagaagggtttgctaaatataaaggtaaagttgatagtataatttttaaattaattggtggattaaggtcatcaatgggatacttgggatcaaaacaaattaaatatttaagagataaaccacaatttgttaaaataacaaaagcaggtttttacgagagtatggtccataatgttgatatagttaaaagcgacaataaatattaat

SEQ ID NO: 204710 - DNA, 487 bp, Unknown
  Bacterial polypeptide expressing nucleotide sequence isolated from the Sargasso Sea
tatggaaaagatcaaatttagagcactaaccttcgatgatgtattgcttttacctcgatataccgactttatgccctctgaggctgaattagaaaccagggtttctaaaaatatttcattaaaaattccccttatatctgcagcgatggataccgttacggaggctgccatggctatagcccttgcagaaaatggaggtattggaattattcataaaaataataccattgaagaacagactttcgaagtcaagactgttaaaaaatacgaaagcggtgtggtaagagatccaacaaccatcaagtccacaaaaactattaatgaactcatgcaacttacaactgagttaagtatttctggtatgcctgtggttgatgatggaaagttgatgggtattgttacgagaagagactttagatatgcagataatctaactgaattagtctcctccattatgactccttatgaaaaattaattaccgttgaa

SEQ ID NO: 204711 - DNA, 556 bp, Unknown
  Bacterial polypeptide expressing nucleotide sequence isolated from the Sargasso Sea
atatgtacaactagggttgtagctggagtaggttatcctcaattttcagctgttttggaagttgctaatgctattaaatcttctggagttcccgtaatagcagatggaggtattaaatatactggtgatattccaaaggcaatagctgctggagctgattgtgttatgttagggtcattgctagctggcactaaagaatctccaggtgaaacaataatttttgagggcaggaagtttaaatcatatagaggaatgggatcattagaggcgatgaaaaagggtagtggagatagatattttcaagaatttgaatctgaagttacaaaacttgttcctgaaggaattgttggtagagttccatataaaggtgatttaactgaaagtgttcatcaatttatcggaggccttagagcaggaatgggttattgtggagcaaaggatattaaaacattaaaagataaatcaaaatttgtaaaaattacttcagctggaattattgaaagccatccacacgggattaatataacaaaagaagcacctaattactctagataat

SEQ ID NO: 204712 - DNA, 902 bp, Unknown
  Bacterial polypeptide expressing nucleotide sequence isolated from the Sargasso Sea
aattctttcagaagcatttacattcgatgatgttttgcttcagcccgcttattctgatatattacctagtcaagttgatgtttcatcatatttaactaaaaatattaaattaaatatccctttgatttcatctccaatggataccgtaacagaatcatctttagctattgcaattgcattgaaggggggaatgggaattattcataaaaatatgacaattgatgatcaagttaaagaggttaaaaaagttaaaagatctcaaagtacaattattaaagatccggttactttgaataaaaactcaactgtaaaagatgctttacaaattatgaaaaaaaataaaattggagggattcctatagttgatgaaaataactatttacatggaattgtaacaaatagagatattagatttcataaggatctaaaagttaaactttctgagattatgacatcagaaaatttaataaccgctcaaaataatacggatttatttaaggctgaacagttattaaaaaaacataaaatagagaagctgccaattgtaaacacaaaaaatattttagttggtttagtaacttataaggatattttgaaaaataaatcaatgccagatgcctgtaaggataggtttggaagacttagggtaggtgcagcaattggaaatgaattggattatgaaaaaagattaaacaaacttatagggcaaggggtcgacgtaattgtcattgatactgctcacgcacattctaaatcggtaatttctttatgcaaaaaaatcaaaaaaaattatgaaattgatttaattgttggaaatgttgctactgctagcgcagtaaaagatctagtatctgcaggtgctgatgctataaaagttggaataggtcctggaagtatttgta

SEQ ID NO: 204713 - DNA, 604 bp, Unknown
  Bacterial polypeptide expressing nucleotide sequence isolated from the Sargasso Sea
catggatcccatcaaagaagccttaacttttgacgacgtaactttagccccaaattattcagaaatattaccttcagagactaatacatttacaaaattatcaaataatctaactttaaaaataccattaatatcatctgccatggatactgtaaccgaaggaagaatggcagccactattgcagaaaaaggtggaataggagtaatccacagaaacttgagtataaaaaaacaaattgatgaaattcaaaaagtaaaaaataaaaaacttttagtaggtgctgcagttggaggaagtttagatgaacataaaagagccgaaagactactaaaagaaaatatagatttaattgtggttgataccgctcatggacatacaaaaaaagtgtcagatataattaaaaagattgttaaaattaaaccaaaaaaaacatcattatgcgccggcaatatagctaccgcagaagctgcaaaatttttaattaaacttggtgtagatattatcaaagtaggtattggaccaggatcaatttgtaccacaagattagtggcaggtattggtgttccacagttaagcgctataatgaatgtcaagaaaggtata

SEQ ID NO: 204714 - DNA, 297 bp, Unknown
  Bacterial polypeptide expressing nucleotide sequence isolated from the Sargasso Sea
tcactctaaaggtgttgcaactgctattaaaaaagttaaagataaatttaatcatatcgatttagtagttggaaatattgcaacagctgaagctgcaaaatttttaagtgatcttggagtagatgggataaaagttggaataggtccaggatctatttgcacaactaggataattgcaggtgttggttatccacaattttcagctattttagaagtggcaagctccctaaaagataaagatattcctatcattgcagatggagggattcgctatacaggtgatatttctaaagctat

SEQ ID NO: 204715 - DNA, 760 bp, Unknown
  Bacterial polypeptide expressing nucleotide sequence isolated from the Sargasso Sea
gggaaaattattaaatgtaaagtagatttgattgttgtggatactgcgcatggccatactaaaagagtggcaaatataatcaaatttataaaaaaaaaaaaatcgaacaaaacaacgttatgtgcaggcaacattgcaacagctgaagcagcgaaatttttatgcaaactcggagtagatatagtaaaagtaggaattggaccaggatcgatttgtacaactagacttgttgctggtatcggtgtcccccagttaagtgcattattagatgcaaaaaaaggtttaagcaaaaatgttaaaatgatttctgacggtggaattaaattttcgggagatattgcaaaagcacttgcagcaggtgcagatgctgtaatggtaggatcaatgattgctggtaccaacgaagctccaggaaaaataataaaaaaaaatggaaaactattcaaagttttcagaggaatgggttcagttggagcaatgaacaaagggtctgctgatagatatttccaaaaaaaacaaaaggatagctcgaaatatgtcccagaaggagtagaaggtttaattaaatataaaggcgacgtatctaagataatttttaaacttattggaggacttaaatcatcgatgggctacttaggttctaaaaatgtaattaatttaagaaataaacctaaatttgttaaaattacaaaagctggattttatgagagtatggtccatagtattgatgaggtgaaaaaaaacagccaatatttatgag

SEQ ID NO: 204716 - DNA, 469 bp, Unknown
  Bacterial polypeptide expressing nucleotide sequence isolated from the Sargasso Sea
atgcgtctgatccaaaaagcactcactttcgatgacgtgctcctcgttcccgccttctccgacgttctcccgcgcgacaccagcctcaagaccaagctgacccgcaacatctccctgaacatgccgctcgtgtccgccgcgatggacacggtcaccgaaggtcgccttgcgatcgcgatggcacagcagggtggcgtcggtatcgtccacaagaacctcacgccggccgagcaggcccgcgaggtcgcgaaggtcaagcgtttcgaatcgggcgtcgtccgtgatccgatcacggtgccgccgcaaatgaaggtgcgcgacgtgatcgcgctgtcgcgccagcatggcatctcgggcttcccggtcgtcgaaggcccgcagctcgtcggcatcgtcacgaaccgcgacctgcgtttcgaaacccgcctcgatgaaccggtcaagtcgatcatgacgccgcgcgagcgcc

SEQ ID NO: 204717 - DNA, 757 bp, Unknown
  Bacterial polypeptide expressing nucleotide sequence isolated from the Sargasso Sea
aagagttgaagaattatcaaaagttaaaacagatttaattgtaattgatactgctcatggtcatacaaaaaaagtattaaatatgatcagaaaaattaaaaaaaaactaaaaaattcaactttatgtgttggtaacattgctactggaaaagctgcagagtttctagctgataatggggttgatatagttaaagttggtataggtccaggatctatttgtacaactcgcttagtagctgggataggtgtaccacagttaagtgcagttatggatgtcaaaaaagctttgaaaaaatacaaggcaaaaataatttcagatggaggtattaaattttctggagacttagcaaaagcaattgcagcaggagcagacgcaattatgataggatcattattttctgggactttggaaagtccaggtaaaattattaaatataaaggtaagctatacaaaaattttagaggtatgggttcagtgggtgctatgagcgctggatctgcagatcgatattatcaaaaaaaaaataaagatattacaaaatatgttcctgaaggtgttgagggaatggtcaagtttaaaggttcagttaaagaaattgtttataatttagttggagggttaaaatcttctatggggtatatgggggcaaaaacaatagaagatttacaaaaaaaaggtcaatttcttaaaattagcaaagctgggttttatgaaagtatggtccataacgtagatcatgtaataaaaaatgaataa

SEQ ID NO: 204718 - DNA, 256 bp, Unknown
  Bacterial polypeptide expressing nucleotide sequence isolated from the Sargasso Sea
gtacctcaaattacagcgcttttaagtgttaaaagggcgatgaaaaaaaataaaataaaaattatttctgacggaggaattaaattctcaggagatattataaaggctattgcagctggcgctgatgcaattatgatgggatcaatatttgcaggaacagaagaaagtcctggaaaaatatttaaaattaaaaataaattgtataaactatatagaggaatgggttcaataggagctatgtcttctggatcttccg

SEQ ID NO: 204719 - DNA, 823 bp, Unknown
  Bacterial polypeptide expressing nucleotide sequence isolated from the Sargasso Sea
atgaagttagaagatgctatcacatttgatgatgttttgttggtgcctgcaaaatcttcagttactccagacatggttgatacagcgacattcgttacaaaggatataaaaattaatatccccttaatttcttccgcaatggatactgttacagagaaaaatatggctatagcaatggcacaatctggaggtattggtgttatacatcgaaatttaagtataagtaggcaagccaaatatgtatctgcagttaaaagatttgaaagtggtattgtttataatccaataactttaaattgtaatgatactgttaagatcgcaaaaaaaattgctgtaagatataatataactggttttccagttgtagacaaagaaaacaaaatattaggtatattaacaaacagagatattcgttttttagatgataattctattaaagtaagtgaagttatgactaaagaaaatttagctatagttaaagaaccaattaattcaaaagaagcaaaacaaataatggcaaaaagaaggattgaaaaacttttagtagttgatgaaagtaattatttaatagggttactaacaataaaagatattgaaaaatctgtattaaatccgttagcctgtaaagatgaattaggtagattaagatgtgctgccgcttcttctacaggtaatgaaggttacgaaagatctgtttcattgatagattctggagcagatgttattgttatagatacagctcatggtcattctttagatgtaatcaaatcggttaaaagattaaaaaaggaatttgctaataccccaagttattgcgggtaat

SEQ ID NO: 204720 - DNA, 352 bp, Unknown
  Bacterial polypeptide expressing nucleotide sequence isolated from the Sargasso Sea
taaagttgaactctttcaaggaagaagttttaagacttatcgaggtatgggatcaattggggcaatgacagaaagagatgatgcaaatagatatatgcaagaggatgttgatcagaacaaacttgtaccagaaggtattgagggaagagtgccttacaagggattggttattaatgtcattaatcaattggaaggtggattgagacaaagcatgggatatgtaggatgtaaatcaatcaaggaaatgcaaaacaatagtcagtttgtagaaattacaaatgcaggcatgactgaaagtcacgttcatgatgtcatgattacaaaagaggctccgaactaccaaagaagttaa

SEQ ID NO: 204721 - DNA, 479 bp, Unknown
  Bacterial polypeptide expressing nucleotide sequence isolated from the Sargasso Sea
catgcgccttcttggaaaagcgctcaccttcgacgatgtgttgctggtgccagcgtactcccaggtcctgcccaaggacacgtccctcgcgacgaaactctcccgcaatatccaactgaacctgccgctcgtgtccgccgccatggacaccgtgaccgaggcacgcctggccattgccattgcccaggagggcggcatcggcatcgtgcacaagaacctcacggcgcaagagcaggctgcccatgtggccaaggtcaagcgttacgagtccggcgtgctgcgcgacccggtggtcatcacccccgagcacacggtgctgcaagtgctgcagctgtccgagcaactgggcatctcgggcttccccgtgtgcgacggtggcaaggtggtcggtatcgtcacgggccgcgacctgcggtttgagacccgctacgacgtcaaggtccaccagatcatgaccccgcgcgagaagctcatcacgg

SEQ ID NO: 204722 - DNA, 601 bp, Unknown
  Bacterial polypeptide expressing nucleotide sequence isolated from the Sargasso Sea
tttgattaaattgggtgtggatataattaaagttggtattggaccaggatcaatttgtactacaagattagttgctggaataggtgttccacagttgagcgcaattttgtctgtaagaaatggagttaaaaacaaaaatgtaaaaataatttctgatggaggaattaaatattctggtgatttagcaaaagcctttgcagctggtgcagatgcagtaatgataggttctttgtttgcaggtacagatgaaacaccgggtaaactaattaaaaaaaatggaaaattatttaaaagttttagagggatgggatcagttggtgctatgaataaaggctcagcagatagatattttcaaactaagcaaaaagatacatcaaaatatgttccagagggtgtagaaggctttgtaaaatacaaaggtgatgttggcagcattatatttagattaataggtggtcttaaatcatctatgggctatcttggttcgaaagaaattgtaaaattgagaaataaaactcaatttgttaaaattactaaagctggattttttgaaagtatggttcataatgttgatgtaattaaaaatgatagtaaatattaa

SEQ ID NO: 204723 - DNA, 844 bp, Unknown
  Bacterial polypeptide expressing nucleotide sequence isolated from the Sargasso Sea
acaaaatatttaaaattgaatattcctttattatcctcagctatggatactgttaccgaaagtaaaatggctatcgcgatagcgaaagcaggcgggatgggaattattcatagaaatttagatataaaaaaacaaattcttgaaattaaaaaagtaaaaaaactaaaacttttagtgggcgcagctgttggggctgggccaagcgaatttaaaagagcagaggcaatacttaaagaaaaaattgatatgattgttgttgatactgctcatggacatacaaaaaaggtctcagaaataattaagtttattaaaaaaacaaaagataaaaaaactgctctttgtgctggaaatattgctacacctgttgcagcaaaatttctattaaagcttggggttgacgtcatcaaagttgggattggaccaggatcaatatgcactacaagattagttgcaggtattggtgtcccacaacttagtgcaatactagaagttagaaatggaataaaaaataagaatgtaaaaattatttctgatggtgggattaaatattcaggtgatttagcaaaagcattcgctgctggagcagatgcagttatgattggttcattatttgcagggacagatgaagtaccaggaaaattaattaggagaaatggaaaactatttaaaaattttagaggtatgggctcagttggtgcaatgaataaaggatccgcagatcgatattttcaatcaaagcaaaaggactcgtctaaatatgtgccagagggagtagaaggatttgcaaaatataaaggtaaagttgataatataatttttaaattaattggtggattaagatcat

SEQ ID NO: 204724 - DNA, 286 bp, Unknown
  Bacterial polypeptide expressing nucleotide sequence isolated from the Sargasso Sea
aatggcctaccagataaataccaattattccattacttttgatgatgttttgctctcaccagcgtattctgagataaaaccaaaagacgtagatacatcgattaccattggaaaagtcaaattacatattccaatactctccgctgctatggatactgtgacagagaacaagatggcaatcaatctagcacttaatggtggtctaggtgttattcaccgtaatatgccgattgataaccaagcaaatgaagttaacaaagttcataactttaaagttaatataaaa

SEQ ID NO: 204725 - DNA, 760 bp, Unknown
  Bacterial polypeptide expressing nucleotide sequence isolated from the Sargasso Sea
ttgacaataagagaaggattcacttttgatgatgttctccttgtacccaaattttcagatataactagtcgttcacaaactaatctttcaaccaacctttctcgaaatattaaactcaatattcctttagttagcgcaaacatggatactgtgacagagtctaccatggcaacaacaatggctagacaaggaggaattggaataattcatagatttttgacaatagaagaagaagctgaacaagttctaaaagtcaaacgctcaggaagtgtaatgattgataatccttaccaaatatcttctgaaaaatctattgaagaagctattgatttaatgactgaaaaagaagtatcagggttacttgtagttgattctgattctaaacttgttggtgtcttaactgagcgtgatgtactttttgaatcaatcaattcaaaaaaatctgtgtctgaattaatgactaaagatgtaatctcctcaaatcaaaatacaacattagatgacgcaaaagatattctaaaaagtcatagaattgaaaaattacctctagtaaatgagaaaaatcacattgtcggtctttatactactcaggatattctaaatattgaaaattttccgaatgcgtcaaaagataagaaaggtagaccccttgttggagctgcagttggagtaaaaggtgactttttagatagaactgaagcattacttggggctggtgcagatgcaattgtggtcgatatgcacatggtcacagcgaaaa

SEQ ID NO: 204726 - DNA, 460 bp, Unknown
  Bacterial polypeptide expressing nucleotide sequence isolated from the Sargasso Sea
ggacggcggcataaagtattcgggcgacctagccaaggccatcgctgcgggtgccgactgcgccatgatcggctcgctactggctggcaccgatgaagcccccggcgaagtgttcctctatgagggccggtcttataagtcctaccgcggcatgggctcgttgggtgccatggcgcgcgggtcggctgacaggtactttcaggccgaggtcgccgacaccctcaagctggtgcctgagggcatcgagggacaggtcgcctataaggggccggcgctgaccgtcgtgcaccagctcgtcggcgggctgcgcgcggccatgggctatactggtaacgccaacctaccggaaatgcagaacagatgccgtttcctgcgcctgaccaatgcggggctgcgcgagagccacgtgcatgacgtcacgatcacgcgcgaggcaccgaactaccggcagaatgcctga

SEQ ID NO: 204727 - DNA, 634 bp, Unknown
  Bacterial polypeptide expressing nucleotide sequence isolated from the Sargasso Sea
catggatcccataaaagaagctctcacatatgacgatgtattgctaactccaaagtattcagaaattcttccttcagaaacaataatagaaacaaaactatcaaataatttaaatcttaaaatacctataatttcctctgcaatggatacagtaactgaatcaagtatggcaattgaaattgcaaagttaggaggaataggagttattcatagaaatttagatataaaaaaacaaatattagaaattagaaaagttaaatctaaaaatttaaaagtaggagcagctgtaggagcaggaccatttgaaataaaaagggctgaagcattgcttaaagaaaaaattgatttaattgttgtagatactgcccacggtcatacaaaaaaggtagcagaaatagtaaagaaaattaaaatattgaaatcaaaaaaaaccactttatgtgcaggaaatattgcaacaaccgaagcatctaaatttttatctaatcttggtgttgatgcaattaaagtaggtatcggtccaggatcaatttgcacaactagaattgttgctggaattggagttcctcaattgagtgcaattttagctgcaaaaaaaggtttaggtaaaaaaaaaattacacttattgctgat

SEQ ID NO: 204728 - DNA, 787 bp, Unknown
  Bacterial polypeptide expressing nucleotide sequence isolated from the Sargasso Sea
ttgacaataagagaaggattcacttttgatgatgttctccttgtacccaaattttcagatataactagtcgttcacaaactaatctatcaacaaatctttctcgaaatattaaactcaatattcctttagttagtgcaaacatggataccgtgaccgagtctaccatggcaacaacaatggctagacaaggaggaattggaataattcatagatttttgacaatagaagaagaagctgaacaagttctaaaagttaaacgctctggaagtgtaatgattgataacccctatcaaatatcttctgaaaaatctgttgaagaagctattgatctaatgaatgaaaaagaagtatcaggattacttgtggttgattctgattcaaaacttgtcggtgtcttaactgagcgtgatgtactttttgaatcaatcaattcaaaaaaatttgtatctgaattaatgactaaagatgtaatttcttcaaatgaaaatacaactttagatgaagcaaaagatatcctaaaaagtcatagaattgaaaaattacctttagtaaatgataaaaatcatattattggtctttacactacacaggatattctgaatattgaaaattttccaaatgcttcaaaagataagaagggtagaccacttgttggagctgcagttggagtaaaaggtgactttttagatagaactgaagcattacttgaagctggtgcagatgcaattgtagtcgatattgcacatggccatagtgaaaatgcaatcagtacagtaaaaaatataa

SEQ ID NO: 204729 - DNA, 470 bp, Unknown
  Bacterial polypeptide expressing nucleotide sequence isolated from the Sargasso Sea
tacatatcaagttgccaaaaaatttaaaattcctgtgattgcagatggaggaataaaaacatcaggtgatattgcaaaagctatagcaggtggtgcaagtgcttgcatgatagggtctttatttgctggtactgaagaatcaccagggaaattattaacgattaaaggtaaaaaatttaaatcatatagaggtatgggttctgtaggagcaatgcaaaaaggatcttttgatcgatactcccaagaagaaacaaagaatgccaaaaaattagtagcagaaggtgtggaaggcatggttccatacaaaggtaaaatagaagatgtagcgtatcaacttgttggtggcttaaaatcttcgatggggtacactggtcataaaacgataaagaaaatgcaaggcaattgtaaatttgtctttatttcaaaagcaggagcccgagaaagtaatgtccacgatgtcattatgtaat

SEQ ID NO: 204730 - DNA, 652 bp, Unknown
  Bacterial polypeptide expressing nucleotide sequence isolated from the Sargasso Sea
atgggtacaataaatgaagctttaaccttcgatgatgtcttaatacttcctaagtactcgagcattcttccaactaaaacagatctaagcttaaaactaaccaataagatttacctaaaggtcccttttttgtcttctgcaatggacaccgtaacagagagtagcatggctattgcgataggtagggaaggtggtattggagttattcatagaaatttaagcttaaaaaaacaatcattggaagtgaaaaaagttaaaaataaaaattatttagttggtgcagctgttggcactaatcaagaagatttagatagaacaaaatcgctagtcgccaatggtgttgatctgattgttatagataccgctcacggtcatagcgaaaaagttttaaaaactttatcaaaattaaaaaagatagttggcaaagttcctatttgtgttggcaatattgcaactggagaggctgcaaaaaaattatataattctggggcagatattataaaagttgggatcgggcccggatcaatttgcacaacaagaatggttgctgggataggcgtaccacagatatcagcaattatagatgttaaaaagacacttaataaaaaaaaaattaaaataatttctgatggcggaattaagtttcaggaga

SEQ ID NO: 204731 - DNA, 807 bp, Unknown
  Bacterial polypeptide expressing nucleotide sequence isolated from the Sargasso Sea
tatggttcctataaaagaagcacttacctttgacgacgtaacattagcgccaaattactcagaaatattaccatctgaggctgataccacagtatctttaacaaatcatcttaaattaaaaattccacttttgtcatctgcaatggacacagtcacagaaagcaaaatggcaatcgctattgcaaaagctggtggaataggagttattcatagaaacttagatattaaaacacaagtttcagaaattagaaaagttaaaaaatattctttaaaagttggagctgcggttggagcgtcagagaaagaatttattagagcaaaagaaattattaatgaaggtgttgacttgattgtagttgataccgctcatggacatacaaaaaaagttggagaaattattaaatatattaaaaaaagcaaaaacaacaaaatcgctttgtgtgctggaaatattgcaactccagaagctgcaaaatttttaataaaattaggagtagatataattaaagttgggattggtccaggctcaatttgtaccactagattagttgcgggcattggggttccacagctaagtgcaattttggcagtaagaaatggtataaaaaacaaaaaagttaaaattatttctgatggaggaataaagtattctggtgatttagcaaaagcatttgcagcaggagcagatgctgtaatgataggatcattatttgcaggaacaaatgagactcctggaaaattaataaaaaaaaatgggaaattgtttaaaagctttcgtggaatgggttctgtaggagctatgaacaa

SEQ ID NO: 204732 - DNA, 652 bp, Unknown
  Bacterial polypeptide expressing nucleotide sequence isolated from the Sargasso Sea
aaatatcgctttatgtgctggaaatattgcaacacctgaagcagcaaaatttttgattaaattaggagtagatattattaaagttggtattggaccaggatcaatttgcacaactaggctggttgcaggaataggtgttccacagttaagtgcaattttgtctgtaagaaatgggcttgaaaacaaaaatgtaaaaataatttctgatggtggaattaaatattctggtgatttagctaaagcttttgcagcaggtgcagatgctgtaatgataggttctttatttgcaggtacagatgaaacacctggtaaattaattaaaaaaaatggaaaattatttaagaattttagaggaatgggatcagtaggtgctatgaacaaaggatcagcagacaggtattttcaaaccaagcaaaaagatacatcaaaatatgttccagagggtgtagaaggctttgtaaaatacaaaggagatgttggtagtattatatttaaattaattggtggtcttaaatcatctatgggatatcttggttcgaaagaaattgtgaaattgagaaatgaacctcaatttgttaaaattacgaaagctggattttatgagagtatggttcataatgtggatgtaattaaaaatgatagtaaatattaa

SEQ ID NO: 204733 - DNA, 643 bp, Unknown
  Bacterial polypeptide expressing nucleotide sequence isolated from the Sargasso Sea
ctttgtgctggaaatattgctacacctgctgcagcaaaatttttattaaagcttggggttgacgtcataaaagttgggattggacctggatcaatatgtacaacaagattagttgcaggtattggagtcccacaacttagtgcaatactagaagttagaaatggaataaaaaataaaaatgtaaagattatttctgacggtggaattaaatactcaggtgatttagcaaaagcattcgctgctggagcagatgcagttatgattggctcattgtttgctgggacggatgaagctccaggaaaactgataaagagaaatggaaaactatttaaaaattttagaggtatgggctcagttggtgcaatgaataaaggatctgcagatcgatatttccaatcaaaacaaaaagatacatcaaaatatgtaccggagggagtagaaggatttgcaaaatataaaggcaaagttgataatataatttttaaattaattggtggattaagatcatctatgggatacttaggatctaaacaaattaaatatctaagagataaaccacaatttgttaaaataacaaaagctggtttttacgaaagtatggttcataatgttgatatagtaaaaagtgataataaatattaat

SEQ ID NO: 204734 - DNA, 751 bp, Unknown
  Bacterial polypeptide expressing nucleotide sequence isolated from the Sargasso Sea
atggacaaagtaaaatcaaaagccctaacgttcgatgacgtacttcttttaccacgttacagtgactttgttcccagtgaagctgtaactgaaacgaagcttactaaaaacatcactatcaaaacccctttaatatctgctgccatggatactgtgacagaatctaaaatgggtattgcgcttgcagaagcgggcggtcttggtgtaattcataagaataattctattgaggaacaagcacagcttgttaaagcagttaaaaaatatgagagtgggatagttagagatcctatgactattgattcaaacagaacaattggagaactgaaacagttgactaccgagttaagtatttcaggtatgccagtaattgatagtggtgtgttaaagggaattgtaacaagtcgagattttagatacgcagatgatatggaatctaaagtttcatcaatcatgactcctttagaaaatctagtaactgttcaagagggaacacctcaaaaagaagtcaaaaaattaatgtatgaaaatagaatagaaaaaattttagtacttgataatagaggtgcattaactggattggttacgatgaaggacattgaaaaggctgcccaacatccaaatgctacaaaagatatttcaggaagactgatggtaggtgctgctcttggaacaggtaaagagactcttgagcgtgctaaagccatagctgaagctggagtagatgtttttgtaattgacagtgcccacg

SEQ ID NO: 204735 - DNA, 745 bp, Unknown
  Bacterial polypeptide expressing nucleotide sequence isolated from the Sargasso Sea
tgtaaagtagatttaattgttgtggatacagcgcatggccatacaaaaagggtggttaatataattaaatttataaaaaaaaaaaaatcgagcaaaacatctttatgcgcaggcaatattgcaacagctgaggcagcaaaatttttatgtaaacttggagtagatatagtaaaagtaggaattggaccaggatcgatttgcacaacaagacttgttgcaggtattggtgttcctcagctaagcgcattattagatgtaaaaaaaggtttaagcaaaaatgttaaaatgatttctgatggggggattaaattttctggagatattgcaaaagcacttgcagcaggtgcagatgctgtaatggtaggatcaatgattgctggaactaacgaggctccaggtaaaattataaaaaaaaatggtaaattgttcaaagtctttaggggaatgggttcagttggagcaatgaacaaagggtccgctgacagatatttccaaaaaaaacaaaaggatagttcaaaatatgttcctgaaggagtggaaggtttgattaaatataaaggtgatgtatctaagataatttttaaacttattggaggacttaaatcatcgatgggttatttgggctcaaaaaatgtaattaatctgagaaataaacctaaatttgttaaaattacaaaagctggattttatgagagtatggttcatagtatagatgaggtaaaaaaaaacagccaatatttatgag

SEQ ID NO: 204736 - DNA, 711 bp, Unknown
  Bacterial polypeptide expressing nucleotide sequence isolated from the Sargasso Sea
tatgtctgaaaacacccctaaaatacttgaagaaggcttgacttttgaagacgttctggttgtacccgcatattcagaaattctacccagagagacaaacacagaaactaaagtatctagaaatattggccttaaacttccaatagtctctgctgctatggatactgtaacagagtcatctctagccatatctattgcaagaagcggaggccttggctttattcacaaaaatatgagcattaaagaccaggccagacaagtaagaaaggtcaaaagagcagaaagcggcttgataacagaccccatcactcttgaagaaagtgcgatgataggtgatgctttgaaaatcatgaaagaaaacagaataggtggcattccaattataaataaagacaaaaacttaataggaattctgactaatagagatctaagattcacaaaagacatgaatctaactgtatcctctataatgaccaaagcacctttgattacagcaaaagaggggactacacttaaacaggctgaggtgattttggaaaaacataagatagaaaaacttcctattgttaatgagaacaatatacttaccggactaataacctataaagatattttaagggttgtaagctacccaaatgcaaacaaagacagcctaggccgcctaagagttggcgcggcaataggcgtaacggcagacatgctggaaaggct

SEQ ID NO: 204737 - DNA, 772 bp, Unknown
  Bacterial polypeptide expressing nucleotide sequence isolated from the Sargasso Sea
aatggtagcaagatcacatcaatcgagatctaaagtattttccgatgaggctctagcgtttgatgacgttctacttgttccagcttattccgacatacttccagtcaacgttgatatatctacacagttaactagagagatagaccttaaaactcctattttatctgctgctatggatactgtgacagagtcccaaatggcaattagtctagctagtgagggtggaattggcatcatccacaaaaatttatcagttgaggatcaagcaaagcaagtaaggctcgtaaaaaaatatgagagtggagttattaacgaccccataactgcatcagcgcaatctacagtgcgagagataaacaatattactgaaaaatatggaatttctggtgttccgatcgtagatcaagacaagctaattggaattgtaacaaatagagatcttagatttgttgagaatatcaacactaaagtgacatctataatgacaccgaaagaaaaactagtgactgtgagtgaaaattattcaaaaaaacaagtcattcaactactgcgaaccaatagaattgagaagatacttattgtaaacaagaaaaaccaactaaaaggaatgattacgttcaaagatattcaaaaatcatctacttatcctaacgcatccaaggataataatggcagcttgcttgttggagcagcggtgagcactaactcagagtctatcgatcgtattcatgcacttataaatgaaaatgttgatgtcataacaatgatactg

SEQ ID NO: 204738 - DNA, 513 bp, Unknown
  Bacterial polypeptide expressing nucleotide sequence isolated from the Sargasso Sea
gctggcatttgacgatgttctactcgttccagcttactctgagatactccctattaacgtttgcataacatctaatcttacgaaatctattcaactaaaaacaccagttttatcagctgctatggatacagttactgaatctaaaatggcaataactctagccagcgagggaggtattggtattattcacaaaaatttatctgttgatgaccaagcaaaacaagtaaggtttgtgaaaaaatatgagagcggtgttataaatagccccattacagcttctgtaaattcgactgtttctgaaattaatcaaattacaaaaaaatatggaatttctggtgtgcctattgttgataaacaaaaagtcgtaggtattgtaactaatagagatttaagatttgtagagaatatcaataccaaagtcaaaacaataatgacaccaaaagataaacttgtgtatgtaggtgagaaatacaataaaaaaagcgtaatagagcttttaagaaaaatagaata

SEQ ID NO: 204739 - DNA, 361 bp, Unknown
  Bacterial polypeptide expressing nucleotide sequence isolated from the Sargasso Sea
tatgaaaaatagaccacctttcgataaagcactcacatttgatgatgtacttcttgtgccaaaagcatcagatatactaccaagagatgtaattttaaaaacacgtctaactcaaaaaatttcgatgaatattccacttttgtcagctgcaatggatacagtaactgaaaatgaaatggctgtagcgttggcccgacagggtggcattggaattattcataaaaatttatcaatcgatcaacaggcacttatggtggatcgagttaaaagatcagaaagtggtatgattgctaatcctataactctttccgcggataaatccattaatgatgctaaaaaagttatggagaattatcatatc

SEQ ID NO: 204740 - DNA, 889 bp, Unknown
  Bacterial polypeptide expressing nucleotide sequence isolated from the Sargasso Sea
ttttcagatataactagtcgttcacaaactgatctctccacaaatctttctcgaaatatcaaactcaatattcctttagttagtgcaaacatggataccgtgacagaatctaccatggcaacaacaatggctagacaaggaggaattggaataattcatagatttttgacaatagaagaagaagctgaacaagttctcaaagtcaaacgctctggaagtgtaatgattgataatccctaccaaatatcttctgaaaaatctgttgaagaagctattgatttaatgaatgaaaaagaagtatcagggttacttgtagttgattctgattctaaacttgttggtgttttaactgagcgtgatgtactttttgaatcaatcaattcaaaaaaatctgtgtctgaattaatgactaaagatgttatttcttcaaatgaaaatacaacattagatgaagcaaaagatatcctaaaaagtcatagaattgaaaaattacctctagtaaatgacaaaaatcacattgtcggtctttatactactcaggatattttgaacattgaaaattttccaaatgcatcaaaagataagaaaggtagacctcttgttggggctgcagttggagttaaaggtgactttttagatagaactgaagcattacttggtgctggtgcagatgcaattgtagttgatattgcgcatggtcatagtgaaaatgcaatcagtactgtaaaaaatattaaaaaagcatttcctgactgtgaactaatcgctggaaatgtagcaactgctcaaggtactgaagatttgataaaagctggagttgatgcagttaaagttggtgttggttcaggttcaatttgtattacaagagtcattactggttctggtgtgc

SEQ ID NO: 204741 - DNA, 255 bp, Unknown
  Bacterial polypeptide expressing nucleotide sequence isolated from the Sargasso Sea
tgacgggcttcttttaccgcgttatagtgatttcgttcccagcgaagctgtaaccgaaacaaagcttactaaaaacagtactattaaaacacctttaatgactgctgccatggatacggtgacagaatcaaaaatgggtattgcgctagcagaagcagggggtctcggtgtaattcataaaaataatccaatagaagaacaggctcagctggtgagagcagtcaaaaaatatgagagcgggatagtcagagatcc

SEQ ID NO: 204742 - DNA, 367 bp, Unknown
  Bacterial polypeptide expressing nucleotide sequence isolated from the Sargasso Sea
agaagctcctggtcaagtcgaactctttcaaggcagaagctataaagcatatagaggcatgggatctgttggcgcaatgtcaggtgaatcctcttcaggggatagatattttcaggacaatcaacaaaccgacaaactggtacccgaaggcatagaaggaagagttccttacaaaggatgggtagaaactaccattcatcaaatgttgggaggcttaagacaaagcatgggttacaccggatgcaaagacattggtaccatgaaaaccaaacctaagtttgttcaaataactacctcaggaatgagcgagagtcacgtgcatgacgtcagcgtcactaaagaagcaccaaattaccgaattacataa

SEQ ID NO: 204743 - DNA, 355 bp, Unknown
  Bacterial polypeptide expressing nucleotide sequence isolated from the Sargasso Sea
aatgatccgcgatcgaattttcgatggtctgacctttgatgatattcttctggttccgggttatgcagagatccatccttccgaggtttccctgaaaagcaaactgacgcgcaaacttgagtgcaacattccccttctcagcgcggcaatggataccgttacggaggccgacacagcgatctgcatggcccaggaaggcggtctcggggtgattcataaaaacctctccattgaggaacaggcgaatcaggtcaatcgggttaaacgctctgaaagcggaatgatcaccaatccgatcaccatcgaacctgaccaaccgatcagcgaagccctgaaactgatggagcgttatcgg

SEQ ID NO: 204744 - DNA, 352 bp, Unknown
  Bacterial polypeptide expressing nucleotide sequence isolated from the Sargasso Sea
taaagttgaactctttcaaggaagaagttttaagacttatcgaggtatgggatcaattggggcaatgacagaaagagatgatgcaaatagatatatgcaagaggatgttgatcagaacaaacttgtaccagaaggtattgagggaagagtgccttacaagggattagttattaatgtcattaatcaattggaaggtggattgagacaaagcatgggatatgtaggatgtaaatcaatcaaggaaatgcaaaacaatagtcagtttgtagaaattacaaatgcaggcatgactgaaagtcacgttcatgatgtcatgattacaaaagaggctccgaactaccaaagaagttaa

SEQ ID NO: 204745 - DNA, 418 bp, Unknown
  Bacterial polypeptide expressing nucleotide sequence isolated from the Sargasso Sea
aatggtaaatacatcaaattcaaaaaaatccaatgtaattattacagaagaaggcttggcatttgatgatgtcctgcttgttcctcagtattcagaaattcttccatctgatgtagttttaaccactaaactcactaaaaatattgagcttaaaacacctgttttatcagcagcgatggatacagtcactgagtcacaaatggcaattactctagctggagagggtggcataggaataattcataaaaatatgtcaattgaagaacaagccaaacaagttaggtttgtgaaaaagtatgaaagtggagtaataaatgatcccgtaactgcatcacctaatatgactatttcagaaataaataggattactaaaaaatataatatatctggagtaccgatagtagataataataaatta

SEQ ID NO: 204746 - DNA, 786 bp, Unknown
  Bacterial polypeptide expressing nucleotide sequence isolated from the Sargasso Sea
tttgacaataagagaaggatttacgtttgatgatgttctccttgtacccaaattttcagatataactagtcgttcacaaactgatctctcgacaaatctatctagaaatatcaaactcaatattccgttagttagtgcaaatatggataccgtaactgaagctactatggctacaactatggctagacaaggtggaattggaatcattcatagattcttaacaattgaagaagaagcaaatcaggtactaaaagtcaaacgttctggcagtgtaatgattgataatccatatcagatttctagggaaaagtcaattgaacaagctattgatctaatgaacgaaaaagaagtttctggattattagtggtagattctgattctaaattagttggaattctaactgaacgtgatgttctttttgaatctctggactcaaagaaatctgtttctgaattaatgactaaagatgttatttctgcaaatgaaaatacaagtcttgatcaggcaaaagatatactcaaaaaccaaagaattgaaaaattacctcttgtaaacgacaagaatcaaatcgttggattgtataccactcaagatataatgaatattgaaaattttccaaatgcaacaaaagatacgaaaggcagacctcttgttggcgctgcagttggtgtccaaggtgactttttagatagaactgaagcattgctagaagctggtgcagatgctattgttgtcgatatcgcacatggccatagtgaaaatgcaatcaatactgtaaaaaacat

SEQ ID NO: 204747 - DNA, 532 bp, Unknown
  Bacterial polypeptide expressing nucleotide sequence isolated from the Sargasso Sea
aatgccacaagtcacagcaattgctgatgttgcaacagagctgaagggaacagatacatgcatcatcgcagatggtggcattcgttattcaggagacatagcaaaagcaatcgcagcaggtgctgacagcatcatgttgggcagtctatttgctggaacagaagaatcacccggtgagatagagctttatcaaggaagaagttttaaatcatatcgtggtatgggctctttgggagcaatggctcaacaacacggctccaaagatcggtatttccaaagcgatgttgaggaggcagaaaaattggtcccagaaggcattgaaggaagggtgccttataaagggaagctttccaaaatcatcgaacagcttgtcggcggattgcgacagtcaatgggatacacaggatgtaaagatatccaggagctccagacaaaaactgagtttgtcagaatcacagattctggaaaaaaagaaggacatgttcacgatgtcagcatcaccaaagaagcacctaattactctgtcgattag

SEQ ID NO: 204748 - DNA, 375 bp, Unknown
  Bacterial polypeptide expressing nucleotide sequence isolated from the Sargasso Sea
gcacagaagaggctcctggggaagttgaactctatcaagggagaagttttaaaacatatcgaggcatgggatctattgcagcaatgtctaaaagaacggatgcaaatcgctacatgcatggagatgaagtagatacggacaaacttgttcctgaaggcattgaaggaagagttccatttaggggctggttgaaagatgtggtttttcaacttgagggcggccttcgtcagggaatgggatatacaggatcaaaaacccttgaagagctaaaacacagagttaagttcatgaagattactagatcaggagtcatggaaagtcatgttcacgatgtaagtatcaccaaagaggctccaaattatcggtcagattaat

SEQ ID NO: 204749 - DNA, 826 bp, Unknown
  Bacterial polypeptide expressing nucleotide sequence isolated from the Sargasso Sea
tttggtttttctggctttccagtaaccgaagaagcaggtggaaagttagttggtatattaacaaatcgggacactagatttgctaataatcctaatcaactagtaaaagaacttatgactgctcatctagatgaaaaaccattagtcacagtggaagaagggatcaaattagatgaggcaaaagtattactacatcaatacagattagaaaaactagtggtagttgacgaacagtcacgttgtgtaggccttattactgttaaagatatcgaaaaagcccaagcgtatccggacgcatgtaaagaccaaaaaggccgattgagagtagcggccgcaactggcatcggtagcaagggttacgagagggctgaacgactagtagactctgaagtggatttgatagtagtagatactgcccacggccactcagagggcgtcattgaagctgtaaaacaaataaagaagatcaagaattgtgccccaattctcgccggaaatatagccacctcagagggtgcgaaagccttaattgacgctggagtcgatgctattaaggttggtattgggcccggaactatttgtactactaggatggtggctggtgtgggtgttcctcagttttctgccatagttgaaacttccgaaactgcaaaaaaagctaatatccatgtagtggctgacgggggcgtaaaatattctggggacgttgctaaagccattgcagctggagcagattcagtaatgattggctctctttttgccggcactgaagaaagccctggtgaagtttttctttatcagggaaggtcgtataaatcctacaggg

SEQ ID NO: 204750 - DNA, 484 bp, Unknown
  Bacterial polypeptide expressing nucleotide sequence isolated from the Sargasso Sea
catggacaaagtaaaatctaaagcactgacatttgacgatgttcttcttctacctcgatatagtgatatcttgcctagcgaggcaataacagaaacttatctcactaaaaacatatccttaaaaacgccattaatatctgcggctatggatactgtaactgaatccaggatgggtatatctcttgctgaagcaggtggccttggtattgttcataaaaataattcaatcgaagagcaatcaaatatagtaagggctgtaaaaaaatatgaaagtggaatcgttagagacccagttactattaattcaacaaaatcaatatctgagctaaagcaattaactaatgagttaaatatatctggtatgccagttttagataatggtgaactgagaggtattgttacaagtagagactttcgctatgcagataatatggaatcctctgtttcatcaatcatgaccccattggatagattggtaactgtt

SEQ ID NO: 204751 - DNA, 577 bp, Unknown
  Bacterial polypeptide expressing nucleotide sequence isolated from the Sargasso Sea
tatcaaagttgggattggacctggatcaatatgtactacaagattagttgcaggtattggtgttccacaacttagtgcaatactagaagttagaaatggaataaaaaataaaaatgtaaagattatttctgacggtggaataaaatactctggtgatttagcaaaagcatttgctgctggagcagatgcagtaatgattggctcattgtttgctgggacagatgaagctccaggaaaacttataaagagaaatggtaaactatttaaaaattttagaggtatgggctcagttggtgctatgaataaaggatctgctgatcgatactttcaatcaaaacaaaaagattcatctaaatatgtgccggaaggagtagaaggatttgcaaaatataaaggcaaagttcataatataatttttaaattaattggtggattaagatcatctatgggatacttagggtcaagacaaattaaatatctaagagataaaccgcaatttgttaaaataacaaaagctggtttttacgaaagcatggttcataatgttgatgtaataaaaagtgacacaaaatattaa

SEQ ID NO: 204752 - DNA, 595 bp, Unknown
  Bacterial polypeptide expressing nucleotide sequence isolated from the Sargasso Sea
atggaatccaaaaaatttatcggaaaaggtctaacttacgatgatgttcttttagttccaagatattcagaagttcttcctaaagatgtttcaatagtttctcgtttctctagaaatatttcccttaatatacctattgtctctgcagcaatggacactgtaactgagagtaatatggcgattgctatggcaagagaaggagggattggagttattcataagaatatgacaataaaggaacaagtagagaatattaggaaagtcaaacgagctgaatctggaatgataatggatcctgttgttctttttgaagattctaaggttggggatgcgaaagagagtatgtctcaaaataaaattggaggaattcctatagttgattcaaagggaaaattacttggtatagttacaaatagggatttacgttttgagaacaacaaatctcgtcctattaaagaagtaatgactgttaaagatttaattactgttagagaaggtacttctcttaaagacgctgaagaaattttgcaaaagcataaaattgaaaaactacctgttgttgatcaaaagaataatctagtaggacttataacat

SEQ ID NO: 204753 - DNA, 409 bp, Unknown
  Bacterial polypeptide expressing nucleotide sequence isolated from the Sargasso Sea
catgacttcctctcgattttccttccccgccgaggacgaaaaatttgcgatagatggattgacctttgatgacgtgctgcttctccccgcagcgtcggaagtgttacccgatgcagtggacacaaagtgtcgcttcactaagaacatcaacctaaacattccacttgcaagcgcggcgatggatacagtcacagaagcccgcctggcgattgcaatggcgcgtcacggtgggatcggtgtcatccatcgaaaccttgatatcgaggaacaagccaacgaagtcgacaaggtgaagcgatccgagtccggaatgattgtggagcccatcacgctgcctcctcatgcgacgttggcccaagcggaagagctaatgggcagattcaaaatcagtggtgtgcccatcactgac

SEQ ID NO: 204754 - DNA, 949 bp, Unknown
  Bacterial polypeptide expressing nucleotide sequence isolated from the Sargasso Sea
ctcagaaatattaccatctgaggctgataccacagtatctttaacaaatcatcttaaattaaaaattccacttttgtcatctgcaatggacacagtcacagaaagcaaaatggcaatcgctattgcaaaagctggtggaataggagttattcatagaaacttagatattaaaacacaagtttcagaaattagaaaagttaaaaaatattctttaaaagttggagctgcggttggagcgtcagagaaagaatttattagagcaaaagaaattattaatgaaggtgttgacttgattgtagttgataccgctcatggacatacaaaaaaagttggagaaattattaaatatattaaaaaaagtaaaaacaacaaaatcgctttgtgtgctggaaatattgcaactccagaagctgcaaaatttttaataaaattaggagtagatataattaaagttgggattggtccaggctcaatttgtactaccagattagttgcgggcattggggttccacagctaagtgcaattttggcagtaagaaatgggataaaaaacaaaaaagttaaaattatttctgatggaggaataaagtattctggtgatttagcaaaagcatttgcagcaggagcagatgctgtaatgataggatcattatttgcaggaacaaacgagactcctggaaaattaataaaaaaaaatggtaagttatttaaaagttttcgtggtatgggctctgtaggagctatgaataaaggttcagcagatagatattttcaaaaaaaacaaaaagatatgtcaaaatatgtgccagagggcgttgaaggttttgtaaagtataaaggtgatgttggaagcattatatataaattagttggtggcttaaaatcttctatgggatatttaggttctaaaaatattattggtctcagaaataaacctcattttgtaaaa

SEQ ID NO: 204755 - DNA, 676 bp, Unknown
  Bacterial polypeptide expressing nucleotide sequence isolated from the Sargasso Sea
atggcgacattaaaagaatctcttacctttgatgatgttactttagttcctcagtattcatcaattttacctagcgaagcctctatcgagacctctttggggtcagagctgaaacttaaaattccttttttatcttctgctatggatactgtaactgagtctaaaatggccatagccattgcagagcaaggaggtcttggaattattcatagaaacttgagtataaataaacagtgcaatgaagttaggaaagttaaaagcaaaaaacttttagttggggcggctgttggaacatcaaaagaagatattatcagagctaataaactcatagacaatggtatagatcttatagttattgatacagctcatggtcatagtaaaaaagtacttttaacattaaaaaaattaaaaaagattaaaagcaaagtaaaaatatgcgctggaaatatagctacagcggagtctgcgagattactctcaaatgagggtgccgatatactaaaagttggaattggcccaggatcaatatgtacaactagaattgtttcaggcataggtgttccacaaataagtgcagttatggatgtaaaagaaggtataaaaaaaaataaaaaaattaaaattatatctgatggaggaataaaatttttaggggatgcagctaaagctttagctg

SEQ ID NO: 204756 - DNA, 622 bp, Unknown
  Bacterial polypeptide expressing nucleotide sequence isolated from the Sargasso Sea
tacacctgctgcagcaaaatttttgttaaagcttggtgttgatgttattaaagttgggattggacctggatcaatatgcacaacaagattagttgcaggtattggtgtcccacaacttagtgcaatactagaagtaaggaatggaataaaaaataagaatgtaaaaattatttctgatggtgggataaaatattcaggtgatttagcaaaagcattcgctgctggagcagatgcagttatgattggctcactgtttgctggaacagatgaaacaccaggaaaactgataaagagaaacggaaaactatttaaaaattttagaggtatgggctcagttggtgccatgaataaaggatccgcagatcgatattttcaatcaaagcaaaaagactcgtctaaatatgtgccggaaggagtagaaggatttgcaaaatataaaggtaaagttgataatataatctttaaattaattggtggattaagatcttctatgggatacttaggatcaagacaaattaaatatctaagagataaaccacaatttgttaaaataacaaaagctggtttttacgaaagtatggtccataatgttgatatagtcaaaagtgataataaatattaa

SEQ ID NO: 204757 - DNA, 438 bp, Unknown
  Bacterial polypeptide expressing nucleotide sequence isolated from the Sargasso Sea
gtgatatagctaaagcaattgcattgggagctgatgttattatgattgggtctctattcgctggaactgatgaatcgcctggagaggttttcttatcgaatggaagaacttataaatcatatcgaggaatgggctctattgcagcaatgggtaaaggctcagcagacaggtattttcaggaagaaatacaacataatgagaaatttgtgccagagggcgttgaaggtagagtgccttatagaggtacagtggtaaaaataattgagcaattagttgggggcttaaaggcttcaatgggatatactggaaataaaaatttgattgatttcaaaaataaaaccaaagttgtgaagataacatcggcaggtttgaatgagagtcacgtgcatagtatatcaataacaagagagtctccaaattatcagcttaacaaatgaa

SEQ ID NO: 204758 - DNA, 727 bp, Unknown
  Bacterial polypeptide expressing nucleotide sequence isolated from the Sargasso Sea
gttgtgtgatactgcgcatggccatactaaaagagtagcaaatataattaaatttataaaaagaaaaaaatcgagcaaaacatctctgtgcgctggaaatatagctacagccgaagcagcaaaatttttatgcaaacttggagtagacatagtaaaagtaggaattggaccaggatcgatttgtacaactagactcgttgcaggtattggtgttcctcagttaagtgcattactagatgtaaaaaaaggtttaaacaaaaatgttaaaatgatttcagatggcggagttaaattttctggagatattgcaaaagcactcgcagcaggtgcagatgctgtaatggtaggatcaatgattgctggaactaacgaagctccaggtaaaattataaaaaaaaatggaaagttgtttaaagtttttaggggaatgggatccgttggagcaatgaacaaagggtctgctgacagatactttcaaaaaaaacaaaaggatagttcaaaatatgtaccagaaggagtagaaggtttaattaaatataaaggtgaagtatccaagataatttttaaacttattggaggattaaaatcatcaatgggctatttgggttctaaaaatgtcatcaatcttagaaataaaccaaaatttgttaaaattacaaaagctggattttatgagagtatggttcatagtatagatgaggtgaaaaaaaacagccaatatttatga

SEQ ID NO: 204759 - DNA, 502 bp, Unknown
  Bacterial polypeptide expressing nucleotide sequence isolated from the Sargasso Sea
tatggtatcaataaaagaatctttaacatttgatgacgtattactgcttccgcgatactcagacgtcttaccctctgaaacagatatttccctaagcttaaccactaagattaatttgggagtgccgtttttgtcttctgcaatggatacagtgaccgagtctaaaatggctattgcaattgctaaagcagggggtattggaataattcatcgaaacctaaatataagagaacaaacaaaagaaataattaaagttaagaaaaaaaaattacttgtaggtgctgcagttggcacaaacaaagaagatgttgatagagctaaatctttaatagcaaacgggtgtgatttaattgtgattgatacagctcatggacatagtaaaagagtattaaaaacattatcaaagttaaaaaaaattgggaattcaataccgttctgtgttggaatattgctacaggagaagcagcaaaaaagttgtacgatgcgggagcagatattataa

SEQ ID NO: 204760 - DNA, 466 bp, Unknown
  Bacterial polypeptide expressing nucleotide sequence isolated from the Sargasso Sea
atggcctaccagataaataccaattattccgttacttttgatgatgttctgctctcaccagcgtattcagagatcaaaccaaaagatgtagatacatcggttaccattggaaaagtcaaattacatattcccatactctccgctgctatggataccgtgacagagaataaaatggcaatcaatctcgcactacatggtggtctaggtgttattcaccgtaatatgccaattgataaacaagcaagcgaagtaaaaaaagttcatagctttaaagttaacgctaaaaaatttcaaaatgctgtaattaattctaatggaaagattgcggtgggcgctgcaattggtgttgaaaataatgcgtacttacgactattagaattattaaaatttggtgttgatatagtctttattgatgttgctcatgcacatacaaaaacaactttacagtttattgaaaaagcaaaaa

SEQ ID NO: 204761 - DNA, 301 bp, Unknown
  Bacterial polypeptide expressing nucleotide sequence isolated from the Sargasso Sea
atgcagatacgtgaggcgcttacttttgatgatgttttattggttccagctcagtcttctgttttaccgtcagatgtagacacccgaactcaggttacaaaagagataaccttgaatatccctttgctaagctcagcaatggatactgtcacggaatctcaaatggctattactatggctcaagctggcggtatcggggttatacatcgtaaccttgaaattgaagatcaagctgagcaagtacgcagagtaaaaagattcgaaagtgagatagtttataatccaaattacacttggtaaa

SEQ ID NO: 204762 - DNA, 559 bp, Unknown
  Bacterial polypeptide expressing nucleotide sequence isolated from the Sargasso Sea
catggatcctataaaagaagcacttaccttcgacgatgttaccttagcgccgcaatactcaaaagtcttaccgtccgatgtatcaacaagaactatattatcaaatcaattaaaactagatatcccaattctgtcatctgcaatggatactgttacagaatcaaagatggctattgctttagctaaacaaggaggaataggtgttattcatagaaatttaaccatatctcaacaaattaatgaaataaaaaaagtaaagtcaaaaagttttaaagtaggagctgctgtaggaacaaatgaaagtgaattaaatagaataaagaatattctaaaacatgatatcgatctaattgtagtagatacagctcatggacatagtcaaaaagttgcagatacaattttaaaaatcaaaaaaattaaaccaaaaaaaactactttatgtgcaggcaatatagctaccgcagaagcagcaagatttttatctaagttaggggttgatgttataaaagttggtattggacctggttcaatatgcacaacaagactagttgcaggtatt

SEQ ID NO: 204763 - DNA, 544 bp, Unknown
  Bacterial polypeptide expressing nucleotide sequence isolated from the Sargasso Sea
atggatcctattaaagaagcactcactttcgatgatgttactctagcaccaagatactctgaaattttgccatcgcaagttgatacatctacttacttaagtaatgattataaaattaatatacctttgttgtcttcagcaatggatactgtaacagagtctaaaatggcaatcgcgatagcaaaagcaggaggtattggagttatacatagaaattttacaattgataaacaaattaaagaaataagaaaagttaaatctaaaaatcttaaagttggagctgcagttggtgctggagaactagagtcaaaaagagctttagcaataattaaagaaaaaattgatttaatcgttgtagatacagcacatggacatacaaaaaaagtaaaggaaataattaaaacaattaaaaaatataaaaataaaaaaacattattatgtgcaggaaacattgccactgctgaggctgcaaattttttggcaaagcttggtgttgatttaataaaagttggcatcggtccaggctctatttgcacaacacgac

SEQ ID NO: 204764 - DNA, 526 bp, Unknown
  Bacterial polypeptide expressing nucleotide sequence isolated from the Sargasso Sea
atggacaaagtaaaagctaaagcactcactttcgatgatgtgcttcttgtaccttcctactgtgattttcttccaagccaagcatctgtaaagacacgccttacgaaaaatattgatattaatttaccactattatctgccgctatggatacagttacagaatatagaatggcaattgctcttgcagaagcaggaggcataggaattcttcataaaaactgttccatccaagagcaatcaaatgcagtcaggaatgtaaaaaaatatgaaagtggagttgttcgcgatcctactacaataagctctgatcaaacaattgctcaattaaagcaacttacaggagagttaaatatatctggtatgcctgtggttgatgatggagtggtaaaaggaatagtaacaagtagggattttagatatgcagacaatatggatgacatggttgaatcaattatgacgcctcgtgaaaaattaataactgttctcgaaggtacctctcaagaagtggttaagaagatgatgtatg

SEQ ID NO: 204765 - DNA, 663 bp, Unknown
  Bacterial polypeptide expressing nucleotide sequence isolated from the Sargasso Sea
aaaagaaaaaaaataaaaaaactgctctttgcgctggaaatgtagctacatccgaggcagctaaatttttgtacaaattaggtgtcgatattatcaaagttggtataggaccaggatctatctgcactactagattggtagctggtattggtgttcctcaattaagtgcaattttaaatgttagaaatggagtgaaaaataaaaatgtgaaaattatatcagatggaggtataaaatattcaggagatttagctaaagcctttgccgctggggcagatgcggtaatgataggctcattatttgcaggcacagatgaaacaccagctaaattgataaaaataaatggaaaattatttaaaagttttagaggaatgggatctgtgggtgctatgaacaaaggttctgcagacagatattttcaatcaaaacaaaaagataactcaaaatatgtccccgaaggtgttgagggtctagccaaatataaaggtagagttaatgatgtaatttttaaattaattggtggtttaagatcatcaatgggttatctaggctctaaacaaataaaatatttgagagacaagccacaatttgtcaaaattacaaaagcaggattttatgagagtatggtccataatgttgatatagttaaaggtgaaaaataaa

SEQ ID NO: 204766 - DNA, 820 bp, Unknown
  Bacterial polypeptide expressing nucleotide sequence isolated from the Sargasso Sea
gtgcctgatcattcagacattcttcctaaagacgttgatttaaaaactcgtttaactcagaacttagatcttaatattcctttgctttcagctgcaatggataccgttactgaatcccgcatgggaatagctttaagcgaattgggtggaattgggattattcataaaaatctatccatagaagctcaagctgccgaagtaagaaaagttaagaaatatgaaagtggtattgttagagaccctatcactatcagatcggataatgaagtcggtgaacttgtacagctaactaaagagcttaatatttcaggtatgccggttgtagataatggagcgttggtcggcatagtgaccagtagagattttagatatcaagaaaatctatctgcaaaagtttcagacattatgactccgaaagatagattagttacagctaaagaaggtgagagtccagatgtaattaaaaagttgctccaagaaaatagaattgaaaaaatcctccttatagacgattcctttaaattaactggactggttacccttaaagatatcaataagtctctggactttccagatgcagctcgtgatgaagaaggaagactcttagctggtgctgctataggaacaaaggcagatactttagatagatgtcaggccttaattgatgcaggagtcgatgtgctggtagcagatagtgctcatggacactctgaaggggtcttaaatcaaatcaaggcagtaaaatccaattttaaagatatacaaataattggtggaaatgttgctacaggagagggtgctctagctttagtgaaagcag

SEQ ID NO: 204767 - DNA, 576 bp, Unknown
  Bacterial polypeptide expressing nucleotide sequence isolated from the Sargasso Sea
catggaaaaattaaaacataaagcgttaacgttcgatgacgtcttactcttaccaagatatagcgactttcttcctagtgaagctagtataaagtcacatttaacaaaaagtatttctttaaaaatgccattgttgtctgcagcaatggatactgtaactgagtctaggatggcaatttctctggcagaagctggaggaattggcattattcataaaaataattctattgacagccaagctgctgaagtgcgagcggtaaaaaaatatgagagcggaattgtaagagatcctgtaactatacattctcaaaaaacaattggagaattaaggcagctaacaagtgagttaaaaatttcaggaatgcctgttgtagatgatggaaatctgcgaggaatagtaacaggcagagattttagatatgcagaaaatatggaagctaaagtagccacaataatgacccctttatcaaagctggtaactgttaaagagggcttttctcaggaagatgtgatgaaattaatgtacaagaatagaatagaaaaagtattagttattggagaagatgatgttcttac

SEQ ID NO: 204768 - DNA, 668 bp, Unknown
  Bacterial polypeptide expressing nucleotide sequence isolated from the Sargasso Sea
catggaaaaattaaaatataaagcgttaacgttcgatgacgtattacttttacctaaatacagcgacttccttccaagtgaagcaaacatcgaatcaaatctaactaaaaatatatctcttcaaatgccgctattatcagcagcaatggacactgttacagaatcaagaatggctatctctttggcagaggcaggaggtattggtgtaattcataaaaataattctattgaagaacaagcccaagaagtcaaaatagttaaaaaatatgaaagcggcattgtaagagatcctgtcactattaattcaaacaaatctattggtgaattaaaacaattaacaagtgagttaagtatttctggcatgcctgttgtagatgaggggaaacttaaaggtattgttacaagtagagattttagatatgcagaaaatatggaggctaatgtttcttcaataatgacatcttttgacaaattaataactgttgaagaaggatttactcaagaagatgttatgcaattaatgtataccaatagaatagagaaagtattagttctcaatgaaaataaagatttatctggattagttacaatgaaagatatcgaaaaatctgcacaatatccaaatgctactaaagattcttcaggtagacttcgcgtggctgctgctc

SEQ ID NO: 204769 - DNA, 579 bp, Unknown
  Bacterial polypeptide expressing nucleotide sequence isolated from the Sargasso Sea
acccgtcgcaaaaaaagatcgccacgggggtattataacaaatcgagatattcgctttgaaaccaacgatctgctttctgtatcagaatgtatgacatcaaaagatcttatatctgttccagtcgggacctcacttgaaaaggctaaggatattcttcaagagcatagaattgaaaaactattagtagtagacgaagatcataacttaactggtttaattaccgttaaagatattcaaaaaaatgaagactaccctcacgcttgtaaagataataacggtcgtttaagggttggtgctgcagttggagtctcaggagatgctattgaaagagcatcgcagctcgcaaatgccgatgtggatgctatagtgatcgatactgcacatggtcattcaaaaggtgtacttaggtcaattgaaaagatcaagagctcacatccaactgttgctttaattgctgggaatgttgcgacaggtgatggagcgcaggctatgatcgacgcaggtgttgattgtgtgaaagttggtattggtgcaggagcaagttgtacaacaagggtaattgctggagtaggcgtacc

SEQ ID NO: 204770 - DNA, 647 bp, Unknown
  Bacterial polypeptide expressing nucleotide sequence isolated from the Sargasso Sea
aagttctactctttgtgttggaaatatagcaactggtaaagctgcaagatttttggctgataatggtgttgatatagttaaagttggtatagggccaggatctatttgcacaaccaggttagttgctggtattggtgtaccacaactaagtgcagtcattgacgttaaaagatctttaaaaaattataaaacaaaaataatttcagacggtggtattaaattttcaggagacttagcaaaagcaattactgctggtgcagacgctataatgattggatcattgttttcaggaacaaacgaaagtccagggaaaattataagatataaaggaaaaatgtataaaaactttagagggatgggttcggttggtgctatgaatgcaggttcggcagatagatattatcaaaaaaaaaataaagatatcaaaaaatatgttccagagggagtagagggactagtcaagtacaaaggtacagtggaaaagattattttcaatctaattggtggattaaaatcttcaatgggatatttgggtgcaaaaaaaataaaagatttacaggaaaaaggagagtttcttaaaattagcaaagctggattttatgaaagtatggttcataacgtagatcatgtaattaaaaatgaataaa

SEQ ID NO: 204771 - DNA, 844 bp, Unknown
  Bacterial polypeptide expressing nucleotide sequence isolated from the Sargasso Sea
gacgatgtactgcttctccctgcgcactcggaaatcctcccaacatcagtaagccttgaaacaaaaataacacgctcggttggcctaaaaattcctttaatttcctccgctatggatactgtaacagaatccaggcttgctatcgctatggctcaagagggcggtttaggtgtgatacataaaagcatgagtatcgaaaaacaggctagagaagttcgcagtgtgaaaaagtttgaaagtggcgttgttcgggaccctttcaccattccagttacggcaaccatcagagatttgatttccttgatgcaagagaacagcatttcaggcatgcctgttactgatagtgccggcttggttggtattgtcaccagtcgtgatgtgcggtttgaatcgaaccttgatgcgactgttgataagataatgacgccgaagcaggatttggtgacggtcaaagagaactttgaattggatgaggttaaagaacttttacataagcaccgaattgaaaaaattcttgtcgtcaataatgagttcgaattaaagggcctgataaccctaaaagatattcggaaatctgaggatttccccaatgcggcgaaagatgatttaggtcgactccgagccgcagctgccgttgggccaagtttggatgctagggagagggtttcggcaatcgtcgatgctggtgtagatgtccttgttgttgatacggcccatgggcactcacagcgcgtgctagatcaagtaaagtctataaaatccgactatccagagctaccagttataggaggtaatatcggcaccgcggacgcggcgaaggccttggctgaggcaggtgcagatg

SEQ ID NO: 204772 - DNA, 739 bp, Unknown
  Bacterial polypeptide expressing nucleotide sequence isolated from the Sargasso Sea
tatggttcctataaaagaagcactcacctttgacgatgtaacattagcgccaaattactcagaaatattaccatctgaggctgataccacagtatctttgaccaataatctgaaactaaaaattccacttttgtcatctgcaatggacacagtcactgaaagcaaaatggcaatcgctattgcaaaagctggtggcataggagttattcacagaaacttagatattaaaacacaagtttcagaaattagaaaagttaaaaaatattctttaaaagttggagctgcagttggagcgtcagagaaagaatttattagagcaaaagaaattattaatgaaggtgttgacttgattgtagttgataccgctcatggacatacaaaaaaagttggagaaattattaaatatattaaaaaaagtaaaaacaacaaaatcgctttgtgtgctggaaatattgcaactccagaagctgcaaaatttttaataaagttaggagcagatataattaaagttgggattggtccagggtcaatttgtactacaagattagttgcgggcattggggttccacagctaagtgcaattttggcagtaagaaatggtataaaaaacaaaaaagttaaaattatttctgatggaggaataaagtattctggtgatttagcaaaagcatttgcagcaggagcagatgctgtaatgataggatcattatttgcaggaacaaatgaaactcctggaaaa

SEQ ID NO: 204773 - DNA, 735 bp, Unknown
  Bacterial polypeptide expressing nucleotide sequence isolated from the Sargasso Sea
catggttcctataaaagaagcacttacctttgacgatgttacattagcaccgaagtactcggagatattgccatctgaagtaaatacatcagtaaatttaacgataaatttaaaacttaaaattccacttttatcttctgcaatggacactgttacggaaagcaatatggcaatagcaattggtaaagctggaggaataggagttattcatagaaatttagatatccaaaaacaaatattagaaattaaaaaagttaaaaaacaaaaactattagttggtgcagctgttggagcgtctattgctgaatttgatagagcaaaagccattcttaaagagggtgttgatttaatcgtagtagatactgcccacggtcacacaaaaaaagtaggagaaatagttaaatttataaaaaaaattaaagataagaacatcgcgttatgtgctggaaatattgcaacaccagaggcagcaaaatttttgattaaattaggggtggatattattaaagttggtattggaccaggatcaatttgtacaacaaggttagttgctggaattggtgttcctcaactaagtgcaattttatctgtaagaaatggacttaaaaacaaaaatgtaaaaattatttctgatggcggaataaaatattctggtgatttagcaaaagcttttgcagcaggggcagacgctgtgatgataggttctttatttgcaggaacagatgaaacacctgg

SEQ ID NO: 204774 - DNA, 611 bp, Unknown
  Bacterial polypeptide expressing nucleotide sequence isolated from the Sargasso Sea
catggttcctataaaagaagctctcacctttgatgatgtaactttgatgcctaagtattctgagatcttaccctcagatgttgataccagcattaaacttacaaattatttaaaattaaaaattcctctattatcttcagctatggatactgttaccgaaagtaaaatggctatcgcgatagcaaaagcaggtgggataggaattattcatagaaatttagatataaaaaaacaaattcttgaaattaaaaaagtaaaaaaacaaaaacttttagtgggcgcagctgttggggctggaccaagtgaatttaaaagagcagaggcaatacttaaagaaaaaattgacatgattgttgttgatactgcgcatggacatacaaaaaaggtctcagaaataattaagtttatcaaaaaaacaaaagataaaaaaactgctctttgtgctggaaatattgctacacctgctgcagcaaaatttttgttaaagcttggggttgatgttattaaagttgggattggacccggatcaatatgtactacaagattagttgcaggtattggtgtccccacacttagtgcaatactagaaagtagaaatggaataaaaaata

SEQ ID NO: 204775 - DNA, 556 bp, Unknown
  Bacterial polypeptide expressing nucleotide sequence isolated from the Sargasso Sea
atggataaagtaaaacaaaaagcattaacattcgatgatgtgcttcttctgccaaagtatagtgactttttaccaagtgaagcatcaactcaaacaaaactttcaaaaaatataaacattaaagttccattggtatctgctgcgatggatactgtaactgaatcaagtatggctatagccttagctgaagcaggaggtattgggattattcataagaataattcaattgaagagcaggttgctctcgtgaaaaaagtcaaaaagtatgaaagtggtgttgtaagagatccaattacaattgactcaaaaaaatctattggagaattaattcaactaacttctgaattaaatatttctggtatgccagttgttgatgatggcgatttaaaaggaatcgtaactagtcgagactttaggtacgcagataatatgaatgcattagtgtcatcaattatgactccatttgaaaaattagtaactgttgaagaagggacccaacaagattatgttaaaaaactaatgcacgaaaacagaatagaaaaaattctagtagtag

SEQ ID NO: 204776 - DNA, 685 bp, Unknown
  Bacterial polypeptide expressing nucleotide sequence isolated from the Sargasso Sea
tatggaccctataaaagaagcactcacctttgatgatgttacattaaaaccaaaatactcagaagtattaccatctcaagttgatactagtattaaattaacaaattatcttaaattagatattcctcttttgtcctcagctatggatactgttacagaaagtaaaatggctattgaaatagccaaacttggaggattaggtgttattcatagaaatttagatattaagaaacaagtatcggaaattaaaaaagttaaaaaattaaagcttttagttggtgctgctgttggagcaggacctaatgaatttattagagctaaagcaatactaaaagaggatttagatatgatagttgttgatactgcacacggtcatacaaaaaaagtttcagaaattatcaaattcataaaaaagataaaaaaaaataaaactgcgttgtgtgcaggaaatattgcaacacctgaagctgctaaatttttattaagactaggcgttgatataattaaagttggaataggtccggggtctatttgtactacaagattagttgcaggcataggagttccacaattaagtgcaattctgagcgttagaaaaggagttaaaaataaaaatgtaaaaataatttcagatggtggaataaaatattcgggtgatttagccaaagctttgcagctggtgcag

SEQ ID NO: 204777 - DNA, 739 bp, Unknown
  Bacterial polypeptide expressing nucleotide sequence isolated from the Sargasso Sea
aaagaaagtgaaaaagaaaaaacttattgtaggagctgccattggaacatctaaagaggacatttatagagcaaataaattaattgaaaataatatagatatgttggttatagacacggcgcatggccatagtaaaaaagttttggatattttaaaaaagttaaaaaaaattgttaaaaagattcctatatgcgccggtaatatagcaacagcagaatccgcaagagctttgtcgaacgagggcgcggatatattaaaagttggtattggtcccggatcaatatgtacaacaagaatagtgtcaggaattggtgttccacaaataagtgctgtcatggatgtaaaaaaaggtattaagaaaaacaaaaaaactaaaattatctccgacgggggagtaaaatttttaggagatgctgcaaaagcaatagcagcaggagcagatgcggttatgatgggatcagtatttgcaggcacagaagaaagtcctggaaagaaatttaaatataaaaaaaagttttataaaacttttagaggaatgggatcaattggagccatgatggatggatcctcgggtagatattttcaaaaaaattttaaagataaatccaaatttgttccagagggtgttgaaggtagggtagagtataaaggtaaggttgaaaaaattctttatcaactgaaaggtgggcttaagtcttctatgggatatataggagcaaaaaatataaaaagtttacaa

SEQ ID NO: 204778 - DNA, 816 bp, Unknown
  Bacterial polypeptide expressing nucleotide sequence isolated from the Sargasso Sea
attcggagttattcacagaaatttgcctataagtgatcagttattagaaataaaaaaagttcaaaaaaaagggcttgcagttggggcagcagttgggaccaatgataccgaactatctcgtgcagaaaaaattattaaaagtaaagttgatttaattgttgtggatacagcgcatggccatactaaaagagtagcaaatataattaaatttattaaaaaaagaaaatcgagtaaaacaactttatgtgcaggcaatattgcaacagcagaggcagcaaaatttttatgcaaacttggagtagatatagtcaaagtaggaattggaccaggttcaatctgcacaactagacttgttgctggtattggtgttcctcagttaagtgcattactagatgcaaaaaaaggtttaagcaaaaatgtaaaaatgatttctgatggtggaattaaattttctggagatattgcaaaagcgcttgcagcaggtgcagatgcggtaatggtaggatcaatgatcgctggcaccaatgaggctccaggtaaaattataaaaaaaaatggaaagttattcaaagttttcaggggaatgggttcagttggagcaatgaacaaggggtctgctgatagatattttcaaaaaaaacaaaaggatagttcaaaatatgttccagagggagtagaaggtttaattaaatataaaggcggtgtatctaagataatttttaaactcattgggggacttaaatcatcgatgggctacttgggttctaaaaatgtaattaatctaagaaataaaccaagatttgttaaaattacaaa

SEQ ID NO: 204779 - DNA, 1078 bp, Unknown
  Bacterial polypeptide expressing nucleotide sequence isolated from the Sargasso Sea
tatggttcttttaaaagaagcacttacctttgacgacgttacattagcgccaaattattcagaaatattaccttctgaggcagatactacggtatctttaacaaatcatcttaaattaaaaattccacttttgtcatctgcaatggacacagtcacagaaagcaaaatggcaatcgctattgcaaaagctggtggtatgggagttattcacagaaacctagatattaaaacacaagtttcagaaattagaaaagttaaaaaacattctttaaaagttggagctgcagtaggagcgtcagagaaagaatttactagagcaaaagaaattattaaagaaggagtagacttaattgtagttgatacagctcatggacatacaaaaaaagttggagaaattattaaatatattaaaaaaagtaaaaataataaaattgctttatgtgctggaaatattgcaactccggaagctgcaaaatttttaataaagttaggtgtagatataattaaagttgggattggtccgggctcaatttgtactactagattagttgcgggtatcggggttccacagctaagtgcaattttgtcagtaagaaatggtataaaaaataaaaaagttaaaataatttctgatggaggaataaagtattctggtgatttagcaaaagcttatgcagcaggagcagatgctgtaatgataggatcattatttgcaggaacagatgagactcctggaaaattaataaaaaaaaatggtaagttatttaaaagttttcgtggaatgggttctgtaggagctatgaacaaaggttcagcagatagatattttcaaaaaaaacaaaaagatatgtcaaaatatgtgccagagggcgttgaaggttttgtaaagtataaaggtgatgttagaagcataatatataaattagttggtgggttaaaatcttctatgggatatttaggttctaaaaatattattggtctcagaaataaacctcattttgtaaaaattactaaagcaggtttttatgagagcatggttcataatgttgatgttattaagagtgatagtaaatactaa

SEQ ID NO: 204780 - DNA, 958 bp, Unknown
  Bacterial polypeptide expressing nucleotide sequence isolated from the Sargasso Sea
atgggaaccattaaagattcgttaacatttgatgatgtaacgcttgttcctcaatattcttctatacttccaactgatgctataacaaactgcaaactatcaaaaaatttaaatttgcaaatacccttaatatcttctgctatggatacagtaactgaatctaaaatgagtatagctatatcaaaatctggtggaattggagttattcacaggaatttagcaattcagaaacaagttgcagaagttcaaaaagtaaaaagaaaaaattatattgtaggagcggctattggagtaaatgaaaaagatttagaaagagcggaagaactatcaagaattaagactgatttaattgtaatagatactgctcacggtcacactaaaaaagttttgaacatgataaggaaaataaaaaaaaaattaaaaaattcgacactttgcgttggaaatattgcaactggtaaagctgcaaaatttttagcagataatggggttgatatagttaaagtaggtattggccctggatctatttgtacaactcgtcttgtagcaggtattggtgtacctcaattaagtgcaattatggatgttaaaaaagctttaaaaaaatataaaacaaaaataatttcagatggaggtataaaattttcaggagacttggctaaagcaattgctgcaggtgcagatgctataatgataggatcacttttttcaggtactacagagagtcctggtaaaattattagatttaaaggcaaattatataaaaattttagaggaatgggatcagttggagctatgaatgctggatctgcagacagatattatcaaaaaaaaaataaagatgttgcaaaatatgttcctgagggagttgagggaatggttaagtataaagggtcagtaaaggaaattatttataatttaattggaggattgaaatcttcaatgggttacatgggag

SEQ ID NO: 204781 - DNA, 312 bp, Unknown
  Bacterial polypeptide expressing nucleotide sequence isolated from the Sargasso Sea
catggaaaaattaaaatataaagcactaacatttgatgatgttttacttcttccgaagtatagcgactttcttcctagtcaagcatgcatcgaatccaaattaactaaaaacattagtcttaagactccgcttatttctgcggccatggatactgtaactgaatcgaagatggcaatttctttagcagaagctggcggtattggaataattcacaaaaataattcaatttcagatcaagcggccttagttaaatctgttaaaaaatacgaaagtggcattgttagagatcctgtaacgattggttctaataa

SEQ ID NO: 204782 - DNA, 764 bp, Unknown
  Bacterial polypeptide expressing nucleotide sequence isolated from the Sargasso Sea
cctgacttttgacgatgttttactcgtaccttcatattctgccataatgcctgctgcagtaaatgtaaagactaagattacaaaaaaaatatccttaaacataccaatcattagtgctgcaatggataccgtaaccgaggccagaactgctattgctatggctcaagagggaggattgggtgttattcataagaatatgagtatcgaggatcaatcggatgaaatacaaaaggttaagaagtatgaaggtggaatgataattgagccacatactatttcacctcaatcaaccggaaagcaggcacttgatataatgacaactaagaattttactggattaccggtcacagagaatggtggcacacttttaggaataataactatgagagatttgagatatgaaaaaaatctccattataaagttagcaaattaatgactcaaaaagaaaaccttaaagttgttgaagctggaactagtcccaacgaggcaagagaattattacataagtataaaattgaaaaactaccagttgtagataaaaagtttaggcttcagggattgattactatgaaggatattcaaaaaagtaagcaattcccttctgcatctaaggataaacaaggtagattgttggcagcagcagctattggtgttgggtctgatatggaagatagagtaaaaagtttgattaaaagtggactagatattttgtttattgatacagcccacgctcattctaaaaaagttatagatgcattaaaat

SEQ ID NO: 204783 - DNA, 427 bp, Unknown
  Bacterial polypeptide expressing nucleotide sequence isolated from the Sargasso Sea
catgaaagtccgagaagcaattacctttgatgatgtattacttgagccttcagaatctgctgtcttaccctctgaaacaattttaaaaacaaaaattacaaaaaatattgatcttaatgttcctcttgcttcagcagcaatggatacagtaacagaatcaaatatggcaattgctatggctcaggctggtggtattggtgtaatacatagaaacttagaaattgaacaacaaattaaagaggtaaataaagtaaaaaaatatgaatccggaatggtggttaatccacttactatttctccaaactctacccttgaagatgctttagctctaatgaaagaaaataatatttcaggagttcctgtaacagacacaaaaacgaataaacttgagggaattttgacaaatagagatgttagatttgcatct

SEQ ID NO: 204784 - DNA, 1069 bp, Unknown
  Bacterial polypeptide expressing nucleotide sequence isolated from the Sargasso Sea
tatgactataattaaagattctttaacttttgatgatgtaacactagtccctcagtattcttccatattgcccaataatacaattactgactgcaaattatcgaataatttaaaattaagaatacctttaatatcgtcagcaatggatactgtgaccgagtctaaaatgagcttggccatgtcaagatctggtggaattggagttattcatagaaatttatcaattgaaaaacaaattattgaagttcaaaaagtcaaaaatagtaattgcttagttggagcagctatcggagtgggtcccaaagacattgaaagagcggaagaattagcaagaattaaaacagatctaatcgtaatagatactgctcacggtcatacaaaaaaagttttatctataatcaaaaaaattaagaaaaaattaaaaagctcaactctgtgtgttggaaatattgcaactggaaaagctgcaaaatttttagcagataatggagtagatatagttaaagttggtataggaccaggatcaatttgtacaacccgattagtagctggaattggcgtgcctcaattaagtgcagttatggatgttaagaaagctttaaaaaattataaaacaaaaataatttctgacggaggtataaaattttcaggagatttagcaaaagcgattgctgcaggtgctgatgctattatgataggatcactattttcaggaacagtagaaagtcctggaaaaattattaaatataaaggtaaagtatataaaaattttagaggaatgggttctattggagctatgaacgctggatctgctgatagatattatcaaaaaaaatttaaggatgttacaaaatatgttccggaaggagttgaaggaatggttaagttcaaaggtccagttaaagaaattatatataatttagttgggggattaaaatcttctatgggttatttaggagctaaaacaataaatgatttacaaaaaaaaggtctatttctaaaaattagtaaggctgggttttatgaaagcatggttcacaatgtagatcatgtaataaaaaatgaataa

SEQ ID NO: 204785 - DNA, 787 bp, Unknown
  Bacterial polypeptide expressing nucleotide sequence isolated from the Sargasso Sea
aatgacgatagagaaaactgccttaacattcgatgatgtacttctcaaaccgaactactcggatgtccttcctcgcgaaacaaatctctcgacaaaactaacaaggaatctttcaattcaaattccattattgtctgctgcaatggatactgtgaccgaatatcagcttgcaatcgctattgctcaagagggtggcatgggaatcattcacaagaatttcagcattgaagatcaagcttcacaagtgaatagggttaaaaagtttgcaagcgggattatttctgatccagtcacagtgagtcctgacataaccatcagagaggtattggatataacaaaattcaataatatctcaggtgtccctgtcgtggataatggcataacagtgggtattgtcaccaatcgtgatctaagatttgaaaccaatcttgatggcttggtaagcagtgtcatgactcccaaagaaaagcttgttactgtcaaagagggtgcagatgaggaagaggtcttgggattgctccatcagcatagaattgagaaagtgctagtggttaatgattccttcgagctaaaaggaatggtcactgccaaggattttcagaaagcaacagactttcctcttgcatcaaaagatgggaatggagcgcttttggttggagcagctgttggtgttggtgatggttctgaggagagggtggaggcgctcaaatcagctggtgttgatgtgatcgttgttgataccgcacatgcacacaccgaaggggtgatcaatcaagttaaatcataa

SEQ ID NO: 204786 - DNA, 805 bp, Unknown
  Bacterial polypeptide expressing nucleotide sequence isolated from the Sargasso Sea
atggacaaagtaaaagataaagcactaactttcgatgatgttctgcttgttcctgcctatagcgactttcttccaagcgaagcatctctgaagacttccctaacaaaaaacattgaaattaacctgccgcttgtttcagctgcaatggacactgttacagaatataggatggctatagcgcttgctgaagctggaggcataggtattcttcataaaaattgctccatcaaagagcaaatgaatgcagtaagaaatgtaaaaaaatatgaaagcggtgtcgttcgtgatccaacaaccataagttcaaataagactataggccaactaaaacaacttactgatgagctcaatgtatctggaatgcctgttgtcgatgatggagttgtaaaaggcatagtaaccagtagagactttagatatgcagacaatatggatgatttagtttcatcaattatgactcctagagaaaagttaataacagtatctgaagatacatctcaagatgttgtaaaaaaattaatgtatgaaaataggattgagaaggtgcttgtgcttaacggggaggagctcaccggacttgtaacgatgaaagatattgagaaatctgaaaaacatccaaatgcaacaaaggatgaagcaggacagctaagagtaggagctgcaataggaactggagctgaaacaatggaaagagcaaaagctttatatgaagcaggcgttgatttattcgttattgatagtgctcatggccatttcaagaatgttgtgaaaacaattaaagctataaaaaagagttttctagtaa

SEQ ID NO: 204787 - DNA, 1078 bp, Unknown
  Bacterial polypeptide expressing nucleotide sequence isolated from the Sargasso Sea
atggttcctataaaagaagcacttacctttgatgatgttacgctagtacctaaatactcagaaatcttaccttctgaggttgacacaagtataaaactaaccaaaagcttgaagttaaaaattccaattttgtcttcagccatggatactgttacagaaagtagaatggcgatagctcttggaaaagctggtggattgggaataatacatagaaatttggatattaaaaaacaagttttagaaattaaaaaagttaaaaaacaaaaattattggttggagctgctgtcggagctgggccaaatgaatttaaaagggcttatgcaattttaaaagaaaatatagatatgattgtagtggatacagctcacggacataccaaaaaagtttctgaaataataagatatattaagagaataagaaataaaaccactgcgttgtgtgctggaaatatcgctacgcctgaagcagcaaagtttctacttaaattaggagtagatattttaaaagttggaattggaccaggctctatatgtactacgagattagtagctggtattggagtaccacagttgagtgcaattttgagtgttagaaacggaactaaaaataaaaatgttaaggttatttctgatggaggtataaaatattctggagacttggctaaagcttttgctgcaggagctgatgcagttatgataggatcattatttgcaggaactgatgaaactccgggtaaattaattagaagaaatggtaaattatttaaaagctttagaggaatgggatcagtaggtgcgatgaacaaaggatcagcagaaagatattttcaatcaaaacaaaaagatatttctaaatatgtacctgaaggtgttgaaggatttgcaaaatataaaggaaaagtaagcgatatcatttataaactaattggtggtctaagatcatctatgggctatcttggttcaaaacaaataaaatttttaagagataaaccaaaatttgttaaaataacaaaagcaggtttttatgaaagcatggttcataatgttgatattgtaaaaaatgatagtaaatactaat

SEQ ID NO: 204788 - DNA, 937 bp, Unknown
  Bacterial polypeptide expressing nucleotide sequence isolated from the Sargasso Sea
aatggatactgttacagaaagtaatatggctatagctattgctaaagctgggggaataggagttatccacagaaatttagatattaaaaaacaaatcttagaaattaaaaaagttaaaaaacaaaaattgttagttggtgcagctgttggagcatcaattgctgaattcgatagagcaaaagccattcttaaagagggtgttgatttaattgtagtagatactgcgcacggccatactaaaaaagtgggagaaatagttaaatatataaaaaaaattaaaggtaaaaatactgctttatgtgctggaaacattgcaacaccggaagcagcaaaatttttgatcaaattaggggtagatattattaaagttgggattggaccaggatcaatttgtactacaagattagttgctggaataggtgttccacagttgagtgcaattttagcagtaagaaatggacttaaaaataaaaatgcaaaaataatttctgatggtggaataaaatattctggtgacttggcaaaagcttttgcagctggagcagacgcagttatgataggctccctgtttgcaggtacagatgaaactcctggtaaattaattaaaaaaaatggaaaattatttaaaagttttagaggtatgggatcagtaggtgctatgaacaaaggctcagcagataggtattttcaaactaagcaaaaagatacatctaaatatgttccagaaggagtagaaggttttgtaaaatacaaaggagatgttggcagcattatatttaaattaattggtggtcttaaatcatctatgggttatcttggttcaaaagaaattgtaaaattgagaaataaaccacaatttgttaaaattactaaagctggattttatgaaagtatggttcataatgtggatgtaattaaaaatgatagtaaatattaa

SEQ ID NO: 204789 - DNA, 721 bp, Unknown
  Bacterial polypeptide expressing nucleotide sequence isolated from the Sargasso Sea
atgttgcgtatagcagaacaagcactgacattcgatgacgtagttttggtgccagaacactcagacattcttcccaaggatgttgatctaaagactcgcttaacaaaaaatatctctttaaacattccattggtttcggctgccatggatacggtcacggaatctaagatgggaattgcaatcagtgaattaggtggaataggagttattcataagaatttatcgattcaagatcaagctactgaagttagaaaagtaaagaaatatgaaagtggtgtggtgagggaccccataaccataaggtctgataaacaagttggcgaattaatacaattaacgaatgatctaagtatttcaggtatgccagttgtcgatgatggagaactagtaggaattgttaccagcagagattttaggaatgaaagaaatctaggggcaacggttgctgagattatgactcctaaaaataagttagttacagctaaggaaggagaagacttagaagttattaaagcactgcttcaagacaacagaatagaaaaaatcctattggtggatgaaaaatttgaattaactggactagtaacactaaaggacatcaataagtctcttgattttcctaatgctgctagagattctgagggaagattgatagttggcgcagctattggaactaaagcagatactttggagagagcttctgctctaattgagtctggag

SEQ ID NO: 204790 - DNA, 628 bp, Unknown
  Bacterial polypeptide expressing nucleotide sequence isolated from the Sargasso Sea
tgaagcgacagaagatttaataaaagcaggtgcagattgtgtaaaaattggcattggtgcaggttctagttgcacaacaagaatcattgctggagttggagtaccacagttatcagctgttatggactgtgctcaagttggaataaaaaacaaaatacctattattgcagacggtggtattaggtatagtggggatattgcaaaatctttagctgctggtgcaaatgtagtaatgcttggaggtatgcttgcaggaatggatgaaagtccaggagaaactatcgtttatgaaggaagaagatataagtcttatagaggtatgggttcactagctgcaatgaaagaaggaggcggcgagagatattttcaacaagaaaaagatgaattaaaattggttccagaaggaattgaaggaatggttccatttagaggtccagttaataatacaattttccaattaattggaggtttaaaatcttcaatgggctattgtggcgctaaagatctaaagtcattatacgaaaataaaaaatttattgaaatttcatctgcaggagttaaagaaagccaccctcacgaagtaagtattattaaagaagccccaaactatcaagggcacgataagtaa

SEQ ID NO: 204791 - DNA, 188 bp, Unknown
  Bacterial polypeptide expressing nucleotide sequence isolated from the Sargasso Sea
aatgaaaaacagaccaccctttaagcaggctttgacatttgatgatgtattgcttgttcctcagaaatcaagcattttaccgaaagaagtaaatttaaaaactaagctaacccagaaaattgaaatgaatataccattgctttccgcagctatggatacggtaaccgaaagtggtatggctgttgctc

SEQ ID NO: 204792 - DNA, 525 bp, Unknown
  Bacterial polypeptide expressing nucleotide sequence isolated from the Sargasso Sea
catgaaagtccgagaagctattacctttgatgatgtattacttgagccttcagaatctgccgtcttaccttctgaaacgattttaaaaacaaaaattacaaaaaatattgatcttaatgttcctcttgcttcagcagcaatggatacagtaacagaatcaagtatggcaattgctatggcgcaagctggaggaattggcgtaatacatagaaacttagaaattgaacagcaaattaaagaggtaaataaagtaaaaaaatatgaatccggaatggtggttaatccacttactatttctccagactctacacttgaagatgctttagctctaatgaaagaaaataatatttcaggagtgcctgtaacagacataaaaacgaataaacttgaaggaattttgacaaatagagatgttagatttgcatctaataaaaatcaaaaagtttctgaacttatgactaagaatgatttgattactgttaaagataatgtttctgaaaatgaagcaaaagaaatacttcataa

SEQ ID NO: 204793 - DNA, 628 bp, Unknown
  Bacterial polypeptide expressing nucleotide sequence isolated from the Sargasso Sea
tatagcaacagctgaggcagcgaaatttttatgcaaactcggagtggatatagtaaaagtaggaattggaccaggatcgatttgtacaactagacttgttgctggtattggtgttccacaattaagtgcattactagatgtaaaaaaaggtttaaccaaaaatgttaaaatgatttcagatggaggagttaaattttctggagatattgcaaaagcacttgctgcaggcgcagacgctgtaatggtaggatcaatgattgctggaactaacgaggctccaggtaaaattataaaaaaaaatggaaagttgtttaaagtttttaggggaatgggatcagttggagcaatgaacaaagggtctgctgatagatatttccaaaaaaaacaaaaagatagctcgaaatatgtcccagaaggagtagaaggtttaataaaatataaaggtgatgtatccaagataatttttaaacttgttggaggattaaaatcatcaatgggctatttaggatctaaaaatgtcattaatcttagaaataaaccaaaatttgttaagattacaaaagctggattttatgagagtatggttcatagcatagatgaggtgaaaaaaaatagtcaatatttatga

SEQ ID NO: 204794 - DNA, 485 bp, Unknown
  Bacterial polypeptide expressing nucleotide sequence isolated from the Sargasso Sea
aatggcttaccagataaatactaattattctgtcacttttgatgatgttctgctttctccagcttattctgagataaaaccaaaagatgtagatacttctgttaccattggaaaaataaaattacacattccaatactctccgctgctatggatactgtgacagagaataagatggctatcaatttagcactaaatggtggtcttggggttattcaccgtaatatgccgattgataaacaagcaagtgaggtcaaaaaagttcatagcattaatgttaacaaaaaaaaatatgaaaatgctgtaattaattctaacaaacagattttggtaggagctgcaatcggcgttgaaaataatgcttatttacgactattagaattattaaaagttggcgttgatatagtttttattgatgttgctcatgctcatacaaaaacaactttacagtttattgaaaaagcaaaaaaagttttaaaaaaaacac

SEQ ID NO: 204795 - DNA, 170 bp, Unknown
  Bacterial polypeptide expressing nucleotide sequence isolated from the Sargasso Sea
tatgggaacaataaaagagtctttaacctttgacgacgtattattaattccaaaatattctgatgtattaccatctgaaacagatatttcattaaacttatctaaaaaaataactttaaaagtaccgttcttatcctcagctatggatacagttactgagtctaaaatgg

SEQ ID NO: 204796 - DNA, 234 bp, Unknown
  Bacterial polypeptide expressing nucleotide sequence isolated from the Sargasso Sea
aatggtctataaaataaatacaaactattcagttacttttgacgacgtacttctttctcctgcttattctgaaattaagcctaaagatgttataacttcaaccactcttggtaacttaaaattacatatacctataatatctgcagcgatggacacggttacagaaaacaaaatggccattaacttatctctcaaaggtggtcttggtgtaattcaccgaaatatgccaatcga

SEQ ID NO: 204797 - DNA, 330 bp, Unknown
  Bacterial polypeptide expressing nucleotide sequence isolated from the Sargasso Sea
tatggataaattaaaacataaagcgttaacattcgatgacgttctacttcttccccgttatagtgactttcttccaagtgaggcagacatatcatctaatttaacaaagaacatcactttaaagatgcctcttttgtcagctgccatggatacagtgactgaatcaaaaatggctatatcacttgctgaagctggaggaattggtgttatacataaaaataactcaattgaaaaacaggctagtgaagtaaaatcagtgaaaaaatatgaaagtggaattgttcgtgaccctgtaacaattagttcaacaaattcaattgaagagttaaa

SEQ ID NO: 204798 - DNA, 379 bp, Unknown
  Bacterial polypeptide expressing nucleotide sequence isolated from the Sargasso Sea
gctgggaactgacgaatctccaggtgaggtatatttattcaagggaagaagctataaatcatacagaggaatgggatcgcttggcgctatggccaggggatctgcagataggtattttcaagaagaaataactgagagcaataaacatgttcctgagggaatcgagggaagagttccatacaaaggacctataacgccgataatataccagcttgttggaggcctgagagcatctatgggatacactggttcaaaagatatagtagaatttaaaaagaatgttaagtttgtagaaattactggagcaggtcttaaagaaagccatgtacatgatgtcgatattacaagagagtcaccaaattatccaacaaacatataa

SEQ ID NO: 204799 - DNA, 343 bp, Unknown
  Bacterial polypeptide expressing nucleotide sequence isolated from the Sargasso Sea
catcagggaaggtcttacaaatcctatagaggtatgggctctatgggagcaatggcgcgtggttctgccgatagatattttcaagaggaggtgtccgatcatcagaaatttgttcccgagggtattgagggacaagttccatataaaggaccaatctcagcggtggttcatcaactggttggcggactaaaggcggcaatgggttacacaggaagcgcttctattcctgagatgcagaaagataaaaaatttcttagaattaccaacgctggccttagagaaagtcatgtccacgacgttactattacccgcgaagcccccaactacaggcctaacttgtgag

SEQ ID NO: 204800 - DNA, 1066 bp, Unknown
  Bacterial polypeptide expressing nucleotide sequence isolated from the Sargasso Sea
atggatcccataaaagaagctctcacatatgatgatgttttgcttacaccaaagtattcagaaattcttccttctgaaactgtaataaaaacaaaattatcaaaaaatttaaatcttaaaatacctataatttcttcagcaatggatacagtgacagaatcaagtatggctattgcaattgcaaagctaggaggaataggagttattcatagaaatttagatataaaaagacaaatattagaaattagaaaagttaaatctaaaaacctaaaagtaggtgcagctgttggggctggaccactagagattaaaagagcagaggcattacttaaagaaaaaattgatttaatagtagttgatactgcccatggacatacaaaaaaggtagctgaaatagtaaaaaaaattaaaaaattaaaatcaaaaaaaacaactctttgtgcaggaaatatttcaacaatcgatgcggccaaatttttatccaaactaggagtagacgcaattaaagttggcattggaccggggtcaatttgcacaactagacttgttgctggaattggagttcctcagttgagtgcaatcatggctgcaagaaaaggattaggaaaaaaaaaaattatgcttgtcgcagatggtggaattaaattttcaggtgatatatctaaagcgttagcagcaggtgcagacgctgtaatgattggatcactatttgctggaacaaatgagtctccaggaaaaataataaaaaaaaatggaaaatattttaaaagttttagaggcatgggatcagtaggtgcaatgaacaaaggttcagcagacagatattttcaaaaaaaacaaaaagatccatctaagtatgtgcctgagggtgtagaaggcttggtaaaatacaaaggaccaattgaaaaaattgtttatcaattaattggcggcttgaagtcatcaatgggatacttaggatcaaaaaatataaaagatctaagaaataaaccgaagtttgttaaaataacaaaagctggcttttatgaaagtatggtacataatatagatcaagttttaaaataaa

SEQ ID NO: 204801 - DNA, 1051 bp, Unknown
  Bacterial polypeptide expressing nucleotide sequence isolated from the Sargasso Sea
tgttggtgtcttaactgaacgtgatgtgctttttgaatcaattaattcaaagaagtctgtgtctgaattaatgactaaagatgttatttcctcaaatgataatactacattagatgaagcaaaagatatcctaaaaaataacagaattgaaaaactacctcttgtaaatgacaaaaatcaaattgttggtctttacactactcaagatattcttaatattgaaaattttccaaatgcatcaaaagataagaagggtagaccacttgttggagctgcagttggagtaaaaggtgactttttagatagaactgaagcattacttgcagctggtgcagatgcaattgtagttgatattgcacatggtcacagcgaaaatgcaatctctactgtaaaaaatatcaaaaaagcatttcctgactgtgaattaattgctggaaatgtagcaactgctcaaggtacagaggatttgataaaagctggggttgatgctgttaaagttggtgttggttcgggttcgatttgtatcacgcgagttattaccggttctggcgtgcctcaattaacggctgtgatggattgcgctgagattggtaaaaaatatgacattccaattatttctgatggtggaacaagaacctctggtgatgcaaccaaagcactagctgctggtgcatcttctgtaatgttaggaagtatgttaggtggaaccgatgaaagtcctggttcaacaatcacaaagaatggaaaaagatacaagttttacagcggaatggcctctctaggtgctgcacgaagaagaaaatcaaaagaagctacacaaagcgatactgaagatgatctaaatgattatgttgctgaaggagtagaagcaatggttccatacaaaggcactgtaattgatattctcgttcaaattactggtggaatacgttctggtttgagttattgtggtggacatgatatcaaacaaatgcaaaataatgctgaattcattaaaatgtcacgtgctggatttgcagaaagccaacctcatgatgttgatgtggtatag

SEQ ID NO: 204802 - DNA, 1069 bp, Unknown
  Bacterial polypeptide expressing nucleotide sequence isolated from the Sargasso Sea
tatgggtatcattaaagattcgcttacatttgatgatgtaacgcttgttcctcaatattcatcagttttaccgacagaaacaattacaaactgtcaattatcaaaaagtataaatttaaaaatacccttgttatcatcagcaatggatacggttacagaatctaatatgtgtttagctttggcaaagcttggaggaattggagtaatccatagaaatttatcaattgaaaaacaaactattgaagtcaaaaaagttaaaaaaaaaaaatatttagtaggtgctgctattggagtaaacgataaagatttagaaagagctgaagaactctctagaatcaaaactgatttaattgtaatagatactgcccacggacatacgcaaaaagttctaaatatgattaaaaaaataaaaaaaaaattgaaaaactctaatttatgtgttggaaatatagctacaggtaaagctgcgagatttttagcagataatggagtggacatagtcaaagttggtataggtcctggatctatttgcacaactagactggttgcaggtattggagtgccacaactaagtgcagtgatcgatgttaagaaatcattaaaaaattataaaacgaaaataatttctgatggaggtataaagttttctggggacttagctaaggcagttactgctggagctgatgctattatgataggatctttattttctggaactaatgaaagtcctggaaaaattataaggtacaagggaaaattgtacaaaaattttagaggcatgggttcagttggcgcaatgaatgctggatctgctgatagatattttcaaaaaaaaaataaagatattaaaaaatatgttccagaaggtgttgagggattagttaagtttaaaggttcagttgaaaaaattatttttaatctaattggaggcttaaaatcttcaatgggttatttgggagcaaaaacaataaaagatttgcaaaaaaaaggtcaatttcttaaaatcagcaaagctggtttttatgaaagtatggtccataacgttgatcatgtaataaaaaatgaataa

SEQ ID NO: 204803 - DNA, 301 bp, Unknown
  Bacterial polypeptide expressing nucleotide sequence isolated from the Sargasso Sea
tatgtcaaataacgttgaaaagaaattaacatttgatgatgttttattagttcctagaagatcctctgttttaccgaaagaagtggattgtgctactaatcttacaaaaaatattactttaaatattcctataatgagtgcagctatggatacagtcactgaatctgatatggcaattgccttggcaagacaaggaggtatcggtgttattcacaagaatttaagtattaaagatcaagctttaatggtagataaggtgaaaagatatgaaagtggtatgattagaaatcctattacttag

SEQ ID NO: 204804 - DNA, 987 bp, Unknown
  Bacterial polypeptide expressing nucleotide sequence isolated from the Sargasso Sea
ttacaagctgtaagttatcaagtaatttaaatttacaaataccattaatatcatctgcaatggatacagttactgagtctaaaatgagcattgctatcgctaaatctggtggaattggagttattcacagaaatttgtctattaaaaaacaacttattgaagttctaaaagtcaaaaaaaataattatttagtaggtgccgctattggagtaggtccccaagatttagaaagagctgaagaactagcaaaaattaaaacagatttaattgtaatagatactgctcatggacatacaaaaaaagttttaaatatgatcaaaaatatcaaaaaaaaattaaaaaattccaccctttgtgttggaaatattgcgactggtaaggctgcaaaattcttagcagataatggtgttgatatagtaaaagttggtattggtccgggatctatttgtacaacacgactagtagccggaattggtgtacctcaattgagtgcagttatagatgttaagaaagctttaaaaaattataaaacaaaaataatttcagatggaggtataaaattctctggagatttagcaaaagcaattgccgcaggagcagatgctataatgattggatctcttttttcaggaactatagaaagtcctggtaaaatcataaaatataaaggcaatttattcaaaaattttagaggtatggggtctgttggagcaatgaatgctgggtctgcagatcgatattatcaaaaaaaaaacaaagataatacaaaatatgtaccagagggagttgagggaatggttaagtttaaaggatcagtaaaagaaataatttataacttaattggaggattaaaatcatcaatgggttatatgggaacaaaaacaataaaagatttacaaaaaagagggcaatttcttaaaattagtaaagcaggtttttatgaaagcatggtccataatgttgatcatgtaataaaaaatgattaat

SEQ ID NO: 204805 - DNA, 481 bp, Unknown
  Bacterial polypeptide expressing nucleotide sequence isolated from the Sargasso Sea
aatgaaaaacagaccaccctttaagcaggctttgacatttgacgatgtattgcttattcctcagaaatcaagcattttaccgaaagaagtaaatttaaaaactaagttaacccagaaaattgaaatgaatataccattgctttccgcagctatggatacggtaaccgaaagcggtatggctgttgctctcgctagagaaggtggtataggtattattcacaaaaatttatcaattgaagagcaagcctcaatggttgatcgcgtgaaacgatatgagagcggtatgatcgtaaatccagttacattgtctagcgataaaacaattaaagacgcaaaagaggtgatggggttatataaaattagtgggctcccagtagtcgagaatgaaaagctaattggaatcattacaaatagagatattcgttttgaaacagatgaatctcttcctgttacagatcgcatgactactgaaaaacttgtc

SEQ ID NO: 204806 - DNA, 289 bp, Unknown
  Bacterial polypeptide expressing nucleotide sequence isolated from the Sargasso Sea
atggacaaagtaaaatctaaagcactgacatttgatgatgttcttctcctgcccaggtatagtgatttcttacctagcgaagctgtaacagaaacttatctcacaaaaaacatcactttaaaaacgccattaatatctgcggccatggatactgtaactgaatccaggatgggtatatctcttgctgaagcaggcggccttggtattgttcataaaaataattcaattgaagagcaatcaaatatagtaagggccgtaaaaaaatatgaaagtggaattgttagagacc

SEQ ID NO: 204807 - DNA, 184 bp, Unknown
  Bacterial polypeptide expressing nucleotide sequence isolated from the Sargasso Sea
catggaaaaattaaaacataaagcgttaacatttgatgacgtcttactacttccaagatacagtgatttccttccaagtgaagtagatatatcttctaagctaacaaatagtattacattaaaaatgccattgctttcagcagcaatggatactgttacggagtctaaaatggcaattccttcc

SEQ ID NO: 204808 - DNA, 925 bp, Unknown
  Bacterial polypeptide expressing nucleotide sequence isolated from the Sargasso Sea
atggaaaccattaaagattcgttaacatttgatgatgtaactttagttcctcaatattcttctatacttccaactgatgctataacaaattgcaaattatcgagaaatttaaatttacgaatacccttaatatcttctgccatggatacagtgactgagtctaaaatgggaatagctatatcaaaatctggtggaattggagttattcatagaaatttatcaattaacaaacaagttgcagaagttcaaaaagtaaaaagaagaaattatatcgtaggagcagctattggggtaagtgccaaagatttagaaagagcagaggaactatcaagaattaagactgatttaattgtaatagataccgctcatgctcacactaagaaagttttaaatatgataaagaaaataaaaaaaaaattaaaaaattcgacactttgcgttggaaatattgcaacgggtaaagcggcgaaatttctagcagataatggggttgatatagttaaagtaggtattggtcctggatctatttgtacaactcgtattgtggcaggtattggtgtacctcaattaagtgctgttattgatgttaaaaaagcattaaaaaaatataaaacaaaaataatttcagatggaggtataaaattttcaggagacttagcaaaagcaattgctgcaggagcggatgccataatgataggatcgcttttttcaggtaccacagaaagccctggtaaaattattaaatacaaaggtaaattatataaaaattttagaggaatgggatcggttggagccatgaatgctggatctgcggacaggtattatcaaaaaaaaaataaagatgttacaaaatatgttcctgagggagttgaaggaatggttaagtacaaagggccagtaaaggaaattatttataatttaattt

SEQ ID NO: 204809 - DNA, 277 bp, Unknown
  Bacterial polypeptide expressing nucleotide sequence isolated from the Sargasso Sea
atggcctaccagataaataccaattattccgttacttttgatgatgttctgctctcaccagcgtattcagagatcaaaccaaaagatgtagatacatcgattaccattggaaaagtcaaattacgtattcccatactctccgctgctatggataccgtgacagagaataaaatggcaatcaatctcgcactacatggtggtctaggtgttattcaccgtaatatgccaattgataaacaagcaagcgaagtaaaaaaagttcatagctttaaagtaa

SEQ ID NO: 204810 - DNA, 525 bp, Unknown
  Bacterial polypeptide expressing nucleotide sequence isolated from the Sargasso Sea
tatggaagcaataaaagaagcgttaacttttgatgatgtgttattactgccgcgtttttctgaaattttaccctctgatacaaatataactgtaaatctttccaaaaatattaaattaaatactcctttcctatcctctgcaatggatacagtgacagagtctataatggctatagcaatagcaaaatctggtggaataggaattattcatagaaatctaaatattaaaaaacaaagcaaagaagttggaaaagttaaaaaaaaaaatttacttgttggagcagcaataggaactaatactgaggatattataagagcaaaatctttagtagatagtggagtagatttaattgttatcgatactgcacatggtcatagtaaaaaagttttaaatattttaaaaaatgttaaaaaaaataaaataccaatatgtgtgggtaatattgctacagctgaagctgcaaaaaaattgtacaattcaggagcagatattattaaggttggtattgggccaggctctatttg

SEQ ID NO: 204811 - DNA, 798 bp, Unknown
  Bacterial polypeptide expressing nucleotide sequence isolated from the Sargasso Sea
tatggttcctataaaagaagcacttacctttgatgacgttacattggccccaaagtattctgatattttaccctcagaggtcgatacaagtatcagtttaaccaatttcttagaattaaagattcctcttttgtcttcagctatggatacagttaccgaaagtaaaatggcaatcgctattggtaaggctggtggtattggtgtaattcatcgaaacttagatataaaaaaacaagttcaagaaataagaaaagtaaaaaaaaaaaaattgatagtaggcgctgcagtgggtgcaggtccaaaagaatttgagagagcaacagctattttaaaagaaaacatcgatatgatagttattgatactgctcatggacacactaaaaaagtttctgaaataattaaatttgttaaaaggaaaaaaaataagaaaacagcattatgtgctggaaatatagctactgcggaggcagcacattttttatatgaattgggtgttgatattttgaaagttggaattggcccaggttctatttgtacaactcgattagtagctggaattggtgttcctcaattaagtgcaattcttaatgtaagaaaaggagttaaaaataagaatattaaaataatttctgatggtggaataaaatattctggcgatttagctaaagcatttgcagcaggtgctgatgctgtaatgataggttcattattttcaggaacttatgaaacacctggaaaacttattaaaaaaaatggaaaattattcaaaagctttaggggcatgggctcagtaggggc

SEQ ID NO: 204812 - DNA, 1075 bp, Unknown
  Bacterial polypeptide expressing nucleotide sequence isolated from the Sargasso Sea
atgggtataataaaagattcgctaacctttgacgacgttacactaatccctgattattcctcggtattgccatcagaaactaacactttaacgcaaataagctcacgtcttaatctcaaaatacctcttttatcttcagcaatggatactgttactgagtcaaaaatggcgattgccatttctaaagcaggaggaattggcgttatacacaggaatttgtccattcaaaaacagatttcagaggtaaaaaaagttaagaaaagtaattgcatagtgggagctgctattggtgttaataacgcagatatagagagagcgtatgaacttaataaagctaaagttgatttaattataatagacacagcacacggtcatacaaaaaaagttttagaaatgatcaaaaaagtgaaaaataatataaaaaatacaactctttgtgctggaaatattgcaactggaaaggctgctaaatttttaggtgatagtggagttgatattgtcaaagtaggtattggacccggatcaatctgcacaaccagattggttgcaggtattggagtcccacaattaagcgcaattatagaagtaaaaaaagctctaaaaagacataaaactaaaatcatttctgatggtggaataaaattttctggtgatttagcaaaagcaattgcagcaggtgctgacgctataatgattggatctttgttttcgggaacatccgaaagtccagggaaaattttaaaaaaaaatggcaaattatataaaaattttagaggtatgggatctgtaggtgcaatgtcggttggttcttcagatagatattatcaaaaaagatttaaagatatttcaaaatatgttccagaaggtgttgaaggagtagttaaatacaaaggtccagtagataaaatcatatataatttaattggtggattaaaagcatcgatgggttatttaggagcaaaaacaattaaggatttacaaagaaaaggtgaatttcttaaaattactaaagctggtttttatgaaagtatggttcataatgttgatcaagtgaaagacaatggaaccaaataaa

SEQ ID NO: 204813 - DNA, 767 bp, Unknown
  Bacterial polypeptide expressing nucleotide sequence isolated from the Sargasso Sea
aatggtaactcaaaaaaataagagtttaaatagcctcactgatactggcatagcttacgatgatgtactccttgtgccacaatattctgaagtattaccaaatgatgttagtctatccactaggctaactaaatctttaaatatcaaaattcctatattatcagcagcaatggatacggttactgagtctcaaatggctatatctcttgctagcgcaggtggaattgggattattcataagaatatgagcattaaagaacacgctaatcaaattaggtttgtaaaaaaacacgaaagtggagtgattagagagcctctcaccgctagtccaggaatgactgtagatgaaatttatggtatcacgaataagtataatatatctggtgtccctgtagtcgagaataaccaattagtcggaattataactagtagggatttaagatttgtagaaaatttggatatgaaaatttctcaaattatgacccctaaagataaactcgtcactgttcgtgaagattataccaaagaggaagtagtatctctattgagagaaaatagaattgagaaaatactcattactaacaaaaaatttgaattaaaaggtatgattacattcaaagatattcaaaaaacatctacttatcctgatgcaagcaaagatacaaatggtagcttaatagtaggtggagcaataggtacaacagatgagtctatcgaaagagcagaagcattagtgagtcaaggtgtagatgttctcgtcatagata

SEQ ID NO: 204814 - DNA, 552 bp, Unknown
  Bacterial polypeptide expressing nucleotide sequence isolated from the Sargasso Sea
tatggttcctataaaagaagcacttacctttgacgatgtaacattagcgccaaattactcagaaatattaccatctgaggctgataccacagtatctttgaccaataatctgaaattaaaaattccacttttgtcatctgcaatggacacagtcacagaaagcaaaatggcaattgctattgcaaaagctggtggaataggagttattcatagaaacttagatattaaaacacaagtttcagaaattagaaaagttaaaaaatattctttaaaagttggagctgcagttggagcgtcagagaaagaatttattagagcaaaagaaattattaatgaaggtgttgacttgattgtagttgataccgctcatggacatacaaaaaaagttggagaaattattaaatatattaaaaaaagtaaaaacaacaaaatcgctttgtgtgctggaaatattgcaactccagaagctgcaaaatttttaataaaattaggagtagatataattaaagttgggattggtccaggctcaatttgtaccactagattagtgcg

SEQ ID NO: 204815 - DNA, 1042 bp, Unknown
  Bacterial polypeptide expressing nucleotide sequence isolated from the Sargasso Sea
gttactttagttccaaagtactctgaaatactaccctcagaagttgatacgagtataaaattaacagatacattaaaacttaaaataccactcttatcatcagcaatggatacagtgactgaaagcagaatggctatcactatagcaaaatctggtggactaggaataattcacagaaatttagatattaaaaaacaagttcttgaagttaagaaagtaaaaaaaaaaaaattactagttggtgcagctgtgggagcaggacctaatgagctcaaaagagctgaagctttattaaaagaaaaattggatatgattgttgtagacactgctcacggacacaccaaaaaagtttctgaaataattagatttatcaaaaaaaataaaaataaaaaaacagctctatgtgctggaaatatagcaacaccagatgcagccaaatttttacttaaattaggtgttgatataattaaggttgggattggtcctggttctatctgcacaactaggttggtcgcgggtattggtgttcctcaattaagcgcaatattaaatgtgagaaacggcataaaaaataaaaatgtaaaaattatttctgatggagggataaaatactcaggtgacctcgctaaagcttttgctgcaggcgctgatgcagtcatgataggttcattgtttgcaggaactgatgaaacgccaggtaaactcattaaaaaaaatggtaaattatttaaaagttttagaggcatgggttcggtaggagcgatgaacaaaggctcggctgatcgatattttcaaaaaaaacaaaaagacagttcaaagtatgtgcccgagggagttgaaggattagcaaaatataaaggtaaagttaataaagttgtttttaaattagttggtggattaagatcatctatgggttatcttggttccaaacagataaaatatttaagatataaaccgcaatttgttaaaattacaaaagctggattttatgaaagtatggttcataatgtcgatatagttaaaagtgatagtaaatactgat

SEQ ID NO: 204816 - DNA, 970 bp, Unknown
  Bacterial polypeptide expressing nucleotide sequence isolated from the Sargasso Sea
actatcaaacaatttatttcttaaaatacctataatttcttctgcaatggatacagtaactgaatcaagtatggccattgaaattgcaaagttaggtggaataggagttattcatagaaacttagatataaataatcaaattttagaaattaaaaaagttaaatctaaaaatttaaaagtaggagctgccgtgggggccggcccacttgaaattaaaagagcggaagcattgcttaaagaaaaaattgatttaattgttgtagatactgcccatgctcatacaaaaaaggtcgcagaaataataaaaaaaattaaaaaattaaaatcaaaaaaaactactctatgtgctggaaatattgctacagcagaagcggctaaatttttatctaaactaggtgtcgacgcaattaaagtaggtattggtcctggatcaatctgcacaactagacttgttgctggaattggagttcctcaattgagtgcaatattatctgcaaaaaaaggtttaggtaaaaaaaaaattatgcttgttgccgatggaggaattaagttttctggggatatatcaaaagctctagcagctggcgcagatgctgtaatgatagggtcattatttgctgggtcaaaagagtctccaggaaaattaataaaaaaaaatggtaaatattttaaaaattttagaggaatgggatcaataggtgcgatgaacaagggttcggctgatagatactttcaaaaaaaacaaaaagatcaatcaaagtatgttcccgagggtgttgaaggtttagtaaaatataaaggaccagttgaaaaaattatttatcaattgattggaggtttaaagtcgtcaatgggatacttggggtcaaaaaatataaaagatttaagaaataaacctaaatttgttaaaataactaaagctggtttttatgaaagtatggtacataatatcgatcaagttttaaaataa

SEQ ID NO: 204817 - DNA, 994 bp, Unknown
  Bacterial polypeptide expressing nucleotide sequence isolated from the Sargasso Sea
catggttcctataaaagaagcgcttacctttgacgacgtcactttagcgccaaaatattctgaaattttgccttcagaagtgaatactggcgtagcattaacaaaatatctcaaattaaaaatacctttattatcatcagccatggatactgtaacagagagcaaaatggcaattgcaattgcaaaagctggaggaattggggtaattcatagaaatttaaatgttaaagagcaaattatagaaattaaaaaagtaaaaaagaaaaaattattagttggtgcagcagttggtgcaggaccaaatgaatttataagagcaaaagctttagttaatgaaggtgtagatttaatagttgttgatacagcacatggtcacacaaagaaagttgcagaaattattaaatttatcaagaggattaaaaataaaaaaattgcattatgtggaggtaatattgcaacaccagaggctgcaaaatttttaattaaactaggagttgatataattaaaatagggataggaccaggctctatttgcactacaagactagttgctggtattggtgtaccacaattaagtgcaatattatctgttagaagcgggattaaaaataaaaatataaagatcatttctgatggtggaattaaatattcaggagatttggcgaaagcatttgcagctggagcagatgcagtgatgataggttcattgtttgctggtactgatgaagcaccaggaaaattgataaaaaaaaatggaaaattgtttaaaagttttagaggaatgggatctgttggtgcaatgaacaaaggatcagcagatagatatttccaaagcaaacaaaaagacacatcaaaatatgtgccggaaggagttgaaggatttgcaaagtataaaggtgatgtaggtagtattttatataaactaataggagggctcaaatcttctatgggttatcttggatctaaggatattttaaaactcagaaataaacct

SEQ ID NO: 204818 - DNA, 632 bp, Unknown
  Bacterial polypeptide expressing nucleotide sequence isolated from the Sargasso Sea
gatgttgcgtatagtaaacaaagcactcacattcgatgatgttctgttgttgcctgatcactccgatatccttccaaaggatgtagatttaaaaacccgtctaacccagaaaatcaatttaaatattccattactttccgctgccatggatacagttactgaatctcggatgggaatagcgttgagcgaattgggtggtataggaattattcataagaatctttcaattcaagatcaagctgcagaagtaagaaaggttaaaaaatatgaaagtgggattgtgagagatccaatcactataaggtcagataataaagtaggtgagttaattcagttgaccaacgaattaaatatttcgggtatgccagtagttgatgatggaaatttagttggaattgtaaccagtagggattttaggtttcaagagcaacattcagtccaagtatcagaaattatgactcctaaagaaaaattgatcactgcgcgagaaggagagagccccgatgtgattaagactcttttgcaagttaacagaatagaaaaaattctacttgttgatgattcttttgctttgactggattagtgactttgaaagatattaataaatctctagattttcctaatgctaccc

SEQ ID NO: 204819 - DNA, 772 bp, Unknown
  Bacterial polypeptide expressing nucleotide sequence isolated from the Sargasso Sea
atgacgaattcaaaaattcttagtgaaggtttaacatatgaggatgttctgctaattcctcaatattctgatattctccctcaaaaagtaaaccttaaaacgagatttagtaaaaatattgatcttaatattcctattgtttctgctgcaatggatactgttactgaaagtaaaatggctattgctgttgcaagagagggtggaataggtgtaattcataagaacctttctattgagaatcaatcaaatgaagttagacttgtaaaaagagctgaatcgggaatgattatagatccagtaacacttaaactaaatgcttatgttaaggacgcaaaaaagtatatgaaaaaatataaaattgggggaatcccaattatatctgataaaggaaaattaaggggaattgtgacaaatagagacttaaggtttgaaaaggaagataacaagccaatctctaaagttatgacctcaaagaatcttattactgttaagtctgggacatcactagacgatgctgaagatgttcttaaaaaacataaaattgaaaaactgccagttgttgattcaaaaaacaatctagttggattaatcacttttagggatattaataaacattctactaaatcaatctctaacaaagatgatcttggaagactaagggttgccgctgcaatcggggttgatagggatttactaaaaaggtctagagaattaattagtgcaggggttgatgcgcttgttattgatactgctcatgctcattctaaaagtg

SEQ ID NO: 204820 - DNA, 496 bp, Unknown
  Bacterial polypeptide expressing nucleotide sequence isolated from the Sargasso Sea
atggcccaagttaaagaatatttaacgtttgacgacgttttattaaaaccccaagtatctaatacactccctaatgacgttgatatatctacaaatcttacaaaagatatagtcttaaatactcctattatttcagctgctatggacacagttacagagtctaaaatggctattgctatgtctcaaaatggtggtttaggagtaatccataaaaactttgatattgaaacacaaagttatgaagtgaaaaaagtgaaaagatatgaagcaggcattgtttataaccctattacaatgaatccaaataatacaattgaagatgttttgagcgtaatgaaagagcaaaatatatcaggatttcctgtagttgataaagacaatacacttcaaggtataataactaacagagatgtgcgttttgtaattaataaaaaaacaaaagttaaagatttaatgacaagaaaagtaatttctattactcaaactcaatcaaaag

SEQ ID NO: 204821 - DNA, 2830 bp, Unknown
  Bacterial polypeptide expressing nucleotide sequence isolated from the Sargasso Sea
aatgcctcaaataactgctattatgaaacagatcgatggctgggaaagatctttaaggcagggtcgaaggattcaggatagactagaatcattagaaaggaaaagatcagaatgggataggctattggctatagagacccaagaaaaagaagagcaggtcaatgcattacgcgactctatcgaaaggaaaagaactaactcatataaattatttataaaagatggccttaatcgatttcataatgatggcgatccagatgagatcgcagatagaatgtctgaagaaagcattgcattagatgagcaagaaattaaaaaaatagaacaatcttttggtcgctttataaaacgatatgacgcttttatgatacgttacaggaagaaccacaaggacattatgaaaaagctaaagccatatggtgggcgaagaaatatcatacttaagaagattcggaatggtaaagagaaagttgaaaaattagagtctatgattgaaaattgggttaacaaattggatgagaaaaatgaatcccttattgcaaaagaaaaagaatataatgagttaaaaaaagaaacaaataccaaactagcagaaatagaatctgaattacaaagagcgcctgaaaaagaacaaagagctcgttcagatattgatagccggacagaaagaaaacttcttttgatatctgataaagaagaaaatttaaaaagtgacatggaagaggaactactctctatagatgatgagttaagcaatcatcctgtggtattgaagatcaatgaatcagaggaaaaaatgttatcatttttctcagagattgaagaaactaaagagcaagtgacctctctcgaaaaggaaatacaaaaactatcaaaggaccgttccttgtcagagtctagacttgagaaagctttcaaaaaacatgataaagcgcagcaatctattgaagtaaaagagacacaattcaaagaagaaaaaaattctcttaaagataagatggatgttaatagaaaggacttttctagtgtccaacaacaactgcttattctagaccaacaaaaagatgaaatactggcccgattagagaacgtagaaaaagatcttaacacatcaaataatttggtaagagatctaaagaagaagatcttggtctctaaccagattccaaaatcggtggataattcgaaaaagagttcaatcagttctaagaaaaaagaaaatagaaaagaacaactccgctatctagatcaaatggaaaaagaccttagaatcaatatagaccgtctagacttactgatcaaagaatcaaatatattaattgataatatgcggaatgaagagtctggcctagaaagttcgatcagcttgatagaaaatgatcttgaatattttaacacagatatttcaagactagaaactcttatgaaaaataatgaagagcatctcaagaagatatccaaagatcataggaatgcactgaatggaatatcaaacataaaagagttatatccgaagtgtaagatcatgttaaatgaaagaatagcaaatctctatacgctggtcgagctaaagacaaaagacagagatgagattgatatcgcacttgacgagatcaaaactgaactaaaagacaaaagagttgaaactgcaatgcttggtcaacaactttctaaaatcaatgatgaaatgaaagaagccctagaaaattcattctatgaacaagaatctgaagatcaagaatggaaatgggaaatagcggaacataaaatgcaaagctatatggatctagcacagctgaagataaatgctaaagacctttttgatgaaattgtaaagatagaaaaaagaatagcacaattaaagaccaaagagtcatctataaaaaatgtgatatctgagaacgagaagatcagtcacaaaaaattaaagaaaatggaagatacctgcacacgactagagcttcgcatcataaaagaaaaaaatgaacttgaggggattgaaaatgaggttcaacagcttaaaggtctcgcattcaactatggagacaggatagaggtacttgagaaagaattagcagagtttaaagaaaaagaaattgagtatgaactgatccttaaagatctggatcgttctatagaatcggttcaggaaagagcagataagattataaggagtaagggatctattaaggaaaactctatagaacttgattatatggcaaacctcggtcttctgatggatccacattcaagacttaacattctacctgatgaacatagaaaggaattcagttactatagatctaatcaaatccttcagaatagtgtactagcccttttaatgactttctctctaagtgctttttttcagcgtactagtataaaaccattaaaagaccagttacctattaaacaatctgaactgagcttgcttagtatgcgccaagatatgaaaaatgttgtagaaagtagaaataaagttgctaacacctttgggcaactgataaatgatgataaaaacatctctgatgatatggtatcattattaaaacatctaagtaaaacgttacccgtaaactttcttgttactaatgtaactctagataaacaggcatctagttcaatatctacacctgatataacagaattctatgacttattgatcacggttgatgggttttatgataatgatatagaaaaagcctcactatatgctgaaaaacttcgtaagtcatttattgctcaaggtcattttaaaaatgtagagatcagtaaaggaaaggtcctgaaaagatctagaaccggtttcaaaataacaattctgctctaa

SEQ ID NO: 204822 - DNA, 718 bp, Unknown
  Bacterial polypeptide expressing nucleotide sequence isolated from the Sargasso Sea
tatgattgtaatagatacagctcacggacatacaaaaaaagtttcaacaataatttataaggttaaaaaaattttaaaaaaaataccgctctgtgcaggtaacattgcaactggaaaagctgctaaatttttggtgagttgtggagttgatatagttaaagttggtattggaccaggatcaatatgcactacaagactggttgcaggagttggcgtaccacagttgagcgcaatattagatgtaaaaaaagctttaggaaaaagtaaaactaaaattatttcagatgggggaattaaattttcaggtgatttagcaaaagctattgctgctggggctgatgctataatgattggttcacttttttcaggaacaacagaaagtcctggaaaaattttaaaacgtaaaggaaaattatataaaactttcagaggtatgggttccgcaggtgcaatgtcagttggttcagcagacagatactatcaaaaaaaatttaaagatatttctaaatttgtccctgaaggcgtagagggaatagtgaaattcaagggtccagtaaataaaattatttataatttaactggcggtctgagatcttcaatgggatacttaggagctaagacaatcaatgatttacaaaaaaaaggtgagtttgtgaaaattagtaaagctggtttttacgaaagcatggttcacaatgtggatcaagtcataaaataa

SEQ ID NO: 204823 - DNA, 915 bp, Unknown
  Bacterial polypeptide expressing nucleotide sequence isolated from the Sargasso Sea
taacagaatctaaaatgtgtatagcaattgccaaagctggtggtattggaattatacatagaaatttagatattaaaaaacaagtcgcagaaataaaaaaagtaaaaaaaaaaaaattattagtaggtgcagccgttggggctggaataaatgaatttgaaagagctaaaaatgttttaaaagaaaatattgatttaattgttgttgatacagctcatggacacacaaaaaaagttgcagatataattaaaaaaataaaaaaaattaaaccaaaaaaaactgctctttgtgcgggaaatatagccactgcagaagctgcgaaatttttaattaaattaggggtagacatcataaaagtagggattggaccgggttcaatttgtactacacgtttggttgcaggaatcggtgttccgcaactaagtgctattttaaatgtaagaaaaggtgttggagctagaaaagtctcaataattgcagacggaggaattaaattttctggtgatattgctaaagctttatctgcaggagcagatgctgttatgataggatctctatttgctggaacagatgaggctcctggaaaaatcattaaaaaaaatggaaaattgttcaaaagttttagaggcatgggctctataggagccatgaataaaggatcggctgacagatattttcaaaaaaaacaaagtgacagtacaaagtatgtaccagaaggggttgaaggatttataaaatataagggggcagtgtctagaattgtctataaattagttggaggtttaagatcatcaatgggatatcttggttgtaaagaaataaagaaacttaaaaataaaccaaaatttgttaaaataactaaagctggtttttatgaaagtatggtacataatatagataaagtaattaggtaaa

SEQ ID NO: 204824 - DNA, 857 bp, Unknown
  Bacterial polypeptide expressing nucleotide sequence isolated from the Sargasso Sea
gttgatggattagtgagcagtgtcatgacgcctaaggataagcttgtcactgttaaagagggcgcaggcgaagaagaggttctaagattgcttcatcagcacagaattgaaaaagtactcgtggttgatgattcctttcatttaaaaggaatggtgaccgccaaggattttcaaaaggcaacggatttccctttggcatcaaaagatgggaacggtgcacttttggtcggagcagctgttggtgttggcgatggctcagaagaaagggtagaggcgcttaaggctgctggcgcagatgtcattgtcgtagacacagctcatgcgcatacggaaggcgttatcaatcaggttaaatcaatcaagaaaatgcattctgatcttgaggtgatcgcaggcaatatcgccacgggagaggctgcaaaagcacttgctgatgcaggcgcagatgcggtaaaggttggaattggcccgggttcaatttgtaccactcgggtggttgcaggagctgggatgccacaaatcacagcaattactgatgtcgcaaatcagcttaagggaaccgatacatgcataatctcagacggaggcattcgttattcaggagacatcgcaaaagccatagcagctggtgctaatagcatcatgctaggcagtctatttgctggaacagaagagtctccaggtgagattgagctgtatcagggcagaagttttaaatcgtatcgtggcatgggttcaattggagcaatggctcagcaacatggttccaaagaccgatactttcaaagcgatgttgaagaaccagaaaaactcgttcctgaaggcattgagggaagggttccttataaaggaaactt

SEQ ID NO: 204825 - DNA, 993 bp, Unknown
  Bacterial polypeptide expressing nucleotide sequence isolated from the Sargasso Sea
ggacatttctctcagaaaatttaagtttaaaaattccacttttatcttctgcaatggatactgtgacagagtcaaaaatggcaattcaaattgcaaaattagggggcataggaataatacatagaaatttatcaattaaaaaacaaattttagaaattagaaaagttaaaaataaaaatttaaaagttggagctgcagtgggaacgagtgaaaatgaatttattcgtgcgaaggcagttcttaaattaggtattgatataattgttattgatacagcacatggacatacaaaaaaagtttcagaaattataaaaaaaataaaaagaatcaaaaataaaaaaactgttctatgcgctggaaatattgcaacaagtgatgctgctaacttcttagctaagcaaggtgttgatgttgttaaagtaggaattgggccgggttcgatttgcacaactagaatagttgcaggaattggggtacctcaactaagtgcaattttagaggttaaaaagggtttaaaaggaaaaaaaacgaaaatcatcgctgatggaggtataaaattttctggagacattgtaaaagctttaacagcaggcgcagatgccgttatgataggatctttatttgcaggaactgatgagtcacctggaaagataattaaaaaaaatggaaaaatgtttaaaagttttcgtggcatgggatcaattggagcaatgaacaaaggttcagctgatagatataaccaaaaagttcaaaaagacagttctaaatatgtaccagagggggtggaagggtatgtaaaatataaaggaccattagaaaagattgtattcaaacttataggtggtttaaaatcctctatgggttatctcggctccaaaaaaattctaaatcttaaaaatagagctagttttgtaaaaattactaaagcaggattttacgagagcatggttcacaacatagataaacttaaaactaaagaagaaaatatatgat

SEQ ID NO: 204826 - DNA, 896 bp, Unknown
  Bacterial polypeptide expressing nucleotide sequence isolated from the Sargasso Sea
caatgtttcagcagaggaaattcttcaaactcataaaatcgaaaaattacctgttgtagactcaaaaggtatacttataggacttataacattcagggatataaataaacattcagaaaagcctacctcaaacaaggataaattaggaagattaatggtttccgctgctattggaacagacaaggactataaaaaaagagcacaaaaacttataaaatctggtgttgacgccttagttgttgacactgctcatgcccattctagtaaggtaggagaagttttaaaaaaccttaaagattcatttagtgaagtcgatattgttgttggaaatattgcaacagcagatgcagcaaattatttgaaggaaaatggtgctgatggaattaaggtaggtattgggccaggatctatttgcacaacaagagtagttgcaggtgtaggttatcctcaattatcagctgtgctagaggtgtcagaagtcttgaaaaactcaaaaatacctttaattgctgatggaggtataagatatactggtgatatttcaaaagctattgctgcaggagctgattctgttatgcttggatcacttttagctggaacagaagaatctccaggagagacaatcatctacgatggtagaaaatttaagacatacagaggtatgggttctgttgaagcaatgcagaaaggaagtagggataggtattttcaatctgaacaggcagataagaaaaaattagttcctgagggaatagttggaagagtgccttataaaggtcagcttaatgaaagtatacatcagtttattggtggtcttagatctggtatgggctattgtggagccaaagacatagcttcattaaaaaaatcctcaaatttgttaagatactggttct

SEQ ID NO: 204827 - DNA, 869 bp, Unknown
  Bacterial polypeptide expressing nucleotide sequence isolated from the Sargasso Sea
cacaaagccgcccagcaaaccaaacgcctgtaaagacgaatttggtcgtttacgtgttggcgctgcagtgggcgtaggcccgggcactgacgagcgtattgccgctttagttgaagctggtgtggatattttattaatagatacctcacacggtcactcggaaggcgtgttagaccgcgtccgtcaaacccgcgctttataccctgacttacaaatagtggctggtaacgttgctacagctgaaggcgcaaaagccttagctctggccggtgccaacgctgtgaaagtgggcataggcccaggttctatttgtaccacccgtattgttacaggttgtggtgtacctcaactgacggctatctctgatgccgtagatggtgttaaaggactggacgtttgtattatcgctgacggcggtatccgcttctcaggcgatattgccaaagctttagtcgctggcgcgcactgcgtgatggtagggtctatgtttgccggtactgaagaagcgccgggtgatgtagagctgtatcagggccgttattacaaatcttaccgtggtatgggttcattaggtgctatggcacaacgtaatggctcgtctgaccgttacttccagggcagcaacaatgctgagaaattagtgcctgaaggtattgaaggtcgtgtggcgtacaaaggcccaatcggcactattattcaccagcaaatgggtggcctgcgctcttctatgggcttaacaggttgcgctactatggctgaattccgctctaagccggaatttgtcaaagtcacttctgctggtatgggtgaatcgcacgtgcatgatgtgcaaatcaccaaagaagcccctaacaaccgcctgggctaac

SEQ ID NO: 204828 - DNA, 881 bp, Unknown
  Bacterial polypeptide expressing nucleotide sequence isolated from the Sargasso Sea
tagagacataaataaacattcagaaaaaccaatttcaaataaagacaaacttggaagattaatggtagctgctgcaattggtactgataatgattataaaaaaagagcaaaaagactagttgaaagcggagtagatgctattgttgttgatacagctcatgcacattcaagtagagtaggggatgttcttaaaagtctgaaggatttatttactgaaactgatattgttattggaaatattgctactggtgaggctgctaactatttaaaagaaaatggtgctgatgcaattaaagttgggataggaccaggttcaatatgtactacaagagttgtagctggggttgggtatccacagctatcagcaattatgaatgtctcagaagcattaaaaaactcatcagttcccttgattgcagatggtggtgtaaagtatacaggagatattgttaaagcaatagctgctggtgcggactcagtaatgctaggatctcttttagctggaactgaagagtctcccggtgaaactgtaatttatgagggtagaaagtttaaaacttacagagggatggggtctgtagaggctatgcaaaagggtagtaaggatagatactttcaatcggatcagtctgataataaaaaattagtacctgagggaattgttgggagagttccttacaaaggtcagcttaatgaaagtattcatcagtttgttggaggtctaaaatctggaatgggttattgtgggtctaaggatattaagacacacaaaggatcatctaaatttgtgaaaattacaggatctggaattagggaaagtcatccacacaatgtatcaattactaaagaggctcctaattatagtcctcctaaactataaa

SEQ ID NO: 204829 - DNA, 879 bp, Unknown
  Bacterial polypeptide expressing nucleotide sequence isolated from the Sargasso Sea
tcataacagtaaaggacatcttcaagcgtcgtcggtatccggatgcttgtaaagatgaacacggacgactccgtgtcggggcggctatcggagcttcggctgaagacatagagagagccgggatgctcgtcgacgctggcgtggacgtgatcgtagtcgatacagctcatggacactccgagggtgtgctgaaggcagttgctaaagtgcgtgagcgattcccggatgttcagctcataggaggcaacgtgggtaccgtggaaggagctagagcattagtagagaggggtgttgatgcagttaaggttggtgtgggtcccggttccatctgtacgactcgagtggtaacgggtgtaggccttcctcaactgacggctataatggatgctgcagaaggtgcagatggcttggttccgatcatcgcagatgggggaatccgctactctggggacatagtaaaggcacttgccgcaggggcacactgcgtaatgatgggttctatattcgcgggaacggacgagtcgccaggtgagacatttcttctcgaaggacgacgtttcaagactgtccggggaatggggtcgatgtccgcaatggaggaggggtctgcggaccgttatttccaagacgcgtctagagacaagcgtaagctggtacctgagggcatcgaagcgcgtgtgccgtacaagggaccggtgtctgacacaatttaccaactagtaggtgggcttcgtgcgggtatggggtattgtggagtcggttctataagtgagctacggacagaatctcgttttaatagggtgacaatgggcggactcagagagtctcaccctcacgatgtcacgatcacccgcgaggcaccgaattaccacggttagt

SEQ ID NO: 204830 - DNA, 520 bp, Unknown
  Bacterial polypeptide expressing nucleotide sequence isolated from the Sargasso Sea
ttttctgcaattatggaatgttcagaagaagcgaataagtcaggtatcaatgttattggtgatggaggtatcaaatacagtggagatattgctaaggcaatcggagctggtgctacatctgttatgattggatcattatttgcaggtacagatgaagcccctggtgaagtttatttatttaaaggaagaagctacaagtcatatcgtggtatgggttcattaggagcaatggcaagaggatcagcagatcgatattttcaagaagaaattactgagaattacaaacttgtacctgaaggaattgaaggacgggttccctacaaaggacccatatctcctattatccaccaattactaggaggactaaaagcttcgatgggctacacagggtccaaagatattgattcatttaaaaagaatgtaaaatttgttcaaatttctagtgctggacttaaagaaagtcatgtacatgatgtagatataacaagagagtcaccaaattatcctacaaatgtataaa

SEQ ID NO: 204831 - DNA, 800 bp, Unknown
  Bacterial polypeptide expressing nucleotide sequence isolated from the Sargasso Sea
cttgggaactgataaagatacttttgatagagccgaagcattatttcatgagggtgtagatgtcttagtaatagatagcgcacacggccactctaaaaatgttattgaaaccatcaaagcagttaaacaaaaatttccaagcgttgatgttattggaggcaatattgcgactgcagatgcagctatggagttagtcaaagcaggagcagatgcagtgaaggttggaatgggtccaggctcaatttgtaccacaagaattatcgcaggtattggtgtaccacaaatttcagcgatatttgatgtaagtacagctctaaaaaatactgaagtagctgtgatagctgatggtggaattagattttcgggagatattgctaaggcaattgctgctggggctgactcagtaatgttaggcagtctgtttgctggaactgaggaggctccaggaaaagttgagttatttcaaggtagaagttttaaaacatatcgtggtatgggttcaattggcgcaatgacagagcgtgaggatgcaaacagatatatgcaggaagacgtcgctgcagataaacttgtacctgaaggaatcgaaggtagagttccatacaaaggtcttgtattgaatgttgtaaaccaacttattgggggtttacgacaaagcatgggttatattggatgtaaaaatatttctgaaatgcacaaaaaaagtcagttcgttgaaattacaaatgctggcatgacagaaagtcatgttcatgatgttatgatcactaaagaggctcctaactatcagagaagttagt

SEQ ID NO: 204832 - DNA, 570 bp, Unknown
  Bacterial polypeptide expressing nucleotide sequence isolated from the Sargasso Sea
atattattaaagttggaattggaccaggatcaatatgcactacaagacttgtagccggtgtaggtgttccacaattaagtgctgtaatagaggtaaaaaatgcactcagaaacaaaaaaacaaaaataatttctgatgggggtattaaattctcaggtgaccttgctaaagctattggagctggcgcagacgctataatgataggctcacttttttcagggacattggaaagtccaggtaaaatattaaaacgtaaagggaaactttacaaaagctttagaggaatgggttctgctggagctatggctgttggatcagcagatagatattatcaaaaaaaatttaaagatctttcgaaatttgttcctgaaggagttgagggaattgttagatttaaaggcccggtgaataaaattatatacaatttggttggagggttaagatcatcaatgggttatcttggcgcgaaaacattgaaagatttacaaaataaaagtgagtttgtaaaaattactaaagcaggcttttacgaaagtatggttcataacgttgatcaagtagttaagtaaa

SEQ ID NO: 204833 - DNA, 1014 bp, Unknown
  Bacterial polypeptide expressing nucleotide sequence isolated from the Sargasso Sea
tttctgcgcttatgacaaaaaatgtcataactgttaaagaaacagttactgcagaagatgctagaaaacttttacataaacaccgtattgaaaaattagttgttgtagacatggataatttttgcgttggattgataactgttaaagacatggaaaaggcacaaaatcatccagactcttgtaaagataaacaaggaagattaagagttgcagcagctactggtgtaggaaaggatggaattaaaagggcagaagctttaattaatgcaggagttgatgttctaatagttgatacagctcatggacatagtgaaatggtactagaaactgttagagctatttcaaaattatcaagtcaaatagctttaattggaggaaatgttgcaactggagatgcaacaagggcattaatagatgcaggtgcaaatggtatcaaagttggtattggccctggatcaatttgtaccacaagaatggtggctggagtaggggtgcctcaattaacagcaataactgattgtgccaaagttgccaaaaaaaactccattcctataatagctgatggtggaataaaatattctggagatattgctaaagccatagcaggtggagcaagtgcagttatggttggttctatacttgcaggaactgacgaaactcctggagaagtctttttgtttcaaggaagatcttataaatcttacagaggcatgggttcattaggagcaatggctagaggctctgctgatagatactttcaagcagagatagaaacattaaaactagttcccgagggtattgaaggccaagttccttacaaagggcctgcacagaatgtaattcaccaattagtaggtggtttaaaatcagctatgggttatacgggtaatataaatattaatgaaatgcaaaaaaaatgtatttttaagaggataagtagtgctggtctaaaagaaagtcacgtacatgacgttactattacaagagaagcccctaattatcgtccttcttaat

SEQ ID NO: 204834 - DNA, 311 bp, Unknown
  Bacterial polypeptide expressing nucleotide sequence isolated from the Sargasso Sea
catgattgatatccccgaagcacttacgttcgatgatgtccttttggtacctgccaagtccgacgttctgcccacacaaacgaacacaacgacccgtctgacccgcaccatcgagttaggcattccgctcatttccgcggccatggatacggtcacagaagccaatctagccatcgccctagcccaagctggtggcatcggtgtgatccacaaaaacctggaaccggaagaacaagctgaagaggtccgtaaagtcaaaaaatatgaaagtggtatggtcataaatccgttgaccatcaacccccacgcga

SEQ ID NO: 204835 - DNA, 805 bp, Unknown
  Bacterial polypeptide expressing nucleotide sequence isolated from the Sargasso Sea
ggcgcagctataggcgtaggcaaagatcttatggataggacaaaagcattagttgaagctggcgtagatgtctttgttcttgatagtgctcatggtgattcaaaacgtgttattgatgcaataaaacaagttaaaaagaaatttcctgatatagatatggttgggggtaatgtagcaacggcatcaggagctaaatcattaattaaagctggagttgatgcagtaaaagttggagttggtccaggatctatatgtacaactagagtagtttcaggcgtgggcgtccctcaattatctgctgtaatggatattgttagtgtcgctggagatattcctgttatttcagatggaggagtaaggtactcaggagacattgtaaaagcaattggagctggagctaatactgtaatgttaggtagtgtttttgctggtacagaagaagctccaggagaaatagaacttttccaaggcagaagctttaaaacttatagaggtatgggatcattgggagcaatgtcaaaaagagctgatgctgaaagatatatgcaaggcgaagatacagctgcagaaaaacttgtcccagaaggtatcgaaggaagagtgccttttagaggctggctaaaagatgttgtttatcaattagaaggcggattaaggcaaggtatgggttatacaggttcaaaagatataaaagatttacaaaaaagagttcaattccaaaaaattactagatcaggcatgactgaaggccatgttcatgatgtcagcataacgaaagaagcgccaaactatagagtggattaat

SEQ ID NO: 204836 - DNA, 916 bp, Unknown
  Bacterial polypeptide expressing nucleotide sequence isolated from the Sargasso Sea
atggatcccatcaaagaatctctaacattcgacgatgttttattagaacctaaatactcagaaatattaccttctgatgtaataactgagacttcattgtcaaaaaacttaaaacttaaaatacctattctttcatctgcaatggatactgtaacagaatctaaaatggcaatctctattgctcaatcaggtggtataggaataattcatagaaatttaagtattaaaaaccaaattaaagaaataagaaaagtaaaatccaaaaatttattagttggagcagctataggtgcgggccctttagaatatgatagagcaaaaaatatattaaaggaaaatcttgatttaatagtgatagatacagctcacggtcataccaaaaaagtttcagaaatagtgaaaaaagtacggtcaataaagccaaaaaaaactgctttatgtgcaggcaatattgcaactttagaggcggcaaaatttttaataaggctcggagtagatattataaaagtaggcattggaccaggatcaatttgtacaacaaggattgtagcaggaataggagttccacaattaagtgcaattctttcagtaaaaaagggcataggaaaaaaaaatattaaaattattgcagatggtggaattaaattttcaggagatattacaaaagctctagctgcaggagctgacgcagttatgataggatctttatttgcgggtacatctgagtctccaggtaaaatttttaaaaaaaatggaaaatattttaaaagttttagaggaatgggctctataggagcaatgaacaaaggatcagcagacagatattttcaaaaaaaacaaaaaaatatttcaaagtatgtagcagagggagttgaaggttttgttaaatacaaaggtccagtagataagatatcta

SEQ ID NO: 204837 - DNA, 475 bp, Unknown
  Bacterial polypeptide expressing nucleotide sequence isolated from the Sargasso Sea
aaaaaaataaaaaatatttcagatggcggaataaaattttctggtgacatagcaaaggccttagcagctggtgcagatgctataatgatgggatctatctttgcaggcacagacgagagtccaggaaaaaaatttaagataaaagaaaaattatataaacaatttagaggaatggggtcaattggtgcaatgtcatcaggttcagctaataggtattttcaaaaaaattttaaagataagtcaaaatttgtacctgagggagtagagggaagagttgagtataaaggcaatgtttcaaaaataatttatcaattacaaggaggcttacgctcttcaatgggatatataggagcaaaaaatttaaatcaaattcaaaaaaaagctaagtttattaagattacaaaagcaggtttttatgaaagtatggtacatagtgtggagattacacaaaaaacaactaattataagttatgat

SEQ ID NO: 204838 - DNA, 643 bp, Unknown
  Bacterial polypeptide expressing nucleotide sequence isolated from the Sargasso Sea
ggtggtacgtggcacagctgaaggcgcattagccctagttgaagctggtgttaacgcggttaaagtcggtattggccctggttctatctgtaccactcgtatcgtgacgggtgtgggcgtgccacaaattaccgcagtgtctgatgctgccgaagccgtaaaaggtttagggatcccagttattgccgacggcggtgtacgtttctccggtgacttagccaaagccttagccgcaggagcatcgtgcatcatggcgggttcaatgttcgcgggtactgacgaagcgccgggcgaaactgaactctaccaaggccgtgcctataagtcataccgcggtatgggttctttaggcgccatgtctcaaggttcttctgaccgttatttccaatctgacaatgctgccgacaagctggtgccagaaggcatcgaaggccgtgtaccttacaaaggcaagctcaaggaaatcatccatcaacatatgggcggtctgcgttcatgcatgggcctaacgggctgtgccacgatccaagaactgaacgaaaaagcgcaatttgtgaaagtgacgtctgctggcatgggcgagtcccacgttcacgatgtgactatcactaaagaagcgccaaactaccgttcaggtgcgtaa

SEQ ID NO: 204839 - DNA, 863 bp, Unknown
  Bacterial polypeptide expressing nucleotide sequence isolated from the Sargasso Sea
aaaagccgagcgtaagcctaatgcctgtaaagacgaattaggtcgtttacgtgtgggcgccgccgtgggtgcgggtgccggtaacgaagagcgtgtcgatgcgctggtgaaagctggtgttgacgtgctgctgattgactcttcccacggccactctgaaggcgtgttgcaacgtatccgtgaaacccgcgcaaaatacccagatttacaaatgatcggtggtaacgtggcaacagctgaaggcgcattagccctagttgaagctggtgttaacgcggttaaagtcggtattggccctggttctatctgtaccacacgtatcgtgacgggtgtgggcgtgccacaaattaccgcagtgtctgatgctgccgaagccgtaaaaggtttagggatcccagttattgccgacggcggtgtacgtttctccggtgacttagccaaagccttagccgcaggagcatcgtgcatcatggcgggttcaatgttcgcgggtactgacgaagcgccaggcgaaacggaactctaccaaggccgtgcctataagtcataccgtggtatgggttctttaggcgccatgtctcaaggttcttctgaccgttatttccaatctgacaatgctgccgacaagctggtgccagaaggcatcgaaggccgtgtaccttacaaaggcaagctcaaggaaatcatccatcaacatatgggggggctgcgttcatgcatgggcctaacgggctgtgccacaattcaagaactgaacgaaaaagcgcaatttgtgaaagtgacgtctgcgggcatgggtgagtcccacgttcatgatgtgactatcactaaagaagcgccaaactaccgttcaggtgcgtaaa

SEQ ID NO: 204840 - DNA, 868 bp, Unknown
  Bacterial polypeptide expressing nucleotide sequence isolated from the Sargasso Sea
atgtttcctataaaagaagcattaacctttgatgatgttactttagctcctaagtactcagaagtattgccatccgaagttgacactagtatcaagctaactaaatttttgaaacttaaaataccacttttatcttcggcaatggatacagtaacagaaagtaaaatggctattgcaatagcaaaagctggtggtttaggaataattcacagaaatttagacataaagaaacaagttagtgaagttaaaaaagtaaaaaaattgagtttattagttggtgctgccgttggcgcaggtcctagagaagtcaaaagagctgaagcactgttaaaagaaaatttagatatgattgttgttgatacagctcatggtcatagcaaaaaagtttttgaaataataagtttcataaaaaagaaaaaaaataaaaaaacagctttatgtgctgggaatatagctacaccagaggcagcaaaatttctacttaaaacaggagttgatgtaattaaagttggtattggtcccggttcaatctgcacaacaagattagtggcaggtataggagttcctcaattgagcgcaattttaaatgtaagaggaggcattaaaaataaaaatgtaaaaattatttctgatggaggaataaagtactctggtgaccttgctaaagcttttgcagcaggagcagatgcagtgatgataggttcattatttgcgggaacagatgaaactccaggcaaacttataaaaaaaaatggaaaattatataaaagcttcagaggaatgggttctgttggggcaatgaacaaaggatcagctgatagatattttcaatcaaaacaaaaggatcaatctaagtatgtacctgagg

SEQ ID NO: 204841 - DNA, 849 bp, Unknown
  Bacterial polypeptide expressing nucleotide sequence isolated from the Sargasso Sea
attgggcgttatacataaaaataactcaattgaaaaacaggcaagtgaggtaaaatttgtcaaaaaatatgagagtggaattgttcgagatcccgtaaccataagttcaacaaattcaattgaggagcttaaaaatctgacagataagcttagcatttctgggatgcctgttgtagataatggacaattgaggggcattgttactggcagagattttagatatgcagaaaatatggattcaaatgtatcaacaattatgacgccttttgagaaactagttactgttaatgagggtttttctcaagaggatgttatgcagttaatgtataagaatagaattgagaaagttttagttttagacgcaaacaaaaacctatcagggcttgttaccatgaaagatattgaaaagtcagcacaatatcctaatgcaacgaaagatgattctggaagactaagggtcgctgcagcaattggtacagaacaaaatactttagagagggctgaagcactttttgaagctggagtagatgtctttgtaattgatagcgcccatggacattcaaaaaatgtcatagatacaattaaaactattaagcggtcttttaaggatattgaaataataggaggtaacatagcaacagctgatgcagcaaaagaattagctcaagctggtgttagtgcagtaaaagttggaatgggtcctggatcaatttgtactacaagaataattgctggaatcggcgttcctcaaataacagcaattcttgaaataaaacaagctattaagaaaaacaatgtgaaagttattgctgacgggggaataagattttctggtgatattgcaaaagc

SEQ ID NO: 204842 - DNA, 661 bp, Unknown
  Bacterial polypeptide expressing nucleotide sequence isolated from the Sargasso Sea
atgggaagtataaaagattcgctcacatttgatgacgtaagccttgttcctcaagaatcatcggtcgtacccaacgaaacaatcacaaaaatcactttgcataaaagattgaatttacagatcccattaatttcatctgcaatggatactgtaaccgagtctaaaatggcaatagctattgctaagatgggaggaattggagttattcatagaaacttatcagcagacgcacaagttagtgaaattagaaaagtaaaaaaggcaaaatttttagtaggtgctgctataggcgtaaataataatgacttagatagagtaaaaaaacttatagaagcaaatgtcgatatgattgtaatagatacagctcacggacatacacaaaaagtttcaaaaatgatttataaggttaaaaaaattataaaaaaaataccgctttgcgcaggtaatattgctactgggaaggctgctaaatttttgtcgagttgcggggtcgatatagtaaaagttggaattggaccaggatcaatttgtactacgagactggttgctggagttggagtaccacagttgagcgcaatattagacgtaaaaaaagctttaggaaaaagtaaaactaaaattatttcagatgggggaataaaattttcaggtgatttagcaa

SEQ ID NO: 204843 - DNA, 448 bp, Unknown
  Bacterial polypeptide expressing nucleotide sequence isolated from the Sargasso Sea
atgaatttgcgagaaggactgacctttgatgatgtgcttctggagcctgctgcatcaaaggtgttgcctgcaaatgcagatacccgaacatatgtaacaaagacaattgagctaggaatacccttactttcagcagcaatggatactgtaactgagagccgattagcaattgcagtagcacaagctggtggaatgggggttatccataaaaatatggatatatcagtgcaggctgatgaagtgcgaaaggtaaaaaaagctgaagctggtatggtcattaatccactgactatatctcctggtcgacctgttatagaagctctaaaactaaaagatgagcatgggatatccggaattccagtagttgaagaaggcaatggaaaattagtcggtatattaactaatagagatgtgagatttgtaacagaccttaaccaaccggtaaggg

SEQ ID NO: 204844 - DNA, 622 bp, Unknown
  Bacterial polypeptide expressing nucleotide sequence isolated from the Sargasso Sea
cctgatcgatgcaggagtggatgcagtcaaggtgggcatcggcccgggatcgatttgcaccacacgaatggtggcaggcattggaatgcctcaaatatcggccattgacagcgttgccgaagccctccgtaaaactgatctcccgatcattgctgatggaggaatcaaatattccggggatatcgtcaaagcccttgctgccggagcacacagcgtgatgatcggcagcctctttgcaggaactgccgaaacccccggacaggtcattctctaccagggtcgccgctacaaactataccgcgggatggggtctctcggtgccatgaaagaaggaagcaaagaccgttatttccagacggaaattcaggaggttcagaaactggtccccgaaggaatcgaaggacgggttccctacaaggggcctttggcggaatccatttttcagttcactggaggtttgcgggccggtatgggttacacaggctgcgcaagcatcaatgagcttcagaacaaggccagttacgtccgcatttccaatgcaggcctcagggaaagccacgtgcatgatgtctacatcaccgaggaagccccgaattatccatcgtttaaacctgatgtctga

SEQ ID NO: 204845 - DNA, 575 bp, Unknown
  Bacterial polypeptide expressing nucleotide sequence isolated from the Sargasso Sea
ccctggatcaatttgtacaacaagaattgttacaggtgtgggagttcctcagattactgcagttgcagaagtaaccgaagctttaataaagaaagatataccggtcattgcagatggcggaattagattttcgggagatatagctaaggctatagctgccggaggacatacagtcatgttaggaagtgttcttgcaggaacagaagaagcaccaggagaattagagttgtatcaaggtaggagttataaatcttatagaggcatgggttctataggagctatgtccggagatcaaggttcttccgatcgttatttccaagatagttcagaagctaccgaaaaattagtacctgagggaattgaaggaagagtgccatataaaggttggttacaggctgttattcatcaaatgatagggggccttagacaaagcatgggatatacaggttcacatgacattgcgactatgagaacaaaacctaaatttgttcaaattacttctgcgggtgttaatgaaagtcacgttcatgatgtaagcgtcaccaaagaggcacctaactacagaatgagctaaa

SEQ ID NO: 204846 - DNA, 802 bp, Unknown
  Bacterial polypeptide expressing nucleotide sequence isolated from the Sargasso Sea
aattctaacaaacaaattgcagtaggcgctgcaatcggtgttgaaaataatgcgtacttacgactattagaattattaaaagttggtgttgatatagtctttattgatgttgctcatgcacatacaaaaacaactttacagtttattgaaaaagcaaaaaaagttttaaagaaaacccctcttatagttggaaacattgctacaaaaaaagctgcatcagatttaattagtgctggtgtagatgccattaaagtaggtattggaccaggatcaatttgtacaacaagagttgtgactggtgttggtatacctcaactttcagctgtgatggatacatttcaagttgccaaaaaatttaaaattccagtaattgcagatggaggaataaaaacatcaggtgatattgcaaaagctatagcaggtggtgcaagtgcttgcatgataggctctttatttgctggcactgaagagtcaccagggaaattattaacgattaaaggtaaaaaatttaaatcctatagaggtatgggttcggtaggagcaatgcaaaaaggatcttttgatcgatactcccaagaagaaacaaagaatgccaaaaaattagtagcagaaggtgtggaaggaatggttccatacaaaggtaaaatagaagatgtagcatatcaacttgttggtggcttaaaatcttcgatgggatacactggtcataaaacgattaagaaaatgcagggcaactgtaaatttgtctttatttcaaaagcaggagcccgtgaaagtaatgtccacgatgtcattatgtaat

SEQ ID NO: 204847 - DNA, 868 bp, Unknown
  Bacterial polypeptide expressing nucleotide sequence isolated from the Sargasso Sea
catttaaagatccctcttatttcctctgcaatggatactgtgactgaagctaaaatggcaatatcaattgcaaaacttggcggtatcggagtgatacatagaaatttacctattgatgcgcaaattaaagaaatcagaaaagttaaatctcaaaaatgtctagttggtgcagcagtaggagctagtttggcggaacataatagagctaaaaaaattctacaagaaaatatagatttaatcgtagttgacacagcgcatgctcatacaaaaaaagttgctgaaataataaaaataattaaaaaaataaaaccaaacaaaactagtctctgtgctggaaatatagctactagtgaggcagcaaagtttctgattaaacttggcgttgatatactaaaagttggaattggtcctggctcaatttgtactacaagattagtagctggaataggagtacctcaactaagtgcaatactaaatgttagagatggaattggcaaaaataaaactaaattgattgccgatggaggaattaaattttcaggagatatagctaaagcactaactgctggtgctgatgccgtgatgataggatcattatttgctggaacagatcaagctccaggtaaacttattaaaaaaaaaggcaaattatttaaaaattttagaggaatgggttcaattggtgcaatgaataaaggatcggctgatagatactttcaaaaaaaacaaaaagatagcacaaaatacgtagcagagggagttgagggatatattaagtataaaggatcagttaataaaattatatatcaacttgtaggtggtttaaaatctgcgatgggatacttaggatcaacaaaaagttattaat

SEQ ID NO: 204848 - DNA, 543 bp, Unknown
  Bacterial polypeptide expressing nucleotide sequence isolated from the Sargasso Sea
gaatgatcgcaggtattggagtgcctcaaatactgcaaataatggaagtcaaaaaagctttaaaaaataaaaaaattaaaattgtatccgatggaggaatcaaattttcaggagatgctgctaaagctttagccgcaggagcagatgcaataatgatgggatcgatttttgcaggaaccgatgaaagccccggtaaaaaatttaaaataggaaataaaatctataaatcatatagaggcatgggctctataggagctatgtcctcgggttcctcagataggtattttcaaaaaaatcaaattgataaatcaaagtatgttgctgaaggagttgaagctagagtaagatacaaaggcccagtttcaaaaattatttatcagttacagggtggcttaagatcttcaatgggttatattggtgctaaaaatttagagggaataaagaaaaatgccaagtttattaaaataacaaaagctggattttatgaaagcatggtacatagcgtagaaacaacaaacggtggaacaaattacaaactatgaa

SEQ ID NO: 204849 - DNA, 934 bp, Unknown
  Bacterial polypeptide expressing nucleotide sequence isolated from the Sargasso Sea
atggataccgtgacagaaaataagatggcgatcaatctcgcactacatggtggtctaggtgttatccaccgtaatatgccaattgataaacaagcaagcgaagtaaaaaaagttcatagctttaaagttaacggtaaaaaatttcaaaatgctgtaattaattctaatggaaagattgcggtgggtgctgcaattggtgttgaaaataatgcgtacttgcgactattagaattattaaaatttggtgttgatatagtctttattgatgttgctcatgcacatacaaaaacaactttacagtttattgaaaaagcaaaaaaagttttaaagaaaacacctcttatagttggaaacattgctacaaaaaaagctgcatcagatttaattagtgctggtgttgatgctatcaaagtaggtattggaccaggatcaatttgtactacaagagttgtaactggtgttggtattcctcaactctcagctgtgatggatacatttcaagttgccaaaaaatttaaaattccagtaattgcagatggaggaataaaaacatcaggtgatattgcaaaagctatagcaggcggtgcaagtgcttgcatgataggttctttatttgccggcactgaagagtcaccaggaaaattattaacgattaaaggtaaaaaatttaaatcctatagaggtatgggttctgtaggagcaatgcaaaaagggtcttttgaccgatactcccaagaagaaacaaagaatgcaaaaaaattagtggcagaaggtgtggaagggatggttccatacaaaggtaaaatagaagatgtagcctatcaacttgttggtggtttaaaatcttctatggggtacactggtcataaaacaattaagaaaatgcagggcaactgtaaatttgtctttatttcaaaaggcaggagcccgcgaa

SEQ ID NO: 204850 - DNA, 846 bp, Unknown
  Bacterial polypeptide expressing nucleotide sequence isolated from the Sargasso Sea
aatggatactgtaacagagtctaaaatggctattgcgattgccaaagagggcggtatcggtattattcacagaaatttaaatataaaagatcagactaaagaagtaaaattagttaaagataaaaaaaatttcgttggtgcagctatagggactaatcatgaagatctagatagaactaagtctttgataagtaatggtgttgatttaatagttatagatactgcacatggacacagtgaaaaagttttaaagactctatcaaaaataaaaaaaattgttggaaaaataccagtgtgcgtgggtaacatagccacgggagaagctgcaaaaaaattatacaattcaggtgccgatataatcaaagttggtattggaccagggtctatctgcactacaagaatggtggctggaataggtgtgcctcagatttctgcagttatggatgtaaaaaaaacattaaggaaaaagaagataaaaataatttctgatggtggtatcaaattttcaggagatattgctaaagctttagcagcaggggccgatgcaattatgatgggttcaatttttgcaggaacagaggaaagtccaggaaaaaaatttaaaataaagggaaaaatttataaacaataccgcggaatggggtcaattggcgctatgtcctcaggatcagcaaatagatattttcaaaaaaattttaatgataaatctaaatttgtaccagagggagtggaaggaagagtggaatataaaggaaaagtatcgcaaataatttatcaactacaaggtggattgagagcatcaatgggatatattggtgcaaaaaatttaaaagagataaataaaaa

SEQ ID NO: 204851 - DNA, 448 bp, Unknown
  Bacterial polypeptide expressing nucleotide sequence isolated from the Sargasso Sea
tctggcgatatagcaaaagcgatagcggcaggtggccatgttgttatgttggggagtttatttgcaggcacagaagagtcaccaggtgaagtggtaatttttcagggcagatcattcaagtcatatcgtggtatgggttctgtgggcgcgatgagtcagacacatggatcatctgataggtattttcaagacagtgaaaacggtttagataaacttgtgccagaaggaatcgaaggcagagtggcttacaaaggttccgtgattacaataattaatcagatggtaggaggacttagatctgcaatgggctacactggttgtgtaacaatctcagaaatgagaacaaaacctcaatttgttaagataaccccagcaggtatgaaggaaagccatgtccatgatgtggcgattactaaagaggcaccgaattacagaagcacatcataga

SEQ ID NO: 204852 - DNA, 658 bp, Unknown
  Bacterial polypeptide expressing nucleotide sequence isolated from the Sargasso Sea
cgcaataggaacaggagctgaaacttttgatagagctaagtctttagctgattcaggagttgatttgtttgttgttgatagtgcgcatggtcatactaaaagtgtaatagagacagtaaaaatgattaaaaaagaatttccaactaaagatgtcattgctggaaatgttgctaccccagaaggagcagaggcgttaatagaagctggtgcagatggcataaagattggaatgggtccaggatcaatatgtacaacaagaattattgctggcattggagttccacaaatttctgcaatattgacaatttatgaaaaagtaaaaggaaaggtgccgctaatagcggatggcggtatgcgctattcaggagacatagccaaagcaattgcagcaggggctgacagcgtaatgcttggaagtatttttgctggaactgaagaagctcctggagaatttgagctctatcaaggaagaagcttcaagacttacagaggaatggggtccttgggagcaatgtctaaaagagatgatagcaacagatattttcaagaagatattgatgctgaaaaacttgtacctgaaggcgttgagggtagggttccttataaaggatgggctatcaatgttattaaccaacttattggaggtcttagacagagt

SEQ ID NO: 204853 - DNA, 733 bp, Unknown
  Bacterial polypeptide expressing nucleotide sequence isolated from the Sargasso Sea
cgaacagcaggccgccgaagtggcccaggtcaagaagttcgaggccggcgtcatccgcgacccgatcaccgtaggcccggaaaccaccatccgcgacgtgctggcgctgacccaggcgcgcaacatttccggcgtgccggtggtggatggcggtggccagctggtgggtatcgtcacccatcgcgacatgcgcttcgagaccgagttggacgatccggtccgccacatcatgaccaagaaggatcgactgatcacggtcaaggaaggcgccgcgtcggacgaagtgctgcagctgctgcaccgcaaccgcatcgagaagatcctggtggtcaacgatgatttcgctctgcgcgggctgatcaccgtcaaggacatccagaagaacaccgactaccccaacgccgccaaggacaccgcgacccgtctgctggtcggtgccgcggtcggagtcggcggcgataccgatcgccgtgtcgaagcgctggtcaccgccggcgtggacgtgctggtggtggacaccgcgcacggccactcgcagggcgtgctggaccgcgtgcgctgggtcaagaagaacttcccgaacgtacaggtcgtcggcggcaacatctgcaccggcgaagccgcgctggcgctgctggacagcggcgctgacgcggtcaaggtcggcatcggcccgggctcgatctgcaccacgcgcgtggtcgccggtgtcggcgtgccgcagatcaccgcg

SEQ ID NO: 204854 - DNA, 685 bp, Unknown
  Bacterial polypeptide expressing nucleotide sequence isolated from the Sargasso Sea
ccgtgaaacccgcgctaaatacccagatttacaaattattggtggtaacgtggcgacagctgaaggcgcattggccctagttgaagccggcgttaacgcagttaaagtcggtattggcccaggttctatctgcaccacacgtatcgtgacgggtgtgggcgtgccacaaattactgcggtttcagatgcggccgaagccgtaaaaggattaggtatccctgttatcgccgacggcggtgtacgtttctctggcgacttagccaaagcgttagcggcgggtgcatcatgcattatggcgggctcaatgttcgctggtactgatgaagcgccgggcgaaaccgagctttatcaaggccgcgcctataagtcatatcgcggtatgggttctttaggcgccatgtctcaaggttcttccgatcgttatttccaatctgacaatgctgccgacaagcttgtgccagaaggcattgaaggccgtgtaccttacaaaggtaagttgaaggaaatcatccatcagcatatgggtggtttacgttcatgcatgggcttaacaggctgtgccactatccaagagctgaatgaaaaagcccagtttgtgaaagtgacgtctgcgggcatgggcgagtcccacgtgcacgatgtgacgatcactaaagaagcaccgaactatcgttcaggttcttaa

SEQ ID NO: 204855 - DNA, 739 bp, Unknown
  Bacterial polypeptide expressing nucleotide sequence isolated from the Sargasso Sea
tgttattgacactgctcatgctcattccaaaagtgtagctgaagcacttaaaaaggttaaaaataatttcaataatattgatgtagtagttggaaatatagcaacaaaagaagcagctaactttttaatagatattggagcggatggattaaaagttggtataggtccaggctctatatgtacaactagaattgttgcaggagttggttaccctcagttttctgcagttttagaagtagcgaagtcaataaaaaataaaaatatacctattattgctgatggtggtattagatatactggagatatatcaaaagcaatagctgctggtgctgattctgtcatgttaggttctcttcttgccggtactgaagaatctcctggtgaaactgtaatttttaatggtagaaaatttaaaacctacagaggaatgggttctgtagaggctatgaaggaaggtagtaaatcaagatattttcaaggttctgaaaatgactcaaaaaaattagttcctgaaggaattgtagggcgagtaccctataaaggtgagcttcaggaaagtatccatcaatttgttggagggttaagatctgggatgggttactgtggagccaaaagcatcaatgagttaaaatctaaatctaaatttgttaagattactggttcaggtattaaagaggggcatccccataatgttacaattacaaaggaagctccaaactatagtccgcctaaagtttaa

SEQ ID NO: 204856 - DNA, 275 bp, Unknown
  Bacterial polypeptide expressing nucleotide sequence isolated from the Sargasso Sea
gatgttacgtattgaagataaagccctcacctttgatgacgttcttttagtgccagctcactcggaagtcttgccgaatgaagttgatttaaagaccagattaaccaagaaacttaatttaaatattccacttgtgtctgccgctatggacacggttacggaatctcgcatgagtatcgctttaagtgaattgggtggaattggcattattcataaaaatttatctattgatgctcaagcttctgaagttagaaaagtaaaaaaatacgaaagcg

SEQ ID NO: 204857 - DNA, 802 bp, Unknown
  Bacterial polypeptide expressing nucleotide sequence isolated from the Sargasso Sea
tttgacgacgttttactcgtaccaagatattcctcagttctaccatcaaatacaagtctaattactaatttaggagactccttaaaattgaaaattccatttttgtcttcagcaatggatactgtgactgagtcaaaaatggcaatagcaatagcaaaagcaggtgggttaggaattattcatagaaatttaagtgcaaaacaccaggcgcatgaagtttctaaagttaaaaaaaaaaaattaattgtaggtgcagctataggtacaaaacgggaagatttagatagagtgaaaatactcttaaaccatggagttgatcttattgttattgatacagctcacggtcatagtgaaaaagtaataagaattttatcaaaagtaaaaaaaatgagttttaaaactaaaatttgtgtagggaatattgcatcaaaagaagctgccaggaaactttgtgaagaaggagctgacattctaaaagtagggataggtccaggctcaatttgtacaacaaggcttgttgctggaattggtgttccacaaataagtgcaattatagaagtaaaaaaaggtattaaaaataaaaaagttaaaattatttctgatgggggaattaaattttcaggagacattattaaagctctaggagctggagcagatgctgttatgatgggctcaatttttgctggaacggaagaaagtccaggaaagaaatttaaatataaaaagaaattttataaatcttttagaggaatgggttcagtaggagcaatgtcagaaggttcatcaaatagatacttcaaaa

SEQ ID NO: 204858 - DNA, 610 bp, Unknown
  Bacterial polypeptide expressing nucleotide sequence isolated from the Sargasso Sea
gaattaatagatgtaggtgctgatggtattaaagtaggaattggcccaggttcaatttgtactactaggattattgctggtgtaggcatgccccagttaactgcaattataaattgtgctaaagaagcagatttacacaatattccggtaattgctgacggtggaattagattttctggagattttgctaaatcaattgcctcaggagcttcttgtgctatgattggttctttatttgcaggaacagatgagtctcctggtgaaatatctttatatcaaggcagaagttttaaaaattacagaggaatgggttctttgggtgctatggcaagaggttctgctgatagatattttcaaaaagaagtagaagcagataaattaattcctgaaggaatagaaggacaagttccatacaaggggtcagttaataacataatttatcaattagtaggtggattaaaggcatctatgggatacacaggtaataaaaatattaatcaaatgaaaaatggttgcaaatttattaaaatatctggcgcaggtttgtcagaaagtcatgtgcatgatgtaagaataacaaatgagtcaccaaactatagtaataattagt

SEQ ID NO: 204859 - DNA, 747 bp, Unknown
  Bacterial polypeptide expressing nucleotide sequence isolated from the Sargasso Sea
aaacaatattaaaagaaaacttagatataatagtaattgatacagctcatggacataccaaaaaagtagaggaaataattaaaaaaataaaaaaaatacgtcctaagaaaacagcaatttgtgcaggaaatatagctacagcagaagccgcaaagtttttggttggattaggtgtggatattataaaagtaggaataggtccaggatctatttgtacaaccagacttgtagcaggaataggagttccacaattaagtgcgatattagatgttaaaaaggggattggtaaaagtaaaacaagattaattgctgatgggggaataaaattttctggtgatatcgctaaagcattagccgctggtgcagatgcagttatgataggatcactatttgcaggtacagatgaagcacctggtaaaaaaataaagaaaaatggtaaattatataaatattttaggggcatgggttcaataggtgcaatgaataaaggctcagcagacagatattttcaaactaaacaaaaagatacatcaaaatatgtagcggaaggtgtagagggatacattaagtacaaaggtaaagttgataaaataatctacaacttagttggaggtttgaaatcttcaatgggctacatgggagctaagaaagtaattgatctaagaaaaaaaccaaaatttgttaaaattaccaaagctggtttttatgaaagtatggtacataatatagatgttgtgaaaaaataac

SEQ ID NO: 204860 - DNA, 642 bp, Unknown
  Bacterial polypeptide expressing nucleotide sequence isolated from the Sargasso Sea
catgatcgatatccccgaagcccttacgttcgatgatgtccttttggtgcctgcaaagtcagatatcctgcccggccaaaccaatacatctactcgcctgacccgcacgattgggttgggcattccgctcatttccgcggccatggatacagttactgaagcaaatctggccatcgcccttgcccaagctggcggcatcggtgttatccacaagaatctaaaaccccaggaacaggctgaagaagtccgcaaggtcaaaaaatacgaaagtggcatggtcatcaatccgctgaccatcaacccccaggcgacattggccgacgccctggccatgaaggaacgcaatggattttccggtattccagtggtggaagatgatgggaagttggtcggtatcttgaccaaccgggacgtgcggtttgctgacaaccctaaccagccagtaagcgagttgatgaccatccattccgaacatgaacccctgattaccgtcaaggagggcatagaccgcaatgaggcgaagaaattgctgcaccgccaccgaattgaacgcctcctggtcgtcgacaatcgctttcgttgcgtcggtctaatcacggtaaaggatatagagaagggagcaacccatcccaatgccgcgaa

SEQ ID NO: 204861 - DNA, 922 bp, Unknown
  Bacterial polypeptide expressing nucleotide sequence isolated from the Sargasso Sea
tatgactccatttgaaaaactagtcactgttaatgagggtttttcacaagaggatgtaatgcaattaatgtataagaatagaattgagaaagttttagttttagacgcaaacaaaaacctatcagggcttgttaccatgaaagatattgaaaagtcagcacaacaccctaatgcaacgaaagatgattctggaagactcagggtcgctgcagcaattggtacagaacaaaatactttagagagggctgaagcactttttgaagctggagtagatgtctttgtaattgatagcgcccatggacattcaaaaaatgtcatagatacaattaaaattattaagcagtcttttaaggatattgaaataataggaggtaacatagcaacagctgatgcagcaaaagaattagctaaagctggtgttagtgcagtaaaagttggaatgggtcctggatcgatttgtactacaagaattattgctggaatcggcgttcctcaaataacagcaattcttgaaataaaacaagctattaagaaaaacaatgtgaaagttattgctgacgggggaataagattttctggtgatattgcaaaagcaatttctgctggagctgattcagtaatgttaggaagtttatttgctggaactgaagaggctcctggcaaagtcgaactctttcaaggtagaagctttaaaacatatagaggcatgggttcaattggcgctatgactgaaagaaatgatgccaacagatatcttcaagaagataaagaatctgataaattagttcctgaaggcatagaaggaagagtgccatacaaaggcctagtcattaacgtaataaaccaattagaaggtggtttaagacaaagcatgggatatgttggctgtaagaatatagaagctatgcaaaaagaaagtcaa

SEQ ID NO: 204862 - DNA, 925 bp, Unknown
  Bacterial polypeptide expressing nucleotide sequence isolated from the Sargasso Sea
catttgacaataagagaaggattcacttttgatgatgttctccttgtacccaaattttcagatataactagtcgttcacaaactaatctatctacaaatctttctcgaaatattaaactcaatattcctttagttagtgcaaatatggataccgtgacagaatctaccatggcaacaacaatggctagacaaggaggaattggaataattcatagatttttgacaatagaagaagaagctgaacaagttctcaaagtcaaacgctctggaagtgtaatgattgataacccctaccaaatatcttctgaaaaatctgttgaagaagctattgatttaatgaatgaaaaagaagtatccgggttacttgtagttgattctgattctaaacttgttggtgttttaactgagcgtgatgtactttttgaatcaatcaattcaaaaaaatctgtgtctgaattaatgactaaagatgttatttcttcaaatgaaaatacaacattagatgaagcaaaagatatcctaaaaagtcatagaattgaaaaattacctctagtaaatgacaaaaatcacattgtcggtctttatactactcaggatattttgaacattgaaaattttccaaatgcatcaaaagataagaaaggtagacctcttgttggggctgcagttggagttaaaggtgactttttagatagaactgaagcattacttggtgctggtgccgatgcaattgtagttgatattgcgcatggtcatagtgaaaatgcaatcagtactgtaaaaaatattaaaaaagcatttcctgactgtgaactaattgctggaaatgtagcaactgctcaaggtactgaagatttgataaaagctggagttgatgcagttaaagttggtgttggttcgggttcaatttgtattacaagagtca

SEQ ID NO: 204863 - DNA, 661 bp, Unknown
  Bacterial polypeptide expressing nucleotide sequence isolated from the Sargasso Sea
aattaaaagactaaaaccaaaaaaaactacattatgtgctggaaatgttgcaacagctgaagctgcaaaatacttaattaaattaggtatagatattattaaagtaggtattggtccaggatcaatttgtacaacaagattagttgccggaattggtgtcccccaattaagtgctattttaagtgttaaaaaaggaatgggaaaaagtaaatgtactttgatagctgacggaggaataaaattttcaggagatattgctaaagctttagctgctggtgctgatgcagttatgattgggtctttatttgcaggaactgatcaagctccaggtaaaattataaaaaggaatggaaaattatttaaaagctttaggggaatgggttctattggtgcaatgaataaaggatcagccgatagatatttccaaactaaacaaaaagatacctcaaaatatgttgctgagggggttgaggcatttgtaaaatataaaggatcagtaaataaaataatttatcaattagtaggaggtttaaaatcatccatgggataccttggatcacctagagttgtagatttaagaaaaaaacctaaatttgtaaagataaccaaagctggattttatgaaagtatggtacataatatagatgaattaaaaaaatga

SEQ ID NO: 204864 - DNA, 562 bp, Unknown
  Bacterial polypeptide expressing nucleotide sequence isolated from the Sargasso Sea
gcctggttctatttgtactactcgcatgatagccggggtaggcttacctcaattgtcagctattatggaatgttctaatattgcaaaaaaatatgatattccagttgttgcagatggaggaattaaatattctggggatatagctaaagctatcgcgtcgggtgcagacgctgttatgattggatcactatttgcgggcactgatgaggcacctggagatgtttttttatatcaaggacgatcttataagtcttatagaggaatggggtctttaggcgcaatgtccagaggttctgcagatagatattttcaagaggagatcgaaaagttaaaacttgttccagaaggtattgagggtcaagtaccatataaaggtccattagaaaacataattcatcaattagtcggtggattaaaatcctctatgggttacactggtaatactgatataaattcaatgcaaaataattgtaaatttagaagaataactaatgcaggtttaaaagaaagtcatgttcatgatgttatgattacacgtgaagcaccaaattatagacaatga

SEQ ID NO: 204865 - DNA, 934 bp, Unknown
  Bacterial polypeptide expressing nucleotide sequence isolated from the Sargasso Sea
gcctattccgaggttaccgccaaggaggtctcgctggtcacgcgcctgacgcgcaacattccgctcaatattccactagtatccgcggcgatggatacggtcaccgagatgcgtctggctattgcgttggcccaggaaggtggaatcggcattatccacaaaaacatgactgttcaagaacaggccgaggaagtgcgccgggtcaagaaattcgagagcggcgtggtaaaggacccgatcaccatcgagagcaccgcgagcattgcgcagctgatcgagctcacccgttccaacggcatttctggcgtgccggtgatggagtccggcaacctcgttggcattgtgactcgccgcgatatccgcttcgagaccgacaccgaacagccggtttccgagatcatgaccaaaaaggaaaagctggtcacggtgaaagagggtgcgccgcttgaagaggtgcagagcctgctgcatgagcaccgtatcgaaaaaattcttgtcgtggacgatgagtttgatctgaaaggcctcatcaccgtgaaagacttcgacaaagcggaatccttcccccacgcatgtaaagacggcttcgggcaactgcgagtcggcgcttctgtgggtaccagtcctgacaccgatgagcgggtggaggcactgattcgcgccggggtcgatgtgctggtggtagatactgcccatggccactcaaaaaatgtgctggatcgggtgagcatgattaaggccgcccatcccgatgttgacgtgataggcggcaacatcgctacggccgaggccgccgtggcgctccgcgacgcaggagccgatgccgtgaaagtgggtatcggtccgggctcgatttgcacaactcgcatcgtgactggggtgggtgtacccccaaatctccggctatcgcgacggtgtccgaggcactgccgat

SEQ ID NO: 204866 - DNA, 805 bp, Unknown
  Bacterial polypeptide expressing nucleotide sequence isolated from the Sargasso Sea
caaaaaacttctagtaggagcagcggtcggtgcaagtgaaaaagaattaattagagcaaaaaatctattaaaggaaaacctagatattattgtgattgatacggctcatggacacacaaaaaaagtagcagatataataaaaaaaatcaaaaaattacgtccaaaaaatacagcaatatgtgctggaaatatcgcaacaactgaggcagcaaaatttttagtaaaattaggagtagatattattaaagttggtattggcccagggtcaatttgtactacaagacttgttgcagggataggagttccacagttaagcgctatcttaaatgtaaaaaaaggaataggtaagagtaaaacgacactaatcgctgatgggggtataaaattttctggtgatatcgcaaaagctttagccgctggagctgatgctgttatgataggatctttatttgcaggaacagatcaagccccaggaaaaaaaattaaaaaaaaaggcaaattatataaatattttagaggcatgggatcaattggagcaatgaataaaggttctgcagatagatattttcaatctaaacaaaaagatacctcaaaatatgtagctgaaggagtagaggggtatattaaatatagaggtagcgttgataaaattatttacaacctaataggaggtttaaagtcgtctatgggatacttgggtgcaaaaaaagttaccgaactaagaaaaaatccaaaatttgtaaaaattaccaaggcaggtttttatgaaagtatggtacataatatagatctagtaaaaaaataa

SEQ ID NO: 204867 - DNA, 568 bp, Unknown
  Bacterial polypeptide expressing nucleotide sequence isolated from the Sargasso Sea
catggttcctataaaagaagctctaacctttgatgatgtaactctaacacccaagtattcagagatacttcctgctgatgttgatactagcatcaagttaacagaaaatttgaagcttaaaattcctcttttgtctgctgcaatggacactgtcactgaaagtaaaatggcaatatcgatagcgaaagcaggtggaataggaattattcatagaaatcttgatataaaaaaacaaattttagaaattaaaaaagtaaaaaaacagaaattactagtgggtgctgcggtaggtgctggaccaagtgaatataaaagagctgaagcaattttaaaagaaaatgtaaatatgatcgtagtcgatactgctcatggccatactaaaaaagtttcagatattattagatttattagaaagaaaaaaagcaaaaaaacagcgctatgtgcaggcaatgtagcaacacctgaagcggctaaatttttactaaaattgggtgtagatattattaaagttggaataggaccaggttcaatttgcacaacaagattagtagctggtattggtgttccc

SEQ ID NO: 204868 - DNA, 779 bp, Unknown
  Bacterial polypeptide expressing nucleotide sequence isolated from the Sargasso Sea
cgggttggagcgagcgtcggcgttggtggcgactcagatgatcgggtagcagcccttgttgaggccggggtcgatatcgtggttgtcgatacagctcatgggcacacaaaggcggtgttagatcgggtaagttggattaagcaaaagtacccggaacttgatgtgatgggaggcaatgtcgcaacaagcgatggtgctagggccctgatcgactcgggagtggatagtgtgaaggtgggaataggtcctggatctatttgcacaactagaatcgtggctggtataggagtgccccaggtaacagctatcacggacgctgtcgaagcggctctggagtcagaggtccctgtcgttgctgacggtgggatacgctactccggtgatatcgccaaagcgattgctgctggcgcaaatgttgtcatgattggcagcttgctggcaggcgctgaagagtcgccaggagaggtcgaattatttcaaggtcgaacttacaagtcctatcggggcatgggttcaatgggggccatggcgcaaagccacggttcaagtgaccgatacttccaggaggtgggctctgatgctggaaagctcgttccagagggagttgaggggcgggtcgcctacaaagggcctgtgagttcaatagtacatcaactaatgggtggcctcagggcatcgatgggctatacagggtgctctaatataggagcaatgagaactgaaaccaagtttgtgagagtcagtgctgccagtatggccgaatcgcatgtccatgacgt

SEQ ID NO: 204869 - DNA, 917 bp, Unknown
  Bacterial polypeptide expressing nucleotide sequence isolated from the Sargasso Sea
tttaataaagaaacttttacaagaaaatagaattgaaaaaattttactaattgatgattcttttaagcttactggtcttgtgaccttaaaagatattaataaatcactagattttccagatgccgctcgtgatgaagaagggagattattagcaggagcagcaataggaactaaatcagatactctacagagatgcgaagctttgatagaagctggagtggatgttttggtagttgatagtgcacatggtcatgccgaaggtgttttatcaactgtctctgaggtcaaaaaaaattttagagaggttgaaattataggtggaaatgttgccaccgctgagggagcacttgcattggccaaagctggtgcggatgcagtaaaagttggaataggtccgggttctatatgcactacaagaatcgttactggtgttggggtgcctcaaataacggcagttgctgaagtaacagaagctctaactaagaaaaatattcctgttatagcagatggtggaattagattctctggagatatagctaaagccattgctgccggaggtcattccgtcatgttaggaagcattttggctggtacagaggaagcgccaggtgaattagaactttatcagggcagaagttataaatcctatagaggaatgggatcgattggtgcaatggcaggagagcaaggctcatctgatcgatattttcaagatagcgcagaggctacagaaaagttagttcctgaagggatagagggtcgagtaccctacaaaggctggcttcaagcagtgatacatcaaatgattggaggtttgaggcaaagtatgggttatacaggctcaagagacatagaagaaatgagaactaagcctaaatttgttcaaataacttctgctggagttagcgaaagccatg

SEQ ID NO: 204870 - DNA, 478 bp, Unknown
  Bacterial polypeptide expressing nucleotide sequence isolated from the Sargasso Sea
cggcgttcccctgatcgccgacggcggtatccgttactcgggcgacgtcgccaaggccctggctgccggcgcacacaccgtgatgatgggcggcatgtttgccggtacggacgaatcgccgggtgaggtgttcctgttccagggtcgctcgtacaagagctaccgcggcatgggctcggtgggcgcgatgaaggacggcgctgccgaccgttacttccaggaagacaacaccgccaacgtcgacaagctggtgcccgaaggtatcgagggccgcgtgccttacaagggctccgcattgccgatcgtgcatcagctcacgggcggcgtgcgttcgtcgatgggctactgcggttgcgcatcgattgccgaatggcacgagaaggcgcagtttgtcgagatcaccgctgccggcatgaacgaatcgcacgtgcacgacgtgcagatcacgaaggaagcgccgaactatcaccgcgactga

SEQ ID NO: 204871 - DNA, 583 bp, Unknown
  Bacterial polypeptide expressing nucleotide sequence isolated from the Sargasso Sea
ggaattggtccaggctcaatttgtaccactcgggtggttgcaggagccgggatgccacaaatcacagcaattactgatgtcgcaaatcagcttaagggaactgatacatgcataatctcagacggaggtattcgttattcaggagatatcgcaaaagccatcgcagctggtgctaatagtatcatgctcggcagcctatttgctggaacagaagagtctcccggtgagattgagctgtatcagggcagaagttttaaatcatatcgtggcatgggctcacttggagcaatggctcagcaacatggttccaaagatcgatactttcaaagcgatgttgaagaaccagaaaaactagttcctgaaggcattgagggaagggttccttataaaggaaaactttcaaaaattattgagcagcttgttggcggtttacgtcagtcgatgggatatactggctgcaaagacatcactgagcttcaaactaaaactgagtttgtgagaattactgactcgggaaaaagagaaggacatgttcatgatgtcagcattacaaaagaagcacccaattactctgtcgattagt

SEQ ID NO: 204872 - DNA, 954 bp, Unknown
  Bacterial polypeptide expressing nucleotide sequence isolated from the Sargasso Sea
caacggttactgtaacgccggaagggaaaatgtgatgcagattcgtgaggccctaacttttgatgatgttttattagttccagctcagtcttctattttaccgtcagatgtcgacacgcggactcaggttacaaaagaaataactttaaatatccctttgctgagctctgcaatggatacggtcacggaatctaagatggctattactatagcgcaggctggaggcattggggttatacatcgtaaccttgaagtcgaacatcaagctgaggaggtccgaagagtaaaaagatttgaaagtgggatagtttataatccaatcactttaggcgaaaatcagactttgggtgatgctaatatcctgagagatcggtataacgttacaggctttcccgttgtagatgaaaaagaccgtgtcattggaattgtgaccaatcgtgatatgcggtttgctgctgacagcagtacacctgtttcaagaatgatgacaaaagaaaacttagctattttaaccgagcctgcggatcgtcggcaagcaattaatctgatgaaagaaaggcgtattgaaaagttattgattacagataagcaaggtcgacttactggattgctgactttaaaagatacagagcaagctgttttgaaccccacggcctgtaaggataaacttggacgattaagggttgcggctgcgacaacagttggtgacgagggatatttaaggtccgattgtttaatagatgctggcattgatttgctggttattgatacagctcatgggcattctgatgcagttattgaggctgtcggcagggtgaaaaaacggtcaaataacgttcaagtagtagcgggaaatgttgcaactgcagatgcatgtcaggctctgattgatgcgggggctgatgctgtaaaagttggattggccctggatcaatttgtacaacacgaatggtt

SEQ ID NO: 204873 - DNA, 772 bp, Unknown
  Bacterial polypeptide expressing nucleotide sequence isolated from the Sargasso Sea
catggaaactattaaagaagctttaacatttgatgatgttactttagcgccaaattactcagcaattttacctagtgaagtaagtacctccataaatttaacagaaagtctaaagatgaaaataccacttttgtcatctgcaatggatactgttacagagtcttcaatgggaattgcaatggggagagctgggggattaggaataattcatagaaacttaaatattgaagaacagattaaagaaattagaaaagtaaaatccaaaaaaatattagtaggtgcagcagttggtgcaagcgaaaaagaattaaagagagcagaaaaaatattaaaagaaaacttggatataatagtaattgatacagcacacggacataccaaaaaagtaggagatataattaaaaaaataaaaaaaatacgtcctaagaaaacagcaatttgtgctggaaatatagctacagcacaagctgcaaaatttttggttgggttaggtgttgatattataaaagtaggaataggaccaggatctatttgtacaacaagacttgtagcaggaataggagttccacaactaagtgcgatattaaatgttaaaaagggaattgggaaaagtaaaacaagactaattgctgatgggggaataaaattttctggtgatattgctaaagcattagcagctggcgcagatgcagttatgataggttcattatttgcaggtacagatgaagcgcctggaaaaaaaataaggaaaaatggtaaattatataaatat

SEQ ID NO: 204874 - DNA, 859 bp, Unknown
  Bacterial polypeptide expressing nucleotide sequence isolated from the Sargasso Sea
tatagttttaaaagtaccttttctttcatcagctatggatacagtaacagagtcaaagatggctatagctatgtccagaaatggtgggctaggtgttattcatagaaacttagacctaaagacccaaagcaaagaagttaacaaagttaaaaaactaaatctaaatgttggagcagctataggcactagtaatgacgatctagaaagagctagatctttaattaacaatggagttgatttattggtaattgacactgcacacgggcacagcaaaaaagttttaaatatattatcaaaaattaaaagaataagttcaataaaatctatttgtgtaggaaatatagcctctggggaagcagcaagagaactttataatgaaggtgcggatatcttaaaagttggtataggccctggctctatttgcacaacaagattagtagctggaataggtgttccacaattaagtgctattatgaatgttaagaaagaattaaaaaataaaaatataaagattatatcagatggaggtataaaattttctggagatataattaaagctttagctgcaggtgcggatgctattatgatgggatctttatttgctggaacagaagaaagcccgggtaaaaaatttagatataaaaacaagttatataaatcatatagaggaatgggttctataggcgcaatgtcatcaggatcatcaaacagatattttcaaaaaaattataaggataagtcaaaatttgtagctgagggcattgaaggtagagttttatacaaaggggcagtagaaaaaattatttaccaattacaaggaggcttgagatcatcaatgggatatattggagccaaaaaa

SEQ ID NO: 204875 - DNA, 933 bp, Unknown
  Bacterial polypeptide expressing nucleotide sequence isolated from the Sargasso Sea
cacagagtctcgaatggccattactcttgctggcgaaggtggcattggtattatacataaaaatatgtctattgaggaacaagctaaacaaatcaggtttgtaaaaaaatatgaaagtggaataataaatgaccccgtgacagcatccccgaatatgactattggagagatcaatatgatcactaaaaaatataatatatctggtgtgccaattgtagataataatcaattagttggcattgtgaccaatagagatctgagatttgtagacgaccttaatttgaaagtatctaaaataatgactcctcaagctagactgattacagttaaagaaaatttcactaaagaagaagtaatcagtgcacttagaaaaaataggattgaaaagatacttataatcaataaaaaacatgaactaaaaggaatggtaacctttaaagatattcaaaaatccacgacttatccaaatgcatctaaagatgatactgggagtctaagagttggagcagcagtggggacaggaaatgaatcggttgatagagccgaggctcttatagagcagaaaacagatattattgttattgatactgcacatgggcattcaaagcttgtcattaaaatgctcaaacatttgaaaaaagcatacccatcacaagaacttattgtcggcaatattgctaccgctgatgcggctaaagatcttattgcctcaggcgctgatgccattaaaattggtattggcccaggttcgatatgtactactagaatagttgctggagttggcgttccacaactcacagctattatgaatatctctaaaattgctaagaaaaataaaatccctttaatagcagatggaggaattaggtactctggagatattgcaaaagcattagctgctggcgctgattccgttatgctaggcggactgtt

SEQ ID NO: 204876 - DNA, 968 bp, Unknown
  Bacterial polypeptide expressing nucleotide sequence isolated from the Sargasso Sea
gttgttatcagcggcgatggatactgtgacagaagcgtcgttggcgatcgcgatggcccaagagggtggtcttggtattttgcacaaaaacatgacaatcgaggcacaggcgcaagaggtccgtaaagtcaaaaaattcgagacggggatcatccaggatcctgtgatctgttcacctaatattacggtccgcgagctattgggcatcactcgtcatcacaatatcagtggtgttcctgtggtcgagggtgacaaccttgtcggaatcgtgacaggtcgagatattcggttcgtgccggatctcgatgtgcaggttcgcgaggtcatgactccaaaagagcgtttggttactgtgactgaaggtgctgggcatcaagaaattcagggtaagcttcacaaacaccgtatcgagaaggtactgatggtggatgatgacttccgattgaggggtctagtcaccgtcaaagatatcatgaaggccgaaagtcacccggatgccgcaaaggatgcagctaagcgcctgttggccgcagcggccattggtacggggccggagggcgaagaccgggttcgagcgcttgtggaggcaggagtagatgttctggtggtcgatacagcgcacggccactctcaaggtgtattggatcgtgttgcgtggataaagcaaaacttcccgcgagtagaagtaattggcggaaatattgcaactggtgaggccgcaaaagcgcttgtcgaagttggcgccgatgctgtgaaagttggtattgggccgggatcgatctgtacaactcgcatcgtggccggtgtcggtgtgcctcaggtctcggcaatcgccaacgttgcatcagcactaataggctcaggagtccctttgattgctgacggaggaatccgatattcaggtgatattgctaaagcgatttcggctggagcatccacagtgatggtcggttcactactagccggag

SEQ ID NO: 204877 - DNA, 883 bp, Unknown
  Bacterial polypeptide expressing nucleotide sequence isolated from the Sargasso Sea
tacattcgatgatgttaccttaactccgaactactcggagattcttccgtcagaagttgacacaaaaatacaattatcaagaaatattactttaaaaatacccttgttatcttcggctatggatacagttacagagtcaaaaatggcaatatcaattgctaaagcaggaggaattggtgttatacacagaaatttaaatataaaaaaacaaattcaggaaattaaaaaagtaaaatcaaaaaatttgttagtaggggcagccgttggtgctggtgttgatgaaattgcaagagcagaagcaattttaaaagagggagtagatttaattgtagtagatacagcacatggccacacaaaaaaggttgctgaaataattaaaaaaataaaaagaaaaaaaggcaagttaacatctatttgtgccggtaatattgcaactccagaggccgcaaagtttttgttaaagctaggtgtagatattataaaagtaggaatagggcccggctctatatgtaccactagattagtagctggaattggagttcctcagttaagcgcaattataaatgtaaaaagtggagtaaaaaacaaaaatgttaaaattatttcagatggaggaattaaattttcaggagatatagcaaaggcgctttcagctggagcagatgcagttatgataggctcattatttgcaggtacagtcgagtcccctggaaaattaataaagaaaaaaggaaaattatataaaaacttcagaggaatgggatccgtaggagccatgaacaaaggttcagcagatagatattttcaaaaaaaacaaaaggataagtctaaatatgtgcctgaaggtgttgaaggtttagttaaatttaaagggagtgtagaa

SEQ ID NO: 204878 - DNA, 889 bp, Unknown
  Bacterial polypeptide expressing nucleotide sequence isolated from the Sargasso Sea
ggattggttactatgaaagatattgaaaaatcagcagaacatccagatgctacaaaagataattctggaagtcttatggttggtgctgccctcggtacagagtcagatactcttaaaagagctaaagctttaagtatgaccggagtagacgtatttgttatagatagcgctcacggacattcaaaaaatgtcatagatacaattaagataataaaaaaagaatttccaaacattgatattattggcggaaatgtagcaacatcagaaggcgcaaaggagttagaaaaagctggagctgacggaattaaagtaggaatgggacctggttcaatatgcacgacaagaattatcgctggaattggtgtcccacagatcacagcaatattagatataaaacatgcaatgaaagattcagacataggtattattgctgatggaggaataagattttcaggagatatagcaaaggcaattgctgctggagctgattcagtaatgcttggaggcttatttgctggtacagaagaagcacctggaaaagttgagcttttccaaggaagaagttttaaaacgtatcgaggtatgggttctattggcgctatgacagaaagacaagatgctaatagatacatgcaagaagatttagatgctgaaaaattagtacctgagggcattgaaggaagagttccatacaaaggactcgtcataaatgttataaatcaactaattggtggactgagacaatcaatgggctatattggttgcaaaactattcaagatattcataacaaaagtgagtttgttgaaatcacaaatgcaggcatgactgaaagtcacgttcatgatgttatgattaccaaggaagcaccaaattaccaaagaagttgat

SEQ ID NO: 204879 - DNA, 814 bp, Unknown
  Bacterial polypeptide expressing nucleotide sequence isolated from the Sargasso Sea
ttaaatttaaccaaaaatattaaattaaaaacacctttcttgtcttctgcgatggacacagttactgaatactccatggctattgcaatggcaaaatcaggtggaattggaattatacatagaaatttagatataaaaaaacaaagcaaagaagttgaaaaagttaaaagaaaaaaattatttgttggagcagctattggaacaaatacagatgatttaaaaagagctaaatcgcttatagataacggagtagatttaattgtgattgatactgctcacggagacagtaaaaaagttttaaaaactttatctaaggtgaaaaaaaataaaataccaatttgtgtaggcaatattgctacagccgaagctgcaaaaagattatttaattcaggagcagatataattaaggttggtattgggccaggatccatttgtacaacccgaatggtagcagggataggagtccctcagatttctgcaataatggaagtccacaatgctttaaaaggaaaaaaaataaaaataatttctgatggaggcattaagttttcaggagatatagcaaaggcaatagctgccggctccgatgccataatgatggggtctatatttgccgggactcaagaaagtccaggaaaaaaatttaagataaaaaataaattttataaacaatacagaggaatgggatctattggagcaatgtcagcaggatcttctaatagatattttcaaaaaaattacaaagataagtcaaaatttgtgccagaaggagttgaaggaagagttgagtataaaggaaatgtttctaaaatta

SEQ ID NO: 204880 - DNA, 919 bp, Unknown
  Bacterial polypeptide expressing nucleotide sequence isolated from the Sargasso Sea
aaattagtaggcattgtaaccaatagagatcttagatttgtagatgatctagatttaaaagtatccgaaattatgactccacaagatagattgataacggtgagagaagactttactaaagatgaggtaattagcgccttaagaacaaataggatagagaaaatactcattagtaataataaacaagaattaaagggtatggttacattcaaggatattcaaaaatcgacaacttaccctaatgcttctaaagatgaaactggaagtctgagagtgggagctgctatcggtacagggcaagattcaatagaaagagcagaagcattaatagagcagaaaatagatgttattgttattgatacagctcatggacattcaaaacttgttattaaaatgttaaaacatttaaaaaagtcatatccaacacaagaattaattgcaggcaatattgctacggaagaggctgctaaagatttgatcacttcaggagcagatgcgattaaaattggtattggacctggctcaatttgtactacaagaatagtagcaggagttggtgttcctcaacttacagcaatcatgaatatttctaagattgctaagaaaaataatatccctctgatagcagacggtggaatacgatattcgggtgatattgcaaaagcattagctgctggcgctgattctgttatgcttggtggtttgttggcaggaacagatgagtcacctggagaggttgaattattcgaaggtagaacatataaggcatatagaggaatggggtcaataggtgcaatgcaacaaggttccaaagacaggtattttcaagatggtgtacaaaaatcatctaaattaatacctgaaggtatagaaggcagagttgcttacaaagggaccatgaaaacaatactacatcaat

SEQ ID NO: 204881 - DNA, 539 bp, Unknown
  Bacterial polypeptide expressing nucleotide sequence isolated from the Sargasso Sea
agtgacgggagtcggagtcccccagttcaccgcagtgatgagtgccgtggaggaatgtacgcagagagatgtccccgtaatcgcggatgggggaataaagtacagcggggacatagccaaggcgatcgcatcgggagccgactgcgtgatggtcggatcgctcctagccggaacggacgagtccccgggggagacaatactctaccaaggcagggcctacaagcagtacagggggatgggttcgctgggtgccatgagcaagggctcctcggacaggtacttccagtcctcgcagggggacacgaggaagtacgtaccagagggaatcgaggggagggtcccatcaaggggcccggtcgaccaggttctctaccaactgatgggtggcctgaggagctcgatggggtacacaggaaattcaacaatcaaggagatgaagagcgagtgcaagttcgttcgaatcaccaatgcaggactctccgagagtcatgtccacgatgtggagatcaccagagaggctcccaactacaggaggtaga

SEQ ID NO: 204882 - DNA, 667 bp, Unknown
  Bacterial polypeptide expressing nucleotide sequence isolated from the Sargasso Sea
gccatggacactgtaacagagtccagaatggcgattgcaatggctcaaaacggaggcattggtgtaatacacagaaatatggaaattaaacagcagattaatgagattaaaaaagttaaaaaacataatttaaatgtagcagcagccataggaacttcaaaaaaagaattgactagagcaaaaagcttaatagatagtggaacaagtatgttagtcatagatacagcacatggacacagcaaaaatgtaatagatatactaaataaaataaaaaaattttctaagaacattactatctgtgttggcaatatagcaactagtgaagctgcaaaaattttatacgactctggagcagatatactgaaagttggtatcggacctggatcaatatgtacaacgcgaatggtagctggaattggtgttcctcaaattactgcaattttaaatgtaaaaaaagcaatgagaaaaaaaaatattaagatcatttctgatggaggtattaaattttctggagatataattaaagcaatagcagcaggtgctgatgcaataatgatgggatctatttttgctggaactgaagaaagccctggcaaaaaatttaaattgaaaaataaattttataaactttatagaggcatgggttcaatcggagcaatgtcgtctg

SEQ ID NO: 204883 - DNA, 948 bp, Unknown
  Bacterial polypeptide expressing nucleotide sequence isolated from the Sargasso Sea
gcaattgctaaagcaggaggtgtaggggtaattcatagaaacctagacataaaaaaacaaattgctgaaattaaaaaagttaaaaaacaaaatttatttgttggtgcagctgttggtgcaggaatgaatgaattttctagggctcaagccataataaaagaaaaagtagatttaattgttgtcgatacggcgcatggacacacaaaaaaagttgaagaaatagtaaaaaaaataaaaaagcaaaaaagtaaaaatacacttttgtgtgctggaaatatagcaacagcagatgctgcaaattttttagcaaaattaggtgtagacataataaaagtaggcattgggcctggttctatatgcacgacgagattggttgcgggtattggggttcctcaattaagtgcaattttggatgttaaaaaaggtttaaaatatagaaatgtaaaaataatagctgatggaggaataaaattttcgggagatatagcaaaagccttatctgcaggagctgatgctgtaatgataggttcgctctttgcaggaacagatgagtcccctggaaaaatagtgaaaaaaaatggaaaactttttaaaaattttagaggaatgggatcaataggagcaatgaataaaggatcagcagatagatattttcaaaaaaaacaaaaagataaatctaaatatgttccagagggagtagagggatatgttaaatataaagggccagttaaaaaaattatttttaaattaataggcggtctaaaatcgtctatgggatatcttggatcgaaaaaagtaataaatcttagaaataaaccaaggtttgttaaaattacgaaggcgggattttatgaaagtatggtgcataatatagatgaagttaaaaagatgaaaaatataaaaactttaattttatttttaataactggtatttttttgacaacaaat

SEQ ID NO: 204884 - DNA, 933 bp, Unknown
  Bacterial polypeptide expressing nucleotide sequence isolated from the Sargasso Sea
agattagctattactatgccccaactaggtggaataggggttttacataaaaacttttcaattaaagagcaagcgtcagaagtaaaaaaagtaaaaaaatttgaagcaggaatggtagtaaatccagttacaataaagcctgatcaatcccttggagatgctttcaaactaatggaaaaaaacaaaataagtggaataccagtcgttgaaggtcttaaaaataaattagtcggtattcttacaaaccgagacgttagatttgctaatgatttaaatcaaacagtttctgcgcttatgactaaaaatgtaataactgttaaagaaagtgttagcaaaaaagaggctagaaaactcttacatcaacatcgtattgaaaaattagtggttgttgatgaagatggtttctgtgttggattaataactgttaaagatatggaaaaatctcaaaaccaccctgatgcatgtaaagatgaacaaggacgattaagagttgcggctgctactggtgttgggaaagacggactttcaagggcggaagctttaattgatgcagaagttgatgttttgatagttgataccgctcatggtcatagtaaaatggttttagattctgtctcaaaaatttcaaagatgtctaaacaagtagctctaattggtggaaacgttgcaactggagatgcaacaaaagctcttatagacgctggagcgaatggcgtaaaggtaggaattggacctggttcaatatgtactacaagaatggttgctggagttggcgttcctcaattatctgcaattatggattgtgtagaagttgcaaacaaattctcagttccaattattgccgatggtggtattaaatattctggagatatagcgaaggccatagcaggaggatctagtgccgttatggtaggctctcttcttgcaggaact

SEQ ID NO: 204885 - DNA, 901 bp, Unknown
  Bacterial polypeptide expressing nucleotide sequence isolated from the Sargasso Sea
gttattcaccgtaatatgccaattgataaacaagcaagtgaagtcaaaaaagttcatagttttaaagttaacgttaaaaaatttcaaaatgctgtaattaattctaacaaacaaattacagtaggcgctgcaatcggtgttgaaaataatgcttacttacgactattagaattattaaaagttggtgttgatatagtctttattgatgttgctcatgcacatacaaaaataactttacagtttattgaaaaagcaaaaaaagttttaaagaaaacccctcttatagttggaaacattgctacaaaaaaagctgcatcagatttaattagtgctggtgttgacgctatcaaagtaggtattggtccaggatcaatttgtactacaagggttgtaactggtgttggtattcctcaactctcagctgtgatggatacatttcaagttgccaaaaaatttaaaattccagtaattgcagatggaggaataaaaacatcaggtgatattgcaaaagctatagcaggtggcgcaagtgcttgcatgataggctctttatttgccggcactgaagagtcgccaggaaaattattaacgattaaaggtaaaaaatttaaatcatatagaggtatgggttctgtaggagcaatgcaaaaagggtcttttgatcgatactcccaagaagaaacaaagaatgcaaaaaaattagtggcagaaggtgtggaaggtatggttccatataaaggtaaaatagaagatgtagcctatcaacttgttggtggtttaaaatcttctatggggtacactggtcataaaacgattaagaaaatgcagggcaactgtaaatttgtctttatttcaaaagcaggagcccgtgaaagtaatgtccacgatgtcattatgtaat

SEQ ID NO: 204886 - DNA, 792 bp, Unknown
  Bacterial polypeptide expressing nucleotide sequence isolated from the Sargasso Sea
caacaacagttggcgacgagggatatttaaggtctgattatttaatagatgctggcattgatttgctggttattgatacagcccatgggcattctgatgcagttattgaggctgtaggtagagtgaaaaaacgttcaaataacgttcaagtagtggcgggaaatgttgcaactgcagatgcttgtaaggctctaattgatgcgggagctgatgccataaaagttggaattggaccaggatcaatttgcacaacacgaatggttgcaggtgttggagttccacaattgactgcaatattggattgtgtggaggcttctggtcagacgcccgtcattgctgacggaggtataaaattctcaggcgattttgccaaagcaattgccgcaggggcttcttgtgcgatggttggtagcatgattgcaggtacagatgagagccccggtgaggtaattttatatcagggaagatctttcaaagcttacagaggaatgggttcacttggagcgatggctcgaggttctgcagatcgatattttcaaaaggatgcagctagcgataaactcgtaccagaaggaattgagggtcaagttccatataaaggtccagctaatgctgtaattcaccaaatggtaggtggattaagagcctccatgggctacacaggatgccagaccataacagagatgagaaataattgtcagtttgttaaaataacaggagcagggctgaaagaaagtcatgtgcacgatgtccaaattacaagagaaagcccaaattatcgtgtcatttgat

SEQ ID NO: 204887 - DNA, 766 bp, Unknown
  Bacterial polypeptide expressing nucleotide sequence isolated from the Sargasso Sea
gatattgaaaaagcccggaaatacccgaatgccaacaaggacgaggtaggccggttgctggtgggtgcggcattaggagtttcggaagatctgcttcagagggcggaagccctgattcaggcggaagtggacctggtcgtgcttgattcagctcatggtcattctcagggagtactcgagggcatccgtaagttgcgaagtcatttcccggaactgcaaatcgtcggtggaaatattgccacagccgagggagcagatgccctgattgatgcaggagtagacgcagtcaaggtgggcatcggtccgggatcgatttgcaccacacgaatggtggcaggcattggaatgcctcaaatatccgccattgacagcgttgccgaagccctccgtaaaactgatgttccgatcattgctgatggaggaatcaaatattccggggatatcgtcaaagccctcgccgccggtgcacaaagcgtgatgatcggcagtctctttgcaggaactgccgaaacccccggacaggtcattctctaccagggtcgccgttacaaactataccgcgggatggggtccctcggtgccatgaaggaaggaagcaaagaccgttacttccaaacgggagttcaggaagttcagaaactggttcctgaaggaatcgaaggacgggttccctacaaggggcctttagcagaatccatttttcagttcactggaggtttacgggccggcatgggttacaccggctgcacaagcatcgaagagcttc

SEQ ID NO: 204888 - DNA, 712 bp, Unknown
  Bacterial polypeptide expressing nucleotide sequence isolated from the Sargasso Sea
catagcaaattagtattagacatggtttcaaaaatcaaaaacagagtaaatttagaaattattgttggcaatatagctacaacagaagcagcgatatctttaatagacagtggtgcaagtgcagtaaaagtaggtattggaccaggatcaatttgtactactagaatagtagcaggaattggaatacctcaattaactgctatattagatgtttgtagtattgcaaagaaaaaaaatattccagtaattgctgatggtggaattaaattttcaggtgatctagcgaaagctatagccgcaggagcaagtgttgctatggtgggctccttatttgcaggaactgatgaaaccccaggtgaagtttttcttaaacaagggcttccttataaatattatagaggaatgggaagtacaccagcaatggcatctggttcagctgatagatactttcaatctgatattaggaataatttgaaattagtccccgaaggaatagaaggaagtgtaacttataaaggacctgttagaaacgtcataaatcaattgattggtggtttaaaagcatctatgggatatactggaaataaaaatataaaagaaatgcaagaaaattgtgaatttataaaaattacaaatgctggcttacgtgaaagccatgttcatgacgtcaatataattcgtcaaccttcaaattataatcaagataaataac

SEQ ID NO: 204889 - DNA, 843 bp, Unknown
  Bacterial polypeptide expressing nucleotide sequence isolated from the Sargasso Sea
agttcttgatgataataataatttatctggattggtgactatgaaagatattgagaaatcagcacagcatccaaatgctacgaaggattcctcaggaaggcttcaagttggagcagctattggtactggagaagatacccttcatagagcagaggctttagttgaagctggtgttgatgtgtttgttattgatagcgcacatggccattctctaaatgttatcaataccattaaagcaataaaaaataaatttaaagatattgatattattggtggaaatattgcaactgcagaagctgcaatagaattagaaaaagcaggtgtagatgctgttaaagtaggaatggggccaggttctatatgcacaacaagaataatagctggaataggggtgccccaaatcagtgcaattcttgaaattaaaaatgctcttattggaaaagatataaatattattgctgatggaggtattagattctcaggagatatagctaaagctattgcagccggtgctgattcagtaatgctaggcagtttgtttgcaggaactgaagaagctccaggaaaggtagagctttttcaaggtagaagttttaaaacatacagaggaatgggatctattggagctatgacagaaagagatgatgcaaatagatatttacaggaagatattgagactgataaattagtgcctgagggaatagaaggaagagttccttataaaggcctggtgattaatgttattaatcaattggttggtggagtaaggcaaagtatgggctacataggctgtaaaaatattaaagatatgcaaattaatagtcaatttgtagagattacaaa

SEQ ID NO: 204890 - DNA, 697 bp, Unknown
  Bacterial polypeptide expressing nucleotide sequence isolated from the Sargasso Sea
ggagttgatagagatttactaaaaaggtctagagagttaattagtgcaggagttgatgcacttgttattgatactgcgcatgctcattctaaaagtgtagcagaagcactcaaaaaggttaaaaataattttaacaatattgatgtagtagttggaaatatagcgacaaaagaagcagctaactttttaatagatattggagcagatggattaaaaattgggataggtccaggttctatatgtacaactaggattgttgcaggagttggttatcctcagttttctgcagttttagaagtagcaaagtcaataaaaaataaaaatatacctattattgctgatggagggattagatatactggagatatatcaaaagcaatagctgctggtgctgattctgtcatgttgggctctcttctagccggtactgaggaatctcctggtgaaactgtaatctttaatggtcgaaaatttaaaacctacagaggaatgggttctgtagaggctatgaaggaaggtagtaaatcaagatattttcaaggttctgaaaatgactctaaaaaattagttcctgaagggattgtaggtcgagtcccttataaaggagagattcatgagagtattcatcaatttgttggaggattaaaaaaagggatgggttattgtggagccaagagtatcaatgaattaaagtcta

SEQ ID NO: 204891 - DNA, 857 bp, Unknown
  Bacterial polypeptide expressing nucleotide sequence isolated from the Sargasso Sea
gcgccctcatgaaattcgcgaagccctaacattcgatgacgtgctcctcgagccttcacgctcggccgtattgcctgccgaaaccaatgttgcgacgaggctgacaaggtctatttccttgaacattccgcttgtttcagcggcgatggacacggtgaccgaacacaggctcgccatcgccatggcccaggccggcggcatcggggtcatccacaagaatatgagcatcgaatcgcaggccgccgaaatcagccgcgtgaagaaatatgaatccggcatggtggtgaacccgctcaccatcacgcccgagcgaacgcttggcgaggcgctggaactgatgaaggtgcaccagatcagtggcatccccgtcgtcgatggcgagggcaagccgccgcaccgtctcgtcggcatcctgaccaaccgcgatgtccgtttcgccagcgacctgaaccagaaggtctgggacctgatgacccgtgaggtaatcaccatcggcgaaagcgcgacgcaggaagacgccaagcgactacttcatgagcatcgcatcgagaaactcgtcgtcgtcgacggcaagcagagctgcatcgggcttatcacggtcaaggatatcgaaaaagccaagaaccatccgttggcggcaaaggacagtgcaggccgcctgctggtcgccgcggcgactggggccggcccggaggggcatgagcgtgccgaggcgctgatcgaggccggtgccgacgtcgtcgtcgtggatacagcgcacggccattctaagggtgttctcggtgcggtcggcgcgatccgcaaaatggcgaatgaagtgcaggtgatcggcggcaatgtcgccactgccgacgggg

SEQ ID NO: 204892 - DNA, 916 bp, Unknown
  Bacterial polypeptide expressing nucleotide sequence isolated from the Sargasso Sea
cctgctgaggtagatttgtctacaaggctgaccaccgggatatctctcaacgcaccgatagtatcagctgccatggacacagtcacagaagccgagatggcgatagccatggcccagagcggaggcataggcgtgatacacaggaacatgccgatagaggagcaggctgtggaggttgacaaggtcaagagattcgagtccgggcttgtcctggagcctgtcactgtagatcctaagatgaccgtgggagagctgcgctctctgaaggaccagtacggtttctccggtttcccagttatcaacggggatgggagtatcgtgggaatggtgaccaacagggacatcaggttcgtcgaggatcccaataccgaggtctcggaggtgatgactaccgacctgatcacggtcccagagcacgtcgacatggaggaagccaagaggctgctccaccaacacaggatagagaagctggttgtggtgaacgaggggggaggtttctccggcctaatcaccgtcagagacatcaatagatccagggacaacccattgtcctgcaaggacgacatgggaaggctccgcgtggttgcggccacggggaccggcgagaaggggatactgagggcattggcaatgttcgaggccggggccgacgcagtcgctgttgacaccgcgcacggtcactctcacggggttctggatactgttcgtactatcagggaacaggccggtgccgatgcccagattatcgcgggtaacgtagggacgccagaagcagctggtgctctgatagacagtggggccaacgcagtgaaagtaggaatcgggccgggctcgatatgcactaccaggatagtgacgggagtaggagtcccccagttcaccgcagtgatgagtgccgtggaggtatgtgcgcaga

SEQ ID NO: 204893 - DNA, 598 bp, Unknown
  Bacterial polypeptide expressing nucleotide sequence isolated from the Sargasso Sea
gggcgcagatgcagttaaagttggaatgggacctggttcaatatgtacaacaagaattattgcaggaattggagtaccacaaataagcgcaattttagatatcaaaaatgctcttaagaaaacagatataaatattattgcagatggcggtattagattttcaggtgatatagctaaagcaatctcagctggagcagattcagttatgcttggaagcctatttgctggcacagaagaagccccaggaaaggttgaactttttcaaggaagaagttttaagacttatcgaggtatgggttcgataggggcaatgacagaaagagatgatgctaatagatacatgcaagaagatgttgatcagagcaaacttgttccagaaggtattgagggaagggtcccttataaaggattagtaattaatgttataaaccaattggaagggggattaagacaaagcatgggatatgtgggatgtaaatcagttaaagaaatgcaaaatgacagccaatttgtagaaattacaaatgcaggtatgactgaaagccatgttcatgatgtcatgattacaaaagaggctccgaactaccaaagaagttaa

SEQ ID NO: 204894 - DNA, 751 bp, Unknown
  Bacterial polypeptide expressing nucleotide sequence isolated from the Sargasso Sea
tatgggtagtataaaagattcgcttacttttgatgatgtaagtctagttcctcaagagtcttccgtagtgcctagcgaaacaataacaaaaatcactttacacaaaagattaaatctaggaattccgttgatttcctctgctatggatactgtaacagaatccaagatggcaatatctattgcgaagatgggaggaatcggggttattcataggaatttatcaacagactcacaaattaatgaaattaaaaaagtaaaacgggcaaaatgtttagttggtgctgctataggtgtaaataataatgatgtagatagggctaaaaaactcttagaagcagatattgatttgatagtaatagatacagctcatggacatacccaaaaagtttcaaaaatgattaataaagttaaaaaaataataaaaaaaataccactttgcgcaggaaacattgcaaccggcaaggctgctaaatttttagaaaattgtggagtggatatagtgaaagttggcattggaccgggatctatatgcacaacaagactggttgctggagttggtgtgccgcagttaagcgcagtgttagaagttaaaaaaactttgggtaaaagtaagactaaaattatttcagatggtgggattaaattttctggcgatttagcaaaagctatagccgctggtgccgacgcagtaatgattggatcacttttctcaggaactacagaaagtccaggaaaaattctcaaacgaaaa

SEQ ID NO: 204895 - DNA, 646 bp, Unknown
  Bacterial polypeptide expressing nucleotide sequence isolated from the Sargasso Sea
atgggtcctataaaagaatcactcacattcgatgatgtaatgcttatgccaagatactcagatgtattaccatctgaagtaagcactacgaccaaacttcaaaaaaatttaaaacttaaaattccattaatgtcatctgctatggatactgtaacggaatcaaaaatggctatagaaataggcaagcttggaggaattggaataattcacagaaacctatcaataaaaaaacaaattcaagaaattaaaaaagttaaatcaaaaaaaatattagtaggcgcagccgtaggtgcaagtgaacaagagatgattagagctaaaagtattttaaaagaaaatcttgatattattgtagttgatacagctcatggacatagtaaaaaagtcgcagaaatagttaaaatgataaaaaagattaaacctaagaaaacatctctatgtgctggtaatattgcatctcctgaagctgcaatttttttatctaagattggagtagatataattaaagttggaattggtcctggatctatttgtactacaagattagttgctggtatcggtgtacctcaattgagtgcaataatagaaataaaaaaagctttaaaaaataaaaaaatttcaattattgcagatggtggaattaaat

SEQ ID NO: 204896 - DNA, 919 bp, Unknown
  Bacterial polypeptide expressing nucleotide sequence isolated from the Sargasso Sea
agttttactttctgatgcatttaaaattaaagaaaaatacaatatatctggcattccagttgttgaaactggaagtaaaaaactcgtaggtattattactaacagagatataagattcgcaaaaaatatgaatcaaaaagttgaatcattgatgactaaggagaacttaattaccgttcagcagaatatatcaatgacaaatgccaagaaactactccatcaacatagaattgaaaagctattagttgtagataaaaattacaaatgtattggattaattacagttaaagatatagaaaaggctcagaaatttcctaacgcttcaaaagataaaatgggtagacttcttgttggagcggcagttggtgttggaaatgaacaagggttagatagagctcaatacttagttaaagcgggtgttgatgttattgtaattgatacagcccatggtcatacaaaaaatgtaattgatactttgagtaaaattaaaaaaacctaccctcatcttccagtaattgttggaaatgtagctacatccgaagcagctaaggatttaataaaagggggagcagattcaattaaagttggtataggtcccggttctatatgtactaccagaataatagctggtattggtgttcctcaacttcacgcaatatctgaaacctctaaagttgcaaaaaaatataaaataccaattatctctgatgggggaataaaattttcaggagatatcgcaaaagccattgctttaggagcagacgttgtaatgatagggtccttgtttgcaggaactgatgaatcgccaggtgaaatatttctttctaatggtagaacgtataaatcgtatagaggtatgggatcattgtctgcaatgggaagagggtcagctgacagatattttcaggaggaagtataa

SEQ ID NO: 204897 - DNA, 937 bp, Unknown
  Bacterial polypeptide expressing nucleotide sequence isolated from the Sargasso Sea
ctgatttcttctgcaatggatactgtaaccgagtcaaagatggctatagcaattggaaaactaggtggaataggaataattcatagaaatctttcaatagaaaaacaggtgcaggaagtaaaaaaagttaaaagacaaaaactttctgttggtgccgcgataggtgttaacaaaaatgatttggatagagcaaaaaaactaagtaaagctaatgttgatcttttagtaatagataccgctcatggtcatacaaataaagttttaaaaattatcaaaaaagtaaaaaaaataattaaaaagacacctctttgtgcaggaaatatcgcaaccggcaaagctgcaaaattccttgctgattcaggagttgatattgttaaggttggaattggaccaggatcaatatgtactacaagacttgtagctggtgtcggagttcctcaactaagtgcagtattagaggttaaaaatgctttaagaaacagaaaaacaaaaataatttcggatggaggcatcaagttttcaggtgatcttgcaaaagccataggagccggtgcagatgctgttatgataggttcccttttttcaggcacattagaaagtcctggtaaaatatttaaagttaagggaaaactttacaaaagttttagaggaatgggttccgcaggagctatggcggttggatctgcagatagatattatcaaaaaaaatttaaagatctttcaaaatttgttcctgaaggagttgaaggaattgtgaaatttaagggttcagtaaataaaataatatataatttagttggaggattgcgatcttcaatgggttatcttggtgcaaaaacggtgaaagatttacaaaagaaaggtgagttcgtgaaaattaccaaagcaggtttttatgaaagtatggttcacaatgttgatcaagtagttaagtgaa

SEQ ID NO: 204898 - DNA, 748 bp, Unknown
  Bacterial polypeptide expressing nucleotide sequence isolated from the Sargasso Sea
aaaagagatttaaaaagtaaatttgatttaatagttgtagacactgcgcatggtcatacacaaaaagtaggagagataattaaaaaaattaagaaaattaaaccaaaaacagtctctctttgtgcaggaaacgtagctacgcaggaggcagcaatatttttaattaaactaggagtagatattgtaaaagttggtattggacctggttcaatttgcacaactagattggttgctggcattggagttccgcaacttagtgcaatcttaaacgtgagaaacggtattaaaaataaaaaagttagtattattgctgatggtggaataaaattttctggagatatcgcaaaagctcttgcagcaggagcagatgctgtgatgataggctcattatttgcggggacagatgaggcccctggaaaaataattaaaagaggcggaaaattatttaaaagttttagaggcatgggatctattggcgctatgaatagaggctctgctgacagatattaccaatctaaacaaaaagataaatccaaatatgttgcagaaggggttgaaggttatgtaaaatataaaggaagagttgataaaatattttaccagttaataggtggattaaagtcctcaatgggatatcttggtgcaaaaaaaataaatattttaaaacaaaatccaaaatttgttaagataacaaaagcaggattttacgaaagtatggtacataatattgatgaaatcaaaaaataaa

SEQ ID NO: 204899 - DNA, 875 bp, Unknown
  Bacterial polypeptide expressing nucleotide sequence isolated from the Sargasso Sea
cgagagcggtgttgtaagagatcctacaactattagatcaaccaaaactattgatgagttaatgaagttaactaacgaacttagcatttctggaatgcctgtcgttgatgatggaaagttaatgggaatcgttactagaagagatttcagatacgctgaggatttatctgctttggtttcttcgataatgactccacgagaaaaactaataactgtcaaagaaggttttgatcaggatgatgtaaaaaaattaatgtataacaatcgaattgaaaaaattcttgttattaacgaagaagactcattaactggtctcgtaacaatgaaggatattgataaatctgcagaacatccgttcgcaacaaaagatccaagagggcaattgcaagttggtgctgcccttgggactggtggcgatactttagagagggcgtcagcattatcagatgcaggagtcgatttatttgtcattgatagtgctcatggccattcgaaaaatgtattagaaacaatcaagaacataaaaaacaaattccctgaaatagacgttatgggtggaaatgtagcaactccagaaggagctgaagcgctcatagatgctggagtggattcggttaaaattgggatgggtccaggatcaatctgtacaactagaattattgcaggcattggagtccctcaaattaccgctattctttccataaaggaaaagcttaagtctaataatatccccttaattgcagatggaggcatcagattttctggagatatagctaaagcaattgcagccggggcaaatgctgttatgttaggaggaatattcgctggaactgaagaggcgccaggtgagttggagctttttcagggtcgaagtt

SEQ ID NO: 204900 - DNA, 576 bp, Unknown
  Bacterial polypeptide expressing nucleotide sequence isolated from the Sargasso Sea
tatgtcaaataacgttgaaaagaaattaacatttgatgatgttttattagttcctagaagatcctctgttttaccgaaagaagtggattgcgctactaatcttacaagaaatattgctttaaatattcctataatgagcgcagctatggatacagtcactgaatctgatatggcaattgccttggcaagacaaggaggtatcggcgttattcacaaaaatttaagtattgaagatcaagctttaatggtagacaaggtgaaaagatatgaaagtggtatgattagaaatcctattactttagatgaagaaaagactgtacgagatgcaaaacaactaatggaacaatattctattggaggtttacctgttttatcaaaaggtaaattagtaggaattattacaaaaagagatattcgttttgaatcagatcttaatactcttgttaaagatagaatgacttcaaaaaatttaattacagttgactctgatacaagcaacgaagacgctaaaaagattcttcaaaaacacagaattgaaagattgttagttgttgataagcaaaataatcttgatgg

SEQ ID NO: 204901 - DNA, 763 bp, Unknown
  Bacterial polypeptide expressing nucleotide sequence isolated from the Sargasso Sea
tcttagattgctgcatcatcacaggatagaaaaagtactggtggtcgatgatgattttcagttgaaaggcatgattactgccaaagatttccaaaaagcaacagatttcccattagcgtccaaggacagtaacggagcattattggttggcgcagcagttggtgttggggagagcacagacgaacgcgtgtctgcactgcaagctgcaggtgttgatgtgatagtggttgatacggcgcacgctcataccgaaagcgcgataggccaattaagaagcattaagtctaattactcagacttagaagttattgctggaaatattgctactggcgaagccgcaattgcattagctgaagcaggtgcagatgccgttaaagtgggtattgggcccggatcaatatgtactacgagagtggttgctggagctggtatgcctcaggtcaccgcaattacagaagttacagaggccttaaagaaatcagatgtttgtgttatctctgatggaggtatccgttattcaggggatattgccaaagcgattgcagcaggtgctaatagtattatgttgggcagcttgttcgctggaactgaagaatctccaggtgagattgaactttaccaaggcagaagttttaaatcctatcgaggaatgggttctataggagcaatggcaagtcagcacggttccaaggatagatatttccagagcgatgtagaagaatctgaaaaacttgtcccagaaggtattgagggcagagttccc

SEQ ID NO: 204902 - DNA, 835 bp, Unknown
  Bacterial polypeptide expressing nucleotide sequence isolated from the Sargasso Sea
agggacatcagattcgtcgaagacgagagcacggagatatcggaggtcatgaccactgatctcgtcactgtcccagagcatgttgacctcgaggacgctaagaggctgcttcatcagcacagaatagagaagctggtagtggtaaacccagacggagggttctcgggcctgataactgtcagggatatcaaccgctcaaaggataacccactatcgtgcaaggacgaaagagggaggctgagggtagttgccgccaccggaactggggacaagggcgtccttagggcgctggcaatgatcgaggctggggctgatgcggttgccgtagacactgcacacggccattcacacggggtcttagagacagttcgcttaatcagggaccaagcgggtgagaaggcacagataatcgcaggcaacgtagggacatcggaggcagcgtcggccctgatacacagcggagccaacgccatcaaagtcgggatcgggccaggctcaatctgcactacaaggatagtgacaggggtgggagtacctcagtttacggccgtgatgagtgcagtggaggcatgctctaagatgggcgtgcctgttattgccgatggtggtataaagtacagcggagatattgctaaggcaatcgcatctggtgctgactgtgtgatggtcggctctctgctcgcaggcactgacgagtctcccggagagacaatcctctaccaaggaaggtcatacaagcagtatcgtggaatgggctcgataggagccatgaccaagggctcttcggacaggtacttccagtcctctcaaggtgatacgaggaagtatgtcccag

SEQ ID NO: 204903 - DNA, 605 bp, Unknown
  Bacterial polypeptide expressing nucleotide sequence isolated from the Sargasso Sea
agaagctgcaaaatttttggttggattaggtgttgatgttataaaagtcggaataggcccaggttctatttgtacaacaagacttgtagcaggaataggtgttccacaattaagtgcgatattaaatgttaagaagggaattgggaaaagtaaaacaagattaattgctgacggtggaattaaattttctggggatattgctaaagcattagcagctggcgcagatgcagttatgattggttcattatttgcaggtacagatgaagcacctggaaaaaaaataaagaaaaatggtaaattatataaatatttcaggggtatgggatcaataggcgcaatgaacaaagggtcagcagacagatattttcaaacgaaaaaaaaggattcatcaaaatacgtagcagaaggtgtagagggatatatcaaatacaaaggtaaagttgataaaataatctataacttagttggcggtttaaaatcttcaatgggctacatgggtgccaagaaagtaattgatttaagaaaaaaaccaaaatttataaaaattactaaagcaggtttttatgaaagtatggtacataatatagatgttgttaaaaaataac

SEQ ID NO: 204904 - DNA, 694 bp, Unknown
  Bacterial polypeptide expressing nucleotide sequence isolated from the Sargasso Sea
gttaaaaattttaaaacaaataaagaaattttctaataaaattacgatttgtgttggaaatatcgccactggtgaagcagcaaaacttctttacaattcaggagctgatattttaaaagttggaatagggccaggatctatttgcacaactagaatggtggctggaataggagtacctcaaatcactgctttacttaatgtaaaaaaggcaataaataaaaaaaaagttaaaattatttctgatggtggaataaaattttcaggagatattataaaagcaatagctgcaggagcagacgctataatgatgggatcaatatttgctggcacagaggaaagtcctggtaaaaaatttaaaattaaaaaaaaattatataagctttacagaggcatgggatctataggagcaatgtcctctggatcctctgaaaggtactttcaaaaaagctataaggataaaaccaagtttgttcctgaaggtgttgaaagcagagtattgtttaaaggcccagtatctaaaataatttatcaattacaaggcggtctcagatcgtctatgggttatataggagctaaaaagattgatgaagtgggtaaaagatctaaatttattaagattaccaaagcaggattctatgaaagcatggttcacagcgtagagacaattaaaagcacaacaaattataagttatga

SEQ ID NO: 204905 - DNA, 903 bp, Unknown
  Bacterial polypeptide expressing nucleotide sequence isolated from the Sargasso Sea
atggagcaccataaaattagtggtatccctgtagttagaagacgcaccgataaattggcggggataataacaaacagagacgtgcgatttgcaacagagttagctcagccagtcagcgaactaatgactaaacgtgtggtcactgttcaggaaacagtcacaagcgatgaagcccgtcagttattgcacaggcaccgaattgaaaaattagtcgttattaataaggatcaaaaatgtgttggtttgataactgttaaagatatcgaaaaagcacaaaactttccacacgcctccaaagatgagcaagggcggttaagaacagcagccgcaacagggattggagatgaaggccttgagcgggctgccgctttattcgactctgaggtagacattctagtaattgatacagcgcatgggcattcacaaaatgtattagatagcatcaagcaaatccgtaaattgtcgaactatacacaaattatagcaggcaatgtcgcaacagcggagggggcaaaagcgttacttgatgcaggtactgacgcgattaaagtcgggattgggcctggttctatttgtacaacgaggatggtagcgggggtcggggtgccgcaattaacagcagtgatggatgccgtcgaggtctgtaagaaggcgaatataccggttatatcggatggtggcatcaagtattctggagatttagccaaagccatagccgcgggagcagattgtgccatgttagggtcacttttcgctggcacagacgaaagcccgggagaagttttccttcatcagggacgctcctataaatcctaccgcggtatgggttctatgggcgctatggctagaggatcggcggatcgctatttccaagaggaagtatccgaccaacagaaatttgtt

SEQ ID NO: 204906 - DNA, 732 bp, Unknown
  Bacterial polypeptide expressing nucleotide sequence isolated from the Sargasso Sea
aaaacctagatattattgtgattgatacggctcatggacacacaaaaaaagtagcagatataattaaaaaaatcaaaaaattacgtccaaaaaatacagcaatatgtgctggaaatatcgcaacaactgaggcagcaaaatttttagtaaaattaggagtagatattattaaagttggtattggcccagggtcaatttgtactacaagacttgttgctgggataggagttccacagttaagcgctatcttaaatgtaaaaaaaggaataggtaagagtaaaacgacactaatcgctgatgggggtataaaattttctggtgatatcgcaaaagctttagccgctggagctgatgctgttatgataggatctttatttgcaggaacagatcaagccccaggaaaaaaaattaaaaaaaaaggcaaattatataaatattttagaggcatgggatcaattggagcgatgaataaaggttctgcagatagatattttcaatctaaacaaaaagatacctcaaaatatgtagctgaaggagtagaggggtatattaaatatagaggtagtgttgataaaattatttacaacctaataggaggtttaaagtcatctatgggatatttgggcgcaaaaaaagttaccgaactaagaaaaaatccaaaatttgtaaaaattaccaaggcaggtttttatgaaagtatggtacataatatagatctagtaataaaataat

SEQ ID NO: 204907 - DNA, 779 bp, Unknown
  Bacterial polypeptide expressing nucleotide sequence isolated from the Sargasso Sea
tttggaaactgatatttcattgagtttaacttccaaaataaaattgagagttccttttttatcctctgcaatggacactgtaaccgagtctagaatggctattgcaatcgcagaggcaggaggtatcggaataattcatcgaaaccttaatattaaagaacagacgaaagaaattataaaagtaaagaaaaaaaaattatttgtgggtgcagcagtcggtacaaataaagatgacattgatagagctaaatcattaatagcaaatggttgtgatttgattgtaatagatacagcacatggacatagtaaaaaagttttaaagatattatcaaaattaaaaaaacttgaaaattcaattcctttctgtgtaggaaatattgcaacagcagaggctgctaaaaaattatataattctggagcagacattattaaaattgggattggtccaggttctatttgtacaactaggatggtagcaggaatcggcgtaccgcagatatctgcaattttggaagtcaagaacgctttaaagaaaaaaaaggttaaaattatttcagacggtggaataaaattttctggcgatattgcaaaagctttagcagcaggagccgatgcgattatgatgggttcaatttttgcaggaacagatgaaagcccaggtaaaaaatttaaatttaaaggtaagctttacaaacaatatagaggaatgggatcaattggagcaatgtcttcaggctctgcaaacagatattttcaaaaaaattttaaagataaatcaa

SEQ ID NO: 204908 - DNA, 451 bp, Unknown
  Bacterial polypeptide expressing nucleotide sequence isolated from the Sargasso Sea
atttgcactacaagagtcgttgcaggtgttggcgtaccacagttaacagcaataatgaacgtttataaagcagctagaaaatcaaaaataccgataattgctgatggtggcataagatattctggtgatatagccaaagctttagcagctggtgcagatacagtcatgctgggtgggcttcttgcaggaacagacgaggcgcctggtgaagtagaaatgtatgaaggaagaacttataaatcatatagaggaatgggttcaattgccgcaatgcaaaaaggttcaaaagatagatacaatcaagatagtgcttcatcatcaaaactcgtaccagaaggaattgagggaagggtaccttataaaggaaccatgaatactctccttcatcaattaattggtggtttgaaatctagtatgggatacgtttggtgtgagatttatctgaaatgaa

SEQ ID NO: 204909 - DNA, 889 bp, Unknown
  Bacterial polypeptide expressing nucleotide sequence isolated from the Sargasso Sea
attggtacctcagaaatctaaaatattgccaaatgagacagttctcaaaacaagattgacaaatagcatagaattaaatattcctattttaagtgcagcaatggatacagtaactgaagaagaaatggcaatagctatggctagagagggcggaataggtgtgattcacaagaactgtgatatagaatcacaaaaatcaatggtagataaagtaaaacgatcagaaagcggaatgatattaaagccggtgacaattagaccagaacgtagtattaatgaagccaaaaaaataatgtcagaatttagaattagtggattgccggttgtggatgatgaaaaattagttggaataataacaaatagagacattcggtttcaagttgatggtgagctagaagtttccgcgtgtatgacagcaaatggtctagttacagtgccattagatacatctctcaatgatgctgaggaacttcttcataaacacaggatagaaaagcttctggtggtagatgactctggtatgctcgctggattaattacggttaaagatataaagaaaaaacagcagtatccaaatgcgtgtaaggactcaaacggtagactaagagtatcagctgcaataggtgtgtctggtgatgcatatgaaagagcaaaagagctggtaaacgcagacgttgatattatcgttgtagatacagcacatggacactctaaaggtgtgttagatgccatttctaaattgaaagcgcaagattctagtttatcaataatagctggcaatgtagcaacagggtatggtgctaaggcacttattgatgctggagtagattgtgtaaaagttggtattggtgctggagcaagctgtactactagaatagttgctggtgtt

SEQ ID NO: 204910 - DNA, 864 bp, Unknown
  Bacterial polypeptide expressing nucleotide sequence isolated from the Sargasso Sea
tcaaaaaaataaaatcgaaaaattgccaattattgatgaaaaaaataaattggttggactgataacttttcgtgatattcaaaaaataactctaaaaccatcatcaaataaagatgagtttggaagattaagagtagctgctgcaattggtgttggtggagaaaaccttgaaagatgtaaaatgttatataaagctggtgtagatgcaatagttattgataccgcacatgctcatacaaaatcagttctaaaaattataaaggatgttaagaaaacatttcctgatttggatgttgttgcaggaaatgttgcgactgctgaagctgccaaatttttagcaaaagcgggagttgatggagtaaaggttggtattggtccaggttccatatgtactaccagaattatagctggagttggctatccacaactatcagctatatataatgtatcaaatgctttgaaaggaactgatatttctatcattgcagatggtggagttaaacatactggagatattacaaaagcaatagctgctggagctgactgtgttatgcttggttcattactggctggtacacttgaatcacctggtgagacaataatttatgagggtagaaaatttaaaacttacagaggaatgggttcagttgaagcaatggaaaaagggagcaaagaaagatattttcagtcaacgataaaagacaaaaacaaattggtacctgaaggcatagtcggtagagttccttacaaaggaagtgtggttgaaagtatgtttcaatttgtaggaggattaaaatccgggatgggatattgtggatctaaaaatattaaagaattaaaagataattcaaagtttgttcaaat

SEQ ID NO: 204911 - DNA, 799 bp, Unknown
  Bacterial polypeptide expressing nucleotide sequence isolated from the Sargasso Sea
gctgtcggtgtcggtggtgactcgggcgatcgagtggcagctctgatcgagaagggtgtggacgtggtcgtgatcgataccgcacacggtcattcgaagggtgttctcgatgcggtggcccggtgcaaggagaagtatcccagccagaatataattgccggaaacattgcgaccaaagaggccgcaagagacttgatttctgccggtgcggatgcgatcaaggtcggcatgggtcccggtacgatctgcacgacgcggatcatcgccgggatcggtgttcctcagatcacggcgatcatggattgtgtcagcgttgctcgtgagtcgggagtccccgttatcgccgatggagggatcacacagtctggcgaaatcactaaggcgattgcagcgggtgcgaacgtggtgatgatcgggtatctcttcgcgggcacggacgaggcgcccggtgagacagtgatctaccagggacgtacgttcaaggtctaccgaggtatgggatcgctcggagctatgcaacgaggttcgaaggaccgttacttccagagtgaggtggaagagcgtaagctggtgcctgaagggatagaaggccaggtgccctacaagggttcactctctgggttcatctaccaactggtgggcggcctccgttcggggatgggctactgcggtacatcaacgatcgatgctctgcggagtgatgcaaaattcgtacgggcgacaccggcagctgctcgcgagagtcacgctcacgatgtttcgatcacgaaggaagcaccgaactatcgtctcgagtaga

SEQ ID NO: 204912 - DNA, 951 bp, Unknown
  Bacterial polypeptide expressing nucleotide sequence isolated from the Sargasso Sea
agtgtcgaaaccataatgaccccaaaatccgagttggtaacggtgaaagaggattttgaattgagtgaagttaaggaacttcttcatcggcatcgtattgagaagattttggtggttaacgataattttgaattgcgtggattaattactcttaaagatattcgtaagtcggaagactatccaaacgcttctaaagatgagcttggtcgtctcagggcagctgctgcggttggtcctagtaacgatgctgaagagagggtctcagcaattgttgatgctggtgtcgatgtgcttgtggttgatacagcgcatggacactcgcagagggttatagaccaggtcaaatcaattaagtcacgttatccagagcttccggtcgtgggcgggaacattggtactgccgatgctgcaaaggtgttggctaaagctggggcagatgccgtaaaagttggtattggtccaggatcaatctgtacaacacgcatagtcacgggtgtcggtgttcctcaaataaccgcggttgctaatgtcgcgcatgcgttaaagggtagtgatgtttgcgtgatctcagatggaggtgtcagatattctggcgacatttcgaaggttattgccgcgggggctcatattgttatggtgggtagtttattggcaggttcagaggaggcgcccggtgaggtcgaattgtatcaagggcgaagttacaaatcttatcgcggaatgggatcattaggtgccatgtcgcactctcacgggtctggcgatcgttactttcaagacgtagagtctggtgcggataaattagtgccggagggtatcgaagggcgggtgccgtacaaagggcccatgtcagccatcgtttcatcacttatgggtggggtgaggtcttctatgggctacactggctgtaaagatatagatgagatgagaaacaacaccaagttttgtgaa

SEQ ID NO: 204913 - DNA, 592 bp, Unknown
  Bacterial polypeptide expressing nucleotide sequence isolated from the Sargasso Sea
agatgccattaaggttgggattggacccggatccatttgtaccactaggatagttgcaggtgttggtgttcctcaattatctgcaatatatgagtgcgcaaaaatttctaaaaaattcaaaataccactcattgcagatggaggtgtacgttactctggagatatagcgaaagcaattgctgctgggtctgatacagttatgttgggaggactcttagctggcacagatgaagctcccggtgaagtcgaaatgtttgagggaaggacctacaaatcatacagagggatgggctcaattggagctatgcaaagtgggtcaaaagatagatattttcaagaacaccacagtgaaagtaaaaaacttataccagaagggattgagggacgcgttccgtataaaggtaccatgaaatctattcttcatcagttaacaggaggactgaaatcaagtatgggctatttgggctgtaaaaatattaaattaatgaaaacaaaaacaaatttcatcaaagtatccagctcatcaaaaattgagagccatacacacgatgtagctattgttaaagagcctccgaactatcagtccagataa

SEQ ID NO: 204914 - DNA, 697 bp, Unknown
  Bacterial polypeptide expressing nucleotide sequence isolated from the Sargasso Sea
gttttatttactttaaataaagtaaaaaaaatttccaaaaaaattcctgtttgcgttgggaatattgctacctctgaagcagcaaaaacactttataattctggagctgatatattgaaagttggcattggcccaggttcaatatgtactacaagaatggtagcgggcataggagttccacaaattacagcaataataaatgttaaaaattctatgaaaaacaaaaatataaaaattatttcagacggaggaataaaattctcaggtgatataattaaagctatagcggctggagcggacgcaattatgatgggttcaatttttgcaggaacagaagaaagtcctggaaagaaatttaagattaagaataaaatatttaaactatacagaggaatgggatctataggcgctatgtcctctggttcttctgaaagatactttcaaaaaaattatagagataaatctaaatttgtaccagagggtgtagaaagtagagttgcgtataaaggaaaagtagctaaaattatttatcaactccaaggaggtctcagatcttcaatgggctatataggtgcacaaaatattagtgatgtaataaaaaaatcgaaatttattaaaattacaaaagccggtttttatgagagtatggtacatagtgttgaaacaattaaaagtagtccaaattttaagttatgat

SEQ ID NO: 204915 - DNA, 850 bp, Unknown
  Bacterial polypeptide expressing nucleotide sequence isolated from the Sargasso Sea
atggaaatcaataaagccctaactttcgatgacgttttactagtaccaaactattcccagatattaccaaaacatgtaaacgttgaaaccaacttatcagataccttaaatcttaagatcccattattatcatcggctatggatactgtaacagagtcaagaatggcaatagcattagcttcaaatggtgggatgggcgtaatacatagaaatttaaacataaaaaaacagttaaatgaggttagaattgtaaaaaataaaaaatttaaagtaggagcggcaattggcgttggtttaaaggaaattgaaagagcagaagcgttgatagaggcaaatgttgatttattagtaattgatacagctcatggccatacaaaaagagtttttgatacattaagagaaattaacaaaataaaaaagaacaaaacgtctttatgtgcgggtaatattgctaccgctgaagcagctaattttcttataaaaggaggggctgatattattaaaattggaataggacctggctcaatatgtactacacgaatcgtagcaggtattggtgttcctcaattaagtgcaattttaaatattaaaaaaaaaattaaaacaaaaaaagtaagcttcatttcagacggtggtattaaattttctggagacttagctaaagcattttcagctggagctgacgcaataatgataggttcactttttgcagggactgatcaagctccaggaaaaataataaaaaaaaacaaaatattatacaaaaaatttagaggaatgggatctattggagcaatgtcgcaaggatcggcagatagatataatcaaaaatctaatttaaaaaaataat

SEQ ID NO: 204916 - DNA, 538 bp, Unknown
  Bacterial polypeptide expressing nucleotide sequence isolated from the Sargasso Sea
tatgtcaaataacgttgaaaagaaattaacatttgatgatgttttattagttcctagaagatcatctgttctacctaaagaagtggattgttctactaatcttacaaaaaatattactttaaatattccagtaatgagtgcagctatggatactgttactgaatctgaaatggcaattgcattggcaagacaaggaggcatcggtgttattcacaaaaatttaagtattgaagatcaagctttaatggtagataaggtgaaaagatatgaaagtggtatgattagaaatcctattactttagatgaagaaaagactgtaagagatgcaaaacaactaatggaacaatattctattggaggtttacctgttttgtcaaaaggtaaattagtgggaataattacaaaaagagatattcgttttgaatcagatcttaatactcttgtaaaaaatagaatgacttcaaaaaatttaattacagttgactctgatacaagcaacgaagacgctaaaaaaattcttcaaaaacacagaatttga

SEQ ID NO: 204917 - DNA, 597 bp, Unknown
  Bacterial polypeptide expressing nucleotide sequence isolated from the Sargasso Sea
gccgcgacgggcgtgaagtccgtatcggcccaggctcgatctgcacgacgcggatcgtggccggtgtgggcgtgccgcaggttacggcgatttcgaacgtgtcggaagcgctgaagggcaccggcgtgccggtcatcgccgacggtggcgtgcgattctcgggcgacgtcagcaaggcgctggccgccggcgcgaattctgtgatgatgggcagcatgttcgccggcaccgaagaagcgccgggcgacgtgttcctgttccagggccgccagtacaagtcgtaccgtggcatgggctcggtcggcgcgatgaaggacggcgctgcagaccgctacttccaggacaattccgcgaatatcgacaagctggtgccggaaggtatcgaaggccgcgtcgcctacaagggctcggtcaacgcgatcctgttccagctgatcggcggcgtgcgcgccagcatgggctactgcggctgccgcaccatcgcggagatgaacgacaaggccgagttcgtgcagatcacgggcgcgggcttgcgcgagtcgcacgtgcatgatgtgcagatcaccaaggaagcgcccaactaccacgtggactaaa

SEQ ID NO: 204918 - DNA, 747 bp, Unknown
  Bacterial polypeptide expressing nucleotide sequence isolated from the Sargasso Sea
attgcaatggctcaagagggtggtaattggtgttatacataaaaacctaactataaagcaacaagcagaaaaaataagaaaagtaaaaagatctgaatcaggaatgattttagatccagtaacacttacaaaaaaaagcaaggttaaagacgcattaaaatgtatgaaagagttcagcattggaggtattccaattgttgataaatcaaactctttagttggaatacttacaaacagagatttaaggtttgaatctgatatgaacaaatctgttaatgatgtaatgactaaagataatttagttacaggtaatccagggataacattaaaacaggctgaaaaaattcttcaaaaaaataaaatcgaaaaattgccaattattgatgaaaaaaataaattggttggactgataacttttcgtgatattcaaaaaataactctaaaaccatcatcaaataaagatgagtttggaagattaagagtagctgctgcaattggtgttggtggagaaaaccttgaaagatgtaaaatgttatataaagctggtgtagatgcaatagttattgataccgcacatgctcatacaaaatcagttctaaaaattataaaggatgttaagaaaacatttcctgatttggatgttgttgcaggaaatgttgcgactgctgaagctgccaaatttttagcaaaagcgggagttgatggagtaaaggttggtattggtccaggttccatatgtactaccag

SEQ ID NO: 204919 - DNA, 834 bp, Unknown
  Bacterial polypeptide expressing nucleotide sequence isolated from the Sargasso Sea
gtaattaaaaagttgctccaagaaaatagaattgaaaaaatcctccttatagacgattcctttaaattaactggactggttacccttaaagatatcaataagtctctggactttccagatgcagctcgtgatgaagaaggaagactcttagctggtgctgctataggaacaaaggcagatactttagatagatgtcaggccttaattgatgcaggagtcgatgtgctggtagcagatagtgctcatggacactctgaaggggtcttaaatcaaatcaaggcagtaaaatccaattttaaagatatacaaataattggtggaaatgttgctacaggagagggtgctctagctttagtgaaagcaggagctgatgctgtaaaagtcggcattggccctggatcaatttgtacaacaagagttgttacaggcgtgggagttccacaaattacagctgtggctgaagttactgaagcattaaaaaagaaagatataccagtcattgcagatggtggaataagattttcaggagatatagccaaggctatagctgccggaggacatacagtcatgttaggaagtgttcttgcaggaacagaagaagcgccaggagaattagagttgtatcaaggtaggagttataaatcttatagaggtatggggtctataggagctatgtccggagatcaaggttcttccgatcgttatttccaagatagtgctgaggctaccgaaaaattagtacctgagggaattgaaggaagagtgccatataaaggttggttacaggctgttatccaccaaatgattggaggactcagacagagtatgggatat

SEQ ID NO: 204920 - DNA, 928 bp, Unknown
  Bacterial polypeptide expressing nucleotide sequence isolated from the Sargasso Sea
cagtattcatcaattttacctagcgaagcctctatcgagacctcttgggggtcagagctgaaacttaaaattccttttttatcttctgctatggatactgtaactgagtctaaaatggccatagccattgcagagcaaggaggtcttggaattattcatagaaacttgagtataaataaacagtgcaatgaagttaggaaagttaaaagcaaaaaacttttagttggggcggctgttggaacatcaaaagaagatattatcagagctaataaactcatagacaatggtatagatcttatagttattgatacagctcatggtcatagtaaaaaagtacttttaacattaaaaaaattaaaaaagattaaaagcaaagtaaaaatatgcgctggaaatatagctacagcggagtctgcgagattactctcaaatgagggtgccgatatactaaaagttggaattggcccaggatcaatatgtacaactagaattgtttcaggcataggtgttccacaaataagtgcagttatggatgtaaaagaaggtataaaaaaaaataaaaaaattaaaattatatctgatggaggaataaaatttttaggggatgcagctaaagctttagctgctggagcagatgctgtaatgatgggatctgtttttgccggaacagaagaaagtcctggaaaaaaatttaaatataaaaataaaatgtataagtcttttagaggaatgggttcaattggagcgatgatggatggctcagctggaagatattttcaaaaaaattttaaagataaatcaaaatttgtaccagagggtgttgagggtagagtcctttataaaggaaaagtagaaaaaattatttatcaactcaagggaggattaaaatcatcaatgggttatattggcgcaaagaaatattattaat

SEQ ID NO: 204921 - DNA, 748 bp, Unknown
  Bacterial polypeptide expressing nucleotide sequence isolated from the Sargasso Sea
agcaaaaaaactaatcaaagccaatgttgatcttttagtaatagatactgctcacggccatacaaataaagtttttaaaattataaagaaaattaaaaaagtaattaaaagggtacctctttgtgcaggaaatatcgcaactggtaaagcggcaaagtttcttgcggactcaggagttgatattgttaaggtcggaattggaccaggatcaatatgcactacaagacttgttgctggcgtaggagtcccacaattaagcgctgtaatagaagttaaaaacgccttaagaaatagaaaaacaaaaataatttcagatggtggtattaagttttcaggtgaccttgccaaagctattggagcaggtgcagatgccataatgataggctctcttttttcaggtacattagaaagtcctggtaaaatatttaaacgtaaaggaaaactttataaaagttttagaggaatgggttcagctggcgcaatggctgttggatcttcagatagatattatcaaaaaaaatttaaagatctctctaagtttgttccagaaggagttgagggaatagttaaatttaagggtccagtaaacaaaataatatataatttagttggtggtctaagatcttcaatgggttatcttggagcaaaaactataaaagatttacaaaagaaaggtgagttcgtaaaaattaccaaggcaggtttttacgaaagcatggttcataatgttgatcaagtagttaagtaa

SEQ ID NO: 204922 - DNA, 904 bp, Unknown
  Bacterial polypeptide expressing nucleotide sequence isolated from the Sargasso Sea
accctcaggtgtagatacgagtattaaattaactgagtctttaaaactaaagattccattactttcatctgcaatggatactgttacagaaagtagaatggctattgctttagcaaaggctggaggactaggtgttattcatagaaatcttgatattaaaaagcaggtattagaaattagaaaagttaaaaaacaaagattagtagtcggtgctgctgtaggtgctggtttaaatgaatttaaaagggctgaagctattttaaaagaaaagatagacatgatagttgtggacacagcacatggtcatactaaaaaagttgcagaaataataaaatttataaagaaaaaaaaagataaaaaaacttctttgtgtgctggaaacattgccacaactgaggcagcaaagtttctacttaatttaggtgtagatattatcaaagttggaataggtccaggttcaatctgtacaacaagattggtagcaggcataggtgtaccgcaactctctgcgattttaaatgttagaaacggaattaaaaataaaaatgtaaaaattatttcagatgggggtataaaatactctggtgatctagcaaaagcatttgctgctggagcagatgcagtaatgattggctctttatttgcaggaacagatgaaacacctggaaaattaataacgaaaaatggcaaactttttaaaagctttagaggaatgggctctgttggtgctatgaacaaaggttctgcagatagatattttcaatctaaacaaaaaaacaaatcaaagtatgttcccgaaggcgttgaaggttttgcaaaatataaaggtaaagttgataatataatctttaaattaattggaggcttgagatcatccatggggtatcttggctctaacaaataa

SEQ ID NO: 204923 - DNA, 697 bp, Unknown
  Bacterial polypeptide expressing nucleotide sequence isolated from the Sargasso Sea
aatgatccgtgatcgaattttcgatggtctgacctttgatgatattcttctggttccgggttatgcagagattcatcactcggaggtttccctgaaaagcaaactgacgcgcaaacttgagtgcaacattccccttctcagcgcggcgatggataccgttacggaagccgacacagctatctgcatggcccaggaaggcggtctcggtgtgattcataaaaacctctccattgaagaacaggcgaatcaggtcaatcgggttaaacgctctgaaagcggaatgatcaccaatccgatcaccatcgaacccgaccagccgatcagcgaagcccttaagttgatggagcgttatcggatttccggagtccctgtcatccgcgggacggagctggtgggcatcctcaccaaccgtgaccttcgcttcgaaaccaatcatgaaaaacccgtctcggaattgatgaccggaggtcgggacaaactcgtcaccgttgcaccgggaatcgagatggaatcagccaaacgtctgctgcaccaacaccggattgaaaaacttctggtggttaatgccaattatgaattgcagggactcatcaccattaaagatattgaaaaagcccggaaatacccgaatgccaacaaggacgaggtaggtcggttgctggtgggtgcggcattaggaatttcggaagatctgcta

SEQ ID NO: 204924 - DNA, 868 bp, Unknown
  Bacterial polypeptide expressing nucleotide sequence isolated from the Sargasso Sea
gatgaccgtcaaggatatcgagaaagccaaggcctaccctctggcgagcaaggacgatcaaggtcgtctgcgtgttggcgctgccgtcggtactggtgccgacaccggtgatcgcgtcggcgctctggtcaatgccggtgtcgatgtgatcatcgtcgacaccgctcacggccactccaagggcgtgatcgaccgcgtgcgttgggtcaagcagagcttcccggacgtccaggtgatcggtggcaacatcgccacgggcgcagctgccaaggcgctggtcgaagccggcgccgatggcgtcaaggtcggcatcggcccaggctcgatctgcaccacccgtatcgtcgctggcgtcggtgttccacagatcagcgccgtggccaacgtggccgcagcactggccggcactggcgtaccgctgattgctgacggtggtatccgcttctctggcgatttgtccaaggccatcgttgccggcgcttccgccgtgatgatcggctccatgctggccggtaccgaagaagccccgggcgaagtcgaactgttccagggccgctcctacaaggcttaccgcggcatgggctcgctgggcgccatggcccaggcgcagggctcttccgaccgttacttccaggactcctcggccggtgccgagaagctggtgccggaaggtatcgaaggtcgtgtgccgtacaagggcgcaatgagtgccatcgttcaccagctgatgggcggcctgcgtgcctccatgggctacaccggctgcgccaccatcgaagacatgcgtaccaagcctgagttcgtgcgcattaccggcgccggtatggccgagtcgcatgtccacgacgtgcagatcaccaaggaggcg

SEQ ID NO: 204925 - DNA, 778 bp, Unknown
  Bacterial polypeptide expressing nucleotide sequence isolated from the Sargasso Sea
attgggagttaataatgatgatttagatagagccaaaaaattaagcaaagctaatgttgatcttttagtaatagatactgcccacggtcatacaaataaagttttaaaaatcatcaaaagaattaaaaaaataattaaaagagtacctctttgtgctggaaatatcgcaacaggtaaagcggcaaaatttcttgcagactccggggttgatattgttaaagtcggaattggaccaggatcaatatgtactacaagaattgtagctggtgtaggggtacctcaactaagtgcagtgatggaagttaaaaatgctttaagaaacagaaaaacaaaaataatttctgatggaggtattaagttttcaggcgacattgccaaagccattggagccggtgcagatgctataatgatagggtcccttttttcaggaacattagaaagtcctggtaaaatatttaaacgtagaggaaaactttataaaagctttagaggaatgggttctgcaggagctatggcagttggatctgcagatagatactatcaaaaaaagtttaaagatctttcaaaatttgttcccgaaggagttgaaggaattgttaaatttaaaggttcagtaaataaaataatctataatttagttggaggattaagatcctcaatgggttacctaggtgcaaaaacagtaaaagatttacaaaagaaaggtgaattcgtaaaaattactaaagcaggtttttatgaaagcatggttcataatgttgatcaaatagttaagtaa

SEQ ID NO: 204926 - DNA, 544 bp, Unknown
  Bacterial polypeptide expressing nucleotide sequence isolated from the Sargasso Sea
gtcggggattggcgttccacaaataacggcggtctctgaggcgtctagagcggcagaagaggatgatattccggtgatcgcggatggtgggattcgttattctggcgatatagcaaaagccatttgcgcgggggcgagttcggtgatggtgggaagcttgcttgcgggaaccgaagaggctccgggagagatagagttgtatcaaggaaggacatacaaatcttatcggggcatgggttcgatgggcgctatggctcaaagtcacggttcaagtgatagatattttcaagaagttgaaggggacggaagaaaacttgttcctgaaggcattgaaggtagagtccctttcaggggaccaacagggccgatcattcaccagctgatgggaggtctccgaggagcgatggggtacacaggcagcggagacattgactaccttaggaaacatccagagtttataaaggtgagcgcggctggcatggccgaatcccatgttcatgatgtggcaatcacaaaagaagcccccaattatccagtcagctag

SEQ ID NO: 204927 - DNA, 925 bp, Unknown
  Bacterial polypeptide expressing nucleotide sequence isolated from the Sargasso Sea
aggatagaaaagcttctagtggtagatgactctggtatgctagctggattaattacggttaaggatataaagaaaaaacagcaatatccaaatgcttgtaaggatttaaatggtagactaagagtatcagctgctgtgggtgtggctgaagatacatttgaaagggcgcaagagcttgtaagagcagatgttgatgttatcgttgtagatacagcacatgggcactctaaaggtgtgttagataccatttcgaaattaaaagctcaagattctaatttatcaataatagctggcaatgtagcaacagggtatggagctaaggctcttattgatgctggagcagactgtgtcaaagttggtatcggtgctggtgcaagttgtactactagaattgttgctggcgttggagtgcctcaattaacagcgatcatggatgcggtagagattactaaaaaagaagatattccagttattgccgatggtggattacgatatagtggggatatagctaaggccctagcatctggtgcagattcaattatgcttggaagtatgttagctggcatggatgaaagtcctggtgaaacgattttatacgaaggacgtcaatacaaaacatttagaggaatgggctctttgggggctatggaggaaggtagcggcgatagatattttcaagaagatacagataataaaaagcttgttccggagggaatagagggcatggtaccttttaggggaccagtcaaaaatacgatccaccaattaactggcggaattagatcatcaatgggctattgtggttgtaaaactataaatgaatttggagaaaagtccgaatttattgaaataactgctgcaggtgtaagagaaggccatccacatgaagtccgaatcgttaaagaagctccgaattactcaccat

SEQ ID NO: 204928 - DNA, 745 bp, Unknown
  Bacterial polypeptide expressing nucleotide sequence isolated from the Sargasso Sea
ttgtttgttggagctgctgttggcacaaacgaagaggatgttgatagagctaaatctttaatagataatggatgtgatttaattgtgatcgatacggcacatggtcatagcaaaaaagtattaaagatattatcaaagttaaaaaaaattgataattcaataccgttttgtgtaggaaatattgctacaggagaggccgctaaacggttgtacaattcgggagcagatataataaagattggaattggtccaggttctatatgcacaacaagaatggttgctggaattggtgtaccgcaaatatctgcaattttagatgttaagaatgctctaaaaaacaagaaaattaaaataatttctgacgggggaataaaattttctggcgatattgcaaaagcattagcagcaggtgcagatgcaattatgatgggctcaatttttgctggaacagatgagagtccaggaaaaaaatttaaatttaaaggtaaattttacaaacaatacagaggcatgggttcaattggggcaatgtcctctggatcagcgaacagatattttcaaaaaaatttcaaggataaatcaaaatttgttccagagggtgttgagggcagggtagaatataaagggagtgtatcaaaaattatttatcaacttaaaggaggtttacgttcatcaatgggatatataggcgctcaaaatttaggacaaataactaaaaatgccaagtttattaaaattactaagg

SEQ ID NO: 204929 - DNA, 952 bp, Unknown
  Bacterial polypeptide expressing nucleotide sequence isolated from the Sargasso Sea
tatggattctgatgtttcaacaattatgactccttttaagaaactagttactgttaacgaaggcttttctcaagaagatgttatgcaattaatgtataaaaatagaattgaaaaagttttagttctagatgaaaacaaaaatttatcagggcttgtcacaatgaaagatattgaaaaatctgcgcaacatcctaatgcaacgaaagatgactctggaagactcagagtcgctgctgctataggtacagaacaaaatactatagaaagagctgaggcactttttgatgctggagtagatgtttttgttattgatagtgcgcatggacattcaaaaaatgtcataaatacaattaagactataaaacagtcttttagggaaattgaaataataggtggtaacatagccacagctgatgcagcaaaagaattagctaaagctggtgttagtgcagtaaaagttggaatgggcccaggatcaatatgtactacaagaattattgccggaatcggtgttcctcaaataacagcaattcttgaaataaaacaagctcttaaaaaaaacaatgtgaaagtgattgctgacggaggaataagattttctggtgatattgcaaaagcaatttctgccggagctgactcagtaatgttaggaagtttatttgctggaactgaagaggctcctggcaaagttgaactctttcaaggcagaagctttaaaacatatcgaggcatgggttcaattggtgcgatgactgaaagaaatgatgctaacagatatcttcaagaagatgcagaatctgataaattagttcctgaaggaatagagggaagggtgccatataaaggtcttgtcataaatgttataaatcaattagagggaggcctaagacaaagtatgggatatgtaggctgtaagaacattaaagctatgcaattagagagtaaatcattg

SEQ ID NO: 204930 - DNA, 693 bp, Unknown
  Bacterial polypeptide expressing nucleotide sequence isolated from the Sargasso Sea
gatcaagaagaagtaaaaaaattaatgtaccagaatcgtattgaaaaggtattagtgcttgataaagctggcagtctttctggactggttacgatgaaggacatagataagtctgctgagttcccattggcaacaaaagataactccggacaattactagttgctgctgctttagggacgggaactgatacgttggaaagggcagaagcccttaatgaaatgggtgtagatgtatttgttgtcgattcagctcatggtcactcaaaaaatgttattgaaactatcaaacttttaaaagataactttaaagacgttcaagtgattgctggaaatgttgcaacgcctgatggtgcagttgctttggatgaggctggagcagatgcaattaaaataggtatgggtccgggttccatatgcaccacgagaatcattgcaggaatgggtgtccctcaaattacagcaatattatcaataagagatgctatgaaaaactcacctacaccattaattgctgatggtggcataagattttcaggcgatttagcaaaagcaattgctgctggtgcatcttcggtaatgcttggcagtatgttggcaggtacagaagaggctccaggtgaaatagagctttatcaaggtagaagctttaaaacatataggggaatgggttctttaggtgcaattcagaaagaa

SEQ ID NO: 204931 - DNA, 877 bp, Unknown
  Bacterial polypeptide expressing nucleotide sequence isolated from the Sargasso Sea
gtaaaaaagtttgaaactggcatggtaattgatcctgtaaccatagcacctgaagctactctatcagatgctttagatctaatgaaagagaatcagatttctggtgtccctgtagtcgatataaacgataaattgcttggtattttaacaaatagggatgtgcgtttcgcaactaacatgtctcaaaaaattagtgagttaatgacaagtgaaaatttgattactgtaaaagagggaatctctagtgacgatgcccaaaaattacttcatgctcatagaattgaaaagctaatcgttgttgacggtaatagaaagtgtattggcttaatcacagtgaaagatatcgaaaaaagtcaattgaacccacacgcatctaaggatgccaaaggtaggctgatagtaggttctgcaataggcgttggaatagaagcaattaatagagctgagcgtttagttgatgctggtgtagatgtgttagtaatagatactgcccatggccactcagaaaaagtcatttctactcttgaagaaattaaatctcttttttcaattgacgtagttgttggcaacgtagctacaaaagaagccacaaaagaattaattgataaaggtgctgattgcataaaagttggcataggtccaggatcaatttgtactactagagtggttgctggaataggagtccctcaattttcagcaattttggattgtgctgaaattgcagttaaaagaaatattccagtcattgctgacggaggcataaaatactctggagatatcgcaaaagcactaggcgcaggagctaacgcagtgatgataggatcattatttgcaggaactgacgagtcaccaggtgaagtctacttatttaaaggta

SEQ ID NO: 204932 - DNA, 945 bp, Unknown
  Bacterial polypeptide expressing nucleotide sequence isolated from the Sargasso Sea
attgatagggatcattacaaatagagatataagatttgaaacagatgggaacctttctgtaaaagatagaatgacgtctgaaaatcttgttacagtttctgaaggaacaaccttagaagatgcaaaaaaagttttacaacagcatcggatagaaaaactacttgtagtgaatgatgagggtaatcttgctggattaattactgttaaagatattcagaaaaaagaagatttcccaaacgcatgtaaggatgagaatgggcgcttacgtgtaggagctgcaattggagtaaataatgattcgattgatagagctaaggctcttttagatgcagatgttgatgttattgtcattgatactgctcatggacattcttcaggagttttagattcagtaaaaaatataaaaaaagctgttggagatttagatattatagcaggtaatgttgcgacttcagagggcaccaaagcgcttattgattcaggagttgattgtgttaaagtaggtataggagcaggtgcgagttgtactacaagagtagttgcaggagtaggtatgccgcaattatctggcattatgggctgtgttgatgaagctcaaaaacatgaaattccaattattgcagatggcggtatacgttatagtggcgatctagcaaaagcaattgcagctggggcagaatcagttatgctgggaagtatctttgctggtatggatgagagtccaggagaatttatcctttatgaaggtcgtcaatataaatcttatagaggaatgggctcactcggagcgatgaaaaaaggtagcggagataggtattttcaagaagatatggaatcaacaaaattggttcctgaaggtattgagggaatggtaccatatagaggttctgttcatatgactattcatcaattgatgggcggtttacgatcctcaatgggatattg

SEQ ID NO: 204933 - DNA, 783 bp, Unknown
  Bacterial polypeptide expressing nucleotide sequence isolated from the Sargasso Sea
gccggtaacgaagagcgtgtcgatgcgctggtgaaagctggtgttgacgtgctgctgattgactcttcccacggccactctgaaggcgtgttgcaacgtatccgtgaaacccgcgcaaaatacccagatttacaaatcatcggtggtaacgtggcaacagctgaaggcgcattagccctagttgaagctggtgttaacgcggttaaagtcggtattggccctggttctatctgtaccacacgtatcgtgacgggtgtgggcgtgccacaaattaccgcagtgtctgatgctgccgaagccgtaaaaggtttagggatcccagttattgccgacggcggtgtacgtttctccggtgacttagccaaagccttagccgcaggagcatcgtgcatcatggcgggttcaatgttcgcgggtactgacgaagcgccaggcgaaacggaactctaccaaggccgtgcctataagtcataccgtggtatgggttctttaggcgccatgtctcaaggttcttctgaccgttatttccaatctgacaatgctgccgacaagctggtgccagaaggcatcgaaggccgtgtaccttacaaaggcaagctcaaggaaatcatccatcaacatatgggggggctgcgttcatgcatgggcctaacgggctgtgccacaattcaagaactgaacgaaaaagcgcaatttgtgaaagtgacgtctgcgggcatgggtgagtcccacgttcatgatgtgactatcactaaagaagcgccaaactaccgttcaggtgcg

SEQ ID NO: 204934 - DNA, 802 bp, Unknown
  Bacterial polypeptide expressing nucleotide sequence isolated from the Sargasso Sea
aaagcacggaaatacccgaatgccaacaaggacgaggtaggccggttgctggtgggtgcggcattaggagtttcggaagatctgcttcagagggcggaagccctgattcaggcagaagtggacctggtcgtgcttgattccgctcatggtcattctcggggtgtactcgagggcatccgtaagttgcgaagtcacttcccggaactgcaaatcgtcggaggaaacattgccacagccgagggagcagatgccctgatcgatgcaggagtggatgcagtcaaggtgggcatcggcccagggtcgatttgtaccacacgaatggtggcaggtattggaatgcctcaaatatccgccattgacagtgttgccgaagccctcagtaaaactgatgtcccgatcattgctgatggaggaatcaaatattccggggatatcgtcaaagccctcgccgccggtgcacacagcgtgatgatcggcagtctctttgcaggaaccgccgaaactcccggacaggtcattctctaccagggtcgccgttacaaactttaccgcgggatggggtctctcggtgccatgaaagaaggaagcaaagaccgttatttccagacgggagttcaggaagttcagaaactggttcccgaaggaatcgaaggacgggttccctacaaggggcctttggcggaatccatttttcagttcactggaggtttacgggccgggatgggctacaccggctgcgcaagcatcgatgagcttcagaacaaggccagttacgtccgcatttccaatgctggccttagga

SEQ ID NO: 204935 - DNA, 787 bp, Unknown
  Bacterial polypeptide expressing nucleotide sequence isolated from the Sargasso Sea
gatgttacgtatcgtagaccaagcacttacctttgatgacgttcttttggtgcctgatcattcagacattcttcctaaagacgttgatttaaaaactcgtttaactcagaacttagatcttaatattcctttgctttcagctgcaatggataccgttactgaatcccgcatgggaatagctttaagcgaattgggtggaattgggattattcataaaaatctatccatagaagctcaagctgccgaagtaagaaaagttaagaaatatgaaagtggtattgttagagaccctatcactatcagatcggataatgaagtcggtgaacttgtacagctaactaaagagcttaatatttcaggtatgccggttgtagataatggagcgttggtcggcatagtgaccagtagagattttagatatcaagaaaatctatctgcaaaagtttcagacattatgactccgaaagatagattagttacagctaaagaaggtgagagtccagatgtaattaaaaagttgctccaagaaaatagaattgaaaaaatcctccttatagatgattcctctaaattaactggattggttacccttaaagatatcaataagtctctggactttccagatgcagctcgtgatgaagaaggaaggcttttggctggtgccgctataggaacaaaggcagatactttagatagatgtcaggccttaattgatgcaggagttgatgttctggtagcagatagtgctcatggacactctgaaaggggtcttaaatcaaatcaaggc

SEQ ID NO: 204936 - DNA, 685 bp, Unknown
  Bacterial polypeptide expressing nucleotide sequence isolated from the Sargasso Sea
gatgttacgtattgaagataaagcactcacctttgatgacgtccttttagtgccagctcactcagaagttttacctaacgaagttgatttaaaaactaaattaaccaagaaacttaatttaaatataccacttgtttctgctgctatggacacagttacagaatcacgcatgggcattgcgttaagcgaattgggcggtatcggaattatccataaaaatttatccatagaatctcaagcttccgaggtaagaaaggtaaaaaaatatgaaagcgggatagttagagacccgataacaattagatcagataaagaagttggtgaacttattcagcttaccaatgaactcaatatttctggtatgccagttgttgatgatggcgatttagttggaattgtaacaagcagagattttagaaatgaacaaaacttttcagctaaagtatctgaaatcatgactcctaaagataagcttgttactgctaaagagggagaagatttagacgtaattaagaaattattacaagataacagaattgagaagatccttttggttgatggatcatttggattgactggtttggtgactcttaaagatataaataaatcgttggactttcccgatgcagcgagagatggagaaggaagattgttggtaggagcagctataggaactaagtcagat

SEQ ID NO: 204937 - DNA, 766 bp, Unknown
  Bacterial polypeptide expressing nucleotide sequence isolated from the Sargasso Sea
atggatcctattaaagaagcacttacatttgatgatgtgacgctagctcctaattattcagaaattttaccgactgatgtaaacacatctataattttatcaaaaaatataactttaaaaatacccataatttcatcagctatggatactgttacagaagctaaaatgtgtatcgctattggtaagtcaggtggcattggtgtgcttcacagaaatttatcagtaaaaaaacaaattttagaaattagaaaagtaaagtcaaaaggatttaaagtaggagcagcagttggagctagttacaaagagcaagcaagagcaagaagaattttagaagagaaagttgatttgattgttgtagatacggcccatgcgcatacaaaaaaagtagctgaaattattaaagttataaaaaaaaataaatctcacaaaaccactctttgtgctggaaatattgcaacttcagaggctgcaaaatatttaataaaacttggtgttgatattataaaagtaggaattggacctggctcaatttgtacaacacgattggttgccggcataggagttccacagttaactgcaattacaaacgttaaaaaaggaataggaaaaagtaaaactaagctaatagcggatggtggtataaaattttctggtgacatagcaaaagctctagcagcgggtgctgatgcagttatgataggttcactttttgcaggtacagaccaagcacctggaaaaataataaaaagaaatggaaaattataaa

SEQ ID NO: 204938 - DNA, 775 bp, Unknown
  Bacterial polypeptide expressing nucleotide sequence isolated from the Sargasso Sea
ataccaattatttcttcagcaatggataccgtaacagaatctgatatggctattgcaatagcaagagctggcggaataggagtaattcatagaaatttagaaataaataaacagatatctgaaataagaaaagttaaatctaaaaatttgaaagttggagctgctgtaggagccggtgaacaagaaattaaaagagccaaagccattcttaaagaaaaaatcgatttaattgtagtggatacagcgcatggtcatacaaaaaaggtagcagaaataataaaaaaaattaaaaaatttaaatcgaataaaactgctctttgtgctgggaatatagcaactaccgaggctgctaaatttttatctaaactaggtgtcgatgtaattaaagtaggtattggcccagggtcaatttgtacaactagacttgttgctgggattggagttcctcagttaagtgcaattttggctgtaaaaaaaggaataagtaaaaaaaatattactcttatagcagatggaggaattaagttttcaggtgatatttcaaaagcactagcagctggagctgatgcagttatgattggatctttatttgctgggtcaaaagagtctcctggtaaaataattaaaaaaaacggaaagtattttaaaagctttaggggaatgggatcaataggagcaatgaacaaaggttctgcagatagatattttcaaaaaaaacaaaaagactcttcaaaatatgtaccagaaggtgttgaaggtttagtaaaatacaaag

SEQ ID NO: 204939 - DNA, 451 bp, Unknown
  Bacterial polypeptide expressing nucleotide sequence isolated from the Sargasso Sea
ggaggtataaaattctcaggagactttgccaaagcaattgccgcaggagcctcttgtgcgatggttggtagtatgattgcaggaacggatgaaagtcctggtgaggtgattttgtatcagggtagatctttcaaagcttatagaggaatgggttcacttggagcgatggcgcgaggttcagcagatagatattttcaaaaggatgcagctagcgataaactcgtgccagaaggaatagagggccaagtcccatataaaggtccagctaacgcagtaattcaccaaatggtaggtggactaagagcttctatgggctacactggatgccagacaatcgcagagatgagaaacgactgtcagtttgttaaaataacaggagcagggcttaaagaaagtcatgtgcatgacgttcagatcacaagagaaagcccaaattatcgtatcatttgat

SEQ ID NO: 204940 - DNA, 803 bp, Unknown
  Bacterial polypeptide expressing nucleotide sequence isolated from the Sargasso Sea
ggccacggggacaggcgagaaggggattctgagggcattggcaatgttcgagtccggagccgacgcagtcgctgttgacaccgcgcacggtcactctcacggagttctagatactgttcgtactatcagggagcaggccggtgccgatgctcagattattgcgggtaacgtagggacgccagaagcggctggtgctctgatagacagtggagccaacgcagtcaaagtaggaatcggccctggctcgatatgcactaccaggatagtgacgggagtcggagtcccccagttcaccgcagtgatgagcgctgtcgaggcgtgcgccgagagaggagtacccgtgatagcggatgggggaataaagtacagcggggacatagccaaagcaatcgcatcgggagccgactgcgtgatggtcggatcgctcctagccggaacggatgagtcccccggggagacaatactgtaccaaggcagggcctacaagcagtacagggggatgggttcgctgggtgccatgagcaagggctcctcggacaggtacttccagtcctcgcagggggacacgaggaagtacgtaccagagggaatcgaggggagggtcccatcaaggggcccggtcgaccaggtcctctaccaactgatgggtggcctgaggagctcgatggggtacacagggaattcaacaatcaaggagatgaagagcgagtgcaagtttgtccgcatcaccaacgcaggactctccgagagccacgtccacgatgtggagatcaccagagaggctcccaactacaggaggtaga

SEQ ID NO: 204941 - DNA, 754 bp, Unknown
  Bacterial polypeptide expressing nucleotide sequence isolated from the Sargasso Sea
cgtggatgttgatgtgatagtaattgatactgcacatgggcattcgagaggcgtattaggctcaattgataaaattaaaaattcgcatcctgatatatccttaatagctggtaatgttgctactggggacggaacccaggcaatgatagatgcaggggtggattgtgtgaaagttggtattggtgcaggagctagctgcacaacaagagtaattgctggagtgggagtgccacaattaaccgccataatggattctgttgatgttgcccgaaaaaataatattcccgtaattgcagatggaggacttcgctatagtggagatcttgccaaagcaattgccgcaggagcagaatctgttatgttaggcagtttattggcgggtatggatgaaagtcctggtgaaacgatcttgtatgaaggccgtcaatacaaatcatacagaggaatgggatcaatgggagctatggagaaaggaagtggagaccgatattttcaggaaggtgcagaagcaacaaaattggttccagaagggatagaaggtatggtcccatacagaggaccagtacgcaatacaatacatcaattgattggtggtataagatcttccatgggatattgtggatgtagtagcatagaagaatttggactcaattcaaacctgattcaggttacctcagcagcgcttaaggaaaaccatcctcacgaagtaagaattgtaaaagaagcacctaattatcaggtgtcagaagggtaa

SEQ ID NO: 204942 - DNA, 717 bp, Unknown
  Bacterial polypeptide expressing nucleotide sequence isolated from the Sargasso Sea
atcaaaagatgggaacggtgcacttttggttggagcagctgttggtgttggcgatggttcagaagaaagggtagaggcgcttaagactgctggcgtagatgtcattgtcgtagacacagctcatgcgcatacggaaggtgttatcaatcaggttaaatcaatcaagaaaatgcattctgatcttgaggtgatcgcaggcaatatcgccacgggagaggctgcaaaagcacttgccgatgcaggagcagatgcggtaaaggttggaattggcccgggttcaatttgtaccactcgagtggtcgcaggagccgggatgccacaaatcacagcaatttctgatgtcgcaaatcagcttaagggaaccgatacatgcataatctcagacggaggcattcgttattcaggagacatcgcaaaagccatagcagcaggtgctaatagcatcatgctcggcagtctatttgctggaacagaagagtctcccggtgagattgagctgtatcagggcagaagctttaaatcgtatcgtggcatgggttcaatcggagcgatggctcagcaacatggttccaaagaccgatactttcaaagcgatgttgaagaaccagaaaaactcgttcctgaaggcattgaaggaagggttccttataaaggaaaactttcaaaaattattgagcagcttgttggcggtttacgccagtctatgggatatacagg

SEQ ID NO: 204943 - DNA, 904 bp, Unknown
  Bacterial polypeptide expressing nucleotide sequence isolated from the Sargasso Sea
aggtgcgttggacttattacagtaaaagatatggagaaggaaagccaaaatccgaatgcatgcaaagatgaaaagggtcagcttcgagtcgccgctgccacaggtacaggagataatgggttagatcgagctaaggttttatctgaaaccggggtcgatgtgatagtagtcgacaccgctcacggccattctgagtcagtcattaagagtgttaaagaaattaaaaactttaaaaactatactcaagtgattgccggtaatattgtgactccagaaggcgcaaaagcactgattgatgccggcgctgactgtatcaaagttggtattggacctgggactatttgcacaactagaatggttgctggtgttggaatgcctcaattatctgctattttggaagttgctaaaatttgcagagaagagaatattccactaattgctgatggcggcataaaatattcaggagatattgccaaggcagtcgctgccggagccgagtcggttatgataggatcattatttgcaggaacagatgaaagtcctggtgaagtttttttgtatcaaggaaggtcatataaatcatatcgtggaatgggttcaataggagcaatggcaagaggttctgcagaccgctactttcaggctgaagtttctaattctttaaagctagtcccagagggagtcgagggaagggtcccctataaggggcccattaagacaattttacatcagctagtcggtggcctaaaatcttctatggggtataccggatgtccagacatcaatgcgatgagaaacaaggcaaagtttcgccgcattactggagctggacttagagaaagtcacgtgcatgacataacaatcacaagagaagccccaaattatggcaaaaatatcccttagt

SEQ ID NO: 204944 - DNA, 889 bp, Unknown
  Bacterial polypeptide expressing nucleotide sequence isolated from the Sargasso Sea
gatgatgttactttagccccaaattactcagcaattctgcctagtgaggtaaaaacctctataaatttaacagagagtctaaagattaaaataccacttttatcatctgcaatggatactgttacagaatcgtcaatggggattgcaataggaagagctgggggattaggtataattcatagaaacttaaatatcgaagagcagattaaagaaattagaaaagtaaaatcaaaaaaaatattagtaggtgcagcagttggtgcaagtgaaaaagaatttaaaagagccgaaaaaatattaaaagaaaacctagatatagttgtaattgatacagctcacggacataccaaaaaagtaggagaaataattaaaaaaataaaaaaaatacgtcctaagaaaacagctatatgtgcgggaaatatagctacagcagaagctgcaaaatttttggttggattgggtgtggacattataaaagtaggaataggcccaggttctatttgcacaacaagacttgtagcaggaataggagttccacaactaagtgcgatattaaatgttaaaaagggaattgggaaaagcaaaacaagattaattgctgatggtggaataaaattttctggcgatattgctaaagctttagcagctggtgcagatgcagttatgattggttcattatttgcagggacagatgaagcacctggaaaaaaaataaagaaaaatggtaaattatataaatattttaggggtatggggtcaataggtgcaatgaataaaggttcagcagacagatattttcaaacgaaacaaaaagattcatcaaaatatgtagcggagggtgtagagggatacattaaatacaaaggcaaagtagataaaataatataca

SEQ ID NO: 204945 - DNA, 859 bp, Unknown
  Bacterial polypeptide expressing nucleotide sequence isolated from the Sargasso Sea
aatggaaatacgtgaagcattaacatttgatgatgtacccttaataccagcaaagtcaagtgtactacctaaagatacagaaattaattctaaacttacaaaaattatcagtttaaagacaccacttttgtcttcagctatggacacggtcacagagtctaagatggcaatagcaatggctcaattaggaggagttggagtaattcatagaaatttagatatatcctctcaatgtgaagaagtaaaaaaagttaagagatttgagtccggtatggtaatcaatcctgtaactattaaagatgatacaaatttatctcatgctttaaatattatgaaaaattataatatttctggtattccagttgtgagtaataacgataatactcttgttggaataataacaaatagagatgttagatttgctacagataaaaatcagccagtaaatgagcttatgacaaaacatcctttgatattagctaaagatggcgtaaatatggaagaagcaaagaaacttttacataaaaatagaattgaaaaattaattattacagataaagatgataaatgtatcggtctaattactgttaaagatattcttaaatctcaaatttttccaaatgcaagtaaggatgaaaaaggaaggcttattgtagcagcagcaactactgttggtcgtattggtttagaaagaagtaaagctctaattgattcagatgttgatgtgctcgttgttgacacagcacatggtcattctactagagttcttgactgtgtagaagaactaaaaaaaatatcaaatgatattcaaatagttgctggtaatgttgcaacagctgatgctgctgctgatttgatt

SEQ ID NO: 204946 - DNA, 728 bp, Unknown
  Bacterial polypeptide expressing nucleotide sequence isolated from the Sargasso Sea
agctaaatcattaatagctaatgggtgcgatttaattgtgattgatacagctcacggacatagtaaaaaagttttgaaaatattatcaaaattaaaaaaaattgattattcaattccactatgtgtgggaaatatcgctacaggagaagctgctaaaaaattgtataattctggagcggatattataaaaattggaattggaccaggttctatttgtacaacaagaatggtagcgggaataggagtaccacaaatatctgcgatcctggaagttaaaaatgctttaaaaaataaaaaaataaaaattatttctgatggtggaattaaattttctggcgacatcgcaaaagcattggctgcaggtgcagatgcaataatgatgggttcaatttttgcaggtaccgatgaaagcccaggtaaaaaatttagatataaaggaaaaatttataaacattataggggcatgggatctattggagcaatgtcctctggctctgctaatagatattttcaaaaaaattttaaggataaatcaaaatttgttcccgagggtgttgaaggaagagttgagtataagggaagtttatcaaaaataatttaccaattaaaaggtggtctgagatcatcaatgggttatataggtgccaaaaatttaaatcaaatcactaaaaacgctaaatttattaaaattactaaagctggattctatgagagtatggtacatagtg

SEQ ID NO: 204947 - DNA, 928 bp, Unknown
  Bacterial polypeptide expressing nucleotide sequence isolated from the Sargasso Sea
gtttgcaagcgggattatttctgatccagtcacagtgagtccttttataaccatcagagaggtattggatataacaaaattcaattatatctcaggtgtccctgtcgtggataatggcataacagtgggtattgtcaccaatcgtgatctaagatttgaaaccaatcttgatggcttggtaagcagtgtcatgactcccaaagaaaagcttgttactgtcaaagagggtgcagatgaggaagaggtcttgggattgctccatcagcatagaattgagaaagtgctagtggttaatgattccttcgagctaaaaggaatggtcactgccaaggattttcagaaagcaacagactttcctcttgcatcaaaagatggaaatggagcgcttttagttggagcagctgttggtgttggtgatggttctgaggagagggtggaggcgctcaaatcagctggtgttgatgtgatcgttgttgataccgcacatgcacacaccgaaggggtgatcaatcaagttaaatcaataaaaaaaatgcactctgatctagaggtcattgctggaaacattgcgacaggagaggccgcgaaagcccttgtagaagcaggagcagatgcagttaaagtcggaataggccctggctcaatatgcaccactcgcgtagttgcaggagccggtatgccacaagtcacagcaattgctgatgttgcaacagagctgaagggaacagatacatgcatcatcgcagatggtggcattcgttattcaggagacatagcaaaagcaatcgcagcaggtgctgacagcatcatgttgggtagtctatttgctggaacagaagaatctcccggtgagatagaactttatcaaggaagaagttttaaatcatatcgtggtatgggctcattgggagcaatggctcaacaacac

SEQ ID NO: 204948 - DNA, 789 bp, Unknown
  Bacterial polypeptide expressing nucleotide sequence isolated from the Sargasso Sea
agataaaaataccacttttgtcatctgcaatggatactgttacagaatcttcaatggggattgctatggggatgtctgggggattaggaataattcatagaaacttaaatatcgaggaacagattaaagaaattcgaaaagtaaaatcaaaaaaaatattagtaggtgcagcagttggtgcaagcgaaaaagaattaaacagagctgaaaaaatattaaaagaaaacttagatataatagtaattgatacagcacacggacataccaaaaaagtaggagatataatcaaaaaaataaaaaaaatacgtcccaaaaaaactgcaatttgtgctggaaatatagctacagcagaagctgcaaagtttttggttggattaggtgttgatattataaaagtaggcataggcccaggatcaatttgtacaacaagacttgtagcaggaataggagttccacaactaagtgctatattagatgttaaaaggggaattgggaaaagtaaaacaagattaattgctgatggtggaataaaattttctggtgatatcgctaaagcattagcagctggtgcagatgcagttatgattggttcattatttgcaggtacagatgaagcacctggaaaaaaaataaagaaaaatggcaaattatataaatattttaggggtatggggtcaataggtgcaatgaataaaggttcagcagacagatattttcaaacgaaacaaaaagattcatcaaaatatgttgcggaaggtgtagagggatacattaaatacaaaaggtaaa

SEQ ID NO: 204949 - DNA, 838 bp, Unknown
  Bacterial polypeptide expressing nucleotide sequence isolated from the Sargasso Sea
ttttagagatattaacaagcactctgaaaaaccggtttcaaataaagataaactaggtagattgattgtagctgctgcaattggtacagatagtgattataaaaaaagagcaaaaaaactagttgagagtggagtagatgctattgttgttgatactgcacacgcacattcaagcagagtaggtgatgttttaaaagatttaaaggatacatttagcgatacagatattgtcgtcggaaatatagcaactgctgatgctgctaaatatttaatggaaaatggggctgatgcaataaaggtaggaattgggcccggttctatatgtacaacgagagttgttgcaggtgtaggatatcctcaattatctgcgattataaacatttcagaagttttaaaaaattcatctgttcctttaatagcggatggcggtgtaaagtacactggagatatatcaaaagcaattgctgctggtgctgactctgtaatgcttggttctcttcttgcaggaactgaagagtcaccaggtgaaacggtaatttatgagggaagaaagttcaaaacttatagaggtatggggtccgttgaggctatgcaaaagggtagtaaggatcgttattttcaatcagatgagtctgataataaaaaattagttcctgagggtattgttggcagggtaccttataaaggtcaattaaatgaaagcatacaccagtttgttggtggacttagatctggaatgggttactgtggatctaaggatattaaatccctcaaaaactcttccaaatttgtaaaaattacaggatcaggaattagagaaagtcatcctcacaatgtg

SEQ ID NO: 204950 - DNA, 802 bp, Unknown
  Bacterial polypeptide expressing nucleotide sequence isolated from the Sargasso Sea
tttaggaatagttacaaatagagatataagatttgctgagaacgataacatatcagttagaactgtcatgacaaaaagaaatttagctattgtgggggagccatttagtgttgtggaagcgcgcaaacttatgaaggcaaggcgcatagagaaattacttgtggtcaaccaaagtaacgagctattaggattaataactttgaaagatctcgagcaatctgtcttaaacccaaatgcttcaaaggatgagcttggaagattaagagtggcagctgcttcgacagtaggagctgttggtttagaacgctctttgtcacttatagatgcaggggctgatttgattgtaatagatacagcacatggtcattcagacgctgtattacgagctgtagatgacattaaaaagcgctcgtcgcaagtgcaggtgttggccggcaatgtagcgactgcaagcgcaactcaagccctaatagataaaggtgccgactcgattaaggttggaattggtcctggatcgatttgtactactagaatagtagctggtgttggtgtccctcagttaaccgccataatggattgcgtagaaatagcgtcaaaatataatattccggtaatagcagatggaggtataaaatattcgggtgattttgcaaaatcgatagcggctggtgctgcctgcgccatgatagggtctatgctggccggcactgatgaagcgcccggagaaacaatatattatcagggtcgcagttataagtcatataggggtatgggttctgaaggagcaatggccaggggttcg

SEQ ID NO: 204951 - DNA, 668 bp, Unknown
  Bacterial polypeptide expressing nucleotide sequence isolated from the Sargasso Sea
catgaaagtccgagaagctattacctttgatgatgtattacttgagccttcagaatctgccgtcttaccttctgaaacgattttaaaaacaaaaattacaaaaaatattgatcttaatgttcctcttgcttcagcagcaatggatacagtaacagaatcaagtatggcaattgctatggcgcaagctggaggaattggtgtaatacatagaaacttagaaattgaacagcaaattaaagaggtaaataaagtaaaaaaatatgaatccggaatggtggttaatccacttactatttctccagactctacacttgaagatgctttagctctaatgaaagaaaataatatttcaggagtgcctgtaacagacacaaaaacgaataaacttgaaggaattttgacaaatagagatgttagatttgcctctaataaaaatcaaaaagtttctgaacttatgactaagaatggtttaattactgttaaagataatgtttctgaaaatgaagcaaaagaaatacttcataaacaccgaatagagaaattgcttgttgttgataacgaatatcgttgtattggcttaatcactgtaaaagatattgagaaatctaatttacatcccgatgctacaaaagatgaaaagggtaggttgagggttgcagcagcaacga

SEQ ID NO: 204952 - DNA, 934 bp, Unknown
  Bacterial polypeptide expressing nucleotide sequence isolated from the Sargasso Sea
cgcatgacgatggaaaagctaattacggttcccaaaggaacaactttagaccaagcaaaagatgaattgcaaaaacatagaattgaaaaattattagttgttaatgatgatgatagccttgcgggtttaattactgtaaaagatatacaaaaaaaagaagattacccaaatgcatgcaaagattcaaatggaaggttaagagttggagctgcaattgggaatagttctgatgccattgaaagagccaaagctttaagaggtgttaatgttgacgtaattatcattgatacagctcatggacactcttcaggagtattaaatttagtaaaaaatattaaaaaagaaataaatgaagttcagcttatagcaggcaatgtagcaacttcagaaggtgtaaaagcgctaattgaagctggtgttgattgtgttaaagttgggattggtgcaggagcgagctgtaccacaagagttgttgctggagtgggtatgccacaattaacaagcataatgaatgcagtagacgaagcaaaaaagcacgagattcccatcatagctgatggaggaataagattcagtggtgatttagcaaaagctatagccgctggttcagatgttgtaatgcttggaagtatattagctggcatggatgagagtccaggtgaattaattttatttgagggtcgtcaatataaatcatatcgcggtatggggtctttaggtgctatgcaagatggcagcggtgatagatattttcaagaaggagaagaggctaaaaagttagtaccagaaggcatcgaagggatggttccttatcgtggatcagtaaaaaataccatacatcaattgatgggagggttaaaggcttctatgggatattgcggatctggaagtattttagagtttcataacaaatcagaatttatacaaactacaa

SEQ ID NO: 204953 - DNA, 604 bp, Unknown
  Bacterial polypeptide expressing nucleotide sequence isolated from the Sargasso Sea
tatggaagcaataaaagaagcactaacttttgatgatgtattgttgctgccgcgtttttcaaatattttaccatcagaaactgacatctctttaaatttaactaagaatataaaattaaaaacacccttcttgtcttctgctatggacacagttacagagtcatcaatggctattgcgatggcaaaatcgggtggaataggaattatacatagaaatttagatataaaaaaacaaagtaaagaagttgaaaaagttaaaagaaaaaaattatttgttggagctgctattggaacaaatgcagatgatttcaaaagagccaaattgctagtagatagtggtgtggatttaattgtaattgatacggctcatggtcatagtgaaaaagttttaaaaactttatctaaagttaaaaaaaataataaaatacctatttgtgtaggtaatattgctacggcagaggcagcaaaaagattatataattctggagctgaagtaattaaggttggtatcgggccaggatctatttgtactacccgaatggtagctgggataggagttccccagatatcggcaataatggaagttcacgatgccttgaaagga

SEQ ID NO: 204954 - DNA, 776 bp, Unknown
  Bacterial polypeptide expressing nucleotide sequence isolated from the Sargasso Sea
aagagcggcacagcttgcaagcgtggatgttgatgtgatagtaattgacactgcacatggtcattcgagaggcgttttagactcaatagataaaattaaaaattcgcatcctgatatatccttaatagctggtaatgttgctactggggatggaacgcaggcaatgatagatgcaggtgtggattgtgtgaaagttggtattggtgcaggagctagctgcacaacaagagttattgctggagtgggagtgccacaattaaccgccataatggattctgttgatgttgcccgaaaaaataatattcccgtaattgcagatgggggacttcgctatagtggagatcttgccaaagcaattgccgcaggagcagaatctgttatgttaggtagtttattggcgggtatggatgaaagtcctggtgaaacgatcttgtatgaaggccgtcaatataaatcatacagaggaatggggtcaatgggagctatggagaaaggaagtggagaccgatatttccaggaaggtgcagaagcaacaaaattggttccagaagggatagaaggtatggttccatacagaggaccagtacgcaatacaatacatcaattgattggtggtataagatcttccatgggatattgtggatgtagtagcatagaagaatttggactcaattcaaacctgattcaggttacctcagcagcgcttaaggaaaaccatcctcacgaggtaagaattgtaaaagaagcacctaattatcaggtgtcagaagggtgaa

SEQ ID NO: 204955 - DNA, 880 bp, Unknown
  Bacterial polypeptide expressing nucleotide sequence isolated from the Sargasso Sea
aactcgtttaactaatgatattgaattaaatatacccattttaagtgctgcaatggatacggtaactgagagcgaaatggcgatagcactagcgaggactgggggtattggtgtcatacataaaaacttatctattgatgaccaggccagtatggtagacagggtaaaaagatcagaaagtggcatgatattaaaccctataaaagttgattttggttcgactataaaaaatgcaaaaaaaattatgcaagagtacaagatcagtggacttccagtagtcaaagatgatcgtcttgttggcataatcactaaccgagatattcgttttgaaaccaatgatatgttgatggtttctgataggatgacctctgagaatcttgtaactgtgcccattggaacttcacttgaaaaagcaaaagacatactacaagaacatcgtattgaaaaattactcgttgtcgacggggatcataatttaacaggtttgattactgtaaaagatattcaaaaaaatgaagactatccaaatgcttgtaaagattctaatggcagacttcgtgctgcagccgcaattggtgtctcaggtgatgcttttgagagagcaaatgaattggcaagagttgacattgatgcaataataattgatacagcacatggtcattctaaaggcgttttggataccatttcaaagattaaaagtgataacaaacaaatttcagtaatagcaggtaatgttgccaccggtgaaggagcaaaggcgttaatcaaagctggagtagattgtgtgaaagtaggtatcggcgcaggtgcaagttgtactactcgtgttattgcaggagtaggagttccccaaattaaccgcaaattatggatgctgttg

SEQ ID NO: 204956 - DNA, 724 bp, Unknown
  Bacterial polypeptide expressing nucleotide sequence isolated from the Sargasso Sea
aatttaattgttgttgatacagcgcatggtcatacaaaaaaagtagcagatataattaaaaaaataaaaaagattaaacaaaaaaaaactgctttatgtgcaggaaatattgcaacaccagaagctgcaaggtttttaattaaattaggtgtggatattataaaagttggaataggaccaggatcaatatgtacaactaggttagtagcaggaataggagttccacagctaactgcaattttaaatgtaaaaaaaggattaggtaaaagaaaagtatcaattattgcagatggtggtattaaattttcaggtgatatcgcaaaagcgctatctgctggtgctgatgcagtgatgattggctctttattagcaggaactgatgaagcgccaggaaaaataatcaaaaaagatggaaaattatttaaaagctttagaggcatgggatctataggagcaatgaacaaaggatccgcagatagatattttcaaaaaaaacaaagtgatagctcaaaatatgttcctgaaggggtagaaggccttattaagtataaaggaacagtttcaaaaatagtttataaattagttggaggattaagatcttccatgggctatcttggttgtaaacaaattaagaatcttaaaaataaacctaaattcgttaaaattactaaagcaggattttacgaaagtatggtacataatattgataaagtaattagataaa

SEQ ID NO: 204957 - DNA, 633 bp, Unknown
  Bacterial polypeptide expressing nucleotide sequence isolated from the Sargasso Sea
gcgatagttaatgagcctgttagtaataaaaaggcacgatctattttatcagaacgtcgaatagaaaagcttttaatagtcaataaacagaatgaattaattgggttgatgactgttaaagatcttgaaaattcggttttaaatccgcttgcaacaaaagactctctgggaagacttcgggttggagccgcatcaacagtgggtcagaaaggactacagcgatcaacggccttggttgaagctggagcagacttgattgttattgacactgcacacgggcattcgtcgcacgtattgaaagcggtagaagaatttaaaaccaaatttccagatgttagtattatagcgggaaatgttgcaacttcggaagcaacagcggcactttttaaagtaggagctgatgcagtaaaggtaggtataggtcctggctcaatctgtactactagaatagtagcgggggtaggagttccccaatttacagctcttctggactgtgctgaggaagctgataagcacgataaggtaataattgctgatggtggaataaagtattctggtgattttgctaaggctatagctgcgggcgcatcatgtgtaatggtggggtcactgttagcgggaacggatgaagcg

SEQ ID NO: 204958 - DNA, 766 bp, Unknown
  Bacterial polypeptide expressing nucleotide sequence isolated from the Sargasso Sea
taaaatattgccaaatgagacagttctcaaaacaagattgacaaatagcatagaattaaatattcctattttaagtgcagcaatggatacagtaactgaagaggaaatggcaatagctatggcgagagagggtgggataggtgtgattcacaagaactgtgatatagaatcacaaaaatcaatggtagataaagtaaaacgatcagaaagcggaatgatattaaagccggtgacaattagaccagaacgtagtattaatgaagccaaaaaaataatgtcagaatttagaattagtggactgccggttgtggatgatgaaaaattagttggaataataacaaatagagacattcggtttcaagttgatggggagctagaagtttctgcgtgtatgacagcaaatgatctagttacagtgccattagatacatctctcaatgatgctgaggagcttcttcataaacacaggatagaaaagcttctagtggtagatgactctggtatgctagctggattaattacggtaaaagatataaagaaaaaacagcagtatccaaatgcgtgtaaggactcaaatggtagactaagagtatcagctgcaataggtgtgtctggcgacacatatgaaagagcgcaagagctggtaaaagcagacgttgatattatcgttgtagatacagcacatgggcactctaaaggtgtgttagataccatttctaaattgaaagcgcaaaattctagtttatcaataatagcaggcaatgta

SEQ ID NO: 204959 - DNA, 610 bp, Unknown
  Bacterial polypeptide expressing nucleotide sequence isolated from the Sargasso Sea
tactgcagacgcagctaagtttttaattaaattaggagtagatgtaataaaggttggtattggtccaggttcaatttgtactacaagattagttgccggtattggggtaccgcaacttagtgcaattttaaatgtaagaaacgggatcaaaaataagaaagtaagtatcatagctgatggtggaataaaattttctggagatatagcaaaagctcttgcagcaggcgcagatgcggtaatgataggctcattatttgctggaacagatgaggcgccaggaaaagtaacaaaaagaggcggtaaatggtttaaaagctttagaggcatgggatctattggtgccatgaatagaggttcggcggatagatactatcaatcaaaacaaaaggataaatcaaagtatgttccagaaggagttgagggatttgtaaaatataaaggtaaagtagataaaatattttatcaattgataggtggattaaaatcttcaatgggataccttggggcaaaaaaaataaaaattttaagtcaaaatccaaaatttgttaaaattacaaaagcaggattttatgaaagtatggtacataacattgatgaaattaaaaaataa

SEQ ID NO: 204960 - DNA, 874 bp, Unknown
  Bacterial polypeptide expressing nucleotide sequence isolated from the Sargasso Sea
ggaggaattggagttattcatagaaacttatcagcagacgcacaagttagtgaaattaagaaagttaaaaaggcaaaatttttagtaggtgctgctataggcgtaaataacaatgacttagatagagcaaaaaaacttatagaagcaaacgttgatatgattgtaatagatacagctcacggacatacacaaaaagtttcaaaaatgatttataaggttaaaaaaattataaaaaaaattccactttgcgcaggtaatattgctactgggaaggctgctaaatttttggcgagttgcggggttgatatagtaaaagttggaattggaccaggatcaatttgtactacaagactggttgctggagtcggtgtaccacagttgagcgcaatattagatgtaaaaaaagctttaggaaaaagtaaaactaaaattatttcagatggaggaattaaattttcaggtgatttagcaaaagctatagctgctggggctgatgctgtaatgattggatcacttttttcaggaacaacagaaagtcctggaaaaattttaaagcgtaaaggaaaattatataaaacttttagaggtatgggctctgctggtgctatgtcggtcggctcagcagacaggtattatcaaaaaaaattcaaagacatttctaaatttgttccagaaggtgtagagggaattgtaaaattcaaaggcccagttaataaaattatttataatttaactggtggattgagatcttcgatgggatatttaggagccaagacaattaatgatttacaaaaaagaggagagttcgtgaaaattagtaaagctggtttttatgaaagtatggttcacaatgtggaccaagtcataaaataaa

SEQ ID NO: 204961 - DNA, 784 bp, Unknown
  Bacterial polypeptide expressing nucleotide sequence isolated from the Sargasso Sea
gaaagatagattagttacagctaaagaaggtgagagtccagatgttattaaaaagttactccaagaaaatagaattgaaaaaatcctccttatagacgattcctttaaattaactggactggttacccttaaagatatcaataagtctctggactttccagatgcagctcgtgatgaagaaggaagacttttggctggtgctgctataggaacaaaggcagatactttagatagatgtcaggccttaattgatgcaggagtcgatgtgctggtagcagatagtgctcatggacactctgaaggggtcttaaatcaaatcaaggcagtaaaatccaattttaaagatatacaaataattggcggaaatgttgctacaggagaaggggctttagctttagtgaaagcaggagcagatgctgtaaaagtaggtattggcccaggatcaatttgtacaacaagaattgttacaggtgtgggagttccacaaattacagctgtggctgaagttactgaagctttaaaaaagaaagatataccagtcattgcagatggtggaataagattttcaggagatatagccaaggctatagctgccggaggacatacagtcatgttaggaagtgttcttgcaggaacagaagaagcaccaggagaattagagctgtttcaaggtaggagttataaatcatatagaggtatggggtctataggagctatgtctggtgatcaaggttcttccgatcgttattttcaagatagtgctgaggctaccgaaaaattagta

SEQ ID NO: 204962 - DNA, 613 bp, Unknown
  Bacterial polypeptide expressing nucleotide sequence isolated from the Sargasso Sea
aaaagattatataactcaggggcagatataatcaaagttggtatcggaccaggatctatttgcaccacaagaatggtagcaggcattggtgtgccgcaaatatcagcaattatggatgtcaaaaaggcactaaataaaaaaaaaattaaaatcatttctgatggtggaatcaaattttctggagatattgcaaaggcattagctgctggggcagacgccattatgatgggatctatatttgcaggaacagaggaaagtccaggaaataaatttaaatttaagaaaaagatttacaaacaatatcgaggcatgggttcaataggcgcaatgtcagctggatcagcaaatagatattttcaaaaaaactttaaagataaatctaaatttgtacccgaaggggttgagggaagagtagaatacaaaggaaaagtatcaaaaataatatatcaactacaaggtggattgagatcatcaatgggatatattggtgcaaaaaatttaaaagaaataaataaaaaagcaaaatttgttaaaataactaaggcaggattctacgaaagtatggttcacagcgtggaaatgacacaaaaaactattaactttaaattgtaat

SEQ ID NO: 204963 - DNA, 803 bp, Unknown
  Bacterial polypeptide expressing nucleotide sequence isolated from the Sargasso Sea
tgcgctggcgatgatgaaaggccataatatcagcggcgttccagtggtcgagggtgtgggtgttggcccgcacagacttgttggtattttgaccaaccgggacgtgcgttttgccagtgacatggatcagaatgtaggtgatctgatgacgcgcgaggttgtcaccgtatgcaacggtgcaacgcaggatgacgccaagagattgctgcatgaaaaccgaattgaaaagctggtcgtagtcgatgccaaggggcgctgtaccggtctgatcaccgtcaaagatatggaaaaggcaaaaaaccatccgatggcctcaaaggatggagctggccgattgcttgtcgcggccgcgacaggttctggcagtgatgggcaagcccgtgctgaggcattgatcgacgctggcgtcgacgtcatcatcgtcgataccgcgcatggccattccgaaggtgttctcaatgccgtatccgctgttcgcaaaatggccaatgcggtgcaggttattggaggcaatgttgccacagccgatggtgcgaaggcgctcatcgatgcgggggccgatgccgttaaggtcgggattggtccggggtcgatttgtacgacacggatggtggctggtgtcggcgtgccacaattgacagcaattatggacgtagcggaagtatgccgtcgcgagggcgtcccggtcattgctgatggcgggatcaaatattcaggtgatcttgcaaaagcaatcgctgcaggaggtgatgtcgcaatgattggatcactgttggctggaaccgatgaaactctcgggtgag

SEQ ID NO: 204964 - DNA, 851 bp, Unknown
  Bacterial polypeptide expressing nucleotide sequence isolated from the Sargasso Sea
catggatcctattaaagaagctcttacatatgacgatgttttgctcacaccaaaatactcagaaattcttccatcagaaactataacagaaacaaaattatcaaataatttaaatcttaaaatacccataatctcctctgcaatggatactgtaaccgagtcaagtatggccattgaaattgcaaagttaggaggaataggagttattcatagaaatttgaatataaaaaaacaaatattagaaattagaaaagttaaatcaaaaaatttgaaagttggtgctgcagtaggagcaggtccatttgaaattataagggcagaggcactacttaatgaaaaaattgatttaattgttgttgatacagcacacggtcatacaaaaaaggtagctgaaataataaaaaaaattaaaatattaaaatcaaaaaaaactactctatgtgcaggaaatattgcaacagcagaatctgctaaatttttagctaaattaggtgttgatgcaattaaagttggcatcggtccaggttcaatttgtacaactagacttgtagctggaattggagttccgcaattgagtgcaattatagatgtaagacgaggcttaggtaaaaaaaatattaaacttattgccgatggtggaattaaattttcaggcgatatatcaaaagcattagctgcaggagctgatgctgtaatgatcggatcattatttgctggatcaagtgagtcacctggaaaaaaaataaaaaaaaatggcaaatactttaaaagttttagagggatgggttcaataggcgcaatgaacaaaggttctgcagatagatatttttcaaaaaaacaaaaagatattt

SEQ ID NO: 204965 - DNA, 793 bp, Unknown
  Bacterial polypeptide expressing nucleotide sequence isolated from the Sargasso Sea
aatattcagagattctaccttcgcaagttgatacaaaaatacaatatcaaaaaatataacttaaaaataccgttattatcttcggctatggatactgttacagagtctaaaatggcaatatctattgccagagcaggaggagtcgggattatacatagaaatttaaatataaaaaaacaaattaaagaaattaaaaaagtaaaatcaaaaaacttaattgtaggtgcggctgttggagctggtatagatgaaattaaaagggcagaagcaattttgaaagaaggtgtagacttgattgtagttgatactgcgcatggacacactaaaaaggtcgcagaaataatcaaaaaaataaaacgaaaaaaaaataataatacagcaatttgtgcagggaatattgcaacttcagatgcagcaaagtttttaataagactaggtgtagatattataaaagtaggaataggaccaggctccatatgcaccacaagactagtagctgggattggagttcctcaactaagcgcaattataaatgtaaaaagtggtgtaaaaaacaaaaatgtcaaaattatttctgatggcggaattaaattttcaggagatatagcgaaggccttagcagcgggagcggatgccgttatgataggttctttgtttgcaggcacaatcgagtcgcccggaaagttaattaaaaagaaaggaacattttataaaaaatttagaggaatgggttcagttggcgctatgaacaaaggttctgctgatagatattttcaaaaaaaacaaaaagata

SEQ ID NO: 204966 - DNA, 778 bp, Unknown
  Bacterial polypeptide expressing nucleotide sequence isolated from the Sargasso Sea
tttgaaagttaaaaaaaaggactatattgttggtgcagcaataggtacctcgaatgaggatttgaagagagcaaaaatgttaatagataacggagttgatttgctagttatcgataccgcacacggacacacacaaagagttattaacacacttaaaaaattaagaattaagaattataaagttccaatttgtgttggaaatattgcgactggagaagcagctataaaactttataatgaaggagcagatattttgaaagtagggatagggccaggttctatttgcacaacaagaatggtagctggaataggtgttccacaattaagtgcggtattagaagtgaaaaagagtgttaaaaataaaaaaattaaaattatctctgatggtggaattaaattttctggtgatataattaaagcattagcagctggagcagatgcgattatgatgggttcaatttttgctggtgcggatgaaagtccaggaaaaaaatttaaatataaaaataaatattttaaacattatagaggtatgggttcaattggagcaatgtcgtcaggatcttcacagaggtattttcaaaaaaattttaaagataaatctaaatttattgccgaaggtgtagagggtagagttgagtacaaaggctatgtaaaagatataatttatcaattacaaggtggtttaagatcttccatgggatacataggtgctaaaaaaataagtgaaatttcaaaaaaagccaaatttattaaaataacgaaagccaggttttac

SEQ ID NO: 204967 - DNA, 649 bp, Unknown
  Bacterial polypeptide expressing nucleotide sequence isolated from the Sargasso Sea
tatttgtactggaaatattgcaactggtgaagcggcgaaaagattatttaatgctggaacagatatcattaaagttggaattggtcctggctctatttgcactactagaatggttgctggaattggagtaccacaaattactgcgatcatggatgtttccaaagctcttaaaggaaaaaaaattaagataatttcggatggtggtattaaattttcgggagatatcgcaaaagcattagcagcaggtgcagacgctataatgatgggatcaatttttgctggcactgatgaaagccctggaaaaaaatacaaaattaagaacaaattttataaaaaatatagaggaatgggatctattggagctatgtcagctggttcttcagatagatattttcaaaaaaatttcaaagatagatcaaaatttgttcctgagggagtagacggtagggtcgtgtacaaaggcaaagtttctaaaataatatatcaactaaaaggaggtttgagatcttcaatgggatatattggagcaaaaaatataaaagatatcaaaaaaaatgctaaatttataaaaattactaaagcaggtttctatgaaagtatggtacatagcgtagaaatgattgagccaacattaaactataagttatga

SEQ ID NO: 204968 - DNA, 749 bp, Unknown
  Bacterial polypeptide expressing nucleotide sequence isolated from the Sargasso Sea
aatgcatatacgtgacgctctgacatttgatgacgttcttttggaaccgtcaagctcgtcggtaattccttcgtctgtgaccacctcaactcggcttacaaaagaaattactcttggtatacctttactgtctgctgcgatggacacagttacagaaagccgtctggcaatagctatggcacagctgggagggctaggtgttattcataagaatatggatattgaaaaacaggcagcggaagtaaaagcagtcaaaaagttcgaagcgggtatggtcgtgaatcccgttactatctttcctgatgaaacattggctgacgccctagaattaatgtcccaccacaaaataagcgggattccagtagtgagacgcaagtcaggtaaattggctggaattttgacaaatcgggatgtaagatttgccacaaacaaactccaacctgtcagtgaattgatgacaaaaaaggttataactgttgccgaaggagttacaccttcggacgctcaacggttacttcacctgcatcgtatcgaaaaattagttgtgactgacagcgaacaaaagtgcgttggtttaataacagtcaaagatatggaaaaggctgataaccatcccgacgcttgtaaagatagtcagggccggctgagatctgcagcagccactggtgtcggtgatgagggagttgaacgtgcccgcgcactttttgatgccgaggttgatgtaatcgtggtggatacggctcatgggc

SEQ ID NO: 204969 - DNA, 601 bp, Unknown
  Bacterial polypeptide expressing nucleotide sequence isolated from the Sargasso Sea
gggcgccgatggcgtgaaagtcggcattggaccaggctccatttgcactacgcgggtggtcgcaggagtgggtgtgcctcaaatcacagcaatctcagataccgccgcggcacttagagagtttgcgattcctgtgatagccgatggaggaattcgtttttccggggacatcgccaaggccattgcggcaggagccaacgcggtaatggttgggggactgctcgcgggaaccgaggaggcgccgggcgagatcgagctctttcagggcagatcctataagagctatcgaggcatgggttcgcttggtgcaatgcaagaaggttctaaggatcggtactttcaagaagggcagagtgatcctggaaaactcgtcccagagggtattgagggacgggttccatttaagggaccgatgtcgcagattattcatcaactgaccggcgggctcagggccagtatggggtatacggggtgcgccacgattgctgaaatgagatcacactgccggtttgtccagatcacacattccgggtacacagaaagtcacgttcacgacgtgactgttgtgaaagaagcgccaaactatcaacggggcagttga

SEQ ID NO: 204970 - DNA, 910 bp, Unknown
  Bacterial polypeptide expressing nucleotide sequence isolated from the Sargasso Sea
ctccttagccattgcattggcacaagaaggtgggatcgggtttattcataaaaacatgaagcctgaagagcaagcaaaacacgttcttgaagttaaaaagtatgagagcggtgtagtatccgaccctgttacagtaactaaagacgcgactattggcgacgttattgctttatcgaaaagcaaaggttactcaggtttccctgttaccgatgaagaaaataacctcattggtattgtgacaggccgcgaccttcgatttgaaaagcgattagagctgcctattagtaacgtcatgacaggtaaagacgaccttgtcacggtaaaagaaggcgctagttctgacgtggttcttgatttgatgcatgagcatcgcatcgaaaaaattcttgttgtggacgacgcatttaaacttaccggccttattacggtaaaagattttcaaaaagcagaaaacaaaccgaatgcctgtaaagactcactaggtagattgcgtgttggtgcggctgttagtgttggcccaggtactgacgaacgcattaaactattagtagatgcgggtgttgacgtgctgttaattgatacttcacatggtcactcccaaggcgttatcgaccgcgtgaagaaagtacgccaagattaccctgacgtacaaattatcgcgggtaacgtagccactcgtgaaggtgcaaaagcactagcggatgcaggcgtagacgcagtgaaagtaggtataggcccgggttcaatctgtacaactcgtattgtaaccggttgtggtatgccgcagattactgccgttgccgatgcggtagaagcccttgaagggactggtattccagtgatcgctgatggcggtatttcgttctcaggtgatatcgccaaagcattagcagctggtgcaagctgcgtg

SEQ ID NO: 204971 - DNA, 631 bp, Unknown
  Bacterial polypeptide expressing nucleotide sequence isolated from the Sargasso Sea
ttatgcgcaggaaatattgcaaccacaaaagctgctaaatttctaattaaattgggggttgatattataaaagtaggaattggtcctggctctatatgcactacaagattagtagctggaattggagttccgcaactcagcgctatcttaaatgtaaaaaagggtttaggtaaaaataaaacaataattatagcagatggaggaattaaattttcaggagacattgcaaaagctctttcagcgggagcagatgcagtaatgattggatcattattcgcaggtacagatgaagcacctggtaaaattattaaaaaagatggagcatttttcaaaagcttcagagggatgggttccattggtgcaatgaataaaggttctgctgatagatattttcaaaaaaaacaaagtgatagttcaaaatatgttccagaaggagtggagggatttataaaatacaaaggaccagtttctaaaatagtttataaactagttggaggtttaagatcatccatgggttaccttggttgtaaacaaataaaaaatcttaaaaataaacccgaatttgttaaaattactaaggctggattctatgaaagtatggtacataatattgataaagtgattaggtaaa

SEQ ID NO: 204972 - DNA, 857 bp, Unknown
  Bacterial polypeptide expressing nucleotide sequence isolated from the Sargasso Sea
gccgagcgtaagcctaatgcctgtaaagacgaattaggtcgtttacgtgtgggcgccgccgtgggtgcgggtgccggtaacgaagagcgtgtcgatgcgctggtgaaagctggtgttgacgtgctgctgattgactcttcccacggccactctgaaggcgtgttgcaacgtatccgtgaaacccgcgcaaaatacccagatttacaaatcatcggtggtaacgtggcaacagctgaaggcgcattagccctagttgaagctggtgttaacgcggttaaagtcggtattggccctggttctatctgtaccactcgtatcgtgacgggtgtgggcgtgccacaaattaccgcagtgtctgatgctgccgaagccgtaaaaggtttagggatcccagttattgccgacggcggtgtacgtttctccggtgacttagccaaagccttagccgcaggagcatcgtgcatcatggcgggttcaatgttcgcgggtactgacgaagcgccgggcgaaactgaactctaccaaggccgtgcctataagtcataccgcggtatgggttctttaggcgccatgtctcaaggttcttctgaccgttatttccaatctgacaatgctgccgacaagctggtgccagaaggcatcgaaggccgtgtaccttacaaaggcaagctcaaggaaatcatccatcaacatatgggcggtctgcgttcatgcatgggcctaacgggctgtgccacgatccaagaactgaacgaaaaagcgcaatttgtgaaagtgacgtctgctggcatgggcgagtcccacgttcacgatgtgactatcactaaagaagcgccaaactaccgttcaggtgcgta

SEQ ID NO: 204973 - DNA, 795 bp, Unknown
  Bacterial polypeptide expressing nucleotide sequence isolated from the Sargasso Sea
gttagtgaacaagcggagcaggtatcattagttaaaaggtttgaaagtgggatagtttataaaccgatagcactcaaacctcatgaaactgtagagaaggcaaaagaactaggtcgtaaatataatgtaactggctttccggtagttgacgacctacaaaaagtcttaggtatagtaactaatagagatatacgttttgtcgaaaatataaaaactcctgtgagggagattatgaccacaaaagatcttgctattgtaatgcagccaataaatacaaaagatgcaaaaaaaataatggctcagaggagaattgagaagctacttgttatagataaggatcgaaagttgtctggcctgctgacaatcagagatattgagcaatctgtactcaatccacatgcctgtaaagactctttaggtagattacgctgtgcggctgcatcaactgtgggagatgagggtttcattagatctatggccttaattgaagcagaggcagatattttggtaatcgatactgctcatggtcattcccaggacgtaattgaagctgtaaaacgaataaaaagggactttatggattttcctgttgtagctgggaatgttgcaaccaaagaagctactaaagctttgatcgatgctggagcagacggaattaaggttggaatcggtccaggctctatttgcaccactcgaataatagctggggtaggagtgcctcagctaacagcaatcatcaattgtgtagaggaggcgaataaacatgacataccaatcatcgcagatggtggtatt

SEQ ID NO: 204974 - DNA, 700 bp, Unknown
  Bacterial polypeptide expressing nucleotide sequence isolated from the Sargasso Sea
gaccgcgtgcgttgggtcaagcagaacttccctgaagtgcaggtgatcggcggcaacatcgccaccggcgctgccgccaaggccctggccgaagctggcgccgacgcagtcaaggtcggtatcggcccaggctccatctgcaccacgcgtatcgtcgccggtgtgggcgtgccgcagatcagcgccatcgccaacgtcgccgctgcccttgaaggcactggcgtacccttgatcgccgacggtggcatccgtttctccggtgacctgtccaaggccatcgtagccggtgcctcctgcgtgatgatgggctcgatgttcgccggtaccgaagaagcaccgggcgagatcgaactgttccagggccgttcgtacaaggcttaccgtggcatgggttcgctgggcgccatgtcccaggcgcaaggctcttccgaccgttatttccaggactcttcggcaggcgccgagaagctcgtaccggaaggcatcgaaggccgtgtgccgtacaaaggcaccctgagcgcgatcatccatcaactgatgggcggcctgcgttcctcgatgggctacaccggcagcgccaacatcgaagaaatgcgcaccaagccagagttcgtacggatcaccggcgccggcatggctgaatcccatgtccacgacgtgcagatcaccaaggaagcgccaaactaccgtgtaggttgag

SEQ ID NO: 204975 - DNA, 784 bp, Unknown
  Bacterial polypeptide expressing nucleotide sequence isolated from the Sargasso Sea
tttgagagggcagaagctttgattgacgcggatgtagatgcaattgtgatagatactgcgcatggtcattcagagggagtgattaatgcggtaaagaatattagagcaaaatatcctgatatagaaatcatagcaggcaatatagctacttctcaagcggctgcagatcttattaaggcaggggttgatgctgttaaggttggtattggtcctggttctatatgtactacccggattattgctggtgtcggggtgcctcagttaacagcaattatggatgtagcaaaagtttgcagggatgcagctgtgccattgatagcagatggaggtattagattttctggtgatgtagcaaaagcaattgcagcaggtgcggattctattatgattggggggttgtttgcaggaactgatgaggctcctggtgaaaagattctatttcaaggacgatcatataaggtctatagaggcatgggatcattgggggcaatgaccaagggatcagctgatagatactctcaaggaaaagtgtctgatcaatcaaaatttgttccagagggtgtggaaggtagggttccctttaaaggcgaattatcagatgtcatataccagcttatagggggcttgcgttctgcaatgggttattgcggcaataaagatattattagaatgcaagaaaattgtgagtttattactattacatcagctagtatgagagaaagcttgccgcatgatattattatcactaaggcagcgccaaactatgatggaggggtaaattaat

SEQ ID NO: 204976 - DNA, 981 bp, Unknown
  Bacterial polypeptide expressing nucleotide sequence isolated from the Sargasso Sea
ttaacttttgatgatgtactccttgtgcctcaggcttcaaaaattctgccatccgatgctgtcaccacgacatgtgtaacaaattcgatatctttaaatattcctttattatcatctgcaatggacaccgtgacggaacagaacatggctatcgcaatggctcaagctggtggaatgggcgtaattcataggaatttatcgattcaaaagcaagcgtctctggtggcaaatgtcaaacgctttgaaagtggtctagtgcatgacccaataattttaaaacgaggacaaactttagaggatgcgcgagccttacaacaaaaatttaaaattactggttttcctgttgttgatcaacaaaagaaattagttgggattgttaccaatagagatatgcgatttgcaaaagataagaagactccggtagaaaagatgatgactgcgtcaaatttagcagttttgtctgaaccttttgacatgcttgaagcaagaaatttaatggaggttaggcgtatagaaaaagttttagttattaatgaccaaggaaaattaacaggtttggtaacacttaaggatttagagcaggccgttttaaatccgagtgcttgcaaggactcgttgggacgcttgcgtgtagctgcggcttcaaccgtaggctctgccggctttgaaaggtctacagctttaattgactcaggagtcgatctaattgttgtagatactgcccatggtcactcaaattcagttttaaaagctgtaagtgagattaaaaaagtatccacaaaaacgcaagtactagccggaaatgttgctacaggggatgcaaccaaagctctgatcgatgccggagcagatgcaattaaagttggcattggtcctggttctatttgcactactagaatcgtagccggggtcggggtcccacaattaacagctataatgaattgcgttgaggcagccgcaaaaacaggtcatccagtggta

SEQ ID NO: 204977 - DNA, 817 bp, Unknown
  Bacterial polypeptide expressing nucleotide sequence isolated from the Sargasso Sea
aaaaaagttaaaagacagaaacttttcgtcggtgcagcaattggtgttaataatagtgatttagagagagcaaaagaattaagcaaagcaaatgttgatcttatcgtaatagacactgctcacggtcatacaaataaagtattaaaaattataaaaaaaataaaaaaaacaataaaaaagattcctctttgtgcaggaaatattgcaactggcaaagccgcaaaatttcttgcagactccggtgttgacattgttaaagtaggaataggaccaggatctatatgtactactagacttgtagcgggtgttggggttcctcaactaagtgccgtaatagaagttaaaaacgctttaagaaatcgtaaaattaaaataatttctgatggaggtattaaattttctggtgaccttgccaaagctattgcggccggtgcagatgcagtaatgataggttcccttttttcaggaacatcggaaagtccaggcaaaatatttaaacgtagtggaaaattttataaaaattttagaggaatgggttcggccggtgccatggcagtcggttctgcagatagatattatcaaaaaaaattcaaagatctctcaaagtttgttccagaaggtgttgaaggaattgtaaaatttaagggaccagtaaataaaataatatataatttggtcggaggactaagatcttcaatgggctatcttggggcaaaaacagttaaagatttacaaacgaaaggtgagttcgtaaaaattacaaaggcaggtttttatgaaagcatggttcataacgttgatgaaatagttaagtaaa

SEQ ID NO: 204978 - DNA, 790 bp, Unknown
  Bacterial polypeptide expressing nucleotide sequence isolated from the Sargasso Sea
aacaaaatggctattaatctagcactaaatggaggtctaggtgttattcaccgcaatatgccaattgataaacaagcaagcgaagttaaaaaagttcatggctttaaagttaacgctaaaaaatttcaaaatgctgtaattaattctaatggaaagattgcagtgggcgctgcaattggtgttgaaaataatgcgtacttacgactattagaattattaaaatttggtgttgatatagtctttattgatgttgctcatgcacatacgaaaacgactttacagtttattgaaaaagcaaaaaaagttttaaaaaaaacccctctaatagttggaaatattgctacaaaaaaagctgcatcagatttaattagtgttggtgtagatgcaattaaagtaggtattggaccaggttctatttgtactacaagagttgtaacaggtgttgggattcctcaactttcagctgtaatggaaacatttcaagtggccaaaaaatttaaaattccagtgattgcagatggaggaataaaaacctccggggatattgcaaaagctatagcaggtggtgcgagtgcttgcatgataggttctttatttgccggcactgaagaatcaccaggaaaattattaacgattaaaggtaaaaaatttaaatcttatagaggcatgggttctgttggagcaatgcaaaaaggatcttttgatcgatactcacaagaagaaacaaagaatgcaaaaaaattagtagcagaaggtgggaaggaatggttccatacaaaggtaaaatgaa

SEQ ID NO: 204979 - DNA, 583 bp, Unknown
  Bacterial polypeptide expressing nucleotide sequence isolated from the Sargasso Sea
gttggtattggtccaggatcaatatgtactacaagaataattgcaggtgttggtgtgcctcagcttacagcaattatggattgtgttgatgaggctaaaaagcaatcaataccggtcattgctgatggtggtattaagttttctggagatttggctaaagcaatagctgggggatctgatctcgcaatgattggctctctttttgctggaacagatgaaacgccaggagaagtatttcttcaccaaggtagaagatttaaatcctatagaggaatgggatcagttgcagctatggccgaaggctctgcagatagatatttccaatctgatctcagtgcatcagataaacttgttcctgaaggaatcgaagggcaggtcccttatattggatcagtacataatgtaatttatcaattaattggtggtttaagagcatcaatgggctacacaggttgtaaaaatatagaggatttccagactaaaactaactttattaaaattacagcagcatcactaaacgaaagtcatacgcatgatgtagttgtaactcgagaagcccctaattaccctacgagaggttaat

SEQ ID NO: 204980 - DNA, 598 bp, Unknown
  Bacterial polypeptide expressing nucleotide sequence isolated from the Sargasso Sea
gatgctgtaaaggttggaataggtcctggttcaatttgcactactagaatagtaacaggagttggtgtttctcaaataacagcaatagcgaatgcagtaaaagctctaaaaggaaagaatgtaccagtaattgcagatggcggtattaggttttcgggtgatgttgctaaggcaatagcaactggtgctcatactgtaatgttaggtagcgtattggcaggaactgaggaagctccgggagaagtggagctatttcaaggcagaagctataaatcttatagaggtatgggttcaataggggctatgagtggagaccaaggctcaggagataggtatttccaagaaagctctgaagccactgaaaaattagttcctgaaggtatcgaaggtcgagttccttataaaggttggatggaagcagttgtgcatcaaatgatgggaggccttagacaaagcatgggttatacaggttcaaaagatatagaaactatgagaacaaaacctaaatttattcaaattacacatgccggagttagcgagagtcatgttcatgatgttaatgttactaaggaagctcctaactacaggatgtcctaaa

SEQ ID NO: 204981 - DNA, 920 bp, Unknown
  Bacterial polypeptide expressing nucleotide sequence isolated from the Sargasso Sea
gaatctgctgtactcccggcggaagtcgatatctcctctagacttacagactcaatcagactcaacattcctctgatttcggcagcaatggataccgtcactgagagtgacatggcgattgccatggctcaggctggtgggattggagtaatccatcgaaacatgaccacagaggctcaggccgctgaggtataccgtgtcaagcgatttgagtctggtctagtactggaccctgtcactgtttcacctgacagttcaatcggcgagttgcgccgaatgaaatctcagaatggattctcaggcttcccagtagtggacgattcgggaattttagttggaataatcaccaatcgagatatcaggttcgtttccgacgattcggagaaagtctctacgatgatgaccacaggtgttgtcaccgtccccgaaggagtagaccccgaggaagccaagcgactcctccacaagcaccgtattgagaagttagtggtagtcgatgacgacggtgggtgcgcagggatgatgacagtgcgagatatccagcggagtcgcgacaatcctgactcctgtaaggacagacagggccgactaagggtcgcggctgccaccggaaccggcgacaagggagtcgagcgagcattagctctgtttgagtccggggcagatgccattgtggtggatacagcccatggacactcgcatggagttattgatactgtgaaggagattcgcagtctagcccctgacaaggcgcagattgtagctggcaacattgcaacaggcgcggctgctgacatgctgattgatgccggggctaatgcggtcaaagtcgggataggaccaggatcgatatgcaccactagaattgtctcgggtgttggagtcccacaactcacggcagtcctgggagtagtatccga

SEQ ID NO: 204982 - DNA, 818 bp, Unknown
  Bacterial polypeptide expressing nucleotide sequence isolated from the Sargasso Sea
aaggctgagagtaggtgccgctataggagttggagaaaaaggatttgaaagagcagaggcattaatagacgcaggagtagatttactggttgttgatactgcacacggacataattctcaagtcattgaaactattaaaaaactttcaaaatcttataataacgtaagtataatgggaggaaatgttgcaacatcagatgcaacaaaggcattgatagatgctggtgcaaattcagtaaagataggcataggaccaggttcaatttgtactacaagaatggttgcaggtgtagggttacctcaactttctgcaataatggaatgttctgaaattgcaaaaaaaaataatattcatgtgattgctgatggtggaataaaatattcaggagacatagctaaagctattgcatcaggagcaagtgcagttatggttggatctttgcttgcaggaacagatgaagccccaggggatgtctttttatatcagggcagatcatacaaatcttatagaggaatgggatctttaggagcaatggctagaggttctgcagataggtattttcaagaagaaatagagcagttaaaacttattcctgaaggtatagaaggtcaagttccgtacaaagggccattggaaaatgtattgcatcaattatctggtggtttgaaatctgcaatgggttatacaggtaactctaatattgagagtatgaaaaataaatgtaactttagaaaaattactaatgctggtttaaaggaaagccatgttcatgatgtaataattactcgtgaagctcctaattacagacggtcataaa

SEQ ID NO: 204983 - DNA, 760 bp, Unknown
  Bacterial polypeptide expressing nucleotide sequence isolated from the Sargasso Sea
cttgttgatgctggcgtagatgttcttgtcattgatactgcgtacggtcattcagaaaaagttatcagcaccttaaaagaaataaaatcaaaattctcaacagatgtaattgttggaaatgttgccacaaacgaagccaccgaagaacttattgatcaaggagctgattgtgtaaaagttggaataggtccgggatcaatatgtaccactagagtggtagctggaattggtgtaccccaattttcagcaattttagactgtgctgaaactgcagcaaaaaaaggagtgccaataattgcggatggtggaattaaatattctggtgatatagcaaaagccttaggcgcaggagcaagcggagttatgatcggttcactctttgctggaactgacgagtctccaggggaggtatatttattcaagggaagaagctataaatcatacagaggaatgggatcgcttggcgctatggccaggggatcagcagataggtattttcaagaagaaataactgagagcaataagcatgttcctgagggaatcgaaggaagagttccttacaaaggacctatatcgccaattatatatcagcttgttggaggcttaaaggcttctatgggatacactggttcaaaagatatagtagaatttaaaaagaatgttaagtttgtagaaattactggagcaggtcttaaagaaagtcatgtacatgatgtcgatatcacaagagagtcaccaaattatccgacaaacatataaa

SEQ ID NO: 204984 - DNA, 817 bp, Unknown
  Bacterial polypeptide expressing nucleotide sequence isolated from the Sargasso Sea
ttatctgcagcaatggacactgtaactgaacatagattagcgataactatggcccaattaggtggtataggagttttacataaaaacttctcaattaaagagcaggcatcagaggttaaaaaagttaaaaaatttgaagcaggaatggtagtgaatccagttacaataaagccagatcaatccctcggcgatgctttcaaactaatggaaaattttaaaataagtggtataccagtagttgaaggtcataaaaataaattagttggtattctaaccaatagagacgttagatttgccaatgatttaaatcaaacagtttctgcgcttatgactaaaaatgtaattactgttagagaaagtgttagtaaagaagaagctagaatacttttacataaacatcgtatcgaaaaattagtagttgttgatgaagatggattttgtgttggattaataactgttaaagatatggaaaaatcgcaaaatcacccagattcgtgtaaagatgaacaaggaaggttaagagtagcagccgcaactggagttgggaaagatggtattttaagagccgaggctttaattgaagctggagttgatgttttaattgttgatactgctcatggtcatagtgaaatggttttggatgctgttaataaaatatcaaagttgtcaaatgaagtagccttaattggggggaatgttgctactagtgacgccacaaaagctctcatagatgctggagctaatggaataaaggtagggattggacctggttcaatctgtacaacaagaatggttgcaggagttggtgttcctcaat

SEQ ID NO: 204985 - DNA, 574 bp, Unknown
  Bacterial polypeptide expressing nucleotide sequence isolated from the Sargasso Sea
agtagatatagtaaaagttggtattggacctggatcaatatgtactacaagattagttgctggagttggagtaccgcagttaagtgcaatattagacgtgaaaaaagctttaggaaaaagtaaaactaaaattatttcagatggagggattaaattttcgggtgatttagcaaaagccatcgctgctggagctgatgcagtaatgattggatcccttttttcaggaacaacagaaagtcctggaaaaattttcaaacgtaaaggaaaattatataaaactttcagaggtatgggatctgcaggcgcaatgtccgttggttcagcagacagatattatcagaaaaaatttaaagatatttcaaaatttgttcctgagggtgtagaggggatagtaaaatttaagggcccagtaaataaaattatttataatttaactgggggcctcagatcttcaatgggatatttaggggctaagacaattaatgatctacaaagaagaggtgagtttgtaaaaattagtaaagctggtttctatgaaagtatggttcacaatgtggaccaagtcataaaataa

SEQ ID NO: 204986 - DNA, 415 bp, Unknown
  Bacterial polypeptide expressing nucleotide sequence isolated from the Sargasso Sea
aaagctggagcagatgcacttaaagttggaatcggacttgggtcaatttgcactacaagagtggttgcaggcgttggcgtaccacagttaacagcaataatgaacgtttataaagcggctagaaaatcaaaaataccaataattgttgatggtggcataagatattctggtgatatagtgaaagctttagcagccggagcagacaccgtcatgctaggcggtcttcttgcgggaacagatgaagcacccggtgaagtcgaaatgtacgagggaagaatttataaatcatacagagggatgggttcaattggtgcaatgcaaaaaggatcaaaagatagatataaccaagatggcgcttcatcatcaaaacttgtaccggagggaattgaaggaagggttccttataaaggaacca

SEQ ID NO: 204987 - DNA, 790 bp, Unknown
  Bacterial polypeptide expressing nucleotide sequence isolated from the Sargasso Sea
gttaaaaaatttgaaagcggagtagtaagagatccaattaccatttcttctaaaaaaagtgttggggaactaatcaagcttactcaggatttaaatatttctggcatgcctgtagttaatgaaggtgatttagtcggaattgtgacttccagagattttcgaaatgtctctgatttatctgctccagttgaatctatcatgacaccaaaaaaacgcttagtaactgcagaggaagatgcaaagttagatattatcaaaaatcttctatacaaaaatagaatagaaaaaatcttgttggttgataaaagttttgccttgaaaggtctcgtaactttgaaagacatcaataaaaacaaagattttcctttggcctcaaaagataccgaaggcaggcttctcgtcggagccgctgtagggaatggggaagaaaccgatgaaagagtggatgctcttgttgaagcaggcgtcgatgttcttgtggttgatagtgctcatgggcattccaaaggcattattgatcgagttaagcgaatcaagaaaatgaacaaaggcatccaagtcattggtggcaatgttgcaacaggcgatggcgccttagacttaattaaagctggggctgacgctataaaagttggaatcggtcctggatcgatttgtactactagaattgtaactggtgtaggcgtacctcaaatttctgctattgcaaatgtagtcaaagccataggtaagaagaatattccagtaattgccgatggcggaattagattttctggcgatatcgcaaaag

SEQ ID NO: 204988 - DNA, 685 bp, Unknown
  Bacterial polypeptide expressing nucleotide sequence isolated from the Sargasso Sea
gaaaacttagatataatagtaattgatacagcgcacggacataccaaaaaagtaggagatataataaaaaaaataaaaaaaatacgtcccaagaaaacggcaatttgtgctggaaatatagctacagcagaagctgcaaaatttttggtcggattaggtgttgatataattaaagtaggaataggcccaggatctatttgcactacaagacttgtagcaggaataggagttccacaactaagtgcgatattggatgttaaagagggaattgggaaaagtaaaacaaaattaattgctgatggtgggataaaattttctggtgatattgctaaagcattagcagctggtgcagatgcagttatgataggttcattatttgcgggtacagatgaagcacctggaaaaaagataaataaaaatggtaaattatataaatattttaggggtatgggatcaataggcgcaatgaataaaggatcagcagacagatattttcaaacgaaacaaaaggatacttcaaaatacgtagctgaaggtgtagagggatatattaaatacaaaggtaaagttgataaaataatctacaacttagttggaggtttaaaatcttcaatgggctacttgggtgctaagaacgtaattgatttaagaaaaaaaccaaaatttgtaaaaattactaaagcag

SEQ ID NO: 204989 - DNA, 796 bp, Unknown
  Bacterial polypeptide expressing nucleotide sequence isolated from the Sargasso Sea
attggtgttggtggagaaaaccttgaaagatgtaaaatgttatataaagctggtgtagatgcaatagttattgataccgcacatgctcatacaaaatcagttctaaaaattataaaggatgttaaaaaaacatttcctgatttggatgttgtagcaggaaatgttgcaactgctgaagcagccaaatttttagcaaaagctggagttgatggggtaaaggttggtattggtccaggctcaatatgtactaccagaattatagctggagttggatatccgcaactatcggcaatatataatgtatcaaatgcattgaaaggaactgatatttctatcattgcagatggtggagttaaacatactggagatataacaaaagcaatagctgcaggagctgactgtgttatgcttggttcattactagccggtacacttgaatcacctggtgagacaataatttatgagggtagaaaatttaaaacttacagaggaatgggttcagttgaagcaatggaaaaaggtagcaaagaaagatattttcagtcaactataaaagacaaaaacaaattggtgcctgaaggcatagttggtagagttccttataaaggaagtgtggttgaaagtatgtttcaatttgtaggaggattaaaatccgggatgggatattgtggatcaaaaaatataaaagaattaaaagataattcaaagtttgttcaaattactagcgcaggtttagacgaaagccatcctcacaacatcactataacaaaggaatctcctaattacacaagataga

SEQ ID NO: 204990 - DNA, 823 bp, Unknown
  Bacterial polypeptide expressing nucleotide sequence isolated from the Sargasso Sea
cccgtttcggatatcatgacgtgtgaaggacttgtgacggcaacgggcgccgtatcacttgatgaggccgaaaaaatcttaatggccaataaggtcgagaagcttctgcttgtcgaccaatctgggctccttacagggcttattaccattaaggacatcgacatgatgaagcgttttccgaatgcctgcaaggattctcaggggcgactgagggtaggagctgccgtaggtgtttttgattacgagagagctgatagcttgatcgctaaaggtgttgatgtactcgttgttgattcagcacatggccattctaaaaatgtcatggagaccgtcactgcaataaaaaaacgttgggatatcgatgtcattgcggggaatattgcaacgagagccggttgtcgtgatttgatcaaggctggggcagatggtgtaaaagtgggtattggacctggttcgatctgtacaacaaggattatctcaggagttggtgtcccccagatttcggctgtctgggaggctgctcaagaggctgctgatgcgaatgtgccgattattgccgatggtggtattcgatattcaggtgacatgacaaaagctattgctgctggcgcacattgttgtatggtcggtgggctactggcaggagtagctgaaagtcctggccaaactgttctttatcaggggcgaacgttcaagtcttatcgcggcatgggttctctgggagccatggtgaaaggatcgagtgagcgatatcgtcagaaggcaggtcatggtagcaataaattggtccctgagggtgttgaaggcacgagtgccttttaag

SEQ ID NO: 204991 - DNA, 610 bp, Unknown
  Bacterial polypeptide expressing nucleotide sequence isolated from the Sargasso Sea
atggaaatcattaaagaagcacttacatttgatgacgtaaccttagcgcccaattattcacaggttctaccatcagaggtcaacacatctaccaatctatcaaaaaatttatctctaaaggtacctttattaacatctgctatggacacagttacagaatctaaaatggcaatagcgatggctgaactcgggggcattggagtaatacacagaaatctgaccatcgaacaacaaatttcagaaataagaaaagttaaagcaaaaaaatgtcttgtaggagcagctgttggagcaagtgcaagggaacatttaagagcacaaaaaattttaaaggaaaatttagatttaatagttgttgatactgcacacgcacacacaaaaaaagttggagaaataataaaaaaaattaaaagactaaaacctaaaaaaaccaccttatgtgctggaaatgttgcaactgctgaagctgcaaaatacttaattaaactaggcgtagatattattaaagtaggtattggtccaggatcaatttgcacaacaagattggttgcaggaaatggtgtccctcaactaagcgctattttaagtttaaaaaaggaatggaaaaagt

SEQ ID NO: 204992 - DNA, 661 bp, Unknown
  Bacterial polypeptide expressing nucleotide sequence isolated from the Sargasso Sea
tttagtagaacagatattgttgttggcaatatagctacagctgaagctgcaagagaccttataaaagctggagcagatgctttgaaagtaggtatagggccaggctctatttgtactacaagaataattgcaggaatcggcgttccacaattaactgctatattggatgtttgttcagtagccaagagatcgaaaactcctgttattgcagatggcggcattaaatattctggtgatataactaaagcactagctgccggagcaaattgtgtaatgattggaaacttgctggcaggtacagacgagactcctggtgatcttgttctttatcagggaagatcatttaaaacttaccgaggaatgggctcagttgaagctatgaaagatggaagcaaagacaggtattaccaagaggacttaattgattctaaattagttcctgaaggtatagaaggcagggtcccctacagaggaccaataagcaaagttgtttatcaattagtaggtggggtaaaagctggaatgggatacaccggttctaagaatttaaaagaattgaaatctgctaaatttttaaaactaactagtgcaggcttgagagaaagccatgttcacgacattgatataagcagagaggcaccaaactattccctagattaaa

SEQ ID NO: 204993 - DNA, 916 bp, Unknown
  Bacterial polypeptide expressing nucleotide sequence isolated from the Sargasso Sea
gcaattgctctagcgagagctggtggtattgggattattcataaaaatttgaccatagaaggccaagtaaatatggttgataaggttaaaagatcagaaagtggtatgatccaaaatccaataacaataaatgagggtgccacgatttcggatgctaaaaaaattatgtcagaatataaaatcagtggtttgccagttgtgaaaaatgaagtgcttgttggtattattactaatagagatatacgttttgaaatagatgggacacttcctgtttcagaaagaatgacttcgaaagatcttgttactgtaccagtaggaacatctctaaataaagcaaaagatatcctccaaaaacacagaattgaaaaattgttggttgtagatgataaaagaaatcttaccggtctcataacagttaaagatattcaaaaaaatgaggattatcctaatgcatgcaaagataaaaacggaaggctcagggttggtgctgctattggtgtcaagggggaagatgttgagcgagcctcagagttagcaaatgtggatgtggatgtaatagtcattgataccgcacacggacattccaaatctgttttgaaatccattgaattattaaaaacgaaacttccacaactttctattattgctggaaatgtagcaaccggcgatgggactaaagctttaatagattctggggtagattgtgttaaagttggtatcggagctggagcgagttgcactactagggttattgctggagtcggtgttccacaattgacagctatcatggattcggttgatatagcaagaaaagaagacatacctgtaattgcagatggtggattacggtatagcggtgacatagcaaaggcattggctgctggtgcaaattcagtgatgcttggtagtctactgc

SEQ ID NO: 204994 - DNA, 661 bp, Unknown
  Bacterial polypeptide expressing nucleotide sequence isolated from the Sargasso Sea
atggaattaataaaagaagctctcactttcgatgacgtattactattacctaggtactctgatattttaccatcagaaacaaacacatcaataagattatcaaaaaaaatatttctaaaattaccgtttatctcgtcagcaatggatacagttacagagtccaaaatggctatagctattgccagacaaggagggttaggtgtcattcatagaaattttgatattaaaactcagtcgaatgaagtttcaaaagttaaaaaattaaatttttttgtaggtgctgccgtagggacaagcagtcaagacattacaagagtaaaaaatcttataaatgcaggagtagacctaattgttattgatacggcgcacgggcacagcaagagagtattgaaaacattagaaaaaattaaaaagatcgcaaaggatcaaactatgtgcgttggaaacattgcgacatccgaagcagcaaaaaaattatataatcttggtgcagatgtggttaaagttggtataggtccaggctcaatatgcaccacaagaataatagctggaattggagtcccacagctaaccgcaattatggaggtaaaaaaagctttaaaaggaaaaaaaattaaaattatatctgatggaggtataaagttttctggagatatagcca

SEQ ID NO: 204995 - DNA, 690 bp, Unknown
  Bacterial polypeptide expressing nucleotide sequence isolated from the Sargasso Sea
ccttaaaagaaataaaatcaaaattctcaacagatgtaattgttggaaatgttgccacaaacgaagccaccgaagaacttattgatcaaggagctgattgtgtaaaagttggaataggtccgggatcaatatgtaccactagagtggtagctggaattggtgtaccccaattttcagcaattttagactgtgctgaaactgcagcaaaaaaaggagtgccaataattgcggatggtggaattaaatattctggtgatatagcaaaagccttaggcgcaggagcaagcggagttatgatcggttcactctttgctggaactgacgagtctccaggggaggtatatttattcaagggaagaagctataaatcatacagaggaatgggatcgcttggcgctatggccaggggatcagcagataggtattttcaagaagaaataactgagagcaataagcatgttcctgagggaatcgaaggaagagttccttacaaaggacctatatcgccaattatatatcagcttgttggaggcttaaaggcttctatgggatacactggttcaaaagatatagtagaatttaaaaagaatgttaagtttgtagaaattactggagcaggtcttaaagaaagtcatgtacatgatgtcgatatcacaagagagtcaccaaattatccgacaaacatataaa

SEQ ID NO: 204996 - DNA, 886 bp, Unknown
  Bacterial polypeptide expressing nucleotide sequence isolated from the Sargasso Sea
atgattactttcaaggatatacaaaaatcatctacataccctaatgcatcaaaagatataaatggaagtttgttagttggcgcagctgtaagtacaagtaaagaatcctatgaaagaattgatgccttagttagagaaaatgtcgacgtgattactattgatactgctcatggacattctaaatctgttattgatactttaaaatatattaaaaagaaacatcctgctcaacaagtaatagtcggcaatatcgctactgctgatgctgctgaacttttaatcaagaatggtgcagatgcaataaaagtaggaataggccctggctccatttgtactacgagaatagtagctggagttggcgtgccgcaactttcagcaatctatcattgttctaaaatagcaaataaacataaaataccattaatagcagatggaggaatacgatattcaggtgatattgctaaagcaatagctgctggcgctgactctgttatgttaggaggccttcttgcaggtacggacgaatcaccaggtgaagtggagatgtttgagggaagaacctataaatcttatcgtggtatgggatcaattggagccatgcaaagcggttctaaagatagatattttcaagatcacgaaagtgaaagtaaaaaacttataccagagggcatagaaggaagagttccatataaaggaacaatgaaaacaattctttatcaattaacaggtgggttgcgatcaagtatggggtatttaggttgtaaaaatataaagttaatgaaaacaaaaaccaattttataaaaatatctaattcttcaaaaatagaaagccatactcatgatgttgcaattgttaaagagcccccaaattatcaacctaaataat

SEQ ID NO: 204997 - DNA, 1075 bp, Unknown
  Bacterial polypeptide expressing nucleotide sequence isolated from the Sargasso Sea
atgggaataataaaagattcgcttacctttgacgatgttactctaataccaagtttttcatccattttaccctcagaaaccataacaactactgatttaggccaaaaattaagattaaaaataccattaatgtcatcagccatggatactgtaacggaagcaaaaatggcaatagcactgtcaaaagcgggtggtcttggagtaatacatcgaaatttatcaattgagaaacaagtaaaagaggtcaaaaaagtaaaaagaagtaaatgcatagtaggagcagccataggagtaagtgaaaaagatcttgagagagcaatagaacttaacaaggccaatgtagatttgttaattatagacacagcgcacggtcataccacaaaggtttctaatatgatcaaaaatgttaaaaaaaggacaagcaaatctaatctttgtgcaggtaatattgctactggcaaggctgcaaaatttttagctgataatggtgcggatatagtaaaagtcggaattggtcctggatcaatttgtacaacaaggttagttgcaggaataggtgtacctcaattaagtgcaataattgatgtcaaaaaatctttaaggaattacaaaactaaaataatttctgacggtggaattaagttttctggagatttggcaaaaggtttagcagctggagcagactgtattatgattggatcattgttttcgggcacaaatgaaagcccaggtaaaataataaagattaaaggtaagctttataaaaattttaggggcatgggttcagttggagctatgtccgttggatcatctgatagatattatcaaaaaagatacaaggatatttcaaaatatgttcctgagggagttgaaggattggtcaagtataaaggccaagtttctaaaattatttataatcttgttggaggattaaaatcttcaatgggttatttgggatcaaaaaaaattaaagatctacaaaaaaatggtgaatttgttaaaattacaaaagcaggtttttacgaaagtatggttcacaacgttgatcatgtaaaacaaaatggaaccaagtaat

SEQ ID NO: 204998 - DNA, 751 bp, Unknown
  Bacterial polypeptide expressing nucleotide sequence isolated from the Sargasso Sea
tgcttatctaagacttttagaattattaaaagccggtgttgatattgtatttgttgatgttgcgcatgcacatacaaaaaccacattaaaatttattgaaaaggcaaaaaaagttttaaaaaaaacatcgctcatagttggtaatattgcaactaagaaagcagcttcagatttaattagttctggtgttgatgctattaaagttggaattggcccaggctctatttgtactacaagagttgtaacaggtgttggaatacctcagctatctgctgtaatggatacatttcaagtcgcaaaaaaatttaaaatccctgtaatagctgatggcggtattaagacttcaggtgatattgcaaaagctatagctggcggcgcaagtgcttgtatgatcggttctttatttgctggtactgaagaatctccaggaaaattattaacgatcaaaggtaaaaaatacaaatcatatcgcggtatgggatctgttggggcaatgcaaaaaggatcttttgatagatattctcaagaagaaacaaaaaatattaaaaagttagtagctgaaggagtcgaaggtatggttccatataaaggaaagatagaagatgtagcttatcaacttgttggaggtttaaaatcttccatggggtacacaggacataatacaatcaaaaaaatgcaaggcaattgcaaatttgtttttatttcaaaagcaggtgctcgtgagagtaatgttcacgatgtcattatgtaa

SEQ ID NO: 204999 - DNA, 979 bp, Unknown
  Bacterial polypeptide expressing nucleotide sequence isolated from the Sargasso Sea
gacgaaagcattgataatataaaaaccttactctatagaaacagaatagaaaaaatattgctcgttgatgacacttttggtctgaaaggtctaattactcttaaagatataaataaatctaaagattatccatctgcaacaaaggactcagagggaagacttctagttggtgcagcaattggtaacggcactgatacagaggaaagaactgaaaaacttgttcaagccggagtcgatgttctcgttgtcgatagcgcccacggacactctcaaggcattttagatagagttaaaaaagtaaaaaaagattatccaaatatagatgtcattggaggaaatgttgctactgcggaaggagctacagcattaatgaaggctggggctgatggagtgaaagttggtattggaccaggttccatctgcactacaagaattgtgacaggagttggtgttcctcaaataacagctatttcagatgtagtttcaagcatgaagaaaaaaggaattccagtcattgcagatggcggaattagattttctggtgattttgctaaagcaattgctgcaggagcagatagtgtcatgctcggcagtatcttggcaggaacagaggaagctcctggtcaggtagaactctttcaaggcagaagctataaagcatatagaggcatgggatctgttggagcaatgtcaggtgaatcctcctcaggggatagatattttcaggataatcaacaaaccgataaactggtacccgaaggtatagagggaagagttccttataagggttgggtagaaactaccatccatcaaatgttaggcggcttaagacaaagtatgggttacaccggatgcaaagacattgatacgatgaaaactaagccaaagtttgttcaaatcactacttctggaatgagcgagagtcatgtgcatgacgtcagcgtcactaaagaagcgccaaattacagaattacataat

SEQ ID NO: 205000 - DNA, 1066 bp, Unknown
  Bacterial polypeptide expressing nucleotide sequence isolated from the Sargasso Sea
catggaaactattaaagaagctttaacatttgatgatgttactttagcgccaaattactcatcaattctacctagtgaagtaaacacatctgtgaatttaacagaaagtttaaagataaaaataccacttttgtcatctgcaatggatactgttacagagtcgtcaatggggattgcaatgggaagagctgggggattaggaataattcatagaaacttaaatatacaagaacagattaaagaaattagaaaagtaaaatcaaaaaaaatattaataggcgcagcagttggtgcaagcgaaaaagaattaaatagagctgaaaaaatattaaaagaaaacttagatataatagtaattgatacagcacacggacataccaaaaaagtaggagatataattaaaaaaataaaaaaaatacgtcccaaaaaaacagcaatttgtgctggaaatatagctacagcagaagctgcaaagtttttggttggattaggtgttgatattataaaagtaggaataggcccaggttctatttgtacaacaagacttgtagcaggaataggagttccacaattaagtgctatattaaatgttaaaaagggaattgggaaaagtaaaacaagattaattgctgatggtggaataaaattttctggtgatattgctaaagcattagcagctggcgcagatgcagtaatgattggttcattatttgcaggtacagatgaagcacctggaaaaaaaataaagaaaaatggtaaattatataaatattttaggggtatggggtcaataggtgcaatgaataaaggttcagcagacagatattttcaaactaaacaaaaagatacatcaaaatatgtagcggaaggtgtagagggatacattaaatacaaaggtaaagttgataaaataatatacaacttagtcggaggtttgaaatcttcaatgggttacatgggagctaagaaagtaattgatctgagaaaaaaaccaaaatttgttaaaattactaaagcaggtttttatgaaagtatggtacataatatagatgttgttaaaaaataa

SEQ ID NO: 205001 - DNA, 1078 bp, Unknown
  Bacterial polypeptide expressing nucleotide sequence isolated from the Sargasso Sea
catggttcctattaaagaagcacttacctttgatgacgtaacattagttccaaaatactctactgttttacctactgatgttgatacaagcattaaattgtcaaataatttaaagcttaaaattcctcttattgcatctgccatggatacagtaacagaaagtaaaatggcaatagcaattgcaaaagctggaggaataggaataattcatagaaacttagatataaaaaatcaaataattgaaattagaaaagttaaaaatcaaaaattattagttggtgctgcggttggagctggcccaaaggaacttcaaagagcaaaggacgtattaaaagaaggtgtagacttgattgtagtagatactgctcatggacatactaaaaaagtatcagaaatagttagatttatcagaaaaacaaaggataaaaaaacagctttatgtgcaggaaatatagcgactcctgaggcagcgaaatttttattaaaactgggtgtagatattataaaagttggaattggaccaggctcaatatgtactactcgattagtggcgggtataggtgttcctcaattaagtgcaattctttctgttagaaagggaattaaaaataaaaaagtaaaaatcatttcagatggaggaattaaatactctggagatttagcaaaagcatttgcagcaggagcagacgctgtaatgattggatctttatttgccggcactgacgaagcaccaggtaaaataataaaaaaaaatggaaaacttttcaaaaactttaggggaatgggttcagttggcgcaatgaataaaggctctgctgatagatattttcaatctaaacaaaaagatatatctaaatatgttccagaaggagtagaaggttttgcaaaatataaaggtggtgttaaagatattatttataaattaataggaggattaaaatcttcaatgggttatttaggctctaagcagataaaatacttaagaaaaaaacctaaatttgtaaaaattaccaaagctggtttttatgaaagtatggtacataatgttgatatagttaaaaaggataatgaatactaa

SEQ ID NO: 205002 - DNA, 1204 bp, Unknown
  Bacterial polypeptide expressing nucleotide sequence isolated from the Sargasso Sea
tatgtcaaataatattgaaaagaaattaacatttgatgacgtcttattagttccaagaaaatcatctgttttacctaaagaagtagattgtgctactaagcttactaaaaatattactttaaatatacctgttatgagcgctgccatggatacagtcacagaatcagacatggctattgctttggctagacaaggtggaattggagttatccacaaaaatttaagtattgaagatcaggctttaatggttgataaagttaaaagatatgaaagtggtatgataagaaatccaataactttagatgataaaaagactgtccgagacgctaaacagttaatggatcaatattctattggtggattaccagtgctatcaaaagggaaattagtgggaattataaccaagagagatattcgatttgaatccaatcttgatactctagtaaaagatcgaatgacttcaaaagatttaattacagttaattcagatacaagcaatgaagatgctaagaaaattcttcagaaacatagaattgaaagattattggtagtagataaacaaaataatcttgatggtctaataactgtgaaagatttaactaaaaaagaagagttccctttatcgaccaaagataaaaatggaagattgagagttgcagctgctataagcgttagagaagactggaaagatagagttaaagctcttgtcaaagtgggagttgatgcaattgttgttgatactgctcatggacactctaaatttgtgctagatttagttaaaaaagttaaaaaagaattccctaaagtagacttaattgccggaaatgtttctactgctgaagcaactgaagatttaattaagtctggagcagattgtgtcaaaataggaattggtgcaggatcaagttgtacaactagaattattgccggtgtaggtgttccacaattatccgcggtaatggattgtgcacaagttggaattaagcataacaccccaattattgctgatggaggtataagatacagtggcgatattgctaagtctttggctgctggtgctaacgtagtaatgttaggaggtatgttggctggaatggatgaaagtcctggtgagactattgtatatgaaggaagaagatataagtcatatagaggtatgggttcattagctgctatgaaagaaggtggtggagaaagatatttt

SEQ ID NO: 205003 - DNA, 940 bp, Unknown
  Bacterial polypeptide expressing nucleotide sequence isolated from the Sargasso Sea
gttgaataaatataaaattgagaaacttcctgttgttgataaagattttagacttcaaggtttaataacaatgaaagatattgaaaaaagtaagcaacacccatattcgtccaaagacagccaaggaagacttattgcagcagcggcaattggcgtcggtaatgatatgctcgaaagacttgatagtcttattaagcatggattggacttagtatttatagatacagctcatgctcattcaaagaaagttatagattcagtaaaaataattaaaaagaaatataaaaaactcgagattgttgttggaaatattgctacagctgaagcagcaaaggctttaatatctgctggagttgattctttaaaagttggcataggtccaggatctatatgtactacaaggataattgctggcataggtgttcctcaaatgacagctataatggatgttgtgagcattgcaaaaaaatctaatattcctgtaattgctgatggggggataaaatactctggtgatattactaaggcacttgcagcaggagcggattgcgtaatgattggaaatttgctggcaggtacagatgaatcaccaggagatctcgtgctttatcaaggtagatcatataaaacatatagaggtatgggttcggtagaagcaatgaaggatggaagtagagatagatataaccaagatgatataattgattcaaaacttgtacctgaaggtattgagggaagagttccatatagaggtgcaacgagcaaagtaatttttcaacttgttggtggattgaaagctggcatgggatatactggctcaaaaaatcttaaagatttgaagaaggctaaatttttaaagctgactggtgctggtttgaaagagagccatgttcacgatgtagatataagtagagaagcaccaaattatacattagattag

SEQ ID NO: 205004 - DNA, 1474 bp, Unknown
  Bacterial polypeptide expressing nucleotide sequence isolated from the Sargasso Sea
atgaaatcaagacctcctttcaagcaagcctttacatttgatgatgttcttttggttcctcaaaagtcgaaagtattgcctagtgacgtaagcttaaaaacaaagctaaccaaaagtatcgacatgaacataccgcttttatctgcagctatggatacggttacggaaagcagtatggcggttgccattgcaagagagggaggtattggaataattcacaaaaacttatcgattgaagaccaagcgctcatggttgacagagtcaaaagatatgaaagtggaatgatagttaaccctgtgacattatctagtgataaaacaattaaagaagctaaagctgttatgtcaatgtataaaattagcggactaccagttgtagaaaatgaaaagctaattgggataatcactaatagagacattcgttttgagactgatgagtcgttaccagtcaaagacagaatgactaaagaaaagcttgtaacagttgaacaaggcacaacgctcgagcaggctaaaaaggtgttgcaggagcatcgcattgaaaaacttttagttgttgataatgagggtaatttagcagggctaataactgttaaagatattcagaaaaaagaagattttcctaattcatgtaaggataaaagtgggcgtctacgagttggtgctgcattgagcgttacagaagattttttggaaagagcgcaagaattacactcaaaagaggtagatgttatagtggttgatactgcccatggtcattctctgggggtattgaatcaaattaaggaaattaaaaaatcaatacccgctttacaaattataggtggtaacattgctactggtgatggagctaaagctttaattgatgcaggtactgattgtgttaaagtaggtattggagcaggagcaagctgcactacgcgaattgttgcaggtattggagtacctcagcttacagcagtaatggattgcgttgacgaagcaaagaaaaacgatattcctgttattgctgatggtggaattagatacagcggagatattgccaaagcaatagctgctggagctgacactgtaatgcttggaagtatattggctggaatggatgaaagccctggtgagtttatactttttgaaggacgtcagtataaatcatacagaggaatgggatctttgggtgcaatgcaagatggagatggtgcgaggtattttcaaaatgatacagaagataaaaaacttgttcctgagggaatagagggcatagtgccttacaggggtagtgtaaaaaacactattcatcaattgatgggtggcttaagatcttcaatgggttattgtggaggtgaaaatattgctgattttcaaagaaaggctgaatttattcaaaatacacaagctggtgttaaagaaagccatcctcatgaggtaaaaataacaaaagaggcccctaactatcagatttctgatacgaaataat

SEQ ID NO: 205005 - DNA, 616 bp, Unknown
  Bacterial polypeptide expressing nucleotide sequence isolated from the Sargasso Sea
tatagcaactgctgaagctgctaaatttttaattaaattaggagttgatattattaaagttggaattggacctggatcaatttgcacaacaagattagttgcagggattggagttcctcaacttagtgcaattttaaatgttagaaatggtttaggaaaaagaaaaactttgatagttgcagatggaggaattaaattttcaggtgatattgcaaaagctttatctgcaggtgcggatgctgtaatgataggatctttatttgctggaacggatgaggcaccaggcaaaattattaaaagggatggtaagttatttaaaagttttagaggaatgggctctattggggcaatgaataaaggttcagcagatagatattttcaaaaaaaacaaagcgatagttcaaaatatgttccagagggtgtagagggccttataaaatataagggatcagtttcaaaaattatatataggctagttggaggattaagatcatctatgggttatctaggttgtagacaaataaagaatcttaaaaataaacctaaatttgttaaaataacaaaagctggtttttatgaaagtatggtacataatatcgataaagtaattagataa

SEQ ID NO: 205006 - DNA, 1081 bp, Unknown
  Bacterial polypeptide expressing nucleotide sequence isolated from the Sargasso Sea
gttgcaaggaattgttacaagtagagattttagatatgcagaaaatatgaatgccaaagtttcatcaataatgacaccttttgaaaagttagtaactgttgaggaaggatttcctcaagaagatgttatgaagttgatgtataaaaatagaattgaaaaaatattagttcttgatggagataataatttatctggattggtgacgatgaaagatatagagaaatctgctcagcaccctaatgctacaaaagattcttcaggaaggcttcaagttggagcagcaattggtactggagaagacactcttgatagagcggaggctttagctgaagctggagttgatgttttcgtgattgacagtgcgcatggccattctttaaatgttattaataccattaaagtaataaaagataaatttaaagatattgatgttattggtgggaatattgctacagctgatgcagcaacagaacttgtgaaagccggtgcagatgccgtaaaggttggtatggggccaggttctatatgcaccacaagaattattgctggcataggagtgcctcaaattagtgcaattttggaaatcaagaaagctcttgatgggaaagatattaatattattgcagatggaggaattagattctcaggtgatatagctaaagccatagcagctggcgctgattcagtaatgcttggaagtctttttgcaggaaccgaagaagctccaggaaaagttgagcttttccaaggaagaagttttaaaacatataggggaatgggatccattggagctatgactgaaagagatgatgctaatagatatttacaggaagatgttgagaacgataaattggtaccagaggggatagaaggaagggtaccatataaaggcttagtaattaatgtgattaatcaattagttggtggagttagacaaagtatggggtatattggctgtaaaaatattgaagacatgcaaaacaatagtcaatttgtagaaatcacaaatgctggaatggctgaaagtcatgtgcatgacgtaatgattaccaaagaagcacctaactatcaaagaagttaa

SEQ ID NO: 205007 - DNA, 505 bp, Unknown
  Bacterial polypeptide expressing nucleotide sequence isolated from the Sargasso Sea
tgtgccccaattaagcgcaatactaaatgtgaaaaaaggtttaaagaaaaaaaaagtaagtattattgctgatggaggtatcaaattttctggagatatagctaaagccttagctgctggtgcagacgcagtaatgataggttcattattcgcaggtacagatgaagctcctggaaaaattataaaaaaaaatggaaaactttacaaaagttttagaggaatggggtctataggagcaatgaacaagggatcagcagacagatattatcaacttaaacaaaaagataaatcaaagtatgtacctgaaggtgtggaaggatttgtaaaatataagggaaaagtagataaaatattttataaattaattggtggtttgaaatcctcaatgggttatcttggagctaaaaaattaaatttactaagaacaaatcctaaatttgttaagattacaaaagcgggattctatgaaagtatggtgcataacatcgatgaaattaaaaaataa

SEQ ID NO: 205008 - DNA, 1348 bp, Unknown
  Bacterial polypeptide expressing nucleotide sequence isolated from the Sargasso Sea
ttgaaaattccattagtgtctgcagcaatggataccgtaacagaggctgcaatggctattgcattggctgataacggcggtattggaataattcataaaaataacaccattgaagatcaggctttagaaattagaaccgttaaaaaatatgaaagtggcgttgtacgagatcctacaaccattagatcaactaaaactatcgatgaattaatgaagctaactaacgaactgagtatttctggaatgcctgttgttgatgatggaaagttaatgggaattgtgaccagaagagattttagatacgcggaggatttatctgctttggtttcttcgatcatgaccccgcgagaaaaattaattactgttaaagaaggttttgatcaggaagatgtaaaaaaattaatgtacaacaatcgaattgaaaaaattcttgttattaacgaagaagactcattaactggtctcgtgacgatgaaggacattgataaatctgcagaacatccgttcgcaacaaaagattctagagggcaactgcaagttggtgctgcccttgggactggtggcgatactttagagagggcgtcagcattatcagatgcaggagtcgatttatttgtcattgatagtgctcatggtcattccaaaaatgtattagaaacaatcaagaacataaaaaacaaattccctgaaatagacataatgggtggaaatgttgcaactccagaaggagctgaagcgctcatagatgctggagtggattcggttaaaattgggatgggtccaggatcaatctgtacaactagaattattgcaggcattggagtccctcaaattaccgctattctttctataaaggaaaagcttaagtctaataacatccccttaattgcagatggaggcattagattttctggagatatagctaaagcaattgcagccggggcaaatgctgtgatgttaggaggaatattcgctggaactgaagaggctccaggtgagttggagctttttcagggtcgaagttttaagacatacagagggatgggttcaattggcgccatgtctgaaagaaacgatttaaatagatattctcaagatggagtgagcactgaaaaaatggtcccagaaggtgttgaaggcagggttccatttaagggctgggttgtaaatgttattgatcagttaattggaggcatcagacagagcatgggatacgttggttgtaaatcaatcgaagaaatgcacaatgatactcaatttgttgaaattacaaatgctggaattaccgaaagtcacgttcatgatgtcatgatcacgaaagaagcaccaaactatcaaagaagttaaa

SEQ ID NO: 205009 - DNA, 1462 bp, Unknown
  Bacterial polypeptide expressing nucleotide sequence isolated from the Sargasso Sea
catgcgtctgatccaaaaagcactcactttcgatgacgtgctcctcgttcccgccttctccgacgttctcccgcgcgacaccagcctcaagaccaagctgacccgcaacatctccctgaacatgccgctcgtgtccgccgcgatggacacggtcaccgaaggtcgccttgcgatcgcgatggcacagcagggtggcgtcggtatcgtccacaagaacctcacgccggccgagcaggcccgcgaggtcgcgaaggtcaagcgtttcgaatcgggcgtcgtccgtgatccgatcacggtgccgccgcaaatgaaggtgcgcgacgtgatcgcgctgtcgcgccagcatggcatctcgggcttcccggtcgtcgaaggcccgcagctcgtcggcatcgtcacgaaccgcgacctgcgtttcgaaacccgcctcgatgaaccggtcaagtcgatcatgacgccgcgcgagcgcctcgtcacggtcaaggaaggcacgccgctcgccgaagcgaaggcgctgatgcacagccaccgcctcgagcgcgtgctggtcgtcaacgacgcgttcgaactgcgcggcctgatgaccgtcaaggacatcacgaagcagaccgagcacccggacgcgtgcaaggacgaacacggcaagctgcgcgcaggcgcggcggtcggcgtcggtcccgacaacgaagagcgtgtcgagctgctggtgcaggccggcgtcgacgtgatcgtcgtcgataccgcgcacggccacagcaagggcgtgctcgagcgcgtgcgctgggtcaagcagaacttcccgcacgtcgaagtgatcggcggcaacatcgcgacggccgccgccgcgaaggcgctcgtcgaatacggcgcggatgcggtcaaggtcggtatcggcccgggctcgatctgcacgacgcggatcgtcgccggtgtcggcgtgccgcagatcagcgcgatcgcgaacgtcgcggaagcgctgaagggcacaggcgtgccgtgcatcgccgacggcggcgtgcgcttctcgggcgacgtgtcgaaggccctcgcggccggcgcgaacgcggtgatgatgggcagcatgttcgcgggcaccgaagaggcgccgggcgacgtgttcctgtaccagggccgccagtacaagtcgtatcgcggcatgggttccgtcggtgcgatgaaggacggcgcggcagaccgctacttccaggacaactcggcgaacatcgacaagctcgtgccggaaggcatcgaaggccgtgtcgcgtacaagggctcggtcaacgcgatcctgttccagctggtcggcggcgtgcgcgcgagcatgggctactgcggctgcaagacgatcgacgagttgcacgacaaggccgaattcgtccagatcaccgcggcgggcatgcgcgagtcgcacgtgcacgacgtgcagatcacgaaggaagcgccgaactatcacgtggactga

SEQ ID NO: 205010 - DNA, 1066 bp, Unknown
  Bacterial polypeptide expressing nucleotide sequence isolated from the Sargasso Sea
catggatcccatcaaagaagccttaacttttgacgacgtaacattagccccaaattattctgaaatattaccttcagaaactaatacatctacaaagttatcaaaaaatctaaaactaaaaataccactaatatcatcggccatggatactgttactgaaggaagaatggcaatctctattgcagaaaaaggtggaataggagtaatccacagaaacttgagtattaaaaaacaaattgatgaaatccgaaaagtaaaaaataaaaaatttttagtaggagctgcagttggggcaagtttagaagaacataagagagccgaaagaatactcaaggaaaatttagatttaattgtagttgatactgctcacggacatacaaaaaaagtgtcagatataattaaaaagataataaaaattaaaccaaaaaagactacgttatgtgccggtaatatagcaacagcagaagctgcaaaattcttaattaaacttggtgtcgatattattaaggtaggtattggacctggatcaatttgtacaacaagattagttgcgggtattggtgttccacaattaagtgccataataaatgttaagaaaggtataggaaacagtaaaacatcaataattgctgacggtgggataaaattttcaggggatattgctaaagctctagcggccggagctgatgcagtgatgataggttcattatttgcaggaacagatcaagctcctggaaaaattataaaaaaaaatggaaaactttttaaaagttttagaggcatgggatcaataagcgctatgaacaagggttcagcagatagatattttcaaattaaacaaaaaaatacatctaaatatgtaccagaaggtgttgaaggatatgtaaaatataaaggaaagatagataatataatttttcaattagttgggggtttgaaatcgtccatgggatatcttggaacaaaaaaagtaattgatttaagaaaaaagcctaaattttttaaaatcacaaaggctggtttttacgaaagtatggtacataatatagatgaagtaaaaaaataa

SEQ ID NO: 205011 - DNA, 1262 bp, Unknown
  Bacterial polypeptide expressing nucleotide sequence isolated from the Sargasso Sea
aatgatccgcgatcgaattttcgatggtctgacctttgatgatattcttctggttccgggttatgcagagattcatccctccgaggtttccctgaaaagcaaactgacgcgcaaacttgagtgcaacattccccttctcagcgcggcaatggacacagttacggaggctgacacagcgatctgcatggctcaggaaggcggtctcggggtgattcataaaaacctctcaattgcagaacaggcgaatcaggtcaatcgggttaaacgctctgaaagcggaatgatcactaatccgatcaccatcgaacccgaccagccgatcagcgaagcattgaaattgatggaacgttatcggatttccggtgtccctgtcatccgcgggacggagctggtgggcatcctaaccaaccgtgaccttcgtttcgaaaccaaccatgaaaaacccgtctcggaattgatgaccggaggccgggacaaactcgtcaccgttgctccgggaatcgagatggaagcagccaaacgcctgctgcaccaacaccggattgaaaaacttctggtggttaatgcaaattatgaattgcagggactcatcaccattaaagatattgaaaaagcccggaaatacccgaacgccaacaaggaccaggtaggccggttgctggtgggtgcggctttgggagtttcggaagatctgcttcagagggcggaagccctgattcaggcggaagtggacctcgttgtacttgattccgctcatggtcattctcagggagtactcggggggatccgtaagttgcgaagtcatttttcggaactgcaaatcgtcggtggaaacattgccacaaccgagggagcagatgccctaatcgatgcaggagtggatgcagtcaaggtgggcatcggcccagggtcgatttgcaccacacgaatggtggcaggcattggaatgcctcaaatatccgccattgacagtgttgccgaagccctccgtaaaactgatgtcccgatcattgctgatggaggaatcaaatattccggggatatcgtcaaagcccttgccgccggtgcacacagcgtgatgatcggcagtctctttgcaggtactgccgaaactcccggacaggtcattctctaccagggacgccgttacaaactataccgcgggatggggtctatcggtgccatgaaagaaggaagcaaagaccgttatttccagacgggagttcaggaagttcagaaactggttcccgaaggaatcgaag

SEQ ID NO: 205012 - DNA, 1471 bp, Unknown
  Bacterial polypeptide expressing nucleotide sequence isolated from the Sargasso Sea
aatgttgcgtatcgtagacaaagcactcacatttgatgatgttttgttgttgcctgatcactccgatatcctcccgaaagatgttgatctaaaaacacgtcttactcaaaaaattaacttaaatattccattattatctgctgccatggatacagtcactgaatctcgcatgggaatagcattgagtgaattgggtggtataggaattattcataagaatctttcgattcaagatcaagctgcagaagtgagaaaggttaaaaaatatgaaagtggaattgtgagagatccaattactataaggtcagataataaagtaggtgagttgatccagctgaccaacgaattaaatatttctggtatgccagtagttgatgatggaaatttggttggaattgtaaccagtagagattttaggtttcaagagcaacattcagttcaagtatcagaaattatgactcctaaagaaaaattgatcactgcgcgagaaggagaaagtcctgatgtgattaaggctctgttacaagtcaaccgaatagaaaaaattctacttgttgatgattcttttgctttgactggattagtgactttgaaagatattaataaatctctagattttcctaacgctactcgtgatgaggagggaagattacttgcaggtgctgcaattggtactaaagctgatacattagatagatgtgaagcattaattgaagctggagttgatgttcttgtccttgatagcgctcatggccaatccgaaggtgttttgaaacaaatcaaagctgttaaatcaacctttaaggatatacaaattatcggaggcaacatagcaacgggtgaaggcgcccttgctctagtggaggcaggtgctgatgccgtaaaagttggtattgggccaggttccatttgcacaacaagaatcgtaaccggagtaggagtacctcaagtttctgcagttgcagaagtaactagtgctctgcttaaaaaagatattcctatcgtcgcagacggtggaataagattttcaggagatatagctaaagccatagcagctggaggtcacactgttatgttaggaagtgtgcttgcaggaactgaagaagctccaggagaattagagttatatcaaggaagaagttataaatcatatagaggcatgggctctataggcgctatgtcaggtgatcaaggttcttctgatcgctattttcaagacagcgctggagctacagaaaaattagtaccggaaggtatagaaggcagagttccttataaaggttggctagaagctgttattcaccaaatgatcggcggccttagacaaagtatgggttatacaggctcacatgatatagagtcaatgcgaacaaaaccaaaatttgttcaggttacttctgccggagtaaatgaaagccatgttcatgatgttagcgtaactaaagaggcacctaactatagaatgagctaa

SEQ ID NO: 205013 - DNA, 1066 bp, Unknown
  Bacterial polypeptide expressing nucleotide sequence isolated from the Sargasso Sea
atggatcctatcaaagaagccttaacttttgatgatgtaacattagctccgaattattctgaaatattaccttcagaaactaatacatctacaaagttgtcaaaaaatctaacactaaaaatacctctgatatcatcagccatggatactgttaccgaaggaagaatggcaatcgctattgctgaaaaaggtggaataggagtaatccatagaaacctgagcattaaaaaacaaattgatgaaatccgaaaagtaaaaaataaaaaatttttagtgggagctgcagttggggcaagtttagatgagcataaaagagcagaaagaatactcaaagaaaacatagatttaattgtagtcgatactgcgcatggacatacaaaaaaagtgtcagatataattaaaaagatagtaaaaattaaaccaaaaaagactacgttatgtgctgggaatgtggcaactgcagaagctgcaaaattcttaattaaatttggtgtcgatattattaaggtgggtattggaccaggatcaatttgtacaacaagattagtagcaggtattggcgttccacaattaagtgccataataaatgttaagaaaggtataggaagcagcaaagcatcaattatagctgatggtgggataaaattttcaggagacattgctaaagctcttgcggcaggtgcagatgcggtaatgataggctcattatttgcaggaacagaccaagcccctggaaaagttataaaaaaaaatggaaaactttttaaaagttttagaggcatgggatcaataggagctatgaacaagggttcagcagatagatattttcaaactaaacaaaaaaatacttctaaatatgtaccagaaggtgttgaaggatatgtgaaatataaaggaaagttagataatataatatatcaattggttggaggcttgaaatcatccatgggatatcttggatcaaaaaaagtaattgatttaagaaaaaaacctaaattttttaaaatcacaaaggctggtttttatgaaagtatggtacataatatagatgaggtaaaaaaataat

SEQ ID NO: 205014 - DNA, 1462 bp, Unknown
  Bacterial polypeptide expressing nucleotide sequence isolated from the Sargasso Sea
catgaaaataacggaagaagccctaacttttgatgatgttctattagtccctgattattcagagatcctccctcgccaggcgtcgttgcagacacagttaactcgggacataaaaatgaacataccccttgtttctgcggcaatggacaccgttaccgaatcggaattagctatcgcattagcccaagaaggcggtgtcggtattatccataaaaatatggatccagagcttcaggcaaagaatgttcgtcgtgttaaaaaatatgagagtggcatcattcaagaacccgttacagtaggaccatatacaagcatacaagaagtaattgatttgacgagacaaaaaaatatctccggtgttcctgtggtagatggagatgagcttgttggtattgttacaagcagggacctgcgttttgaagaaaaaccagatgatcctgttagaaacattatgactagaaaggaatctttggttaccgtagaggagcacgcgactaaagaagaggtccgcgctcttttacataaacatcgcatagaaaaaatattggtggtcaataacaaatttcagttagccggtttaattacagtgaaggatatgcaaaaagcttctgagtatccaaacgcatgtttagatgatgccgaacagctaagagtaggtgcggcagttggtgtaggagaaatagcaaggaaacgagctgcactccttgttgagtctaacgttgatgttattgttgttgatacagcacacggtcattcaaagggtgtgttagatatggtgaagtggataaagacgaattttaaggagacgcaagttattggaggcaatattgcaacagcagatgcggcattggcattagtaaaagcaggtgctgatgctgttaaagttggtataggccccggttcaatttgtacgacacgagttataagcggcgtgggcatgccacaaatctccgcagtcacaaatgttgccaaggctttaaaaaataaaggtattcccgtcatatctgatggcggcgttcgttattcgggggatttagcaaagggcttagcagcaggcgcaaatagtatgatggtcggcggattatttgcgggcactgaggaagcaccgggtgaagttgagctttatcaaggacggtcctataaaacgtatcgaggaatgggttcgcttggggcaatggctgaaaaatacggctcatcagatcgttattttcaagagaatgatgaggttgaaaaacttatacccgagggtattgaaggtcgcgtaccatataaaggtgcgctagaagcagttgttcatcaactatgtggtggcatcagagctgcgttaggttatacaggatgcttggatttaaaagaaatgagggataaggcaaaatttgtacgattaacaagcgcaggatttaaagaaagtcatgtgcacgatgttgccattaccaaggaaccagctaattaccgtttgtag

SEQ ID NO: 205015 - DNA, 640 bp, Unknown
  Bacterial polypeptide expressing nucleotide sequence isolated from the Sargasso Sea
tatgagtaaaacaaagtttattgaaactggactaaccttcgatgatgttttacttgtgccatcatattcagaagtactaccatctgatgttgtgttactttcaaaattttctagaaatcttagtttaaaggttcctgttgtatccgccgccatggatactgtaacagaaagcaaaatggctattgcaatggctcaagagggtggtattggtgtcatacataaaaacctaactataaagcaacaagctgaaaaaataagaaaagtaaaaagatctgaatcaggaatgattttagatccagtaacactcacgaaaaaaagtaaggttaaagacgcattaaaatgtatgaaagaattcagtattggaggtattccaattgttgataaatctaactctttagttggtatacttacaaacagagatttaaggtttgaatctgatatgaataaatctgttaatgatgttatgactaaagataatttagttaccggtaatccagggataacattaaaacaggctgaaaaaattcttcaaaaaaataaaattgaaaaattaccaatcattgatgataaaaataaattggttggactgataacttttcgtgatattcaaaaaaataactttaaaaccgtcatcaaataa

SEQ ID NO: 205016 - DNA, 772 bp, Unknown
  Bacterial polypeptide expressing nucleotide sequence isolated from the Sargasso Sea
attgagatctaaatctttaattgataacggatgtgatttaatagtagttgatacagctcatggacatagtgaaaaagttcttaaaatattgtcaaaattaaaaaaaattaatggtaaaattccaatatgcgtaggaaatatagcaacaggagaggctgcaaaaaaattatataattcaggggcagatataattaaagtagggataggacccggctctatttgtacaacaagaatggttgcgggcatcggagtacctcaaatatctgcagtaatggatgtaaaaaaagctcttaaaaaaaagaatgtaaagataatttctgacgggggtattaaattttctggagatatcgcaaaagctttggcagctggtgcagatgcaataatgatggggtcaatatttgcaggtactgatgaaagtccaggtaaaaaatttaaatataaaggtaaactttacaaacaatatagagggatgggatcgataggcgcaatgtcttcaggatcagccaatagatactttcaaaaaaattttaaagataaatctaaatttgttcctgaaggagttgaaggcagggtaatttataaagggtcagtttcaaaaattatttaccaattaaaaggaggtttgcgctcatcaatgggctatataggagcaaaaaatcttaatcagattaaaaaaaacgctgaatttattaaaatcactaaggctggattctatgagagtatggtgcatagtgtagaaatgacagaaaaaacaatcaattttaaattatga

SEQ ID NO: 205017 - DNA, 560 bp, Unknown
  Bacterial polypeptide expressing nucleotide sequence isolated from the Sargasso Sea
tatggatacaattaaagaatctcttacctttgatgatgtattattgctgccgcaatattccaacgtattaccatctcaaacagatatttctttagaattaacaaaaaaaattaaattaaaagttccttttttatcatccgcaatggacacagtgacagagtctaaaatggctatcgctatcgcaaaagctggtggaattggaattatacatagaaatttagatattaaaaaacaatctaaagaaattgctcttgttaaaaaaagaaaactattggtaggtgcagcagtagggacaactaatgatgatattaaaagagcaaaatcattaatcgattgtggctgtgatcttatcattattgatacagctcacgggcacagtacgaaagtattgaatacattatctaagttaaaaaaaattagaggtactgcaccaatttgtgtagggaatatagcaacaggagaagcggcaaaaaaattgtttgactctggtgctgatattataaaagtaggtattggtcccggatcaatttgcacaacgagaatggtagcaggaataggtg

SEQ ID NO: 205018 - DNA, 1465 bp, Unknown
  Bacterial polypeptide expressing nucleotide sequence isolated from the Sargasso Sea
atggacaaagtaaaatcaaaagcgttcacattcgatgatgttcttcttttgcctcgttatagtgactttgtgcctagcgaggcagatacagaaacaagacttactaaaagtattaaaataaaaatgcctttaatttctgctgcgatggatacggtaacagaatcaaggatggctattgccttagctgaagctggggggctaggaataattcataaaaataattctattgaagagcaagctgctattgtaaaagctgttaaaaagcatgaaagtggtgtagttagagatccaactataattcgatcttcaaaaacaataggcgaattaaaacaattaactgccgaattaagtatttctggaatgccagtggttgatgatggggatttaaaaggcattgttaccagtagagattttaggtatgcagatgatatggatgcagatgtagcttcaatcatgactcctttagataaattagttactgttagcgaaggcacacctcaagatgaagtaaaaaaattaatgtatgagaatagaattgaaaaaatcttagttttagacgaattaaataaattaagcggtcttgtcaccatgaaagatattgaaaagtcagcagaacacccggatgctactaaagattcttctggaaggcttagagttggtgcggcattaggaactggtgctgatactattgatagagcaaaagcccttcaagaagctggtgttgatgtctttgtggttgatagcgctcatggccattcaaaaaacgtattagatatagtaaagcttattaaaaaagaatttaaagatattgaagtaattggtggaaatgtcgccacaccagagggagcattagagttagtaaagtctggagtagattcagtcaagattggaatggggccaggatcaatatgtactacgaggattattgcaggtataggcgttccacagatcacggccattatggaaataaaaaatgctttaaaaggtaaagatgtaagtattattgctgatggagggataagattttctggcgacattgctaaagcaattgcagctggtgctgattctgtaatgttgggaggtctttttgcaggaactgaagaagctcctggtgaagtagagttatttcaaggaaggagttttaaaatttatagaggcatgggatcaattggtgctatgaccgaaagagatgatgcaaatagatattctcaagaggatgttgagcctgataaattagttccagaaggaattgaaggtagagtaccttataaaggatgggttattagtgtaattaatcagttaattggaggattaagacaaagcatgggatatgtaggatgtaagactattccagaaatgcaaaaagatagtcagtttgttgaaattacaaatgcaggaatgactgaaagtcatgtccatgatgtcatgattactaaagaggctccaaactaccaaagaagctaat

SEQ ID NO: 205019 - DNA, 1471 bp, Unknown
  Bacterial polypeptide expressing nucleotide sequence isolated from the Sargasso Sea
atgagtaatcgtccaccatttaaacaagcgttcacctttgacgatgttttattagtgccacaaaagtcaagtgtgttaccaaaagatgtaagtttgaaaacaaaacttacaaatgatatagagcttaatatacctatcttaagtgcagctatggacacggttacggagagtgaaatggccatatctcttgctaggactggtggcatgggtgttatccataagaacctatctatcgaagatcaatctaatatggttgataaagtaaaacgttctgaaagtggcatgatactaaacccgatcactattgaggaatcatcaaccatagaagatgcaaaaaagatcatgtctgagtataagataagtggactacccgttgttaaaaatgatcgccttgtgggtattataacaaatcgagatattcgctttgaaactaacgatctgctttctgtttcggaatgtatgacatcaaaggatctcgtatctgttccagttggtacttcccttgaaaaggctaaggatattctccaagagcatagaattgaaaaactattagtagtagataaagatcataacttaactggattaattaccgttaaggatattcaaaaaaatgaagactaccctcacgcgtgcaaagatgataacggtcgtttaagggttggtgctgcagttggagtctcaggagatgctattgaaagagcatcgcagcttgcaagtgccgatgtggatgctatagtgatcgatactgcacatggtcattcaaaaggtgtacttaggtcaattgaaaagatcaagagttcacatccaactgttgctttaattgctggaaatgttgcgacaggtgatggagcgcaggctatgatcgatgcaggtgttgattgtgtgaaagttggtattggtgcaggagcaagttgtacaacaagggtaatagctggagtaggcgtaccgcaattaactgccataatggattgtgtggatattgctagaaaaaataatattcctgtcattgctgatggtggacttcgttatagtggagatcttgcaaaagcactggcagtaggtgcaaactcagtcatgttaggtagtctattggctggtatggatgagagtcctggagaaacgatcctttatgaaggtcgccaatataaatcttataggggaatggggtcgatgggagccatgcagcaaggtagtggtgacagatattttcaggaaggttcagaagaaactaaattagttccagagggaattgaaggcatggtgccatacaggggaccagttcgaaatacgatacatcaaatgatcggtggtattaggtcttcaatgggatattgcggttgtagtaccatagaagagtttggaatgaacacaacgttggtgcaggttacctcagctgcactgaaggaaaaccatcctcatgaagttaggatcgtaaaggaagcgcctaactatcaagtatcagatgggtaat

SEQ ID NO: 205020 - DNA, 1459 bp, Unknown
  Bacterial polypeptide expressing nucleotide sequence isolated from the Sargasso Sea
catggacaaagtaaaagataaagcactaactttcgatgatgttctgcttgttcctgcctacagcgactttcttccaagccaagcatctctaaagacttccctaacaaaaaacattgaaattaacctgccgcttgtttcagctgcaatggatactgttacagaatataggatggctatagcgcttgctgaagctggaggcataggtattcttcataaaaattgctccatcaaagagcaaatgaatgcagtaagaaatgtaaaaaaatatgaaagtggtgtagttcgtgacccaacaaccataagttcaaataagactataggccaactaaaacaactaactgatgaactcaatgtatctggaatgcctgttgtcgatgatggagttgtaaaaggcatagtaaccagcagagactttagatatgcagacaatatggatgacttagtttcatcaattatgactccgagagagaagttaataacagtatctgaagatacatctcaagatgttgtaaaaaaattaatgtatgaaaataggattgagaaagtccttgttctgaatggagaggagcttaccggtcttgtaacgatgaaagatattgagaaatctgaaaaacatccaaatgcaacaaaggatgaagcaggacagctaagagtaggagctgcaataggaactggagctgaaacaatggaaagagcaaaagctttatatgaagcaggtgttgatttattcgttattgatagtgctcatggtcattcaaagaatgttgtggaaacaattaaagctataaaaaaagagttttcagataaagatgtaattgcaggaaatgttgctactcctgaaggagcagaagcgctaattgatgctggagctgattcagtaaaaattggcatgggtcctggatctatttgtactacgagaattattgcaggaattggtgtgccgcaaatttcagctatcctttctatttataaaaaagttaagggtaaagtgccgctaattgcagatggcggtatgagatattctggtgatattgctaaggcaattgcagctggtgctgactgtgtaatgcttggaagtatctttgctggtaccgaggaagcgccgggagaatttgaactctatcaaggaagaagctttaagacttacagaggcatgggatcacttggagcaatgtcaaaacgtgatgacactgatagatattttcaagaggatgttgatgctgagaaactcgttccagagggagttgaaggaagagtgccttataaaggttgggctataaatgtgattaatcaactagtgggaggccttagacaaagtatgggctacgtgggttgcaaaaatattcatgaaatgaaagagaatagtaaatttgtcgagattacaaatgctggaatgacagaaagtcatgtgcacgatgttcaaattactaaagaagcaccaaactaccaaagaagttag

SEQ ID NO: 205021 - DNA, 790 bp, Unknown
  Bacterial polypeptide expressing nucleotide sequence isolated from the Sargasso Sea
agaagattggcaagaaaggataaaagaactcataaaagtaggagtagatgcaattgttgttgatacagcacatggccactctgaatttgttttaaaattagttaaagaaataaaaaaagaatttccaaatttagatttaatcgcgggaaatgtagcaacccctgaagcaacagaagatttgataaaagctggtgcagattgtgtaaaaattggcatcggtgcaggctctagttgcactacaagaatcattgctggagttggagtaccacagctatcagctgttatggactgttctcaggttggaataaagcacaatatacctataattgcggacggtggtattaggtatagtggagatattgcaaaatctttggctgctggtgcaaatgtagtaatgcttggaggtatgcttgctggcatggatgaaagtccaggagaaactattgtttatgaaggaagaagatataagtcttatagaggaatgggttcgctagctgcaatgaaagaagggggcggtgaaagatattttcaacaagaaaaagatgaattaaaattggttccagaaggaatcgagggaatggttccatttagaggtccagttaataatacaattttccaattaattggaggtttaaaatcttcaatgggctattgtggcgccaaagatctaaagtcattatatgaaaataaaaaatttattgaaatttcatctgcaggagttaaagaaagtcaccctcacgaagtaagtattatcaaggaagccccaaactatcagggtcacgataagtaa

SEQ ID NO: 205022 - DNA, 711 bp, Unknown
  Bacterial polypeptide expressing nucleotide sequence isolated from the Sargasso Sea
tagataccgcccatggacacacaaaaaaagtaggagagataattaaaaaaattaagaagattaaaccaaaatcagtctctctttgtgcaggaaatgttgctactgaagatgcagcaaagtttttaattaaattaggagtagatattataaaggttggtattggcccaggttcaatttgcacaacaagattagttgctggtattggggtaccacaacttagtgcaattcttaatgtaagaaacggggttaaaagtaggaaagtaagcattattgccgatggagggataaaattttctggagatatagcaaaagctcttgcggcaggtgcagatgcggtaatgataggctcattatttgctggaacagatgaggcgccagggaaagtaataagaagaggtggtaaattgtttaaaagctttagaggcatggggtcaattggtgccatgaaccgaggttcagcagatagatattatcaatcaaaacaaaaggataaatcaaagtatgtccctgagggagttgagggatttgtaaaatataaaggtagagtagataaaatattctatcagttgattggtggattaaagtcttcaatgggataccttggagcaaaaaaaataaaaattttaaggcaaaatccaaaatttgttaaaattacaaaagcaggattttatgaaagtatggtacataacatcgatgaaattaaaaaataaa

SEQ ID NO: 205023 - DNA, 1078 bp, Unknown
  Bacterial polypeptide expressing nucleotide sequence isolated from the Sargasso Sea
atggatcctataaaagaagcacttaccttcgacgatgttactttagcgccaaaatattcaaaagtcttaccatccgacgtatcaacaagaacttcattatcaaatcaattaaaattagatatccctattctttcatctgcaatggatactgttacagagtcaaagatggctattgctttagctaaacaaggaggattaggtgttattcatagaaatttaaccatatctcaacaaattaatgaaataaaaaaagtaaagtcaaaaagttttaaagtaggagctgctgtaggaacaaacgaaagtgaattaaatagaataaagaatattttaaaacttaatatcgatctaattgtagttgatacagctcatggacatagtcaaaaagttgcagatacaattttaaaaattaaaaaaattaaaccaaaaaaaactactttatgtgcaggcaatatagctactgcagaggcagcaagatttttgtctaagttaggggttgatgttataaaagtcggtattggacctggttcaatatgcacaacaagactggttgcaggtattggtgttccacaattgagtgcgcttctagatgttaagaagggacttaacaaaaaagtaaaaatgatttctgatggtggtattaaattttctggtgatattgcaaaagctttagcagcaggagctgatgcagtaatggttggctcaatgctcgcgggtacatctgaggcaccaggaaaaattataaaaaagaagggcaaattatttaaagtgtttagaggaatgggttctgtgggagctatgaataaaggttctgccgatagatattttcaaaaaaaacaaaaagataaatctaagtatgtaccagaaggagttgaaggtttgattaaatataaaggggatgtaagcaagactattaacaagttagtaggaggtcttagatcttcaatgggatatttgggtgctgagcaaataaaatatctaaataaaaaagctaaatttgttaaaattacaaaagctggtttttacgaaagtatggtacatagtatagacgaagtaaaaaagaatagtgaatatttatgaa

SEQ ID NO: 205024 - DNA, 1258 bp, Unknown
  Bacterial polypeptide expressing nucleotide sequence isolated from the Sargasso Sea
tgatattcttctggttccgggttatgcagagattcatccctccgtggtttccctgaaaagcaaactgacgcgcaaacttgagtgcaacattccctttctcagcgcggcgatggatacggttacggaggctgacacagcgatatgcatggcccaggaaggcggtctcggggtgattcataaaaacctctccattgaggaacaggcgaatcaggtcaatcgagttaaacgatctgaaagcggaatgatcaccaatccgatcaccattgaacctgaccagccgatcagcaaagcccttaagctgatggaacgttatcggatttccggagtccctgtcatccgcgggacggagctggtgggcatcctcaccaaccgtgaccttcgtttcgaaaccaatcatgaaaaacccgtctcggaattgatgaccggaggccgggacaaactcgtcaccgttgctccgggaatcgagatggaagcggccaaacgcctgctgcaccaacaccggattgaaaaacttttggtggttaatgccaattatgaattgcagggactcatcaccattaaagatattgaaaaagcccggaaatacccgaacgccaacaaggacgtggtaggcaggttgctggtgggtgcggcattaggagtttcggaagatctgcttcaaagggcggaagtcctgattcaggcggaagtggacttagtcgtgcttgattccgctcatggtcattctcagggagtactcgaaggcatccgtaagttgcgaagtcatttcccggaactgcaaatcgtgggtggaaacattgccacagccgagggagcagatgccctgatcgatgcaggagtggatgcagtcaaggtgggcatcggcccgggatcgatttgcaccacacgaatggtggcaggcattggaatgcctcaaatatcagccattgacagcgttgccgaagcccttcgtaaaaccgatgtcccgatcattgctgatggaggaatcaaatactccggggatatcgtcaaagccctggccgccggtgcacacagcgtgatgatcggcagtctctttgcaggaactaccgaaaccccaggacaggtcattctttaccagggccgccgctacaaactttaccgtgggatggggtctctcggtgccatgaaggaaggaagcaaagaccgttatttccagacgggagttcaggaggttcagaaactggttcccgaaggaatcgaaggacgggttcccttcaaggggcctttggcggaatcc

SEQ ID NO: 205025 - DNA, 793 bp, Unknown
  Bacterial polypeptide expressing nucleotide sequence isolated from the Sargasso Sea
acttggagaagatacgcttagtagagcagaggctttagctcaagcaggagttgatgtttttgtaattgatagtgcgcatggccactctttaaatgtaattaatactattaaagcaataaaagataaatttaaagatgttgatgtcattggggggaatattgctacagctgaagcagctacagagcttgtgaaagctggcgctgatgctgtaaaggttggtatgggaccaggttctatatgcaccacaagaatcattgctggcataggagtgcctcaaattagtgcaattttggaaattaagaaagctctttatggaaaagatattaatattattgcagatggaggaattagattctcaggagatatagcaaaagctatagcggctggtgcagattctgtgatgctaggaagcctttttgcaggaactgaagaagcccccggaaaagttgagctttttcaaggaagaagttttaaaacatatagaggaatgggatctattggagctatgactgaaagagatgatgctaatagatatttacaggaagatgttgagaccgataaattggtgcctgagggaatagaagggagagttccctataaaggtttagtaattaatgtaatcaatcaattagttggtggagttaggcaaagtatggggtatattggctgtaaatgtatcaaagatatgcaaaacaatagtcaatttgtagaaattacaaatgctggtatggctgagagtcatgtgcatgatgtaatgattaccaaagaagcaccaaactatcaaagaagttaa

SEQ ID NO: 205026 - DNA, 1468 bp, Unknown
  Bacterial polypeptide expressing nucleotide sequence isolated from the Sargasso Sea
atggagcgctccactattcaaaaatccctttcatttgatgatgttttaataaagcctgcgcgctcatctattctgccaactgaggtccaatcacatacatctataacctcaaatattaaacttggcataccattaatctcatcggctatggacactgtcacagaatataagttagctatcgctattgctcaatctggtgggctagggatacttcataaaaatatgtctatagacgatcaagctcaaaatgttgcaaaagttaaaaagtttgaaactggcatggtaattgacccagtaaccatagcccctgaagccactctatcagatgctttagatctaatgaaagagcatcagatttctggtgtccctgtagttgatagtaacgataaattgcttggtattttaacgaatagggatgttcgtttcgcaactaatatgtctcaaaaaattagtgagttaatgacaagtgaaaatttgattactgtaaaagagggaatctcaagtgatgatgcccaaaaattccttcatgcccatagaattgaaaaactaatcgttgttgacgataatagaaagtgcattggcttaatcacagtgaaagatatcgaaaaaagtcaattgaaccctcacgcttctaaggatgccaaaggtaggctattagtaggttctgcaataggcgttggaatagaagcaattaatagggctgagcgtttagttgatgctggtgtagatgtgttagtaatagatactgcccatggccactcagaaaaagtcatttctactcttgaggaaattaaatctcatttttccattgatgtagttgttggcaatgtggctacaaaagaagctacagcagaattaattgataaaggtgcagattgtataaaagttggcataggtccagggtcaatttgtaccactagggtggtggctggaataggggtccctcaattctcagcaattttggattgtgctgaaattgcaaacaaaaaaaatattccggttattgctgatggaggcataaaatattctggagatattgcaaaagcgctgggtgcaggagctaacgcagttatgataggatcattatttgcaggaactgacgagtcaccaggtgaagtctacttatttaaaggtagaagttataaatcatatcgtggaatgggttccttgggcgcaatggcacgagggtctgcagatagatattttcaagaggaaattacagaaagcaataaacatgtacctgaaggaattgaaggaagagtgccttacaaaggtccaatatcaccaataatataccaactcgttggcggcttgaaagcatcaatgggctacacaggctcaaaagatataatgcaatttaaaaagaatgttcagtttattgaaatcacaggagcaggattaaaagagagtcatgtgcatgatgttgatattactcgtgagtcaccaaattacccaaccaacatttaag

SEQ ID NO: 205027 - DNA, 1135 bp, Unknown
  Bacterial polypeptide expressing nucleotide sequence isolated from the Sargasso Sea
aatgaaagaaaataatatttcaggagtgcctgtaacagacacaaaaacgaataaacttgaaggaattttgacaaatagagatgttagatttgcgtctaataagaatcaaaaagtatctgaacttatgactaagaatgatttgattacagttaaagataatgtttctgaaaatgaagcaaaggaaatacttcataaacaccgaatagaaaaattgcttgttgttgatgagaaatatcgttgtattggtttaattactgtaaaagatatcgaaaaatctaatttacatcccgatgcaacaaaagatgaaaagggtaggttaagggttgcagcagcgacaacagttggggacgaaggttttaaaagagccgaagcattaattgatagtgaaacagatataattgttgtggatactgcgcatggtcactctgttaaagttccaaagattattgaaaggataaagaaactatcaaattctgttcaggttgttgctggtaatgttgcaactaaagaagcttcaaaatcattaattggtgcaggagcagattgtataaaggttggtattggcccaggatcaatatgtacaacaagaataattgcaggtgttggtgtgccacagcttacagcaattatggattgtgttgatgaggctaaaaagcattcaatacccgtcattgctgatggcggtattaagttttcaggagatttagctaaagcaatagctggaggcgctgaccttgcaatgataggatctctttttgctggaacagatgaaacaccaggagaagtatttcttcatcaaggtagaagattcaaatcctatagaggaatgggatcagttgcagctatgtctgaaggttctgcagatagatatttccaatctgatctaagtgcatcggataaacttgtgcctgaaggaatcgaaggacaagtaccttatattggatcagtgcataatgtaatttatcaattagtaggtggtttaagggcatcaatgggttacacaggttgtaaaaatttagacgatttccagacgaaaactaactttattaaaattacaacagcatcattaaacgaaagtcatacgcacgatgtagtcgtaactcgagaagcccctaattatcctacaagaggttaa

SEQ ID NO: 205028 - DNA, 1438 bp, Unknown
  Bacterial polypeptide expressing nucleotide sequence isolated from the Sargasso Sea
ttgacaataagagaaggattcacttttgatgatgttctccttgtacccaaattttctgatataactagtcgttcacaaactgatctctcaacaaaactttctcaaaatattaaactcaatattcctttagttagtgcaaatatggatactgtgacagaatctactatggcaacaaccatggctcgacaaggaggaattggaattattcatagatttttgacaatagaagaagaagctgaacaagttctaaaagtcaaacgctctggaagtgtaatgattgataatccctaccaaatatcttctgaaaaatctgttgaagaagctattgatttaatgaatgaaaaagaagtatctggattactagtagtcgattctggttctaaacttgttggtgttttaactgagcgtgatgtactttttgaatcaatcaattcaaaaaaatcagtgtctgaattaatgactaaagatgttatttcttcaaatgaaaatacaacattagatgaagcaaaagatattctaaaaagtcatagaattgaaaaattacctttagtaaatgacaaaaatcacattgttggtctttatactactcaggatattttgaatattgaaaatttcccaaatgcgtcaaaagataagaagggcagaccacttgttggagctgcagttggagttaaaggtgactttttagatagaactgaagcattacttggtgctggtgcagatgcaattgtagttgatattgcgcacggtcacagtgagaatgcaatcagtacagtaaaaaatattaaaaaagcatttcctaattgtgaactaattgctggaaatgtagcgacagctcaaggtactgaagatttgattaaagctggagttgatgcagttaaagttggtgttggttcgggttcaatttgtattacacgagtaattactggttctggtgtacctcaattaacagctgtaatggattgtgctgaaattggaaaacaatatgatataccaattatctctgatggtggaacaagaacatccggagatgcaactaaagcattagctgctggtgcatcatctgttatgttaggaagtatgttaggtggaactgatgaaagtcctggctcaacaatcacaaagaatggaaaaagatacaagttttacagtggaatggcatctttaggagccgcacgaagaagaaaatcaaaagaagttacacaaactgatagcgaagatgatctaaatgattatgttgctgaaggagtggaggcaatggttccatacaaaggcactgtaattgatattcttgttcaaattactggtggaatacgttctggtttgagttattgtggcggacatgatatcaaacaaatgcaaaataatgctgaatttatcaaaatgtcacgtgctggatttgcagaaagtcaaccccatgatgttgacgtactatagc

SEQ ID NO: 205029 - DNA, 927 bp, Unknown
  Bacterial polypeptide expressing nucleotide sequence isolated from the Sargasso Sea
catggacaaagtaaaagccaaagcactcactttcgatgatgtacttcttcttccgtcctattgcgactttcttccaagccaagcatctgtaaagacgtctctcaccaaaaatattgatattaatttgccgttgttatctgctgctatggatacagttacagaatatagaatggcaattgccctcgcagaagcaggaggtatgggaattctgcacaaaaattgttcgatccaagagcaatcaaatgctgttaggaatgtaaaaaaatatgaaagtggagttgttcgtgatccaaccacaataagctctaaacaaacaatcggtcaattaaaacaactcacaggagagttaaatatatctggtatgcctgtggttgatgatggagtggtaaaaggaatagtaaccagtagagattttagatatgcagacaatatggatgatctggttgaatcgattatgacacctcgtgaaaaattaattacggttcttgaaggtacctcacaagaggtagttaagaaaatgatgtatgaaaacagaattgaaaaagttcttgtcttagataaggcagaaaagttaaccggtttagtaacaatgaaagatattgaaaagtctgaaaagcatccaaatgctactaaggatgatgcaggtcagctaagagttggagctgcaataggaacaggagctgaaactcttgatagagctaagtctttagctgattcaggagttgatttgtttgttgttgatagtgcgcatggtcacactaaaagtgtaatagagacagtaaaaatgattaaaaaagaatttccaactaaagatgtcattgctggaaatgttgctaccccagaaggagcagaagcgttaatagaagctggtgcagattgcataaagattggaatgggtccaggatcaatatgtacaacaagaattat

SEQ ID NO: 205030 - DNA, 1471 bp, Unknown
  Bacterial polypeptide expressing nucleotide sequence isolated from the Sargasso Sea
atgccaaataaaccaccattcatttataaatatacttttgatgatgttcttcttgtaccacagtcatcaaaagtgctccctaaagatgtgaatttgtcttctaatattactagtagtataaaaataaatataccgttaataagtgctgcaatggatacagtaactgaaagcgaaatggctattgcgttagccagagaaggtggaatgggagttattcataaaaatctttcaatttctgatcaagtaaatatggttgataaagtaaaaagatcagaaagtggaatgataataaatcctcttattatggatccttctaaaacaatacgtgaagcaaaagcgatgatggataattatcatattagcggactacctgtcgttaaagatggaaaactagttggaataattaccaatagagatattcgttttgaaaaagatttagatctatttgttagtgatcgtatgactactgaaagtttagttacagtacccgtaggtactactttggataaagcaaaagaaatacttcaagaacatcgtatagagaaactattagtagttgatggagacggctcactagcagggctaataaccgtcaaagatattcaaaaaaaagaacaatttcctatcgcatgtaaagataaaaatggacgtttaagagttgctgcagctataggtgttaatgatgaagcaattgaacgtgctcaagcactgcaaaattctggtttagatgcattagtagtagatactgctcatggtcactcttctggcgtattaaaattaattgaaaaattgaagcatagtataggcacaatggctctaattgctgggaatgtagcaactaaagagggagtaaggtctctgatagatgctggagttgactgtccaaaaataggaataggtgcaggagctagttgtacaacaagagtagttgcaggtgttggagttccacaattatcttcaattatagattgcgccgaagaggctgcaaaatctaatattccaattatagcagatggtggaatacgttacagcggtgatatagcaaaatcaattgctgctggagcaagctctgtgatgttaggaagcttactggctggaatggatgaaagtccgggtgaaactatattatttgaaggtagacaatataaatcatatcgtggtatgggctcactaggagcgatgaaagaaggaagtggggatcgttatttccaagagggcgctgaatcaacaaaattagttcctgaaggtatagagggtatggttccatatagaggaccagttcgaaatactattcatcagttgactggaggattaaaagcttctatgggttattgtggagctgacacaatttcaaattttagtaaaaatagtaatttcattcaaattacaagtgctggtgtaaaggaaggccatccacatgaggtaaaggttattaaagaagcacctaattatcaaatttctgatgaataaa

SEQ ID NO: 205031 - DNA, 820 bp, Unknown
  Bacterial polypeptide expressing nucleotide sequence isolated from the Sargasso Sea
tttggttggagcagctgttggtgttggtgatggttctgaggagagagtagaggcgctcaaatcagctggtgttgatgtgatcgttgttgataccgcacatgcacacaccgaaggggtgatcaatcaagttaaagcaataaaaaaaatgcaccctgatctagaggtcattgctggaaacattgcgacaggagaggctgcgaaagcactttcagaagcaggagcagatgcagttaaagtcggaataggccctggctcaatatgcaccactcgcgttgttgcaggagctggtatgccacaagtcacagcaattgctgatgttgcgaaagaactcaagggaacagatacatgcatcatcgcagatggtggcattcgttattcaggagacatagcaaaagcaatcgcagcaggtgctgacagcatcatgttgggcagtctatttgctggaacagaagaatcacccggtgagatagagctttatcaaggaagaagttttaaatcatatcgtggtatgggctctttgggagcaatggctcaacaacacggctccaaagatcgatatttccaaagcgatgttgaggaggcagaaaaattggtcccagaaggcattgaaggaagggtgccttataaagggaagctttccaaaatcatcgaacagcttgttggcggattgcgacagtcaatgggatacacaggatgtaaagatatccaggaactccagacaaaaactgagtttgtcagaatcacagattctggaaaaagagaagggcatgttcacgatgtcagcatcaccaaagaagcacccaattactctgtcgattag

SEQ ID NO: 205032 - DNA, 1066 bp, Unknown
  Bacterial polypeptide expressing nucleotide sequence isolated from the Sargasso Sea
catggatcctatcaaagaagcactcactttcgatgatgtaactttagcaccaaattattctgaaattttaccttcagaagtaaggacagaagttaaattatcaaaacacttaaatatttctataccccttctaacttcagcaatggatactgtaacagagtctaatatggctatttcaatcggtaaaaggggtggaataggtgttatacatagaaatttatcaataaatgatcagataaaagaaataagaaaagtaagagcaaaaaaaatgttagttggtgcagctgttggtgcaagtttaaacgaacacataagagctcaaaagattttaaaagaaaatatcgatttaattgttgttgatacagctcatggccacacaaaaaaagtagctgaaataataaaaaaaattaaaaaaattaaaccaactaaaacagctttatgtgcaggtaatattgctacagcagaagcagctaaatttctgattaagcaaggagtagatattataaaagttggaattggaccaggatctatatgcactacaagattagttgcggggataggagttccacagttaagtgcaattttagatgtaaaaaaaggtatgggcaaaagtaaaacaacattaatagctgatggaggtatcaaattttctggggatattgcaaaagcacttgcagcaggagcagatgcggtaatgattggatcattatttgcaggaacagatcaggctccaggaagaattattaaaagaggtggtaaattatttaaaagttttagaggcatgggatctattggagcaatgaataaaggatcagcagatagatattttcaatcaaaacaaaaagatacttcaaaatatgtagcagaaggtgttgaaggttttgttaaatacaaaggcacagttgaaaaaataatctaccaactagtagggggtttaaaatcatcaatgggatacttaggtgcaaaaagaattaaagatctcagaaaaaaaccaaaatttgtcaaaattactaaagcaggtttttatgaaagtatggtacataacatagacgaaataaaaagatga

SEQ ID NO: 205033 - DNA, 1462 bp, Unknown
  Bacterial polypeptide expressing nucleotide sequence isolated from the Sargasso Sea
atggacaaagtaaaagccaaagcactcactttcgatgatgttcttcttgttccttcttattgcgactttcttccaagccaggcatctgtaaagacgtctcttacaaaaaatatagatattaatttgccgttgttatctgcggctatggatacagttacagaatatagaatggcaattgcccttgcagaagcaggaggtataggaattcttcacaaaaactgttccatccaagaacaatcaaatgctgtcaggaatgtaaaaaaatatgaaagtggagttgtgcgcgatccaaccacaataagctctaaacaaacaattggccaattaaaacaactcacaggagagttaaatatatctggtatgcctgtggttgataatggagtggtaaaaggaattgttaccagtagagattttagatatgcagataatatggatggcctggttgaatcgattatgacgcctagtgaaaaattaataaccgtgctcgaaggcacctctcaagaagtagttaaaaaaatgatgtatgaaaacaggattgaaaaagttcttgtcttagataaatcagagaagttaaccggtctagtaacaatgaaagatatagaaaagtctgaaaagcatccaaacgctactaaggatgatgcaggtcagctcagggttggagctgcaataggaactggagctgaaactttagatagagctaaatctctatttgattcaggggtcgatttatttgttgttgatagtgcgcatggtcatactaaaagtgtaatagagacagtaaaaaagattaaaaaagaatttccaaccaaagatatcattgctggaaatgttgctacaccagaaggagcagaggcactaatagaagcaggtgcagatggtattaagattggaatgggtccaggatcaatttgtacaacaagaattattgctggtatcggagttccacaaatttctgcaatattaacaatttatgaaagagtaaaaggaaaggtgccgctaatagctgatggaggcatgcgatattcaggagatatagccaaagcagttgcagcaggagctgacagcgtaatgcttggaagcatttttgctggaactgaggaagcacctggagaatttgagctctatcaaggaagaagctttaagacttacagaggaatgggttccttgggagcaatgtctaaaagagatgatagcaacagatactttcaagaagatattgatgctgaaaaacttgtacctgaaggcgttgagggcagggttccttataaaggatgggctatcaatgttattaaccaacttattggcggtcttaggcagagtatgggttatgtgggttgtaaaaatattcaagaaatgaaagaaaatagtagattcgttgaaattacaaatgctgggatgacagaaagtcatgtgcatgatgttcaaatcactaaagaagcaccaaactatcaaagaagttaag

SEQ ID NO: 205034 - DNA, 808 bp, Unknown
  Bacterial polypeptide expressing nucleotide sequence isolated from the Sargasso Sea
atgcgtctgatccaaacagcactcacgttcgatgacgtgctcctcgtcccggctttctccgatgttctgccgcgcgacaccagcctcaagacccggctgacccgcaacatctccctgaatatgccgctcgtgtccgccgccatggacaccgtcaccgaagcccgtctcgcgatcgcgatggcgcaaatgggtggcgtgggcatcatccacaagaatctcaccgcagccgagcaggcgcgtgaagttgccaaggtcaagcgcttcgaatcgggcgtcgtgcgcgatccgatcaccgtgccgccgcaaatgaaggttcgcgacgtcattgcgctgtcacgccagcatggcatttcgggcttcccggtcgtcgaaggcgcgcaactggtcggcatcgtcacgaaccgcgacttgcgttttgaagagcgtctcgacgaaccggtgcgcaacatcatgacgccgcgcgagcgtctcgtcaccgtcaaggaaggcacgccgctcgccgaagccaaggcgctgatgcacagccaccgccttgagcgcgtgctggtcatcaacgacgcattcgaactgcgcggcctgatgaccgtcaaggacatcaccaagcaaaccgagcacccggacgcgtgtaaagacgagcacggcaagctgcgcgcgggcgcggcggtcggagtgggcgaagacaatgaagaacgcgttgagctgctggtgcaggcgggcgtcgacgtcatcgtggtcgacacggcgcatggtcacagcaagggcgtgctcgagcgcgttcgctgggtcaagcagaacttcccgcacgttg

SEQ ID NO: 205035 - DNA, 1465 bp, Unknown
  Bacterial polypeptide expressing nucleotide sequence isolated from the Sargasso Sea
tatggaaaaattaaaacataaagcgttaacgttcgatgacgtcttacttcttcctcgttatagtgattttcttccaagcgaagttgacatttcgtcaaacttaactgaaaaaatctcacttaaaatgccgttattgtcagctgcaatggataccgtaacagaatctatgatggcaatttctcttgctgaagctggaggaattggagtgattcataaaaatagttcaattaatgaacaggctagtgaagttaaaactgttaaaaaatatgaaagtggtattgttagagatccagtaaccataagctcaactagttcaattgaggaattaaaaaaacttacaaatgaactaagtatttcaggtatgccagttgttgataatggaaaattaaaaggtattgttactagcagagattttcgttatgcagaaaatatggtttcaaatgtatcgacaataatgactccttttgaaaaattagtaactgttgaagaagggttctctcaagacaaagttatgcagttgatgtatgagaacagaattgaaaaaattcttgttcttgataaaagtagaaatttatctggcctagttacaatgaaagatattgaaaaatctgctcttcatccaaatgccactaaagatgaatctggacgactaagagtagcagctgcaattggcactgaaaataatacaatagaaagagcagaagcattgtttgctgcaggtgttgatgtttttgtgattgatagtgctcatggtcattctaaaaatgttatcgatactatcaaagatatcagaaataaatttaaggaagtagaaataattgcaggaaacattgctactgcaagtgctgcagttgagctttcagaagctggcgttgatgcagttaaggtaggtatgggacctggatcaatatgcacaacaagaataattgccggaattggagtgcctcaaataactgcaattcttaaaattaaagaagcactaaaaaaagagaatgttaatgttatagctgatggcggtattcgcttttcaggtgatattgcaaaagcaattgctgcaggagctgactcagttatgttaggaagtttatttgcaggtactgaagaggcgcctggtaaagttgagctttttcaaggaagaagctttaaaacatatagaggaatgggatcaattggagcaatgactgaaagaaatgatgctaatagatatcttcaagaggatatagaatccgataaattagttcctgagggcattgaaggaagagttccatataagggcttagttataaatgtaattaatcagctagaaggaggtttgcgacaaagtatgggttatgttggttgtaaaaatataagtgaaatgcagtctaaaacccaatttattgaaataactaatgctggtatggcagaaagtcatgttcatgatgtaatgattactaaagaggcgccaaattatcaaaaaagctaa

SEQ ID NO: 205036 - DNA, 1456 bp, Unknown
  Bacterial polypeptide expressing nucleotide sequence isolated from the Sargasso Sea
atgatagtggaagccctaacttttgatgatgttttaataaagccctgcgcatcaagtgtgcttccaaaccaaactgagctaactacaaacataacatcagcaataaaattaaatatcccaataatctcaagcgcaatggatacggtcacagaagctaatctggctatcgccatggctcaagtagggggcatgggtgttattcatagaaatttagagccgaaagagcaggcaaatcaaattgctcaggtgaagaaatttgagtctgggatggttgtaaatcccgttaccataaatcaagacgcaaaactgaaagaggctatcaacttgatgcataatcactcaatatctggcattccagttgttgcaaaaaataacaaacttgttggtattattactaaccgtgacgtgagatttataaccgactttgatgttgcagtcgcagatttaatgacaaaggataaaattataactgtcaatgagaacgcgacaactgaagaggcaaagggtttattacataagtatagaattgaaaagcttattgttgttgataaagattataaatgcattggcttgataactgtaaaagacatcgaaaaagcaaaactctatcctgatgcgagtaaagacacgcttggtagattgattgttggtggcgccacaacagttggaaaaaagggaatggaacgaactgagttacttgttgatgctggcgctgatattgttgttgttgatacggcgcatggacattcttccagagtaattaaggcagtggaagaaatcaaaaagaaatataatgttcaagttatggcaggcaatatagcaactaaagaagctgcacaggctttagtcgatgcaggtgcggatgctgtcaaggttggcattggccctggctcaatttgtacaactcgagttgttgctggaattggtgttccgcagttttccgcaatactcgagacagcagattatttgaccaaagccaatattcctctaattgcagatgggggaataaaatattcaggtgatctagcaaaagcacttgcaggaggagcaaatgcagctatgatcggatctttatttgcgggcactgatgaaagccctggtgagatcttcctttatcaaggcaggagctacaagtattatcgtggcatgggatcactcggcgcgatggcaagaggctctgcagacagatactttcaagaggaagtaaaggatacatacaagttagttcctgaaggtatagaggggcaggtaccctacaaaggcccgttatctggtgtaatacaccagctcataggtggattgagggcatcaatgggctatactggcgcaaaaaatttgtcagagtttagaaaaaatgcagttttccaaagaatatcgagcgcagggcttaaagaaagtcatgtgcatgatgtcgtcataacacgtgagtcaccaaactatccatcagtccgttgaa

SEQ ID NO: 205037 - DNA, 892 bp, Unknown
  Bacterial polypeptide expressing nucleotide sequence isolated from the Sargasso Sea
tatgggtacaataaatgaatctttaacctttgacgatgttttacttcttccaagatattcaaatattttgccttcagatacaaatatttcattaaatttaacaaaaaaaattattcttaaggtcccttttctttcttctgctatggacacagttacagagtcaagaatggctattgctatagctaaatccggtggattagggataattcaccgaaatttaaatataaatgatcaaaccaaagaaattattaaagttaagaataaaaatttattggtaggtgcagcagtaggaactagcaaagaggatctattaaggtctaaatatttgatagataatggatgtgatttgatagtagttgatacagctcatggacatagtgaaaaagttttaaggactttatcaaaattaaaaaaaattaacggtacaattccaatatgtgtaggaaatatagcaacaggagaagctgcaaaaaaattatataattcaggggcagatataataaaagttgggatagggcctggttctatttgtacgacaagaatggtagctggaattggagtaccacaattatctgcagtaatggatgtaaaaaaagctcttaaaaataaaaaagtgaagatcgtttctgatggtggaattaaattttctggagacattgcaaaagctttggcagctggtgctgatgcaattatgatgggctcaatatttgcaggtacagaggaaagcccagggaaaaaatttaaatataaaggcaaactttacaaacagtttagggggatgggatcgataggcgcaatgtcttcaggatcagccaataggtattttcaaaaaaattttaaagataaatataaatttgtgccagaaggagttgcaggaagagtaatcttaaag

SEQ ID NO: 205038 - DNA, 1471 bp, Unknown
  Bacterial polypeptide expressing nucleotide sequence isolated from the Sargasso Sea
aatgttgcgtatcgtaaaccaagcactaacgttcgatgacgtcctccttgtgccagatcattcagatgtacttccaaaagatgttgatttaaaaacacgcttaactcaagaactcaacttaaatataccccttctttctgctgctatggatacagtgactgaatctcgtatgggcatcgcattaagtgaattgggaggaataggtattatccataagaatctttcaattgaaaaccaagccgcagaggttagaaaagtcaaaaaatatgaaagtggaattgtaagagatccaatcacaataagatctgataataaggtgggtgaattaatccagctaaccaacgaattgaatatttcaggtatgcctgtagtagatgacggaaaattagttggaatcgttactagtagagattttagatatcaagagcagcattcagttcaggtatctgagattatgactcctaaagataaattaattacagccaatgaaggagaaagccctgacgtaataaaaagacttttgcaggataataggatagaaaaaattctactagtcgatgactcttttactttgactggcttggttaccttaaaagatatcaataaatctctagattttccaaatgcaactcgtgatgaggaaggtagactccttgcaggagctgcaataggaacaaaaccagatacattagaaagatgcgaagcattagttgaagcaggagtagatgttctagttttggatagtgcacatggtcattcagaaggtgttttaaatcaaatcaaagcagtaaaatctacttttaaggatttacaaataatcggtggcaacatcgccactggtgaaggagcgctagcattggtagaagcaggagctgatgccgtaaaagtaggaattggtcctgggtcaatttgcacgacaagaattgttactggagttggagtgcctcaggtatccgcagttgcagaagtaacgcaggcactcaagaaaaaagatataccaatcattgcagatggtggaataagattttctggagatatagccaaagctatagctgctggaggacatacagtaatgctgggtagcgtgctagctggcactgaagaagctccaggggaattagagttatatcaaggaagaagttataaatcatatagaggcatgggttctataggagctatgtcaggtgatcaaggctcctctgatcgttattttcaagacagcgccggtgccactgaaaaattagttcctgaaggaatcgaggggagagttccttacaaaggctggcttgaagctgtaatacatcaaatgattggtggtctaaggcaaagtatgggatatacgggctcgcacgatataccatcaatgagaacaaaaactaaatttgttcaaatcacctctgctggagtgaatgaaagccatgttcatgatgttagtgtaactaaagaggcacctaactatagaatgagctaa

SEQ ID NO: 205039 - DNA, 1465 bp, Unknown
  Bacterial polypeptide expressing nucleotide sequence isolated from the Sargasso Sea
catgaaagtccgagaagcaattacctttgatgatgtattacttgagccctcagaatcttctgttctaccatcagagacaatcctaaaaactaaaatcacgaaagatattgatcttaatgtacctttagcttcagcagcaatggatacagtaacggagtctgagatggctatcgcaatggctcaagctggaggtattggcgtaattcacagaaatttagagatagaagatcaagtaaatgcagtaaataaagtaaaaaaatatgaatccgggatggttgtaaacccacttactatttctcctgagtctactcttgaggatgctctagttctgatgaaagaaaatagtatttcaggagtacctgtaacagataaaaaaacaaataaacttgagggaatccttacaaatagagatgttcgatttgcatctaacaagaatcaaaaagtttccgagttaatgactaaggaagagttgattactgttaaagataatgtttctgaaaatgaagcaaaggaaatccttcataaacaccgaattgagaaattacttgtcgttgatgataactatagttgtgtaggtttaataacagttaaagatattgagaaatctaatttacaccctgatgctacaaaagatgaaaagggaagattaagagtagcagctgcaacaacagttggagataaaggctttgaaagagctgaggcattaattgatagtgaaacagatataattgttgtggatactgcccacggtcattccattaaagttccaaaaattattgaaagaataaaaaagttatcaaattctgttcaggttgtcgctggaaatgttgcaaccaaggaggcgtcaaaatcattaattggggcgggtgctgattgtataaaagttggaattggcccaggttcgatatgcacaacgagaattattgcaggtgtaggcgtgcctcaacttacagcaataatggattgtgttgaggaagcaaaaaagaactcaatacctgttatagctgatggtggaataaaattttctggagatttggcaaaagccattgctggtggcgctgatttagcaatgataggctctctttttgctggaacagatgaaacaccaggagaagtttttcttcatcaaggaagaagatttaaatcatataggggtatgggttcagttgcagccatggcagaaggatctgcagataggtatttccaatctgaccttggagcttcggataaacttgttcctgaaggaattgaaggacaagtgccttatattggctcagttcacaatgtgatttatcaattggtgggtggattaagagcttctatgggctatacaggctgtaaaaatatagaagatttccaaactaaaactaattttattaaaattacatcagcatcattaaatgaaagtcatacgcatgatgttgttgtaactcgcgaagcacctaattatcctacaagaggttaa

SEQ ID NO: 205040 - DNA, 1462 bp, Unknown
  Bacterial polypeptide expressing nucleotide sequence isolated from the Sargasso Sea
tatggaaaaggttcttacagaagcattaacttttgacgatgtattggtgttgccaatgcattctaatgtcctgcctaaagaagtttcacttaaatcaaaatttactaaaaatataagtctaaatttacctttttgttctgctgcaatggatacagtcactgaagcaaaaatggcaattgcactagcatcccttggagggataggaataattcataaaaacaacactcctgaagagcaagccattcaagttaagcaggtgaaaaaatttgaaagtggcatagttagagatccaattagtattcgatcaaataatactattggagagcttaaacagttaacctcagaattaaagatatccggtatgcctgttgttgatgatgatgaattaaaaggaattgtgacaggaagagatttcaggtatgcaaaagatatggagcaaactgtttcagaaattatgacttcaagagaaaaactaatcacagtgaaagaaggggaaactcaagatgtcgttaaaacattaatgtataaacatagaattgaaaagattcttgttctggatgataaagataagctagttggcttaatgacaatgaaggatattgaaaaatcaattgattatcccttagcttcaagagattcagaaggtaggttgattgttggagcagctataggagttggcaaagatcttatggaaagaactaaagctttggttaatgctggtgttgatgtattcgtacttgatagtgcccatggtgattcaaaacgtgttattgatgcaataaaagagataaaaaagaaatttcctgagatagatattgttggcggcaatgtagcaacagcatcaggagctaaatcattaataaaggctggagtcgatgcaataaaagttggagttggcccaggatctatatgtacaactagagtagtctcaggagtgggcgtgcctcaattgtctgctgtgatggatattgttagtgtttctggagatattcctgtcatatcagatggaggggtaaggtattcaggagatattgtaaaagcaattggagctggagcgaatactgtaatgttaggcagtgtttttgctggcacagaagaagctccaggagaagtagagttatttcaaggtagaagctttaaaacttacagaggcatgggttcattaggagcaatgtcaaaaagagctgatgctgaaagatacatgcaaggcgaagaaacaaatgcagataagctagttcctgaaggtatcgaaggcagagtgccttttagaggttggctgaaagatgttgtttatcaattagaaggcggcttaagacaaggcatgggctatacaggctcaaaagatataacagatttacaaaaaagagttcaatttcaaaagatcactagatcaggtagagcagaaggtcatgttcatgatgtcagcataacgaaagaagcaccaaactatagagtggattaa

SEQ ID NO: 205041 - DNA, 1084 bp, Unknown
  Bacterial polypeptide expressing nucleotide sequence isolated from the Sargasso Sea
atgaaaaagaccgagtcatcggaattgttacccaatcgtgatatgcggtttgctgctgacagcagtacacctgtttcaagaatgatgacaaaagaaaacttagctattttaaccgagcctgcggatcgtcggcaagcaattaatctgatgaaagaaaggcgtattgaaaagttattgattacagataagcgaggtcgacttactggtttgctgactttaaaagatacagagcaagctgttttgaatcccacagcctgtaaagataaccttggaagattaagggttgcggctgcgacaacagttggtgacgagggatatttaaggtcagattgtttaatagatgctggcattgatttgctggttattgatacagctcacgggcattctgatgcagttattgaggctgtcggcagggtgaaaaaacgctcaaataacgttcaagtagtagcgggaaatgttgcaactgcagaagcatgtaaggctctaattgatgcgggggctgatgctataaaagttggaattggccctggatcaatttgtacaactcgaatggttgcaggtgttggagtcccacaattgactgcaatattggattgtgtagcggcttctggtcagacgcccgtcattgctgacggaggtataaaattctcaggagattttgccaaagcaattgctgcaggggcttcttgtgcaatggttggtagcatgattgcaggaacggatgagagccccggtgaggtaattttatatcagggaagatctttcaaagcttatagaggaatggggtcgcttggagcgatggctcgaggttctgcagatagatattttcaaaaggatgcagctagtgataaactcgtaccagaaggaattgagggccaagtcccatataaaggtccagctaatgctgtaatacaccaaatggtaggtggattaagagcctcaatgggctacacgggatgccagactatagaagagatgagaaataactgtcagtttgttaaaataacaggagcagggctaaaagaaagtcatgtgcacgatgtccaaattacaagagaaagcccaaattatcgcatcatttaat

SEQ ID NO: 205042 - DNA, 1278 bp, Unknown
  Bacterial polypeptide expressing nucleotide sequence isolated from the Sargasso Sea
catggacaaagtaaaagccaaagcactcactttcgatgatgtacttcttgttccatcctattgcgactttcttccaagtcaagcatctgtaaagacgtctctcactaaaaatattgatattaatttgccgttgttatctgctgcaatggatacagttacagaatatagaatggcaattgccctcgcagaagcaggaggtatgggaattctgcacaaaaattgttcgatccaagagcaatcaaatgctgttaggaatgtaaaaaaatatgaaagtggagttgttcgtgatccaaccacaataagctctaaacaaacaatcggccaattaaaacaactcacaggagagttaaatatatctggtatgcctgtggttgatgatggagtggtaaaaggaattgttaccagtagagactttagatatgcagataatatggatggcttagttgaatcgattatgacgcctagtgaaaaattaataaccgtgctcgaaggaacttctcaagaagtagttaaaaaaatgatgtatgagaataggattgaaaaagttcttgtcttagataaaacagaaaagttaaccggtttagtaacaatgaaagatatagaaaagtctgaaaagcatccaaacgctactaaggatgatgcaggtcaactcagagttggagctgcaataggaacaggatctgaaacctttgacagagctaagtctttagttgattcaggagttgatttatttgttgtcgatagtgctcatggtcatactaaaagtgtaatagagacagtaaaaatgattaaaaaagaatttccaactaaagatgtcattgctggaaatgttgctaccccagaaggagcagaggcgttaatagaagctggtgcagatggcataaagattggaatgggtccaggatcaatatgtacaacaagaattattgctggcattggagttccacaaatttctgcaatattgacaatttatgaaaaagtgaaaggaaaggtgccgctaatagctgatggcggtatgcgctattcaggagacatagccaaagcaattgcagcaggggctgacagcgtaatgcttggaagtatttttgctggaactgaagaagctcctggagaatttgagctctatcaaggaagaagcttcaagacttacagaggaatggggtccttgggagcaatgtctaaaagagatgatagcaacagatattttcaagaagatattgatgctgaaaaacttgtacctgaaggcgttgagggtagggttccttataaaggatgggc

SEQ ID NO: 205043 - DNA, 929 bp, Unknown
  Bacterial polypeptide expressing nucleotide sequence isolated from the Sargasso Sea
tatgggtcctattaaagaagcacttacattcgatgacgtaaccttggctccaaagtactccgaggtactaccttcagaggttgatacaaaaatacaattatcaaaacatatatctttaaaaatacctttattgtcttcagcaatggatacagttaccgagtcaaaaatggctattgcaatagctaaagcaggaggcattggtataattcatagaaatttaagtgtaactaaacaaattcaagaaataaaaaaagtaaaggcaaacaaactaattgtaggagctgcagtaggagctggtttaaatgaaattataagggcagatgcaatattaaaagaaggtgtagatttaattgttgttgataccgctcatggtcataccaaaaaagttgctgaaataattaaaaaaattaaaaaaaaaaaagatatgaaaacagcaatttgtgcaggaaatatagcaacacctgaagctgcaaagtttttaattaagcttggtgttgacattattaaagtaggaatcgggcctggctctatatgtacaacacgtttagttgctggcataggagttccacaacttagtgcaataataaacgttaaaaatggtgtaaaaaaaaagaaaataaaaattatctcagacggaggtataaaattttcaggagatatagcaaaagccttagctgcaggagctgatgcagtaatgattggatctctgtttgcaggaacaatagagtcacctggtaaattaataaaaaaaagaggtaagcttttcaaaaattttcgaggaatgggttctgttggagccatgaacaaaggttccgcagatagatattttcaaaacaaacaaaaagataaatcaaaatatgtaccagagggagttgaaggtctagtaaaatttaaaggtaatgtagataaagtaatttttaaatctagtg

SEQ ID NO: 205044 - DNA, 1162 bp, Unknown
  Bacterial polypeptide expressing nucleotide sequence isolated from the Sargasso Sea
gccaaactggttcagcgtcttacgcggttgtactccgcggcgtttaaaaagtggtgtttccacagacaaaaattttgaaattcatcggaggcaggagaacgcaatggaagggaaaatcgtccaagctggtatcacttttgacgacgtgctattgattccgaggttttcaacggtcgttccctcggaggttgatgtcagtacccggttgactcgatcgattggtctgaacctccctcttgtgagctcaccaatggacactgtgactgaaagtgcaatggctatttcgttggcccaggaaggcggactgggggttattcacaagaatctctctattgaaggccaggccgatgaagtcgataaggtcaaaaggacagcaaatggaattattgctgaccctgtaacactgccgccaacggctacggtagcgcgtgcacgagaagttatggctcagtcaaatatctccggagtgccaatcacaactgagggccaaaagctcgtcggaataatcacaaaacgtgatctgcggtttctcgaacgtggggacaccccaatcgctgaaattatgactcaaactgggctggtcacggcgactggtacggtaacgcttgatgaggcagaaaaagtcctcatggcaaacaaggtagagaaattgctactggtagatggggagggtgtgctcaccggccttatcaccatcaaagatattgacatgctaaagcgattcccaaatgcgtgtaaagacaatcagggacgcttacgggttggggccgctgttggtgtatttgatttcgagagagctgaaaaccttatttccaagggtgttgatgtacttgttgtggactcggcacacgggcactcaagcaatgtgatggagacggtccaggagattaagaagcgatgggaaatacaggtgattgcgggaaacgtggcaacccgggagggctgtcgtgatcttttgaaatctggtgcagatgggatcaaagttgggatcggtcccgggtcgatctgtactacacgggttatttccggtgttggtgttccgcagatctccgcggtctgggaagcatcacaggaagttgccggtacggatgttccgatcatcgctgatggaggtattcgctactcgggagatattacaaaagcgatcgcggccggagccaac

SEQ ID NO: 205045 - DNA, 922 bp, Unknown
  Bacterial polypeptide expressing nucleotide sequence isolated from the Sargasso Sea
aatggatactgtaaccgagtctaaaatggcaatagctattgctaagatgggaggaattggagttattcatagaaacttatcagtagatgcgcaaattagtgaaattaagaaagttaaaaaggcaaactttgtagtaggtgctgctataggcgtaaataataatgacttagatagagtaaaaaaacttacagaagcaaacgttgatatgattgtaatagacactgctcatgggcatacacaaaaagtttcaaaaatgatttataaggttaaaaaaattacaaaaaaaataccactttgcgcaggtaatattgctactgggaaggctgctaaatttttggcgagttgcggggttgatatagtaaaagttggaattggaccaggatcaatttgtactacaagactggttgctggagtcggtgtaccacagttgagtgcaatattagatgtaaaaaaagctttaggaaaaagtaaaactaaaattatttcagatggaggaattaaattttcaggtgatttagcaaaagctatagctgctggagctgacgctgtaatgattggatcacttttttcaggaacaacagaaagtcctggaaaaattttaaaacgtaaaggaaaattatataaaacttttagaggtatgggatctgctggcgctatgtcggttggctctgcagataggtattatcaaaaaaaatttaaagatatttctaaatttgtaccagaaggagtggagggaatagtaaaatttaaaggccctgtaaataaaattatttataatttaactggtggattgagatcctcgatgggatatttaggagcaaagacgattaatgatttacaaaaaagaggcgagttcgtaaaaattagtaaagctggtttttacgaaagcatggttcataatgtagaccaagtcataaaataa

SEQ ID NO: 205046 - DNA, 1105 bp, Unknown
  Bacterial polypeptide expressing nucleotide sequence isolated from the Sargasso Sea
atgcctgtagtggataatggacaattaaaaggaattgttacggggagagactttagatatgcagaaaatatggattctaatgtttcaacaattatgacgccttttgagaaactagttactgttaatgaaggtttttctcaagaagatgttatgcagttaatgtataaaaataggattgaaaaagttttagttctagatgaaaacaaaaatttatcagggcttgtcacaatgaaagatattgaaaaatctgcacaacaccctaatgcaactaaagatagttctggaagacttagagtcgctgctgcaataggcacagaacaaaatacgctagaaagagccgaggcgctttttgaagctggagtagatgtctttgtaattgatagcgcccatggacattcaaaaaatgtcatagatacaattaaaactattaagcggtcttttaaggatattgaaataataggaggtaacatagcaacagctgatgcagcaaaagaattagctaaagctggtgttagtgcagtaaaagttggaatgggtcctggatcaatttgtactacaagaataattgctggaatcggcgttcctcaaataacagcaattcttgaaataaaacaagctattaagaaaaacaatgtgaaagttattgctgacgggggaataagattttctggtgatattgcaaaagcaatttctgctggagctgattcagtaatgttaggaagtttatttgctggaactgaagaggctcctggcaaagttgaactctttcaaggtagaagctttaaaacatatagaggtatgggttcaattggcgccatgactgaaagaaatgatgccaacaggtatcttcaagaaaatacagaatctgataaattagttcctgaaggcatagaaggaagagtgccatacaaaggcctagtcattaacgtaataaaccaattagaaggtggtttaagacagagcatgggatatgtgggttgtaagaatattgaagctatgcaaaaagaaagtcaatttattgaaattactaatgctggaatgactgagagtcatgttcatgacgtaatgatcactaaggaagctccaaattaccaaagaagttagg

SEQ ID NO: 205047 - DNA, 1054 bp, Unknown
  Bacterial polypeptide expressing nucleotide sequence isolated from the Sargasso Sea
tatggaaaagatcaaattcaagtctctcacctttgacgatgtactcttacttccacgtttttctgactttgctcctaacgatgcaattctcaaaactgcctttactaaagaaatcaatctaaatttaccaatagtgtctgcggcgatggatactgttaccgaatctaaaatggctatagcgcttgctgaaagcggggggataggtgttattcacaagaataatgatatcgatgcacaagctcaacaagtgaaaacagttaagaaatatgaaagcggcattgtaaaggatcctataactatttcctccactaaaacaatcgatgaattgatgcagctcactagtgagctaaatatttctggcatgccggtagttgataatgggaagttgaggggaatagtaactgctagagattttaggtatgcagacgacatgaatgcaaaggttgccagcattatgactacttatgaagatttagttaccgtaagtgaagggaccgatcaagacacagtgaagaaactaatgtatcaaaatcgcatcgaaaaagttcttgttttagacaaagcaggaaacttgtcaggtttggtgactatgaaagatatagaaaaatctgcagcttttccattagcaaccaaagattcctctggtcaacttatagtggccgcagcaattggaaccgaaacacaaactattgaacgagcagaagcattagaggcagccggtgtagatgttttggtagtagattccgctcatggtcactccaaaaatgttatcgatacggtaaaacttatcaagcaaacctttagtgatattcaagtcgtaggaggtaatgttgccacacctgatggagcgcttgcattaattgaagctggtgctgatgcagttaagattggaatgggtcctggttctatttgcactactagaattattgcaggtattggtgtccctcaagttactgcaattttgaagataagagaagctattaaaaaattatctgtacctttaattgctgatggtgggataaggttttcgggcgatttagccaaggcaattgct

SEQ ID NO: 205048 - DNA, 1462 bp, Unknown
  Bacterial polypeptide expressing nucleotide sequence isolated from the Sargasso Sea
tatggaaaaggtacttgcagaagcattaacttttgacgacgtattggttttaccaatgcactctgatgtcctacctaaacaagttttactcaaatctagatttacaaaaaacatttctttaaatcttcccttttgttccgctgctatggatacggttacagaatccaaaatggcaatcgcactagcctctcttggtggtataggaataattcacaaaaataactctcctgatgagcaggcattagaagttaaaaaagttaagaagtttgagagtggaatagtgaaagatcctataacaattaaaagtagcaataccatagaggaactcaaacaacttacttctgagttaaatatatcaggtatgccggtagtcgatgaggatgaattaaagggaattgtgactggcagagattttagatatgcgagagatatggaacagacagttgcagaaattatgactcccaaagaaaaacttataactgtaaaagaaggagaaagtcaggatgttgttaaatcacttatgtacaaaaatagaattgagaaagtccttattttagatgatcacaataaactctcgggaatgataacaatgaaagatattgaaaaatctatcgattatcctttggcttcaagagactctgaaggaagactcattgttggtgctgcacttggagtaagtagtgatttaatggaaagagcagaaaagctctcagcagcaggtgtagatgtatttgttcttgatagtgcccacggtgactctgaaggagttataaatgctattaaggaagtaaaaaagaaattttcaaagattgaaattattggcggtaatgttgctactgcagaaggtgcaaaagcactaattgatgcgggagtagatgcagtgaaggtaggtgttggtccggggtcaatctgcactactagaataattgctggagttggagtcccacaactatcagctgtattaaatgttgtgcaagcagctaaagatattccagttatatctgatggtggagttagattttctggagatattgtaaaagctattggagctggagcagattcagtaatgttaggaagtgcactggctggaacagaggaagcgccaggagaggttgagctgtatcagggcagaagttttaaaacttatagagggatgggttcaatcggcgctatgtcaaaaagaacagatgcaaatagatatatgcaaggtgaagatatcgatacagataaattagttcctgaaggaatagagggcagggtgccttttagaggttggttaaaagatgttgtgtatcagttagagggcggtctcagacagggcatgggttatacaggatcaaaaaatattgaagaattaaagaagaaagtacaattccaaaaaattactagatctggtgttttagaaagtcatgttcatgacgttagcattaccaaagaggcaccaaattatagagcagattaa

SEQ ID NO: 205049 - DNA, 1471 bp, Unknown
  Bacterial polypeptide expressing nucleotide sequence isolated from the Sargasso Sea
atggcccaagttaaagaatatttaacgtttgatgacgttttattgaaaccccaagcatcaactattctcccgaataacgtcgatatttcaacaaatctaacaaaagatataaaactaaatattcctatcatatcagcagcaatggatactgtaacagagtccaaaatggcaatatcaatgtctcaaaatggcggtttaggagtaattcacaaaaattatgatatagaaacgcaaagttatgaagttaaaaaagtaaaaagatacgaagcagggattgtctataatccaataacaatgagtcctaataatacaattgaagatgttttaaatgtaatggaaaaacaaaatatatctggatttccagtggtcgataaagcaaataaacttcagggaattattactaatagagatgttcgatttgtaattaataaaaaaacaaaagttaaagatttaatgactaaaaaagtaatttctattactcaaactcaatcaaaaggaatgtcttcatttggtctggcaaaaaaattactacaagaaaatagaatagagaaactagttgtaactgataataacaataaatgtattggtttaattactgttaaggatattcaaagaggagagaagtttccctattctgttaaagataaaaatggacaattattagttggtgctgcaataggaagtaagcctaatgacttacaaagagctatagaattagataaagctggtgttgatattttattcatagacacagctcatggtcattcatcagcagtattagagtcttttaaaaaaataagaaaaaaaataaaattacctatagttgtaggtaatattgctacacctgaagctgctaaagacttaattaaattaggtgcagatgcaatcaaagtaggtattggtccaggttctatctgtactactagaattgttgcaggtgttggagtacctcaatttactgccattcaagatattgctacaataacaaataaaaataaaattccaatgatctctgatggagggatacgttattctggtgacattgtaaaagctcttgcagctggagctaactgtatcatggcaggctctttatttgctggaacagatgagtcacctggagaagtttttttatttcaaggaagatcttataagtcctatcgtggaatgggctctctgggagctatggccagaggttcagcagatagatattttcaagacgaaattaatgaggctatcaaattagttcctgagggtattgagggaagaattccttataaaggtcaagtatctaacgttttatttcaattgacaggaggtttgaggtctggaatgggatatacgggctctaagaacctcactatacttaaaaaaaatgcaaaatttgtccgtttgaccaattctggtattaatgaaagtcacgttcacggtgtacaagtaacaaaagaagctccaaattaccgctcaaattgag

SEQ ID NO: 205050 - DNA, 1281 bp, Unknown
  Bacterial polypeptide expressing nucleotide sequence isolated from the Sargasso Sea
aatgacgatagagaaaactgctttaacattcgacgatgtccttctcaaaccgaattactcggatgtactcccacgcgaaacaaatctctcaacaagactcaccaaaaatctttccatacagatcccattgttgtctgcagccatggataccgtcacagaataccagctggcaattgcaattgcacaagagggcggaatagggatcattcataagaatttcagtgtcgatgatcaagcatcacaagttaacagggtaaaaaagttcgaaagtgggattatctcagatcccgttaccgtcagttcagacatcaccatcagagaagttttggaaattacaaaattcaataatatttccggcgtaccagttgtagatgatggcgtaacagtcggcattgtgaccaatcgtgaccttcgatttgaaaccaatcttgatggattggtgagtagtgtcatgacgcctaaggataaacttgtcactgttaaagagggcgcaggcgaagaagaggttctaagattgcttcatcagcacagaattgaaaaagtactggtggttgatgattcctttcatttaaaaggaatggtgaccgccaaggattttcaaaaggcaacggatttccctctggcatcaaaagatgggaacggagcacttttggttggagcagctgttggcgttggcgatggctcagaagaaaggatagaggcgcttaaggctgctggcgtagatgtcattgtcgtagacacagctcatgcgcatacggaaggtgttatcaatcaggttaaatcaatcaagaaaatgcattctgatcttgaggtgatcgcaggcaatatcgccacgggagaggctgcaaaagcacttgctgatgcaggagcagatgcggtaaaggttggaattggcccgggttcaatttgtaccactcgggtggttgcaggagctgggatgccacaaatcacagcaattactgatgtcgcaaatcagcttaagggaaccgatacatgcataatctcagacggaggcattcgttattcaggagacatcgcaaaagccatagcagctggtgctaatagcatcatgctaggcagtctatttgctggaacagaagagtctccaggtgagattgagctgtatcagggcagaagttttaaatcgtatcgtggcatgggttcaattggagcaatggctcagcaacatggttccaaagaccgatactttcaaagcgatgttgaagaaccagaaaaactcgttcctgaaggcattgagggaagggttccttataaaggaaa

SEQ ID NO: 205051 - DNA, 1363 bp, Unknown
  Bacterial polypeptide expressing nucleotide sequence isolated from the Sargasso Sea
atgcaaataaaggaggctttgacgttcgatgacgtgttactagtacctaataagtcaaatattctgccaaatgaggcaaatactcagaccctgataacaagcagaatttctcttaatagcccaattatgtcatcagctatggataccgtaactgagtcaagaatggcaatcgctctggcccaatatggtgggatagggatcatccataggaatttaaagataaaagaacaagttgcgtgcgttaatgatgttaagagatttgaaagtgctattgtctatgatcctgtaacgttaaaagaaaatcaaaaattacgcgaggctaaggaccttcaaaagaaattgaatattactggttttccggtagtgaatgaaaataatattttaaaaggcattctaacgaatagggatatgaggtttgtagaaaatttagaaaccccggtgagtgaaatgatgactgacaccaacttggcaatcgttaatgagccggtaagtaacgaaaaagcacgagcaattttgtctgaacgtagaatagaaaaacttctaatcataaataaacataatgaattagtcggtttgatgactgttaaagatcttgagaattccgtcttgaaccctcttgcaacaaaggactcgctaggtaggctaagggttggcgcagcttcaacagttggtcagaagggacttcagcggtcaatggctttgattgaagctggagcagacttgatcgtaattgatactgctcatggacattcttctcacgtactggaatcggtagaggatcttagaaacaaatttccagatattgatattgtagcaggaaatgttgcaactaaggaagcaacaagagcacttattaaagcaggggcagacgcagtgaaggtaggtattggtcctggttcaatctgtacaactagaatagtagcaggtgtaggagttccccagtttaccgctcttttagagtgtgctgaagaagctgagaagcatggcaaggttataatagctgatggtggaattaagtattcgggcgattttgctaaggccatagctgcgggtgcttcttgtgtaatggtggggtcactattagctggaacagatgaagcaccgggagaagtattatattaccaaggaagcagcgttaaaaactatcgtggcatgggctctgtcggagctatggcaagaggatcggccgatcgatactttcaaaaggaggttgaagccgacaaacttatcccagagggaatagagggtcacgttccgtataaaggaccagtaggaaaagttcttcatcagcttcttggaggccttaaggctgcaatgggttataccggaaatcagacaattgactctatgagaaaaaattgtt

SEQ ID NO: 205052 - DNA, 1471 bp, Unknown
  Bacterial polypeptide expressing nucleotide sequence isolated from the Sargasso Sea
atgctacgtatcatccaagaagccctgacgttcgacgatgtgttgctggttcccggccactcgaccgtcctccctcacacagccaacttacaaacacgccttacgcgtggcgtaacgttaaatattccaatggtgtctgctgccatggacacggtttctgaagcccgtctagctattgcgctagcccaagagggtggtattggtttcattcataaaaacatgaagcccgaagagcaagccaaacacgtacgtgaagttaagaaatacgaaagtggtgtggtatctgatccggtaacggttgaagagaatgcgaccataggtgaagttatcgcgctttctaagcgtcttggttactctggcttcccggtgactgacaaagataataacctaattggtattgtgacaggccgcgatcttcgctttgaaaagcgtttgaatttgcctattagaaacgtaatgaccggtaaggatgatctggttaccgttaaagaaggtgcaagctctgatgtggtgttagatcttatgcacgaacaccgcattgagaaaattcttgtcgtcgacgacgcgtttaagcttacaggcctgatcactgttaaagacttccaaaaagcagaaaacaagccaaatgcatgtaaagactcgcttggtcgtcttcgcgttggtgcagcggtaagcgtcggtccaggtactgacgaacgtattgcactacttgtagatgcaggcgttgacgttctacttatcgatacctctcacggtcactcgcaaggtgttattgaccgcgtgaaaaaggtacgtgcagactatccagatgtacaaattattgcgggtaacgttgcgacgggcgatggcgcgaaagcacttgccgatgccggcgtagatgctgttaaagtgggaattggccctggttcaatttgtactacccgtatcgtaaccggttgcggtgtgcctcaaattactgcggtatcagatgcagtagaagcgcttaaagatactgacattccagtaatcgctgacggcggtattcgtttttcgggtgacattgctaaggcgttggctgctggcgcaagctgcgtaatggttggcagcatgctagcaggtactgaagaagcgccaggcgaagtagaacttttccaaggccgttattacaagtcatatcgcggtatgggttcactaggcgctatggatcaaagccacggttcgtcagaccgttacttccaagattctgataacgctgagaaacttgtaccagaaggtattgaaggccgcgtagcgtacaaaggtccaattgctaatattatccatcagcaaatgggcggcttgcgctcagccatgggcttaacgggctgcgcaacgattgaagagctcaataccaaggcacaatttgtgcgcgtaacttcagccggaatgggcgagagccacgttcacgatgtaagcattaccaaagaagcgccaaactaccgtttaggttaag

SEQ ID NO: 205053 - DNA, 1462 bp, Unknown
  Bacterial polypeptide expressing nucleotide sequence isolated from the Sargasso Sea
aatgcatatacgtgacgctttgacattcgatgatgtcctattagaaccttccagttcttctgtcgttccctcgtctgtgagtacttctacccgacttactcaagatattactctaggtatacccctgctgtcggctgcaatggacaccgtgacggaaagtcgtctagcaattgccatggcacaacttgggggactgggggttattcataaaaatatggatattgaaaagcaggcagctgaagtaaaagccgttaaaaagtttgaagcgggtatggtcgtaaatccagttacgatctttcccgatgagacgttagccgacgccttggcgctaatgtgtcaatacaaaataagcggaatcccggtcgttaggcgtcgatcaggcaagctagctggaattttaacaaacagggatgttaggtttgccacaaacaagcttcagcctatcagcgaattaatgaccaaaaaggttataacggttaccgaaggtgttactgcttccgatgcgcagagactattgcatttgcatcgcatcgaaaaattagttgtcacggatagtgaaaataaatgcgtcggattaattactgttaaagacatggaaaaggcagataatcaccctgacgcatgtaaagatgcccagggtcgtctgcgatcggccgcagctactggcgttggtgacgaaggcgtggaacgcgcccgtgcactttttgatgcggaagtcgatgttatcgttgtagatactgctcacgggcattctgaaaatgtaatcgactcggtttcaaggataagaaaattatcaaattattcacaaattatagctggtaatatcgctacaaccgaaggagcgaaggcacttatcgatgccggggctgattctgttaaggttggcataggaccggggtcaatatgcacaacaagaatggttgccggtgtgggtgtgcctcagttgacagccatactggatgcggttgaagcttgcagaaaatcagatatacccgttatttccgacggtggcattaaatattctggtgatctagcaaaagcaattgcagcaggtgctgattgtgcaatgcttggtactttgtttgctggaacagaggaaagtccgggagaagtatttttacaccaaggtaggtcttataagtcttatcgaggcatgggatccatgggagcaatggctcgtggctccgcagatagatatttccaagaagaggtttccgaccatcaaaaattcgttcctgagggaatagaaggacaagttccttataaaggaccaatttcagcggttgtccatcaactggttgggggcttgaaagcggcaatgggctacaccggaagtgcttctattctcgaaatgcagaaagagaaaaaatttctcagaattacaaatgcaggacttcgggaaagtcacgttcatgatgttacaattactcgcgaagcgccaaattataggcccaacttgtga

SEQ ID NO: 205054 - DNA, 1078 bp, Unknown
  Bacterial polypeptide expressing nucleotide sequence isolated from the Sargasso Sea
tatggttcctataaaagaagcactcacctttgatgatgtaactctgatgcccaagtattctgagatcttaccctcagatgttgatactagcattaaacttacaaattatttaaaattaaaaattcctctattatcctcagctatggatactgttactgaaagcaaaatggctatcgcgatagcgaaagcaggtgggataggaattattcatagaaatttagatataaaaaaacaaattcttgaaattaaaaaagtaaaaaaacaaaaacttttagtaggcgcagctgttggggctggaccaagcgaatttaaaagagcagaggcaatacttaaagaaaaaattgatatgattgttgttgatactgctcatggacatacaaaaaaggtctcagaaataattaagtttatcaaaaaaacaaaagataaaaaaactgctctttgcgctggaaatattgctacacctgctgcagctaaatttttgttaaagcttggtgttgatgttattaaagttgggataggacctggatcaatatgcactacaagattagttgcaggtattggtgttccacaacttagtgcaatactagaagttagaaatggaataaaaaataagaatgtaaagattatttctgatggtgggataaaatattcaggtgatttggcaaaagcattcgctgctggagcagatgcagttatgattggttcattatttgcagggacagatgaagcaccaggaaaattaattaggagaaatggtaaattttttaaaaattttagaggcatgggttcagttggtgctatgaataaaggatctgcagatcgatactttcaatcaaagcaaaaggactcgtctaaatatgtaccagaaggagtagaaggatttgcaaaatataaaggcaaagttgataatataatttttaaattaattggtggattaagatcatctatgggatacttaggatcaagacaaattaaatatctaagagacaaaccacaatttgttaaaataacaaaagctggtttttacgaaagtatggtccataatgttgatatagtcaaaagtgataataaatactaa

SEQ ID NO: 205055 - DNA, 1024 bp, Unknown
  Bacterial polypeptide expressing nucleotide sequence isolated from the Sargasso Sea
gctatagcattagcacaagaaggcggaataggagttatacacaaaaatctagaccctacaatgcaggccgaggaagtaaaaaaagttaaaaaatacgaatctggtattataactgagccagttgtaacgtcacccttagcaagcattaatcaagttctagatttaaccaaaaaacataatatttctggggtaccaattgtaaatgggaaggaacttaaaggaattgtaactgcacgagatcttcgttttgtaacaaaaactaataataaaatatcctccattatgacacctaaagaacgtttagtgactgtcaaagaaggcgcctctaaagaagagataaaaaaacttctacataaacatagaatagaaaaaattttagtcgtaaatgacaagtttcacttgaagggattaattactgtaaaagatatacaaaaatctactgattatccaaatgcttgtaaggacaagtttggaagactaagggttggtgctgcaattggggtaaataaagacgccttaagtagagcagacattcttataaaatctgaagtagactttttagtagttgacactgcgcatggacattcagagatggtgatatcaacagttaaagctttaaaaaagaaacaccctaagacagatgtcatagctggaaatattgcaaccaaaaaagcagctttagatttaaaaaaagctggagttgatgcggtaaaagttggaattggaccaggatcaatctgcacaacgagaatagtttctggtgttggtgttcctcagataactgctatagacgaagtatcaagagcattaaagagatcaaatgtaaaagtaattgctgacggtggaattagattttctggggatatttcaaaagcaatcgtagctggggcagacacagttatgcttggaggtttatttgcaggaacacaggagtcacctggtgagatagagctttatcaaggtagaacatataaaaattatcgtggaatggggtcgattgcagctatgaaagatggctctaaag

SEQ ID NO: 205056 - DNA, 1078 bp, Unknown
  Bacterial polypeptide expressing nucleotide sequence isolated from the Sargasso Sea
tatgggtcctataaaagaagcacttacgttcgatgatgttaccttaactccaaattattcggagattctcccatcagaagttgacacaaaaatacaattatcaagaaatataactttaaaaatacccttgttatcttcagccatggatacagttacagagtcaaaaatggctatatcaattgctaaagcaggagggatcggcatcatacacagaaatttaaatatagaaaaacaaattcaggaaataaaaaaagtaaaatcaaaaaatttattagtaggggcagctgttggtgctggggttgatgaaattgtaagagcagaagcaattttaaaagagggagtagatttaattgtagtagacacagcacacggccacacaaaaaaagttgctgaaataattaaaaaaataaaaagaaaaaaaggcaagtcaacgtctatttgtgccggtaatattgcaactccagaggctgcaaagtttttattaaagctaggtgtagatattataaaagtaggaatagggcctggctctatatgcaccactagattagtagctggaattggggttcctcagttaagcgcaattataaatgtaaaaagtggagtaaaaaataaaaatgttaaaattatttcagatggaggaattaaattttcaggagatatagcaaaggcactttcagctggagcagacgcagttatgataggctcattatttgcaggtacagtggagtcccctggaaaattaataaaaaaaaaaggaaaattatataaaaatttcagaggaatgggatccgttggtgccatgaacaaaggttcagcagatagatattttcaaaaaaaacaaaaagataaatcgaaatatgtgccagaaggggtagaaggcttggttaaatttaaagggagtgtagaaaaagtaatttataagcttatcggtggtttaaaatcatcaatgggatacctgggagcaaaaacaataactaaattaagaaaaaaacctaattttgtaaaaattactaaagctggcttttatgagagcatggtgcataatattgatgaagtaaaaaaggatagtgaattttaa

SEQ ID NO: 205057 - DNA, 1108 bp, Unknown
  Bacterial polypeptide expressing nucleotide sequence isolated from the Sargasso Sea
aatggcctaccagataaatactaattattccgttacttttgatgatgttctgctctcaccagcgtattcagagatcaaaccaaaagatgtagatacgtcgattaccattggaaaagtcaaattacatattcctataatttctgctgctatggatactgtgacagagaataagatggcgatcaatttagcacttaatggtggtctaggtgttattcaccgtaatatgccaattgataaacaagcaagtgaagtcaaaaaagttcatagttttaaagttaatgttaaaaaatttcaaaatgctgtaattaattctaacaaacaaattgcagtaggcgctgcaatcggtgttgaaaataatgcgtacttgcgactattagaattattaaaagtcggcattgatatagtctttattgatgttgcacatgcacacacaaaaactactttacagtttattgaaaaagcaaaaaaagttttaaaaaaaactcctcttattgttggtaacattgctacaaaaaaagctgcatcagatttaattagtgctggtgtagatgctattaaagtaggtattgggccaggatctatttgtacaacaagggttgtgactggtgttggtattcctcaactctccgctgtgatggatacatatcaagttgccaaaaaatttaaaattcctgtgattgcagatggaggaataaaaacatcaggtgatattgcaaaagctatagcaggcggtgcaagtgcatgtatgatagggtctttatttgctggcactgaagaatcaccaggaaaattattaacgattaaaggtaaaaaatttaaatcctatagaggtatgggttcagtaggagcaatgcaaaaaggttcttttgatcgatactcccaagaagaaacaaagaatgccaaaaaattagtggcagaaggtgtggaagggatggttccatataaaggtaaaatagaagatgtagcgtatcaacttgttggtggcttaagatcttctatggggtacactggtcataaaacgattaagaaaatgcaaggcaattgtaaatttgtgtttatttctaaagcaggagcccgcgaaagtaatgtccacgatgtcattatgtaa

SEQ ID NO: 205058 - DNA, 1360 bp, Unknown
  Bacterial polypeptide expressing nucleotide sequence isolated from the Sargasso Sea
attgatcttaatgttcctcttgcttcagcagcaatggatacagtaacagaatcaagtatggcaattgctatggcgcaagctggaggaattggtgtaatacatagaaacttagaaattgaacagcaaattaaagaggtaaataaagtaaaaaaatatgaatccggaatggtggttaatccacttactatttctccagactctacacttgaagatgctttagctctaatgaaagaaaataatatttcaggagtgcctgtaacagacacaaaaacgaataaacttgaaggaattttgacaaatagagatgttagatttgcctctaataaaaatcaaaaagtttctgaacttatgactaagaatgatttgattactgttaaagataatgtttctgaaaatgaagcaaaagaaatacttcataaacaccgaatagagaaattgcttgttgttgatgacgaatatcgttgtattggcttaatcactgtaaaagatattgagaaatctaatttacatcccgatgctacaaaagatgaaaagggtaggttgagggttgcagcagcaacgacagttggtgataaaggttttgaaagagctgaagcattaattgatagcgaaacagatataattgttgtggatactgcacatggtcactctattaaagttccacagattattgaaaggataaaaaaactatcaaattctgttcaggttgttgctggcaatgttgcaactaaagaagcttcaaaatcattaattggagcaggtgcagattgtataaaggttggtattggtccaggatcaatatgtacaacaagaataattgcaggtgttggtgtgccacagcttacggcaattatggattgtgttaatgaggctaaaaagcattcaatacccgtcattgctgatgggggtattaagttttctggagatttagccaaagcactagctggaggagctgatcttgcaatgatcggctctctttttgctggaacagatgaaacaccaggcgaagtatttcttcaccaaggtaggagattcaaatcctatagaggaatgggatcagttgcagctatggctgaaggatctgcagatagatatttccaatctgatctcagtgcatcagataaacttgtgcctgaaggaattgaagggcaggttccttatattggatcagtacataatgtaatttatcaattaattggtggtttaagagcatcaatgggttacacaggttgtaaaaatttagaggatttccagacaaaaactaactttattaaaattacagcagcttcactaaacgaaagtcatacgcacgatgtagttgtaactcgagaagcgcctaattatcctacaagaggttaat

SEQ ID NO: 205059 - DNA, 1066 bp, Unknown
  Bacterial polypeptide expressing nucleotide sequence isolated from the Sargasso Sea
atggaaagtattaaagaagctttaacatttgatgatgttactttagcgccaaattactcagcaattttacctagcgaagtaagcacctccataaatttaacagaaagtctaaagataaaaataccacttctgtcatctgcaatggacactgttacagaatcttcaatggggattgctatagctagatcagggggattaggaataattcatagaaacttaaatgttgacgaacagattaaagaaattagaaaggtaaaatcaaaaaaattactagtaggtgcagcagtcggtgcgagtgataaagaattaaaaagagctcaaaaaatattaaaagaaaacttagacttaatagtaattgacacagcgcacggacataccaaaaaagtaggagatattattaaaaaaataaaaaaaatacgccctaagaaaactgcaatttgtgcaggaaatatagctacagcagaagctgcaaaatttttggttggattaggtgttgatattataaaagtaggaattgggccaggatctatttgtacaacaagacttgtagcaggtataggtgttccacaactaagtgcgatattaaatgttaaaaagggcattgggaaaagtaaaacaagattaattgctgatggtggaataaaattttctggtgatattgcaaaagcattagcagctggcgcagatgcagtaatgataggttcattatttgcaggtacagatgaagcgcctggaaaaaaaataaaaaaaaatggaaaattatataaatatttcaggggtatgggatcaattggtgctatgaataaaggttcagcagacagatattttcaaacgaaacaaaaggatacatcaaaatacgtagcggaaggtgtagagggatatattaaatacaaaggtaaagttgataacataatctacaacttagttggaggtttaaaatcttcaatgggctacatgggagccaagaaagtaattgatttaagaaaaaaaccgaaatttgtaaaaattactaaagcaggattttatgaaagtatggtacataatatagatgttataaaaaaataat

SEQ ID NO: 205060 - DNA, 1066 bp, Unknown
  Bacterial polypeptide expressing nucleotide sequence isolated from the Sargasso Sea
atgggtcctataaaagaatctctaacatttgacgatgtaacgcttgcgccaaagtattcagaaattctcccgtcggaagtaataactgaaacaaagttagcaaaaaatttgacattaaaagtgcctattttatcatcagcaatggataccgtaactgagtctaaaatggcaattgcgttagcaaaatctggaggcatagggataatccatagaaatttaacaataagcaaacaaaaaattgaaatcaaaaaagtacaaaagcaaaaatttattgtaggtgctgcagttggagcgggtgaaaatgaggaaaagagagcaagatcgatactaaaggaaaatatagatttaatagttgtggatactgctcatggacatacaaaaaaagttgctcagattattaaagttattaaaaaaattaaaccatctaaaactgcactttgtgctggaaatgtagctactatagatgcagcaaaatttctaataagacttggagttgatataattaaagttggcataggaccaggatcaatatgtacaaccagattagtcgctggcatcggtgttccccaattaggagctattacagaagttcgaagaggtattaaaaaaagcaaaacaacattaatagctgatggaggtataaaattttcaggcgacattcctaaggctcttgcagcaggtgcagatgcagtaatgataggatcattatttgcaggaacagatgaagcacctggaaaattaattaagaaaggtggaaaaaagtttaaaagtttcagaggcatgggctcaataggtgcaatgaataaaggctctgcagatagatattttcaaaaaaaacaaagagacacatctaagtatgttgccgaaggtgtagaggggttggtcaaatataaaggtaaagtagataaaataatttatcaattaatcggtgggttaaaatcatcgatggggtatttggggtcaaagagaataattaatttaagaaaaggacctaaatttattaaaattacaaaggcaggtttctacgaaagtatggtacataatgttgatgaaatcaaaaaataat

SEQ ID NO: 205061 - DNA, 994 bp, Unknown
  Bacterial polypeptide expressing nucleotide sequence isolated from the Sargasso Sea
gatggagcactccactattcagaaatccctttcatttgatgatgttttaataaagcctgcgcgctcatctattctgccaactgaggtccaatctcatacatctataacctcaaatattaaacttggtataccattaatctcttcggcaatggacactgtcacagaatataagttagctatcgctattgctcaatctggtgggctagggatactccataaaaatatgcctatagacgatcaagcacaaaatgttgcaaaagtaaaaaagtttgaaactggcatggtaattgatcctgtaaccatagcacctgaagccactctatcagatgctttagatctaatgaaagagcatcagatttctggtgtccctgtagtagatagtaacgataaattgcttggtattttaacgaatagagatgtgcgtttcgcaactaatatgtctcaaaaaattagtgagttaatgacaagtgaaaatttgattactgtaaaagagggaatctctagtgatgatgcccaaaaactcctacatgcccatagaattgaaaaactaatcgttgttgacgataatagaaagtgcattggcttaatcacagtgaaagatatcgaaaaaagtcaattgaaccctcacgcttctaaggatgccaaaggtaggctgttagtaggttctgcaataggcgttggaatagaagcaattaatagggctgagcgtttagttgatgctggtgtagatgttttagtaatagatactgcccatggccactcagaaaaagtcatttctactcttgaggaaattaaatctcatttttccattgatgtagttgttggcaatgtagctacaaaagaagctacagcagaattaattgataaaggcgcagattgtataaaagttggcataggtccagggtcaatttgcactactcgggtggttgctggaataggggtccctcatttctcagcaattttggattgcgctggaattgcaaacaaaaaaaaa

SEQ ID NO: 205062 - DNA, 1450 bp, Unknown
  Bacterial polypeptide expressing nucleotide sequence isolated from the Sargasso Sea
gatgcagattcgtgaggcccttacttttgatgatgttttattggttccagctcagtcttctgttttaccgttagacgtagacacgcggactaatgttacaaaagatatcactttgaatattcctttgttaagctcagcaatggatacagtaacggaatctcagatggctataactatggcgcagtctggtggtattggggttatacatcgtaaccttgaagttgagcaacaagctgaggaagtccgcaaagtaaaaagattcgaaagtgggatagtttataatcctatcactctaagcgaaaatcagactttggctgatgctgataatctaagagatcgatataacgtaaccggctttcccgttgtggatgaaaaaagccgtgtcgttggaattgtgactaatcgcgatatgcgctttgctgccgatagcagtacaccagtgtcaaaaatgatgacgaaagaaaacctggcaattttaactgagcctgcggatcgtcgacaagcaattaacctaatgaaagagaggcgtattgaaaagttactgattacagacaatcaacgtcgactgactggtttgctgactttaaaagatacggagcaagcggttttgaatcccacagcctgcaaggataatcttggaagattaagggttgcggctgcaacgactgttggcgacaaaggatatttaaggtcagattgtttaatagactccggtgttgacttgcttgtgatagataccgctcatgggcattctgatgcagtcattgaggccgtcagtagggtaaaaaaactttcaaataatgtgcaagtagtggcgggaaatgtggcaactgcagatgcgtgcaaggccctaattgatgttggggccgatgctataaaagttggaattggcccgggatcaatttgtacaacacgaatggttgctggtgttggcgttccacaattgacagcaatattggattgtgtggaggcttccggaaagacgcccattattgctgatgggggtataaaattctcaggagattttgccaaagcaattgctgcaggagcttcttgtgcaatggtcggtagtatgattgcaggaacggatgaaagccctggtgaggttattttatatcagggaaggtctttcaaagcttacagaggaatgggttcacttggagcgatggctcgaggttctgcagatcgatattttcaaaaggatgcagctagcgataaactcgtgccggaaggaatcgaaggccaagtcccatataaaggtccagctaattctgtaatacaccaaatggtcggtggattaagagcctctatgggctacacaggatgcaagacgatcgccgagatgagaaataactgtcaatttgttaaaataacgggagcggggctgaaggaaagtcatgtacatgacgtccaaatcacacgagaaagcccgaattatcgtatcatttga

SEQ ID NO: 205063 - DNA, 973 bp, Unknown
  Bacterial polypeptide expressing nucleotide sequence isolated from the Sargasso Sea
atgctacgtttaattaaagaagcgctaacttttgacgatgtgttacttgttcctgcgcattctactgtactcccaaataccgccattcttaaaactcgcctgaccaataccattgaactgaatattccgcttgtgtctgccgctatggacactgtgaccgaagcgcgtcttgcgatcgccatggcacaggaaggtggcttaggttttattcataaaaacatgagcatagaaaagcaggccgaagaagttcgtaaagtaaaaatttacgaggcaggcgtagttcaacaacctgtgacggtaacgccttcaaccacgctggctgatttaaaagtactgaccgccaagaatggttttgcgggttaccctgtggtcaacgaagccaatgaattggtgggtattatcactggccgtgacgtacgtttcgtaactgactggagcaaaactgtagaagaagtgatgacgcctaaagcgcgtttagtcacggttgccgaaggcactaagttagatgaagtgcaaaaattaatgcactcaaaccgtatcgaaaaagtgttagttgtcgatgataacttcaagctgaaaggcttaatcacagttaaagacttcgaaaaagccgagcgtaagcctaatgcctgtaaagatgagttaggtcgtttacgtgttggcgccgctgtgggtgcgggtgcgggtaacgaagagcgtgtcgatgcgctggtgaaagccggcgttgacgtgctgctgattgactcttcccacggccactctgaaggtgtacttcaacgtatccgtgaaacccgcgctaaatacccagatttacaaattattggtggtaacgtggcgacagctgaaggcgcattggccctagttgaagccggcgttaacgcagttaaagtcggtattggcccaggttctatctgcaccacacgtatcgtgacgggtgtgggcgtgccacaaattactgcggtttcagatgcgg

SEQ ID NO: 205064 - DNA, 1471 bp, Unknown
  Bacterial polypeptide expressing nucleotide sequence isolated from the Sargasso Sea
atgttacgtatcgttgaccaagcacttacctttgatgacgtcctcttggttccggatcactcggatattcttccaaaagacgtcaaattacaaactcgcctgacccgaacactcgatttaaatattccgctactttctgcagctatggatacagtgactgaatctaggatgggaattgctttaagtgagttaggtggcatcggaataattcataaaaacctttctattgaaaatcaggctgctgaagtcaggaaagttaaaaaatatgaaagtggtatcgtacgtgatccaataacaatccgatctgataatgaagtaggagagcttattcagctaaccaaagaattaaatatatccggaatgccggttgttgataatagtgaactagtgggaatagtcaccagcagagatttcagatatcaggaaaatctaactgctaaagtctctgaaatcatgacacctaaagagagattggtgactgcaaaagaaggcgaaagccctgatgttattaaacgattacttcaggaaaataggattgagaagatattactgattgatgattcatttcaactcactggacttgtaacccttaaagatattaataaatcattggatttccctgatgcagctcgtgacagtgaaggaaggcttctggtcggagcagctattggaaccaagcctgataccctggatagatgcgaggcattgatcaacgctggggtcgatgttttggtagccgacagtgctcatggtcattctgaaggagttcttagtaaaatcacagaaattaaaaataccttcaaagatatacaaataattggcggaaatgtagctaccggagaaggagctcttgctctggtaaaggcaggtgctgatgctgttaaggtgggtattggtccctggatcatttgtacgacaaggattgtaaccggtgtcggtgttcctcaagttacggccgtagctcaagtaactgaagcgttgaagaaaaccgatgtgccgattattgctgatggaggcattagattttctggagatatcgctaaggcaattgccgctggaggccatacagtgatgctcggaagtgttctcgctggaacagaagaagctccaggtgaattagagttataccaaggaagaagctataaatcctatagaggcatgggatctataggcgcaatgtcaggtgatcaaggctcttcagatagatatttccaagacagttctgaggcaactgaaaaattagttccagaaggcattgaagggagagtgccttacaaagggtggcttcaggctgttatccaccaaatgattggaggactcagacagagtatgggatatacaggttcacatgatattgaaactatgcgaacaaaacccaaattcgttcagataacttctgcgggtgtcagtgaaagtcacgttcatgacgttagtgtcactaaagaagctcctaattacagaatcagctaac

SEQ ID NO: 205065 - DNA, 1078 bp, Unknown
  Bacterial polypeptide expressing nucleotide sequence isolated from the Sargasso Sea
atgggtcctataaaagaagcacttacatttgacgacgtaacacttacaccaaattattctgaaatattaccctctgacgtaaataccacaacatttttatcaaaaaaatttaaacttaaaattcctcttatatcgtctgcgatggacacagtcacagaatctaaaatggcgatagcaattgctaaagctggaggtattggagtaatacacagaaacctagatataaaaaaacagatattagagattaaaaaagttaaaaaacaaaatcttttagttggtgcagcggtcggagctggtccactagaatttgaaagggccaaagctataataaatgaaaaagtaaatttaatagtagtagatactgcacatggtcatactaaaaaagtagcagacataattaaaaaaattaaaaaaattaaaaataaaaatactttactatgcgcaggaaatattgcgactgcaaatgcagcaaattttttagcaaaattaggtgttgatattataaaagtaggaattggacctggttcaatttgtacaacaagattggttgcaggcattggagtgcctcaactgagtgcgattttagatgtaaaaaaaggtttaaaaaataaaaatataaaaattattgcagatggaggaattaaattttcaggcgacatagcaaaagctttgtctgcaggagctgatgcggttatgataggctccctatttgctggtacagatgagtcgccaggaaaaatagtaaaaaaaaatggtaaactatttaaaaatttcagaggaatgggctcaataggcgcgatgaacaagggatcggcagacagatattttcaaaaaaaacaaaaaaataaatctaaatacgttcccgagggagtagagggatatgttaaatacaaaggctcggttgaaaaaatcatttttaaactcattggtggtcttaagtcttctatgggatatcttggatcaagaaaaattatttatttaagaaaaaaaccaaaatttgttaagattacaaaagctggtttttacgagagtatggtgcataacatagatgaaattaaaaaagatgaaaaatattaaa

SEQ ID NO: 205066 - DNA, 1072 bp, Unknown
  Bacterial polypeptide expressing nucleotide sequence isolated from the Sargasso Sea
atggttcctataaaagaagctcttacctttgatgatgtaactttagtacctaagtattcaagtgtactaccatcggatgttattaccaaaacagaactttcaaagaacctgaccttaagaattcctctattatcatctgccatggatacggtaacagagtctaaaatggcgattgcaatggccgaggcaggaggtattggagtaattcatagaaatctaagtataaaaaaacaaattctagaaattagaaaagttaaaaaaaagaaattaattgttggggcagcggtaggtgctggaggggaagaagttaaaagagcagaagcgattataaaagaaaatattaatctaattgtcgttgatacagcgcatggtcatagcaaaaaagttgctgaaataattaagaaaattaaaaaaataaaatcatcaaaaactaccttatgtgcaggtaatatagcaactcccgaggccgcaaaattcttaattaaacttggtgttgacgtagttaaggttggtatcggcccaggttctatttgtacaacgagattagtagccggaattggagtacctcaactaagtgcaatattaaatgtaagagaaaaatttaaaagtaaaaatgttaagataatatcagatggcggcataaagttttctggagatattgctaaggctttagctgctggagccgatgccgtaatgataggctcattgtttgcaggaagtagagaagccccagggaaattaataaaaaaaaaaggaattatttataaaaactttcgtggcatgggttcagttggtgcaatgaacaaaggatctgctgatagatattttcagaaaaaacaaactgatacgtctaaatatgtgcctgagggtgtagaaggattagtaaaatttaaaggaaaagttgataaaataatttataaactaatagggggattaaagtcttcaatgggatatctaggatctaaagaaataaaaggacttagaagtaaaccaaagtttgttaaaataacaaaagcaggcttttatgaaagcatggttcacaacatagatgaggttaaaaaagaaacataaa

SEQ ID NO: 205067 - DNA, 1209 bp, Unknown
  Bacterial polypeptide expressing nucleotide sequence isolated from the Sargasso Sea
aagttaaaaaatatgaaggtggaatgattattgaaccgcatactatatcaccagaggctactggacatcaagcattggaagtaatgacaactaaaaattttacaggattgccagtaaccataaatgatggagatcttttaggtattgttacaatgcgtgacttaagatacgaaaaaaatttacactttaaagttaaaaagttaatgactccaaaagataaattaataacggttcaagcaggcataggatcaaatgaagctagggaattattaaataaatataaaatagagaaattaccagttgttaataaaagttttaagctgcaagggttaataaccatgaaagatattgagaagagtaaggaatttcctaattcatcaaaagataaacaaggaagactgatagctgcagcagcaattggtgttggtcaagatatgattgaaagagtatcaagtttagtaagttcagggttagatgtagtgtttatagatactgcacatgctcactcaaagaaagtaattgactcagtaaaattaattaaaaagaaatttaaatccttagaaatagttgcaggaaatattgctacatctgaagcagctcttgctttgataaaagcgggtgctgatgcattaaaagttggtattggtcctggttccatttgcacaacaaggattattgctggtataggtgttcctcaaatgactgccataatggacgttagtagtgttgcaaagaaatataaaatccctgttattgcagatggtggaataaagttctcaggagatataactaaggcattggctgcaggagctgattgtgtaatgattggaaatttattagctggaactgatgaatcacctggtgatttagtcttatatcaaggaagatcctacaagacttatagaggcatgggttcaatagaagcaatgaaagaaggaagtaaagatagatattatcaagaggatataattgactccaaacttgttcctgagggtatagaaggaagagttccttatagaggcactaccagtaaagttatttttcaattagttggtggtttaaaagcaggtatgggctatacaggatctaaaaatcttcttgcattaaaaaaagctaactttatgaaattaacaggagctggtcttaaagaaagtcatgttcacgatgtagtcataagtagggaagctccaaactattctttagattaat

SEQ ID NO: 205068 - DNA, 685 bp, Unknown
  Bacterial polypeptide expressing nucleotide sequence isolated from the Sargasso Sea
gctgaaatatatcaaaaagaatttcaaaaatcaggaggttattgtaggtaatattgcaactgaggatgcagcactcgatttgataaaagctggagcagatgcacttaaagttggaattggccccgggtcaatttgtactacaagagtcgttgcaggtgttggcgtaccacagttaacagcaataatgaacgtttataaagcagctagaaaatcaaaaataccgataattgctgatggtggcataagatattctggtgatatagccaaagctttagcagctggagcagacacagtcatgctgggtgggcttcttgcaggaacagatgaggcgcctggtgaagtagaaatgtatgaaggtagaacttataaatcatatagaggaatgggttcaattgccgcaatgcaaaaaggatcaaaagatagatacaatcaagatagtgcttcatcatcaaaactcgtaccggaaggaattgagggaagagtaccttataaaggaaccatgaatactctcctccatcaattaattggtggtttgaaatctagcatgggatacgttggttgtgagaatttatctgaaatgaaaaataaaacaaaatttattagaattacatcttcggccaaacaagagagtcatatccatgacgtagacattgttaaagagcctcctaattatcaaccaaggtaa

SEQ ID NO: 205069 - DNA, 1108 bp, Unknown
  Bacterial polypeptide expressing nucleotide sequence isolated from the Sargasso Sea
aatggcctaccagataaatactaattattccgttacttttgatgatgttttgctctcaccagcgtattcggagatcaaaccaaaaaatgtagatacatcgattaccattggaaaaatcaaattacatattcccatactctccgctgctatggataccgtgacagagaataagatggcgatcaatctcgcactaaatggtggtctaggtgttatccaccgtaatatgccaattgataaacaagcaagcgaagtaaaaaaagttaatagctttaaagttaacagtaaaaaatttcaaaatgctgtaattaattctaacaaaaaaattgcagtaggcgctgcaatcggtgtggaaaataatgcgtacttacgactattggaattattaaaagttggtgttgacatagtctttattgatgttgctcatgcacacacaaaaacaactttacagtttattgaaaaagcaaaaaaagttttaaagaaaactcctcttatagttggaaatatcgctacaaaaaaagctgcatcagatttaattagtgctggtgtagatgcaattaaagtaggtattggtccaggatcaatttgtactacaagagttgtgactggtgttggtattcctcaactctccgctgtgatggatacatttcaagttgcaaaaaaatttaaaattcctgtgattgcagacggaggaataaaaacatcaggtgatattgcaaaagctatagcaggtggtgcaagtgcttgcatgatagggtctttatttgctggtactgaagaatcaccagggaaattattaacgattaaaggtaaaaaatttaaatcatatagaggtatgggttcggtaggagcaatgcaaaaaggatcttttgatcgatactcgcaagaagaaacaaagaatgcaaaaaaattagtagcagaaggtgtggaagggatggttccatacaaaggtaaaatagaagatgtagcgtatcaacttgttggtggcttaaaatcttctatggggtacactggtcataaaacgattaagaaaatgcaaggcaattgtaaatttgtgtttatttctaaagcaggagcccgcgaaagtaatgtccacgatgtcattatgtaa

SEQ ID NO: 205070 - DNA, 1465 bp, Unknown
  Bacterial polypeptide expressing nucleotide sequence isolated from the Sargasso Sea
tatgtcaaataatattgaaaaaaaattaacatttgatgatgtcttattagttccgagaaaatcatctgttttgcccaaagaagtagattgttcttctaagcttactaaaaacatcactttaaatattcctattatgagtgctgcgatggatactgtgacagaatcagatatggctattgctttggcaaggcaaggtggaattggagttattcataaaaatttaagtattgaaggtcaggctttgatggttgataaagttaaaagatatgaaagtggtatgataagaaatcccataactttagatgaccaaaagactgttagagatgctaaacaactaatggatcaatactctattggtggattaccagtattatcaaaaggaaaattagttggaattataacaaaaagagatattcgatttgaatccgatcttgacactcttgtgaaaaatcgaatgacttcaaaagatttaattacagttaattcagatacaagcaatgaagatgctaagaaaattcttcaaaaacatagaattgaaagattattggtagtagataaacaaaataatcttgatggtttaataacagttaaagatttaaccaaaaaagaagaatttccattatctactaaagataaaaatggaaggttaagagttgctgctgctataagtgttcgagatgactggaaagatagagttaaagctcttgttaaagtgggtgttgatgccattgttattgatactgctcatggacattcccaatttgttttagatttagttaaaaaagttaaaaaagaattccctaaagtagatttaattgcaggaaatgtttctactgctgaagcaactgaagatttgattaaggctggagcagattgtgtaaaaataggaattggagcaggatcaagttgcacaaccagaataattgccggtgtaggtgttccacaactatctgcagttatggattgtgcaaaagttggaactaagcttaataccccaattattgctgatggaggtataagatatagtggagatattgctaagtctttggctgctggtgctaacgtagtaatgcttggcggtatgttagctggaatggatgaaagtcctggtgaaactattgtatatgaaggaagaagatataaatcatatagaggtatgggttcattagctgcgatgaaagaaggcggtggagaaagatactttcaacaagaaaaagacgaactcaagctagtgccagaagggattgaaggaatggttccttttagaggtcctgtgaataatacaatttttcaattaattggaggacttaaatcttcaatgggttattgtggtgcaaaggatttaaaatctttctataagaacaaaaaatttatagaaatttctgcagcaggaataaaagaaagtcatccacatgaagttagtattattaaagaggccccaaactatcagggtcatgataagtaa

SEQ ID NO: 205071 - DNA, 520 bp, Unknown
  Bacterial polypeptide expressing nucleotide sequence isolated from the Sargasso Sea
tgtagcaggaataggagttccacaactaagtgctatattaaatgttaaaaagggaattgggaaaagcaaaataagattaattgctgatggtggaataaaattttctggtgatattgctaaagcattagcagctggtgcagatgcagttatgattggttcattatttgcaggtacagatgaagcacctggaaaaaaaataaagaaaaatggtaaactatataaatattttaggggtatggggtcaataggtgcaatgaataaaggttcagcagatagatattttcaaacgaaacaaaaagattcatcaaaatatgtagctgaaggtgtagagggatacattaaatacaaaggtaaagtagataaaatagtatacaacttagttggaggtttgaaatcttcaatgggttacatgggagctaagaaagtaattgatcttagaaaaaatccaaaatttgttaaaattactaaagcaggtttttatgaaagtatggtacataatatagatgttgtgaaaaaataa

SEQ ID NO: 205072 - DNA, 1471 bp, Unknown
  Bacterial polypeptide expressing nucleotide sequence isolated from the Sargasso Sea
aatgctcaggatcgtgaaagaagccattacatttgacgacgtgttacttgttccggcgcactccactgtgttaccccacaccgcagacttgcggactcaattgaccagcaaaattacgttaaatatacctatggtatcggcgtctatggacactgtgaccgaggctcgtttagctattgctttagcacaggaaggcggtttaggttttattcacaagaatatgaccatcgaagagcaggcagctaatgttcgtaaagtaaaaaaatacgaaagtggtgtcgtctctgaccctgtcactgtgcgtccagagcaaagcatccgtgaagtacagcaactggctgctcagcatggattctctggtttcccggtagttgatgctgacaataacctggttggtattgtgacaggtcgtgacctgaacgttgaaaccaacccacaactggctatttcttctgtgatgacgccaaaagagcgtttagtcacagtaaatgaagcaggcccacgtgctgaagctttggctttaatgcacaaacatcgtatcgaaaaagtattagtggtcgacaatgactttaaactcaaaggtctgatcacagtacaggattacaacaaagccgccagcaaaccaaacgcctgtaaagacgaatttggtcgcttacgtgttggcgcagctgtgggcgtaggcccaggcacagacgaacgtattgctgctttagtcgaagccggtgtggatattttattaatagatacctcacacggtcactctgaaggcgtgttagatcgcgtgcgtcaaactcgcgccatgtaccctgatttacaaatagtagcgggtaacgtcgccacagccgaaggcgcaaaagctttagctttagctggtgccaatgcggtgaaagtgggcataggcccaggttccatttgtaccacccgtattgtcacaggttgtggtgtaccacaactgacagctatctctgatgcagtagatggtgtgcagggcatggacgtttgtattatcgctgacggcggtatccgcttctcaggtgatatcgccaaagctttagtagctggcgcgcactgcgtgatggtaggttcaatgtttgctggtactgaagaagcaccgggtgatgttgaactgtatcagggccgttactacaaatcctaccgtggtatgggttcattaggtgctatggcacaacgtaatggctcctctgaccgttacttccagggcagcaacaatgctgagaaattagtgcctgaaggtatcgaaggccgtgtggcgtacaaaggcccaatcggcactattattcaccagcaaatgggtggcctgcgctcttcaatgggcttaacaggttgctcaactattgctgaagtccgcaccaagccggtctttgtcaaagtaacttctgctggtatgggtgaatcgcacgtgcatgatgtgcaaatcaccaaagaagcaccaaactaccgcttaggttaa

SEQ ID NO: 205073 - DNA, 672 bp, Unknown
  Bacterial polypeptide expressing nucleotide sequence isolated from the Sargasso Sea
caataaaaaagatcaaaaaattacgtccaacaagaacagcaatttgtgctggaaatatagctactgaggaaggtgcaaagtttttagttggattaggtgtagatattataaaagttgggattggtccaggatctatttgtacaacaagacttgtagcaggaattggagtcccacaattaagtgcgatattaaatgttaaaaagggcattggaaaaagtaaaacaagattaattgctgatggaggtattaaattttctggtgatattgcaaaagcgctagcggctggtgcagatgcagttatgataggttcattatttgctggaactgatgaagcacctggaaaaaaaataagaaaaaaaggcaaattatataaatattttaggggtatgggatccataggcgcaatgaataaaggatcagcagatagatattttcaatcaacacaaaaggatacatcaaaatatgtacctgaaggagtagagggatatattaaatataagggtaaagttgataaaataatctataacttagttggaggtttgaaatcttcaatgggctatatgggagctaagaaagtgattgatttaagaaaaaaacccaagtttgtaaaaattactaaagcaggtttttatgaaagtatggtacataatatagatgtaataaaaaaataat

SEQ ID NO: 205074 - DNA, 1459 bp, Unknown
  Bacterial polypeptide expressing nucleotide sequence isolated from the Sargasso Sea
atggcgcagattgagaccgcactcagttacgacgacgttctccttcttccagcggagtcagcagtacttcctgctgaggtagatttgtctacaaggctgaccaccgggatatctctcaacgcaccgatagtatcagctgccatggacacggtcacagaagccgagatggcgatagccatggcccagagcggaggcataggggtgatacacaggaacatgccgatagaggagcaggctgtggaggttgacaaggtcaagagattcgagtccggtcttgtcctggagcctgtcactgtagatcccaagatgaccgtgggagagctgcgctctctgaaggaccagtacggtttctcaggtttcccagttatcaacggggatgggagtatcgtgggaatggtaaccaacagggacatcaggttcgtcgaggacccaaataccgaggtctcggaggtgatgactaccgacctgatcacggtcccagagcacgtcgacatggaggaagccaagaggctgctccaccagcacaggatagagaagctggttgtggtgaatgagggaggagggttctccggtctaatcaccgtcagagacatcaacagatccagagacaacccattgtcctgtaaggacgacatgggaaggctccgcgtggttgcggccacggggaccggcgagaaggggatactgagggcattggcaatgttcgaggccggggccgacgcagtcgctgttgacaccgcgcacggacactctcacggggttctggatactgttcgtgctatcagggaacaggccggtcccgatgcccagattatcgcgggtaacgtagggactccagaagcggctggtgctctgatagacagtggagccaacgcagtcaaagtaggaatcgggcctggctcgatatgcaccaccaggatagtgacgggagtcggagtcccccagttcaccgcagtgatgagcgctgtcgaggcgtgcgccgagagaggagtacccgtgatagcggatgggggaataaagtacagcggggacatagccaaagcaatcgcatcgggagccgactgcgtgatggttggatcgctactagccggaacggacgagtcccccggggagacaatactgtaccaaggcagggcctacaagcagtacagggggatgggttcgctgggtgccatgagcaagggctcctcggacaggtacttccagtcctcgcagggggacacgaggaagtacgtaccagagggaatcgaggggagggtcccatctaggggcccggtcgaccaggtcctctaccaactgatgggtggcctgaggagctcgatggggtacacagggaattcaacaatcaaggagatgaagagcgagtgcaagttcgtccgaatcaccaacgcaggactctccgagagccacgtccacgacgtggagatcaccagagaggctcccaactacaggaggtaga

SEQ ID NO: 205075 - DNA, 633 bp, Unknown
  Bacterial polypeptide expressing nucleotide sequence isolated from the Sargasso Sea
caactgcagatgcagcattagagcttgtaaaagcaggtgtagatgcagttaaagttggaatgggtcctgggtcaatatgcacaacaagaattattgcaggaataggagtgccacaaataagcgcaattttagacatcaaaaatgctttaaaaaaaacagatataaatatcattgcagatggtggtattagattctcaggcgatatcgctaaagcaatcgcagctggagcagactcagtaatgcttgggagtttgtttgcaggcacagaagaggcgccaggaaaagtagagctatttcaaggaagaagttttaagacttatcgcggcatgggttcaataggagcaatgacagaaagagatgatgccaataggtacatgcaagaagatgttgatcagagcaaactcgttccagaaggtattgagggaagagttccgtataaaggtttagtaattaatgtcataaatcaattggaaggcggattaagacaaagcatgggttatgtaggatgtaaatcaattaaggaaatgcaaaataatagtcaatttgttgaaatcacaaatgcagggatgactgaaagccatgttcatgatgtcatgatcacaaaagaggctccaaattaccaaagaagctaac

SEQ ID NO: 205076 - DNA, 1165 bp, Unknown
  Bacterial polypeptide expressing nucleotide sequence isolated from the Sargasso Sea
aatgacgatagagaaaactgctttaacattcgacgatgtccttctcaaaccgaattactcggatgtactcccacgcgaaacaaatctctcaacaagactcaccaaaaatctttccatacagatcccattgttgtctgcagccatggataccgtcacagaataccagctggcaattgcaattgcacaagagggcggaatagggatcattcataagaatttcagtgtcgatgatcaagcatcacaagttaacagagtaaaaaagttcgaaagtgggattatctcagatcccgttaccgtcagttcagacatcactatcagagaagttttggaaattacaaaattcaataatatttccggcgtaccagttgtagatgatggcgtaacagtcggcattgtgaccaatcgtgaccttcgatttgaaaccaatcttgatggattagtgagcagtgtcatgacgcctaaggataagcttgtcactgttaaagagggcgcagacgaagaagaggttctaagattgcttcatcagcacagaattgaaaaagtactcgtggttgatgattcctttcatttaaaaggaatggtgaccgccaaggattttcaaaaggcaacggatttccctttggcatcaaaagatgggaacggtgcacttttggttggagcagctgttggtgttggcgatggctcagaagaaagggtagaggcgcttaagactgctggcgtagatgtcattgtcgtagacacagctcatgcgcatacggaaggcgttatcaatcaggttaaatcaatcaagaaaatgcattctgatcttgaggtgatcgcaggcaatatcgccacgggagaggctgcaaaagcacttgctgatgcaggagcagatgcggtaaaggttggaattggcccgggttcaatttgtaccactcgagtggtcgcaggagcagggatgccacaaatcacagcaatttctgatgtcgcaaatcagcttaagggaaccgatacatgcataatctcagacggaggcattcgttattcaggagacatcgcaaaagccatagcagcgggtgctaatagcatcatgctcggcagtctatttgctggaacagaagagtctccaggtgagattgagttgtatcagggcagaagctttaaatcgtatcgtggcatgggttca

SEQ ID NO: 205077 - DNA, 1471 bp, Unknown
  Bacterial polypeptide expressing nucleotide sequence isolated from the Sargasso Sea
atgttacgcattgttaaccaagctctcacctttgatgacgttcttttagtgcctgaccactctgatgtccttcctaaagacgtaaaattaaaaacacgtcttactaaaaatctaaatttaaatataccccttttgtctgcagctatggatacagtaacagagtctcgtatgggtattgctttaagtgaattaggcggaattggtattattcataaaaacttttctgtagaagatcaggcagctgaagttaagaaggttaaaaagtacgaaagtggtattgtaagagatccgataacaattagatctgataacgaagttggagagttaatacagttaacaaaagaattaaatatatctggtatgccagttgtcgatgacggaaaccttgtagggatagttactagtagagattttaaatatcaggaaaactctacagctaaagtctctgagataatgactcctaaagacagattagtgaccgctaaagagggagaaagtgctgatttaattaagaaactattacaagaaaatagaattgaaaagattttactaattgatgattctttcaagctaaccggtttagtgacattaaaagatataaataaatctttagatttccctaacgctgctcgtgatgaagagggtaggttgttagctggagcagccatcggtacaaaattagatacaattaaaagatgcgaagctttaattgaagccggagtggatgttcttgtggttgatagtgcgcatggccattctgaaggagtcttatcaacaatttctgaaataaaaaagaattttaaagatgtagaaatcattggaggtaatgttgccaccgccgaaggcgctcttgcattggccaaagctggtgcggatgcagtaaaagttggaataggcccgggttctatatgcactacaagaatcgttactggtgttggggtgcctcaaataacggcagttgctgaagtaacagaagctctaactaagaaaaatattcctgttatagcagatggtggaattagattctctggagatatagctaaagccattgctgccggaggtcattccgtcatgttaggaagcattttggctggtacagaggaagcgccaggtgaattagaactttatcagggcagaagttataaatcctatagaggaatgggatcgattggtgccatggcaggagagcaaggctcatctgatcgatattttcaagatagcgcagaggctacagaaaagttagttcctgaagggatagagggtcgagtaccctacaaaggctggcttcaagcagtgatacatcaaatgattggaggtttgaggcaaagtatgggctatacaggctcaagagacatagaagaaatgagaactaagcctaaatttgttcaaataacttctgctggagttagtgaaagccatgttcatgatgttagcgttactaaagaggcgccaaactatagagtaagttaag

SEQ ID NO: 205078 - DNA, 835 bp, Unknown
  Bacterial polypeptide expressing nucleotide sequence isolated from the Sargasso Sea
aattaaaaaagttaaaaaaaaaaatttaaaagttggtgctgcagtgggcgctggaccattagaatttaagagagcacaagcaattatcaaagaaaatattgaattaattgttgttgatactgctcatggtcatacaaaaaaagttgctgaaattataaaaaaaataattaaaaacaaatcaaaaaagactgctctttgtgcaggaaatgttgctacgtatgatggagcaaaatttttatcaaaacttggagtcgatattataaaagttggaataggaccaggatctatttgcacaactagattggtagctggaataggggttccacagctaagtgcaatattagaagctaaaaaaggatgtaaaggtaaaaaaatttctataattgctgacggtggaattaaattttcaggagatatatctaaagctttagcagctggagcagacgctgtcatgattggttctttatttgctggtactgatgagtctccaggaaagataataaataaaaatggtaaactatttaaaaattttagaggcatgggctctataggagcaatgaacaaaggatctgctgatagatattttcaaaaaaaacaaaaagatatgtcaaaatatgtacctgaaggagttgaaggattggtaaaatacaaaggcccagtaaataaaataatctatcaactaattggagggttaaaatcatcgatgggatacttaggatcaaaaaaaatcacatcattaagaaaaaaaccaaaatttgttaaaattacaaaagcaggtttttatgaaagtatggtacataatatagatgaaattaaagggaatggtaaatattaa

SEQ ID NO: 205079 - DNA, 1474 bp, Unknown
  Bacterial polypeptide expressing nucleotide sequence isolated from the Sargasso Sea
atgaaaaacagaccaccctttaagcaggctttgacatttgatgatgtattgcttgttcctcagaaatcaagcattttaccgaaagaagtaaatttaaaaactaagctaacccagaaaattgaaatgaatataccattgctttccgcagctatggatacggtaaccgaaagcggtatggctgttgctctcgctagggaaggtggtataggcattattcataaaaatttatcaattgaagagcaagcatcaatggttgatcgcgtgaagcgatatgagagtggtatgatcgtaaatccagttacattatctagtaataaaacaattaaagacgcaaaagaggtgatggggttatataaaattagtgggctcccagtagttgagaatgaaaagctaattggaatcattacaaatagagatattcgttttgaaacagatgagtctcttcctgttacagatcgtatgactactgaaaaacttgtcacggttccacagggcaccacacttgaccaagcaaaaaaagtattacaagagcatcgaatagagaaattacttgttgtagataaagagggtagccttgcaggcttaattactgttaaagatattcaaaagaaagaggattttccatacgcatgcaaggataaaaatggacgtctcagggttggtgcggcgctaagcgtcactaatgattttctagaaagagctcaagaattacattctaaagaggtagatgttattgttattgatactgctcacggacactctaaaggagttttaagtcaaatagaaaaaattaaaaaatcgatgtcaggcttacagattgttggcggaaatgttgcaacttcagaaggtgcaaaagcattaattaatgctggcgttgattgcgttaaggtcggtattggagccggtgcaagctgtactacaagaattgtagcaggtattggagtcccacagctaaccgcagtaatggattgtgttgatgctgcaacaactgacaacattcctgtgattgctgatggcggtatcagatacagtggagatatcgcaaaagctatagctgctggtgcgagcactgttatgctaggaagcattcttgcgggcatggatgaaagccctggtgaatttatattatttgaaggtcggcagtataagtcttatagaggaatgggatctcttggagcaatgcaagatggcggcggagaacgatattttcaaaatgatactgaagataaaaaactcgtacctgaaggcattgaaggtatagttccttatagaggaagtgtaaaaaataccatccatcagctaatgggtggattgagatcttcgatgggatattgcggtggggaaaatatattagattttcagaaaaaagctgaatttattcagtcaactcaagctggcgttaaagagagccaccctcatgaagttaaaataacaaaggaagctcctaactatcagatttcagatactaaataga

SEQ ID NO: 205080 - DNA, 1017 bp, Unknown
  Bacterial polypeptide expressing nucleotide sequence isolated from the Sargasso Sea
tgactccgaaagatagattagttacagctaaagaaggtgagagtccagatgtaattaaaaagttgctccaagaaaatagaatgaaaaaaatcctccttatagatgattcctctaaattaactggattggttacccttaaagatatcaataagtctctggactttccagatgcagctcgtgatgaagaaggaaggcttttggctggtgccgctataggaacaaaggcagataccttagatagatgtcaggccttagttgatgcaggagtcgatgtactggtagcagatagtgctcatggacactctgaaggggtcttaaatcaaatcaaggcagtaaaatccaattttaaagacatacaaataattggcggaaatgttgctacaggagagggggctttggctttagtgaaagcaggagcggatgctgtaaaagtaggtattggcccaggatcaatttgtacaacaagaattgttacaggtgtaggagttccacaaattacagctgtggcagaagtaaccgaagctttaataaagaaagatataccggtcattgcagatggcggaattagattttcaggagatatagccaaggctatagctgccggaggtcatacagtcatgttaggaagtgttcttgcaggaacagaagaagcaccaggagaattagagctgtatcaaggtaggagttataaatcatatagaggtatggggtctataggagctatgtctggtgatcaaggttcttccgatcgttattttcaagatagtgctgaggctaccgaaaaattagtacctgagggaattgaaggaagagtgccatataaaggttggttacaggcagttattcatcaaatgatagggggccttagacaaagtatgggatacaccggttcacatgacattgcgactatgagaacaaaacctaaatttgttcaaataacttctgcgggtgttaatgaaagtcacgttcatgatgtaagcgtcaccaaagaggcacctaactacagaatgagctaaa

SEQ ID NO: 205081 - DNA, 946 bp, Unknown
  Bacterial polypeptide expressing nucleotide sequence isolated from the Sargasso Sea
aatggtaaatacatcaaattcaaaaaaatccaatgtaattattacagaagaaggcttggcatttgatgatgtcctgcttgttcctcagtattcagaaattcttccatctgatgtagttttaaccactaaactcactaaaaatattgagcttaaaacacctattttatcagcagcgatggatacagtcactgagtcacaaatggcgattactctagctggagagggcggcattgggataattcataaaaatatgtcaattgaagaacaagctaaacaaattaggtttgtgaaaaagtatgaaagtggagtaataaatgatcccgtaactgcatcacctaatatgactatttcagaaataaataggattactaaaaaatataatatatctggagtaccgatagtagataataataaattagttggtattgtaaccaatagagatcttaggtttgtagatgatctaaatttaaaagtatctgaaattatgaccccaaaagatagattgataacggtaaaggaagattttactaaagatgaagttattagtgccttaagaaaaaataggatagaaaaaatactgattactaataataaatatgaattgaaaggtatgattacatttaaggatattcaaaaatccacaacttatcctaatgcttctaaagatgaaactggaagtctgagagtaggagctgctattggtactggtcaagattcaatagaaagagcggaagcattaatcgaacagaaaatagatgttattgttatagatacagctcatggacattcaaaacttgttattaaaatgttaaaacatttgaaaaaatcatatccaacacaagaattgattgctggcaatattgctacggaagatgctgctaaagatttaatcacttcaggcgcagatgcaattaaaattggtattggaccaaggttcaatttgtac

SEQ ID NO: 205082 - DNA, 1374 bp, Unknown
  Bacterial polypeptide expressing nucleotide sequence isolated from the Sargasso Sea
ccgaaacttttgtcactaaggatataaaacttaatattccactactttcatcagcaatggatactgttactgaaactaatatggcaattgcaatggcacagtgtggtggaattggtgttatacatagaaatttaagtattagtaaacaagtgaaatatgtatctgcagttaaaagatttgagagtggtattgtttataatccaattactttaaattttgatgatacagtgaaaactgcaaaaaaaattgcaaaaaaatataatataactggatttcctgtagttgataaagcaaataaagtacttggaattttaactaatagagatattcgatttttagaagataataatgtaagagttggtgatattatgactaaagaaaatttagcaatggtaaaagagccaattaatacaaaagaagcaaaagatattatggcaaaaaggagaatagaaaaacttttagttgttgataataataattttttgtctggattactcacaataaaggatatcgaaaaatccgttctaaatcctttcgcaagtaaagataggttgggtagattgagatgtgctgcggcatcttcagttggtgataatggttttgaacgttcttcatctttaattgaagcaggagtagacattattgttatagatacagctcatggtcattctgtagaagttatagaagcagtaaagagattaaaaaaagaattttctgatactcaaattattgctggtaatgttgtaactgcagaagccactaaagaattaataggtgttggtgctgatggtattaaagtaggtataggtccaggatcaatatgtaccactagaattattgctggtgtaggaatgccacaaataactgcgataattaattgtgctaaagaagctgaaagacataatatacccataattgcggatggaggaattagatattctggggattttgcaaaatcaatagcctctggtgcctcttgtgctatggttggttccttattagcaggtacagatgagtctcctggggagataactttataccaaggaaggagttttaaaaactatagaggaatgggttctataggtgctatggctaggggatctgctgatagatattttcaaaaagatatacaagctgataaacttatacctgaaggaatagagggacaggttccatataaaggttcagtaaacaaaattatttaccaattagttggtgggttaaaggcgtcgatgggatacactggtaatgaaaatataaagctaatgaagaaagactgtaagtttattaaaattacaggatctgggttgtctgaaagtcatgtacatgacgttagaataacaaatgagtctccaaattatagcaataattagt

SEQ ID NO: 205083 - DNA, 1066 bp, Unknown
  Bacterial polypeptide expressing nucleotide sequence isolated from the Sargasso Sea
tatggatcctatcaaagaagcattaacgtatgatgacgttttacttaccccaagatattcgcaaattttaccctcagaagtttcgacttctacaaacttatcaaaatatttaaatcttaaaattccaatagtatcctctgcaatggatactgtaaccgaatcaaatatggcaatcgaaattgctagattaggaggaataggagttattcacagaaatttaaatattaataaacaaataactgaaattaaaaaagttaaatcaaaaaatttaaaagttggagctgctgttggagcaggaccaatagaaattaaaagggcagagtcattattaaaagaaggaatagatttaattgtagtagatactgctcacgcacatacaagaaaagtaggagaaataataaaaaaaatttcaaaactaaaaccaaaaaaaacaactctttgtgctggaaatattgccacaactgaagctgctaaatatttatctaagcttggagttgatgccattaaagtaggtataggcccaggttcaatttgtacaactagacttgttgcaggtataggggttcctcagttaagtgcaattatagctgcaagaaagggagtagggaaaaaaaatattacaatcatagcagatggtggaataaagttttcaggtgatattccaaaagcattagccgctggggcagacgcggtaatgataggttcgttattggctggatctaaagagtctccaggaaaaattataaagaaggaaggtaaatattttaaaagttttagaggaatgggttcaataggtgcaatgaataaaggatcagcagatcggtattttcaaaaaaaacaaaaagatagttcgaaatatgtcccagaaggcgttgaaggtttagtaaaatacaaaggccctgtggaaaaaattatttttcaactaataggaggtctaaaatcttcaatgggttatttgggatcagaaaatataaaaaaattaagaaataaacctaagtttgtaaaaataactaaagcaggcttttatgaaagtatggtacataatattgaccgagttttaaaataa

SEQ ID NO: 205084 - DNA, 1471 bp, Unknown
  Bacterial polypeptide expressing nucleotide sequence isolated from the Sargasso Sea
atgctacgtatttcaaccgacgcattaacattcgacgacgtcctcttactgcctgcctattctgaaatcttgccttctgatgtttgcttaaagagcaaattaaccaagcgtattggtctcaatattcctgtcgtttcttctgcgatggatacggttaccgaggcgaggcttgcagtgtcgatggcgcaggaaggcggcctcggcatcgtccataagaatttatcggtagaggatcaggcccgtgaagttcggttggtaaagaaatttgagtcaggaattatccgagatccagtgacaatacaccctgaggcgacgatagagaccctgatagctaccaccacagaaaataggatatcaggtgtgcccgttgtcgacggggaaaagcttgttggaatcattactactcgggatatccgttttttggatcgaattgatcttaaagtgaaagatgttatgaccccccaggataggctgttgacggccaaagagggcgcgagtaacgaagagattaagcgaatcctgcacgagcaccgaattgaaaaagtcctattggtgaatgatgaatttgagctaaccggcatggtcacggttaaagatataaccaaagcagagacttacccttcagcatgcaaagacgagcaagggcgcttgcgtgtcggtgctagtgtcgggacctctgaagagacagacgatcgtgtggccgcattagtggaagcggatgtagatgtcatagtcgttgatacggctcatggtcattcaagaggcgtggtcgatcggattgcctggattaaacaaacctatcctaatctcgatgtgatcggcggaaacgttgctacctacgatggtgccagagcgctgatagacgcgggcgtcgacgccgtaaaggtcggtattggccctgggtcgatctgtacgaccaggatcgtgtcggggattggcgttccgcaaataacggcggtctctgaggcgtctagagcggcagaagaggatgatattccggtgatcgcagatggtgggattcgttattctggcgatatagcaaaagccatttgtgccggggcgagttcggtgatggtgggaagcttgcttgcgggaaccgaagaggctccaggagagatagagttgtatcaaggaaggacatataaatcttatcggggcatgggttcgattggagctatggctcaaagtcatgggtcaagtgatagatattttcaagaagtcgagggggacggaagaaagctcgttcctgaaggcattgaaggtagagttcctttcaggggaccaacagggccgatcattcaccaactgatgggtggtcttcgagcagcgatggggtatacaggcagcggagacattaactaccttaggaaacatccagagtttataaaggtgagcgcggctagcatggccgaatctcatgttcatgatgtggcaatcacaaaagaagcccccaattatccagtcagctagc

SEQ ID NO: 205085 - DNA, 1461 bp, Unknown
  Bacterial polypeptide expressing nucleotide sequence isolated from the Sargasso Sea
tatgctacgtttaattaaagaagcgctaacctttgacgatgtgttacttgttcctgcgcattcgactgtactcccaaacaccgccatccttaaaactcgcctgactaacaccattgaactgaatattccgcttgtgtctgccgctatggacactgtgaccgaagcgcgtcttgcgatcgccatggcacaggaaggtggcttaggttttattcataaaaacatgagcatagaaaagcaggccgaagaagttcgtaaagtaaagatttacgaagcgggtgtggttcaacaacctgtgacggtaacgccttcaactacgctggcggatcttaaagtactgaccgcgaagaatggttttgcgggttaccctgtggtaaacgaagccaatgaattggtgggtattatcactggccgtgacgtacgtttcgtgactgactggagcaaaaccgtagaagaagtgatgacgccaaaggcgcgtttagtcactgttgcggaaggcactaagttagatgaagtgcaaaagttaatgcactcaaaccgtatcgaaaaagtgttagttgtcgatgataacttcaagctgaaaggcttaatcacagtaaaagacttcgaaaaagccgagcgtaagcctaatgcctgtaaagacgaattaggtcgtttacgtgtgggcgccgccgtgggtgcgggtgccggtaacgaagagcgtgtcgatgcgctggtgaaagctggtgttgacgtgctgctgattgactcttcccacggccactctgaaggcgtgttgcaacgtatccgtgaaacccgcgcaaaatacccagatttacaaatgatcggtggtaacgtggcaacagctgaaggcgcattagccctagttgaagctggtgttaacgcggttaaagtcggtattggccctggttctatctgtaccacacgtatcgtgacgggtgtgggcgtgccacaaattaccgcagtgtctgatgctgccgaagccgtaaaaggtttagggatcccagttattgccgacggcggtgtacgtttctccggtgacttagccaaagccttagccgcaggagcatcgtgcatcatggcgggttcaatgttcgcgggtactgacgaagcgccaggcgaaacggaactctaccaaggccgtgcctataagtcataccgtggtatgggttctttaggcgccatgtctcaaggttcttctgaccgttatttccaatctgacaatgctgccgacaagctggtgccagaaggcatcgaaggccgtgtaccttacaaaggcaagctcaaggaaatcatccatcaacatatgggggggctgcgttcatgcatgggcctaacgggctgtgccacaattcaagaactgaacgaaaaagcgcaatttgtgaaagtgacgtctgcgggcatgggtgagtcccacgttcatgatgtgactatcactaaagaagcgcaaactaccgttcaggt

SEQ ID NO: 205086 - DNA, 1066 bp, Unknown
  Bacterial polypeptide expressing nucleotide sequence isolated from the Sargasso Sea
atggatcccatcaaagaagctctaacttttgacgacgtaacactagcaccaaattattctgaaatattaccatctgagactaatacatctataaaattgtcaaaaaatttaactttaaaaataccattgatatcatcagcaatggatactgttacagaaggcagtatggcagctgccatcgctgaaaaaggtggaataggtgtaatacataggaatttgagtatcgaaaaacaaatttttgaaattaaaaaagtaaaacaaaaaaaattattagtaggagcagcagttggagctagctcagaagagcataggagagccaaaagaatactaaaagaaaatttagatttgatagttgttgacaccgcacatgctcataccaaaaaagtatcagacataattaaaatgatagtaaaaacaaaaccaaaaaaaacaacattatgtgccggtaatatagcaacagcagaagctgcaaaattcttaattaaacttggtgtagacacgattaaagtgggtattggaccaggatcaatttgtaccacaagattagtggctggaataggcgtacctcaattaagcgcaataatgaatgttaagagtggtgttggaaatagaaaagtatcaattattgcagatggtggaataaagttttctggagatattgcaaaagctcttgctgctggagcagatgcagtaatgataggctcattatttgctggaacagatcaagcgccaggaaaaattataaaaaaaaatggaaaactatttaaaagctttagaggcatgggttcaattggagcaatgaataagggctcagcagatcgatattttcaaactaagcaaaagaatagctctaaatatgtacccgaaggagtagaaggttttgtaaaatataagggaaaagtcgataaagtgatttatcaattggtaggaggattaaaatcgtctatgggatatcttggatcaaaaaaaataacgcatttaagaaaaaaacctaaattttataaaatcacaaaggctggtttttttgaaagtatggtacataatatagatgaagtaaaaaattagt

SEQ ID NO: 205087 - DNA, 872 bp, Unknown
  Bacterial polypeptide expressing nucleotide sequence isolated from the Sargasso Sea
tatgggaataataaaagattcgcttacctttgacgatgttactctaataccaagtttttcatcgattttaccctcagaagccataactactactgatttaggccaaaaattaagattaaaaataccattaatgtcatcagccatggacactgtaacggaagcaaaaatggcaatagcactctcaaaagcgggaggtcttggagtaatacatcgaaatttatcaatcgagagccaagtaaaagaggtcaaaaaagtgaaaagaagtaaaagcatagtaggagcagccataggagtaagcgaaaaagatcttgagagagcaatagaacttaacaaagccaatgtagatttattaattatagatacagcgcacggtcatactactaaagtttctaaaatgataaaaaatgttaaaaaaaagattagcagagttaatctttgtgctggcaatattgcaactggtaaagcagcgaaatttcttgcagatagtggagcagatattgtgaaagttggaattggccctggatctatttgcacaacaagattagttgcaggtattggtgtacctcaattaagtgcaataattgatgtcaaaaaatctttaaggaactacaaaactaaaataatttctgacggtggtattaagttttctggagacttggcaaaaggtttagcagccggagcagactgtataatgattggatcattattttctggcacaaatgaaagcccaggaaaaataattaagattaaaggaaagctttataaaaactttagaggcatgggttcagtgggagcaatgtctgttggatcttcagatagatattaccaaaaaaaatacaaagatatttcaaaatatgttcccgagggtgttg

SEQ ID NO: 205088 - DNA, 526 bp, Unknown
  Bacterial polypeptide expressing nucleotide sequence isolated from the Sargasso Sea
agtgccacaaataagtgcaatcttagatattaaaaatgctcttaataaaacagatacaaccattatcgcagatggtggtattagattttcaggcgatattgccaaagcaattgcagccggagcagactctgtgatgcttggaagtctgtttgcaggtactgaagaggcaccaggtaaagttgaactctttcaaggaagaagttttaagacttatcgaggcatgggatcaattggagcaatgacagaaagagatgatgcaaacagatacatgcaagaggatgttgatcagaacaaacttgtaccagaaggtattgagggaagagtgccctacaagggattagttattaatgtcattaatcaattggaaggtggattgagacaaagcatgggatatgtaggatgtaaatcaatcaaggaaatgcaaaacaatagtcagtttgtagaaattacaaatgcaggcatgactgaaagtcacgttcatgatgtcatgattacaaaagaggctccgaactaccaaagaagttaa

SEQ ID NO: 205089 - DNA, 968 bp, Unknown
  Bacterial polypeptide expressing nucleotide sequence isolated from the Sargasso Sea
aatggtttatcatataaataccaattattccgttacttttgatgatgttttgctctcaccagcgtattcggagataaaaccaaaagatgtagatacatcgattacgattggaaaagtcaaattacatatccccatactatctgctgctatggataccgtgacagagaataaaatggctattaatctagcacttaatggtggtcttggtgttattcaccggaatatgccaattgataaacaagcaagtgaagtcaaaaaagttcatagctttaaagttaacggtaaaaaatttcaaaatgctgtaattaattctaatggacaaattgctgtaggcgctgcaatcggtgttgaaaataatgcgtacttacgactattagaattattaaaagtcggcgttgatatagtctttattgatgttgctcatgctcatacaaaaacaactttacagtttattgaaaaagcaaaaaaaattttaaagacaacgcctcttattgttggaaatattgctacaaaaaaagctgcatcagatttaattagtgctggcgttgatgctattaaagtaggtattggaccgggatcaatttgtacaacaagagttgtaacaggtgttgggattcctcaactttcagctgtaatggatacatttcaagtggccaaaaaatttaaaattcctgttattgcagatggaggaataaaaacatcaggtgatattgcgaaagctatagcaggtggtgcaagtgcttgcatgataggctctttatttgctggcactgaagaatcaccagggaaattattaacgattaaaggtaaaaaatttaaatcctatagaggtatgggttctgtaggagcaatgcaaaaaggatcttttgatcgatactcccaagaagaaacaaagaatgcaaaaaaattagtggcagaaggtgtggaaaggatggttccatataaaggtaaaatagaagatgtagcct

SEQ ID NO: 205090 - DNA, 1465 bp, Unknown
  Bacterial polypeptide expressing nucleotide sequence isolated from the Sargasso Sea
catggataaattaaaacaaaaagcgttaacattcgatgacgtattacttttaccaagctacagtgactttctgcccagtgatgcaaatactgaatcaaaactctctaaaaacatctcactgaaaatacctttgatttctgcagccatggatactgtcacagaatcaagtatggctattgcacttgcagaggcaggtggtattggaattattcacaaaaataattcaattaaagaacaggctagtcttgtgaggtctgtaaagaaatatgaaagcggtattgtaagggatccagtcacaatacattcaaagaaatcaattggagagttaaaacaacttacatctgaattaagcatttcaggaatgccagttgttgatgacggtgacttaaaggggatcgttacaagtagagattttcgttatgcggaaaatatggaatcagatgtttctactattatgacgccgcttgaaaagctggtaacagtaaaagagggtgtttctcaaacagaagtaatgcaattaatgtataaaaatagaattgaaaaagttcttgttctagatgatgaggacaagttatctggccttgtaacaatgagagacattgaaaataccgctaaaaaccctgatgccactaaagatgattttggtagattaatagttggagcagccttgggtactgataaagatacttttgatagagccgaagcattatttcatgagggtgtagatgtcttagtaatagatagcgcacacggccactctaaaaatgttatcgaaactattaaagcaatcaaacaaaaatttccaaatgttgatgttattggaggcaatattgcgactgcagatgcagctatggagttagtcaaagcgggagcagatgcagtaaaggttggaatgggcccaggctctatttgtaccacaagaattatcgcaggcattggtgtaccacaaatctcagcaatatttgacgtaagtacagctttaaaaaatactgaagtagctgtgatagctgatggtggaattagattttcgggagacattgctaaggcaattgctgctggggctgactcagtaatgttaggtagtctcttcgccggaactgaggaagcaccaggaaaagttgagttatttcaaggtagaagctttaaaacatatcgtggtatgggttcaattggcgcaatgacagagcgtgaggatgcaaacagatatatgcaggaagatgtcgctgcagataaacttgtaccagaaggaattgaaggtagagttccttataaaggtcttgtcttgaatgttgtaaaccaacttattgggggtttacgacaaagcatgggttatattggatgcaaaaatatttctgaaatgcacaaaaaaagtcagttcgttgaaattacaaatgctggcatgacagagagtcatgttcatgatgttatgatcactaaagaggctcctaactatcagagaagttag

SEQ ID NO: 205091 - DNA, 1259 bp, Unknown
  Bacterial polypeptide expressing nucleotide sequence isolated from the Sargasso Sea
tattcacaaaaactgtgatatagaatcgcaaaaatcaatggtagataaagtaaaacgatcagaaagcggaatgatattgaagccggtgacaattaggccggaacgcagcataaatgaagccaaaaaaataatgtcagaatttagaattagtggactgccggttgtggataatgaaaaattagttggaataataacaaatagagacattcgttttcaagttgatgaggagctagaagtttctgcatgtatgacagcaaatgatctcgttacagttccattagatacatctctcaatgatgctgaggagcttcttcataaacacaggatagaaaaacttctagtggtagatgactccggtatgctagctggattaattacggttaaggatataaagaaaaaacagcagtatccaaatgcgtgtaaggactcaaatggtagactaagagtatcagctgctgtaggtgtgtctggagacacatatgaaaggacgcaagagcttgtaagagcagatgttgatgttatcgttttagatacagcgcatgggcactctaaaggtgtcctagataccatttctaaattaaaagctcaagattctagtttatcaataatagctggcaatgtagcaacaggttatggtgcaaaggctcttattgatgctggagcagactgtgtaaaagttggtatcggtgcaggtgcaagttgtactaccagaatcgttgctggcgttggagtgcctcaattaacagcgatcatggatgcggtagaggttactaaaaaagaagatattccagttattgctgatggtggattacgatatagtggtgatatagctaaggccctagcatctggtgccgattcaattatgcttggaagtgtgttagctggtatggatgaaagtcctggtgaaacgatcttatatgaaggacgccaatataaaacatttaggggaatgggctctttgggggctatggaagaaggtagcggcgatagatattttcaagaagatactgataataaaaagctagttccagagggaatagagggtatggtaccttttagaggaccagtcaaaaatacgattcaccagttgactggtggaataagatcatcaatgggctattgcggttgtaaaactatagatgagtttggagaaaaatcagagtttattgaaataactgctgcgggtgtaagagaaagtcatcctcatgaggttcggattgttaaagaagctccgaattactcaccatcagactcttaaa

SEQ ID NO: 205092 - DNA, 1129 bp, Unknown
  Bacterial polypeptide expressing nucleotide sequence isolated from the Sargasso Sea
aaaaacctaagtataaacattccaataatttcttccgctatggataccgtcaccgaatccagaatggctattgctttggcagagcttggaggtattggaatcattcataggaacttaagcattgaagatcaagctaatgaagttcgggcagtgaaaaaattcgagagcggtattgtaagagatccaacaactatctcatcaagcagcacagttggcgaccttattcagctaactaaagaattaaacatctctggcatgcctgtggtagacgatgacaatctggttggaattgtgacatccagggattttcggaatgaatccaacatgaccgccaccgtaagttcgattatgaccccgaaagaaaaacttattacggctaaagagaatgaaagtatcgataatataaaaactctactttatagaaatagaatagaaaaaatattgctcgtggatgacgcttttggtctgaaaggtctaatcactctgaaagatataaataaatcaaaagattatccatctgcaactaaggactcagaaggaagacttcttgttggcgcagcaataggtaatggacccgatacagatgaaagaactgaaaaacttgttcaagccggagtcgatgttctcgttgtcgatagcgcccacggacactctcaaggcattttagatagagttaaaaaagtaaaaaaagattatccaaatatagatgtcattggaggaaatgttgctactgcggaaggagctacagcattaatgaagactggggctgatggagtgaaagttggtattggaccaggttccatctgcactacgagaattgtgacaggagttggtgttccccaaattacagcaattgcagatgtggtttcaagcatgaagaaaaaaggaattccagtcattgcagatggcggaattagattctctggtgattttgctaaagcaattgcagcaggcgcagatagtgtcatgctcggcagtatcttggcaggaacagaggaagctcctggtcaggtagaactctttcaaggcagaagctataaagcttatagaggaatgggatctgttggagcaatgtcaggtgaatcctcctcaggggatagatattttcaggataagaacaaaccgacaa

SEQ ID NO: 205093 - DNA, 781 bp, Unknown
  Bacterial polypeptide expressing nucleotide sequence isolated from the Sargasso Sea
agaaagggtagaggcgcttaagactgctggcgtagatgtcattgtcatagacacagctcatgcacatacggaaggcgttatcaatcaggttaaatcaatcaagaaaatgcattctgatcttgaggtgatcgcaggcaatattgccacgggagaggctgcaaaagcacttgctgatgcaggagcagatgcggtaaaggttggaattggcccgggttcaatttgtaccactcgggtggtcgcaggagctgggatgccacaaatcacagcaattactgatgtcgcaaatcagcttaagggaaccgatacatgcataatctcagacggaggcattcgttattcaggagacatcgcaaaagccatagcagctggtgctaatagcatcatgctcggcagtctatttgctggaacagaagagtctccaggtgagattgagctgtatcagggcagaagttttaaatcgtatcgtggcatgggttcaattggagcaatggctcagcaacatggttccaaagaccgatactttcaaagcgatgttgaagaaccagaaaaactcgttcctgaaggcattgagggaagggttccttataaaggaaaactttcaaaaattattgagcagcttgttggcggtttacgccagtctatgggatatacaggctgtaaagacatcactgagcttcaaaccaaaactgagtttgtgagaattactgactcgggaaaaagagaagggcacgtccacgatgtcagtattacaaaagaagcacccaattactctgtcgattag

SEQ ID NO: 205094 - DNA, 980 bp, Unknown
  Bacterial polypeptide expressing nucleotide sequence isolated from the Sargasso Sea
tatggatcccataaaagaagcactaactttcgatgacgttactctagcacctagatactccgaaattttaccatcacaagttgatacaacgacttacttaagaaatgattgtaaaattaatatacccttattatcttcagcaatggatacagttacagagtctaaaatggctatcgcaatagctaaagcaggaggtataggagttatacatagaaattttacaatcgataatcaaattaaaaaaattagaaaagttaaatctaaaaatcttaaagttggagcagctgttggcgcaggtgaactagaatcaaaaagagctttagcaataattaaagaaaaaattgatttgattgttgtagatactgcacatggacacacaaaaagagtaaaggaaataattaaaataataaaaaaaaacaaaaataaaaagacgcttttgtgtgcagggaatattgcaactgcagaagctgcaaatttcttagcaaatcttggcgtagatttaataaaagttgggattggcccaggttcaatttgtacaacacgactagttgctggaataggtgttcctcaacttagtgcaataattaatgtaaaaaaaggtctaaggaataaaaaagttaaaattattgctgatggcggtataaaattttcaggggatatagtaaaagctctcgccgcaggagccgatgcggtaatgattggttctttgtttgctggcacaaatgagtcaccgggcaaaattataaaaaaaaatggtaaaatgtttaaagtttttagaggaatgggatcaattggagcaatgaacaaaggttctgccgacagatattttcaaacaaaacaaaaagataaatctaaatatgtaccagaaggggttgaaggttttgttaaatataaaggacctgtagataaaataatttttaagttaattggaggtttaaaatcttcaatgggttatctaggatcaaaaaaagttttaaatt

SEQ ID NO: 205095 - DNA, 1465 bp, Unknown
  Bacterial polypeptide expressing nucleotide sequence isolated from the Sargasso Sea
tatggataaattaaaacataaagcgttaacattcgatgacgttctacttcttccccgttatagtgactttcttccaagtgaggcagacatatcatctaatttaacaaagaacatcactttaaagatgcctcttttgtcagctgccatggatacagtgactgaatcaaaaatggctatatcacttgctgaagctggaggaattggtgttatacataaaaataactcaattgaaaaacaggctagtgaagtaaaatcagtgaaaaaatatgaaagtggaattgttcgtgaccctgtaacaattagttcaacaaattcaattgaagagttaaaaaatcttacaaatgaacttagcatttctgggatgcctgtagtagataatggacaattaaaaggaattgttacggggagagattttagatatgcagaaaatatggattctaatgtttcaacaataatgactccttttgacaaactagttactgttaatgagggtttttctcaagaagatgttatgcagttaatgtataaaaacagaattgaaaaagttttagttctagatgaaaacaaaaatttatcagggcttgtcacaatgaaagatattgaaaaatctgcgcaacaccctaatgcaactaaagatagttctggaagacttagagtcgctgccgcaataggcacagaacaaaatacactagaaagagccgaggcgctttatgatgccggagtcgatgtttttgtaattgatagtgcgcatggccattctaaaaatgttttaaagactataaaaaccataagaaattcatttgatgatattgaaattattggagggaatatagcaaccgctgatgctgcagtggaattagcaaaagctggagtaaatgctgttaaagttggaatgggtccaggatcaatttgtactactagaattattgcaggcattggagttccacagataacagctattctagaaataaaagaagcacttaaaaaaaataacgttaaaattattgcagatggtggtataagattttcaggtgatatcgcaaaggcaatatctgctggagctgattcagttatgcttggaagtttatttgctggaactgaagaagcgcctggtaaagttgaactttttcaaggaaggagtttcaagacttataggggaatgggatctattggtgcaatgacagaaagaaatgacgccaataggtatctccaagaggatattcaatcagataaattagttccagaaggcattgagggaagggtaccttataaaggattagttataaatgtaataaatcaacttgagggtggcttaagacaaagtatgggatatgtaggctgtaaagatatcaaatctatgcagctagacagtcaatttattgaaataactaatgctggaatgactgaaagccatgtacatgatgtgatgattacaaaagaggctcctaattatcaaagaagctaa

SEQ ID NO: 205096 - DNA, 831 bp, Unknown
  Bacterial polypeptide expressing nucleotide sequence isolated from the Sargasso Sea
tatgggtacaattaaagaatctcttactttcgatgatgttttattactaccacaatattctgatattttaccttcggaaacagatatatcattacagttaacaaaaaatattttattaaaagttcctttcctatcttcagcaatggacacagtaaccgagtctaaaatggcgatttcaatcgcacatgcaggtggtttaggggttattcatagaaatttaaacattgttgatcaaacaaaagaaattaaaaaagttaaggaaaaaaatttacttgttggcgctgcagtaggaacaaacaaagatgacttagaaagagctaggtcattagtgacaaatggatgtgatttaatagtcattgatactgctcacggtcatagcgaaaaggttttaaaaacattatcaaaacttaaaaggataagtaaaaaaattcctatttgtgtaggtaatattgcgacagctgctgcagcaaaaaagttatataactcaggtgctgacattataaaagttggaattggaccaggatcaatttgtactactagaatggttgcaggaataggtgtgccgcagatttctgctattatggaagtgaaacaagagcttaaaaaaaagaaaataaagattatctcagatggcggaattaaattttcgggtgatattgctaaagctttggctgcaggagcagatgcaattatgatgggctctatattcgcaggtactgatgagagcccaggaaaaaagtttaagataaagggaaaaatctttaaagaatatagaggtatgggttcgataggagcaatgtcatctggctcagcgaatagatattttcaaaa

SEQ ID NO: 205097 - DNA, 1066 bp, Unknown
  Bacterial polypeptide expressing nucleotide sequence isolated from the Sargasso Sea
catgggtcctatcaaagaagctcttacatttgatgatgtattgttaacaccaaattattccaatattctcccttctgaagtttctacaagtacttctctttcgtctaatataaatttaaaaatacccgtactgtcatctgcaatggataccgtaacagagtcaaaaatggctatttcgattgctagggcaggaggattgggaataattcatagaaatttaaaaattaaaaaacaaattattgaaataaaaaaagttaagtcaaaaaaactacttgtaggagcagcggtaggcgctggtccaatagaaattaaaagagcagaagctttactaaaagaaaatatagatatgattgtagtggatactgctcatgggcacacacaaaaagtagcagaaattattaagaaaataagaaagataaagccaaagaaaacattgttatgtgctggaaatatagcaacagcagaagctgctaaatttttagctagtttaggagtagatgtaattaaggttggaattggaccaggatcgatatgcacaacaagacttgtagcaggaataggtatgcctcaattaagtgcaatattgactgtcagaaaaggtttgggaaataaaaaaattaaaattatagctgatggtggtataaaattttctggagatattccaaaggcactcgctgcaggagcagatgcagtaatgattggatctttgtttgcaggaactagtgaggcaccaggcaaaattttaaaaagaaatggaaaatactttaaaagttttagaggaatgggttctatcggtgcaatgaacaaaggttctgcagatagatattttcaggtcaagcaaagcgataattcaaaatatgttcctgagggagtagaaggactagtaaagtacaaaggttcagtaaataaaataatttttcaactagtaggtggtctgaaatcgtctatgggttatctaggtagaaaaaaagttaaagatttaagaaaaaatgctaaatttgtaaaaattactaaagctggcttttatgaaagtatggtacataatatagatcaagttttaaagtaa

SEQ ID NO: 205098 - DNA, 1072 bp, Unknown
  Bacterial polypeptide expressing nucleotide sequence isolated from the Sargasso Sea
atggttcctataaaagaagcactcacctttgatgacgttacacttgtacctaagtattctgaaatacttccttctgaagtagacactagcatcaaattaactaacaatttaaaattaagaattcctcttttatcttctgcaatggatactgttactgaaagtaaaatggcaattgccatagcaaaagctggaggattgggtgtaatacatagaaatttagatattaaggctcaaatatcagaaattaaaaaagtaaaaattaaaaaacttttagttggtgcagccgtaggtgcaggtccaagtgaatttaagagagctgacgctattttaaaagaaaatatagacatgattgttgttgatactgcccatggtcatacaaagaaagtttcagagataatcaaattcattaaaaaaaaaaaaaataaaaaaacagcactgtgtgcaggaaatatagctacaccagaagctgcaaaatttcttttaaaattaggggtggatataatcaaagtgggtataggccctggatctatctgtaccacacgattagtggcaggcattggagttcctcaactaagtgcaattttaacagttagaaatggagttaaaaataaaaatgttaagattatctctgatggaggtattaaatactctggtgatttagctaaagcttttgctgcaggagcagatgcagtgatggtaggttcactatttgcaggcacagatgagacaccaggtaaattaattagaagaggtggaaagctatttaaaagtttcagaggcatgggatcagtgggtgctatgaacaaaggttcagctgatagatattttcaatcaaaacaaaaagatatctcaaaatatgtacctgaaggtgtagaaggatttgctaaatataaaggcaaagttgaaaaaataattttcaaacttattggtggtttgaaatcatcgatgggttatcttggctctaaacaaattaaatatttaaggaataaaccacaatttgtaaagattacaaaagctggattttatgaaagtatggtacataacgttgatatagtaaaaagtgatgattgat

SEQ ID NO: 205099 - DNA, 1465 bp, Unknown
  Bacterial polypeptide expressing nucleotide sequence isolated from the Sargasso Sea
atggaaaaagtaaaacaaaaagcattaacatttgacgatgttcttcttctacctcgttatagtgactttgtccccagcgaagcatcaactcatacaagacttaccaaaaatataaatattaaagttcctttgatatcagctgccatggatactgtaactgaatcacgtatggccatagcgctagctgaagttggcggaattggtattattcataaaaataattcaattgaagatcagatagcgcaagttaaaattgtaaaaaaatatgaaagtggagttgtaagagatccaatcacaattgagacaaataaatctattggcgaattaattcaattaactgctgaattaaatatttctggaatgccggttgtggataatggaaagctaaaaggaattgttacaagcagggactttagatacgcagataatttggatgcttcattatcatcaattatgactccatttgatgaattaataactgtagaggagggtacttcacaagaaatagtaaaaaaactgatgcatgagaacagaattgaaaaagtattagttattgatcaatcaggaaaattaagcggattagtaactatgaaagatatagaaaaatctgcagaacatccagatgcaacaaaagatgattcaggtagtttaatggttggtgctgctttgggaaccggacctgacactcttaaaagagcaaaggctttaagtgaagcaggagttgatgtattcgttattgacagtgctcatgcacattcaaagaatgtcattgagactgtaaagatgattaaaaaagaattttcctctattgatttaatagcaggtaatgtagcaacttctgatggagctatggagttagtaaaagctggggctgatgcgattaaagttggcatgggtcccggttctatttgtacaactcgaattattgctggaattggcgtgccacaaatatcagctattctcgacatcaaagaagctctaaaggatctgagtgtaggcataattgcagatggtggcattagattttcaggagacatagctaaagctattgctgctggggctgattcggttatgttaggtggtttatttgcaggaactgaagaagcgcctggaaaagtagagcttttccaaggaagaagttttaaaacctatcgcggtatgggatcaattggagcgatgacagaaagggatgatgcaaataggtacatgcaggaagacgtaagttctgaaaaattagtacctgagggcattgaaggaagagttccctataaaggccttgttataaatgttattaatcaattgattggtgggttgaggcaatccatgggttacattggttgtaaaacatttgatgaagttcatgagaatagtgaatttgttgaaattactaatgctggcatgactgaaagccatgttcatgatgtaatgattaccaaggaagcacctaattatcaaagaagttaat

SEQ ID NO: 205100 - DNA, 1289 bp, Unknown
  Bacterial polypeptide expressing nucleotide sequence isolated from the Sargasso Sea
attgggtaaaaaaagtatcaaaatatataacgctggagtaaaagtgaaaaatagacccccatttaaacaagcatttacatttgatgatattttattggtgccacagagatcaagtattcttccgcgaaatgtaaagttgaaaacaaagttgactaatcatattgcactaaacattcctatcataagtgctgcaatggatactgttactgaaactgatatggcaattgctctctcgagagctggtggcatggggattattcataaaaatttgaccatagaaggccaagccagtatggtggataaggttaaaagatcagaaagtggtatgattcaaaacccaataacaataaatgagggtgccacgatttccgatgctaaaaaaattatgtcagaatatagaatcagtggtttgccagtcgtgaaaaatgaaatccttgttggtattattactaatagagacatacgttttgaaacagatgggacacttcctgtttcagaaagaatgacttcgaaagatcttgttactgtaccagtaggaacatctctaaacaaagcaaaggatatcctccaaaaacacagaattgaaaaattgttggttgtcgatgataatagaaatcttaccggtctaataacagttaaagatattcaaaaaaatgaggattatcctaatgcatgcaaagataaaaacggaagactcagggttggagctgctattggtgtcaagggagaagatgttgagcgagcctcagagttagcaaatgtggatgtggatgtaatagtcattgataccgcacacggacattccaaatctgttttaaaatctattgaattattaaaaacaaaacttccacaactttctattattgctggaaatgtagcaaccggcgatgggactaaagctttaatagattctggggtagattgtgttaaagtcggtatcggagctggagctagttgcactactagggttattgcaggagtcggtgttccacaattaacagccatcatggattcggttgatatagcaagaaaagaagacatacctgtaattgcagatggtggattacgatatagcggtgacatagcaaaggcattagctgctggtgcaaattcagtgatgcttggtagtctacttgcaggaatggatgaaagtccaggggagactatattatatgaaggaagacagtataaatcgtatagaggaatgggatcaatgggggcgatgaaacaaggaagtggcgacaggtattttcaggatcatccagactcatcaaaactagtcccagaag

SEQ ID NO: 205101 - DNA, 487 bp, Unknown
  Bacterial polypeptide expressing nucleotide sequence isolated from the Sargasso Sea
attgaaaggtaaaaaagttcaaatcattgctgatggaggtattagattttcaggagatattgccaaggcaattgctgctggagctgatacagttatgttaggaagcttgtttgctggaactgaggaagctcctggaaaaatagagttgtttcaagggagaagttttaaaacttatagaggaatgggctcaattggtgctatgacagaaaggaatgatgctaatagatatctccaagaagatgttgagtcaaataaattggtacctgagggaattgagggaagagttccatataaaggcttagttattaacgtaattgaccaattaattggtgggcttagacaaagtatgggatatattggttgtaaagacataacagcaatgcaacaagatagccagtttgttgagattacaaatgctggaatgacagaaagtcatgtccatgatgtaatgatcactaaagaggcacccaactaccaaagaagctaa

SEQ ID NO: 205102 - DNA, 1066 bp, Unknown
  Bacterial polypeptide expressing nucleotide sequence isolated from the Sargasso Sea
atggacaaagtaaaatcaaaagcgttcacattcgatgacgtgctgctcttacctcgttatagtgactttgtgcctagcgaggcagatactgaaacaagacttactaaaagtattaaaataaaaatgcctttaatttctgctgcgatggatactgtgacagaatcaaggatggctattgctttggctgaagctggcgggctaggaataattcataaaaataattctattgaagaacaagctgctattgtaaaggttgttaaaaagcatgaaagcggtgtagttagggacccaactacaattcgatcttcaaaaacaataggcgaattaaaacaattaactgctgaattaagtatttctggaatgccagtggttgatgatgggaatttaaaaggtattgttactagtagagattttaggtatgcagatgatatggatgcagatgtggcttcaatcatgactcctttagataaattagttactgttagtgaaggcacatctcaagatgaagtaaaaaaattaatgtatgagaatagaattgaaaaaattctagttttagatgaatcaaatcatttaagcggtcttgttacaatgaaagatattgaaaagtcagcagaacacccagatgctactaaagattcttctggaaggcttagagttggtgcggcattaggaactggggctgatactattaatagggccaaagcccttcaagaagctggtgttgatgtttttgtagttgatagcgctcatggccattccaaaaatgtattagatatagttaagcttattaaaaaagaatttaaagatattgaggtaattggtggaaatgtcgctacaccagagggagcgttagagttagtaaattctggagtagattcagtcaagattggaatggggccaggatcaatatgtactacgaggattattgcaggtataggtgttccacagatcacagctattatggatataaaaaatgctttaaaaggaaaagatgtaagtattattgctgatggagggataagattttctggcgacatcgctaaagcaattgcagctggtgctgatt

SEQ ID NO: 205103 - DNA, 958 bp, Unknown
  Bacterial polypeptide expressing nucleotide sequence isolated from the Sargasso Sea
atggatcccataaaagaagctctcacatatgacgatgttttgctcgcaccaaagtactcagaagttcttccttcagaaacaaaaacagaaactaaattatcaaataatttaagtcttaaaataccaataatttcttctgcaatggatactgtaaccgagtcaggaatggccattgaaattgcaaagttaggaggaataggagttattcatagaaacttagatataaaaaatcaaattttagaaattaaaaaagttaaatctaaaaatttaaaagtaggggccgctgtggggaccggaccacttgaaattaaaagagctgaagcattacttaaagaaaatattgatttaatagttgtagatactgcccatggccatacaaaaaaagtagccgaaataataaaaaaaattaaaaaattaaaatcagcaaaaactactctatgtgcaggaaatattgccacagaagaagcggctaaatttttatctaaactaggtgtggacataatcaaagtaggtataggtccaggatcaatctgcacaactagacttgttgctggaattggtgttcctcaattgagtgcaatattagctgcaaagaaaggtataggtaaaaaaaaaattatgcttattgctgatgggggaattaaattttctggcgatatatcaaaagcgttagcagctggagcagatgctgtaatgatagggtcattatttgccggttcaaaagagtccccaggaaaattaataaaaaaaaaaggtaaatattttaaaagttttagaggaatggggtcaattggcgccatgaacaaaggttcagctgatagatactttcaaaaaaaacaaaaagatccatccaagtatgtacctgagggtgtagaaggtttagtaaaatataaaggaccagttgaaaaaattatttatcaattgattggaggtttaaagtcatcaatgggatatttgg

SEQ ID NO: 205104 - DNA, 872 bp, Unknown
  Bacterial polypeptide expressing nucleotide sequence isolated from the Sargasso Sea
aatggaaatagtagagggtttaacatttgatgatgtgcttttagttcctgcagagtcagatgtaatgcctagtgaagtttctacactgacggaggtagttgagggaataactcttaatacaccaataatgtcatctgctatggatactgttactgaagcagagatggccattgctatggctcaatacggtgggttaggtgtgatacatcgtaacatggatattgaaaagcaggcacagttagtgagcgatgttaagcgctttgagagttttgttataacggatccaatcactttaagagagttcaatacagtgagagaagcaagagaattgcaggataaatttaacattaccggatttccagtaatcagcgataataagaagttagttggtattgttacaaatcgggatatgagattttcaacggatgacagcacgccggtagcaagcatcatgacacgaaatgatttagctacaataaattcttgttccgatccaaagcaagctaaaagcattatggcttcaaggcgaatagaaaaacttccaattgttaataaagataattcacttactggtttaataactataaaggatcttgaaagagctgtactaaatcccgatgctacaaaagatgatcatggaagactgcgtgttgcagcagccactactgtaggtgagcaaggcttttcgcgatcaaaaaggttaattgaaagtggggttgatatactaattatagatacggctcatgggcactcgaatcaggtaattgaagcggtaaagaaaattaaaaacagttttaaagcaactaaagtaattgccggaaacgtggctacgcctgagggaactcgagctcttattaatgcaggagctgact

SEQ ID NO: 205105 - DNA, 604 bp, Unknown
  Bacterial polypeptide expressing nucleotide sequence isolated from the Sargasso Sea
atggcctaccagataaatactaattattccgttacttttgatgatgttctgctctcaccagcatattcggaaattaaacctaaagaggtagatacatcgattaccattggaaaagtcaaattacatattccaatactctctgctgctatggataccgtgacagagaataagatggcgatcaatctcgcactacatggtggtctaggtgttattcaccgtaatatgccaattgataaacaagcaagcgaagttaacaaagttcatagctttaaagttaacgctaaaaaatttcaacatgctgtaattaattctaatggaaagattgcggtgggcgctgcaattggtgttgaaaataatgcgtacttacgactattagaattattaaaagttggtgttgatatagtctttattgatgttgctcatgcacatacaaaaacaactttacagtttattgaaaaagcaaaaaaagttttaaagaaaacacctctcatagttggaaacattgctacaaaaaaagctgcatcagatttaattagtgctggtgtagatgctattaaagtaggtattggaccaggatcaatttgtacaacaagggttgtgactg

SEQ ID NO: 205106 - DNA, 1018 bp, Unknown
  Bacterial polypeptide expressing nucleotide sequence isolated from the Sargasso Sea
agtctctgaaatgatgacaactgacttggtgactgtaccagagcatgttgacccagaggttgcaaagaaactacttcaccagcatagaatcgagaaactcttggttgtcgatgaagaaggaaagtgcgctggaatgatgacagtccgcgatatccagcgcagtcgcgataatccatattcctgcaaagataaacacggtcgtcttcgagtcgctgctgcaaccggaacaggagagaaaggtatcgagagggccttggctctgttcgaggctggtgctgatgctgtagtcgtcgacacggcccatgggcactctcatggagttctacatacggttcaccaaattcgagaagcagcaggacctgaagcgcaaatcatcgccggtaatgtcgcaactggagcagctgccgatgcgctgattgcagcaggcgcaaatgccgtcaaagttggaataggccctggttctatctgcaccacaagaatcgtctccggagtaggagtcccccaactaaccgccgttcaatcggtagtcgcggtttgtaagaaagccaacattccggtaattgccgatggtggaatcaagttcagcggcgatatcgcaaaggcaattgctgccggcgccgactgtgtaatggtcggtagcgttcttgctggaactgatgaagcgccgggtgaagtaatcctctaccaagggcgctcctacaaggtctacagagggatgggaagtgttggagcaatgagcaagggcgctcacgagcgttacttccaatcagaacagggagatacacgcaaatatgttccagaaggaatcgaaggcagggttcctgctcgaggtccagtagagcatgtcctccaccaattgattggcgggctacgatcttcgatgggttacacaggaaatggcgacatcaacgcaatgcgtgagaattgccaattcgtcaagatcactaacgctggactttcggaatctcatgttcacgatgtggagattactcgtgaggcaccaaactaccgccgctga

SEQ ID NO: 205107 - DNA, 709 bp, Unknown
  Bacterial polypeptide expressing nucleotide sequence isolated from the Sargasso Sea
cataatagtaaagtattagaaagcataaaatatatctcaaaaaaatatagtaataaaagtattttagctggaaatgtagcgactccggaagctgtaaaagctcttattgatgtaggtgccacttcaataaaaataggtattggaccaggatcaatttgtacaacacgtatgatagctggggtaggtttaccacaattatcagcaattatggagtgtgttaaagtagcaaaaaaaaataaagtcaatttgatttcagatggtggtattaaatattctggagacatagcaaaggctatagctgccggtgcaagtgctgttatgattggttcattatttgctggaactgatgaatccccaggtgaagtttttttatatcaaggtagatcttataaatcatatagaggaatgggttcacttggagcaatggctagaggttcagctgatcgatactttcaagaagaaattgagcatttaaaattagttccagaagggatagagggtcaagttccttacaaaggtcctctagaaaatgtgttttatcaattggctgggggattgaaatcagctatggggtatacagggaatcgcaatattgtaaacatgcaaaaaaattgtaaattcagaaaaattactaattcaggattaaaagagagtcatgttcatgatgttttgataacacgagaagcaccaaattatagaccttcttaac

SEQ ID NO: 205108 - DNA, 1292 bp, Unknown
  Bacterial polypeptide expressing nucleotide sequence isolated from the Sargasso Sea
ttggcccagtcccgccgggcttggggttatccatcgcaatatgacgccggcccagcaggcggagcaggcgagtacggtcaagaagtatgagagcggaatcattaagaatccggtctgtgttcccagctccgcgacagtcggcgaagtggtggcactcatacgggagaagaacttttcaggggtaccggtgttggatgaaggcggacggctcactggcatcgtcaccagtcgggacatccgcttcgaggatcgttttgaccaggcggtgacggcagtcatgacgccacgtgaacggctggtgaccgcgccggaaaaagcgacgcgggaggatattcgcggattgcttcatgagcaccgaatcgagaaggttctcctggtagacgaggcctttaatctgaaagggctggtcactgtcaaggacatacagaaacagaccgagtttcccgatgcctgcaaggatgacgaggggcggctccgtgttgcggccgccgttggtaccgggggagattcggcagagcgttgtgagcgtctggtagaggccggagttgacgccatcgtggtcgacactgcgcatggacattcgcgaggtgtgcttgagcgcgttcgtgaaatcaaaaagtcattaggcaatgttgaagtcgtggcgggaaacatcgcaaccgccgatgcggcccgggctctggccgacgcgggtgctgatggcgtgaaagtgggcattgggccgggctccatctgcaccactcgggtagtcgcaggggtcggcgtccctcagatcacagcaatttcagataccgcttcggcgctaagagagtccgctattcccgtgattgccgatggagggattcgtttttcaggggatattgccaaggccattgcggcgggagcaaacgcggtaatggtgggcggcctgctcgctggtaccgaggaggcccccggcgagatcgaactctttcaaggcaggtcatataagagttaccgaggcatgggttcgctcggcgcgatgcaagaaggctctaaggatcggtactttcaggagggacagagcgatcccgaaaaactcgtccccgaaggtatcgagggccgggtcccgtttaaggggccgatgtcacagattattcatcaactgaccggtgggctcagggccagtatgggttatacgggttgtgccacgattggtgaaatgagatcgcactgccggtttgtccagatcacacattccgggtacacagaaagtcacgttcacgacgtgactgttgtgaaagaagcgccaaactatcagcggggcagttaag

SEQ ID NO: 205109 - DNA, 877 bp, Unknown
  Bacterial polypeptide expressing nucleotide sequence isolated from the Sargasso Sea
ggtggattaggaattattcacaggaatttagatattaaaaaacaaatcatcgaaataaaaaaagttatttcaaaaaaattacctgttggtgcagctgtaggtgctggatctgctgaatttaaaagagcacaagccttgttaaaacagaatataactatgattgttgtagatactgctcatggtcatacaaaaaaggttgctgagatcataaaaaaaataaaaaaaattaaatctaaaaatacagcattgtgtgctggaaatattgcaacaccggaagcagcaaaatttttagctaatttaggtgtagatgtaattaaagtaggcatcggacctggctctatatgcacaactagactggtagcaggaataggaatgccacaacttagtgcaatattggctgttaaaaaaggtttaaaaaataaaaatataaaaatcattgctgatgggggtattaaattttctggagatattcccaaagctctagctgcgggtgctgatgcagtaatgataggatctttatttgcaggcacagatgaagctcctggaaaaataataaaaaaaaatgggagattttataaaagttttagaggcatgggttcgattggcgccatgaataagggctctgcagacagatattttcaaactaaacaaaaagataaatcaaaatacgttcctgaaggtgtagaaggtttggtaaaatataaaggtgaagtaagtaatataatttttcaacttgtggggggtcttaagtcatctatgggttatttaggtaggaaaaatataaaagatttaagaaaaaaggctaagtttgtaaaaattaccaaagctggcttttatgaaagtatggtacataatatagatcaagtttttaaataaa

SEQ ID NO: 205110 - DNA, 685 bp, Unknown
  Bacterial polypeptide expressing nucleotide sequence isolated from the Sargasso Sea
aaaagaaataaaatcaaaattctcaacagatgtaattgttggaaatgttgctacaaacgaagccaccgaagaacttattgatcaaggggctgattgtgtaaaagttggaataggtccgggatcaatatgtaccactagagtggtggctggaattggtgtaccacaattttcagcaattttagactgtgctgaaactgcagcaaaaaaaggagtaccgataattgcggacggtggaattaaatattctggtgatatagcaaaagccttaggcgcaggagcaagcggggttatgatcggttcactctttgctggaactgacgagtctccaggggaggtatatttattcaagggaagaagttataaatcatacagaggaatgggatcgcttggcgctatggcaaggggatctgcagataggtattttcaagaagaaataactgagagcaataaacatgttcctgagggaatagagggaagagttccttacaaaggacctatatcgccaattatatatcagcttgttggaggtttaaaggcttctatgggatacactggttcaaaagatttagtagaatttaaaaagaatgttaagtttgtagaaattacaggagcaggtcttaaggaaagccatgtacatgatgtcgatatcacaagagagtcaccaaattatccgacaaacatataa

SEQ ID NO: 205111 - DNA, 1234 bp, Unknown
  Bacterial polypeptide expressing nucleotide sequence isolated from the Sargasso Sea
gaagagcaagcaattcaagttcgacaagtaaagaaattcgaaagcggtatagttcgagacccaattagcattagatcaaacaatacaattggagagctcaaacagcttacttcagaattaaagatatcaggtatgccagttgttgatgatgatgaattaaaaggaattgtaacaggcagagattttagatatgccagagatatggaacagactgtttcagaaatcatgactccaagagaaaaattaatcacagttaaagaaggggaaacccaggatgttgttaaatcattaatgtataagcatagaattgaaaaaattcttgttcttgatgataaagataagttagttggcttaatgacaatgaaagatattgaaaaatcaattgattatcctttagcttcgagagattcagaaggcaggttaattgttggtgcagctataggtgtaggtaaagatcttatggatagagcaaaagcattagttggagctggtgtagatgtttttgttcttgatagcgctcatggcgattcaaaacgtgttattgatgcaataaaacaagttaaaaagaaatttcctgatatagatatggttgggggtaatgtagcaacggcatcaggagctaaatcattaattaaagctggagttgatgcagtaaaagttggagtcggtccaggatctatatgtacaactagagtagtttcaggcgtgggtgtacctcaattatctgctgtgatggatattgttagtgtcgctggagatattcctgttatttcagatggaggagtaaggtattcaggagacattgtaaaagcaattggagctggagctaatactgtaatgttaggtagtgtttttgctggtacagaagaagctccaggagaaatagaacttttccaaggcagaagttttaaaacttatagaggtatgggttcattaggagcaatgtcaaaaagagctgatgctgaaagatatatgcagggtgaagatacagatgcagaaaaacttgtcccagaaggtattgaaggaagagtaccttttagaggctggttaaaagatgttgtttatcaattagaaggtggattaaggcaaggtatgggttatacaggctcaaaagatataaaagatttacaaaaaagagttcaattccaaaaaattactagatcaggcatgactgaaggccatgttcatgatgtcagcataacgaaagaagcaccaaactatagagtggattaat

SEQ ID NO: 205112 - DNA, 805 bp, Unknown
  Bacterial polypeptide expressing nucleotide sequence isolated from the Sargasso Sea
tggagccgcaataggaactggatctgaaaccttagatagagctaagtctctatttgattcaggtgttgatttatttgttgtcgatagtgctcatggtcatactaaaagtgtaatagagacagtaaaaatgattaaaaaagaatttccaactaaagatgtcattgctggaaatgttgctaccccagaaggagcagaggcgttaatagaagctggtgcagatggcataaagattggaatgggtccaggatcaatatgtacaacaagaattattgctggcattggagttccacaaatttctgcaatattgacaatatatgaaaaagtgaaaggaaaggtgccgctaatagctgatggcggtatgcgctattcaggagacatagccaaagcaattgcagcaggggctgacagcgtaatgcttggaagtatttttgctggaactgaagaagctcctggagaatttgagctctatcaaggaagaagcttcaagacttacagaggaatggggtccttgggagcaatgtctaaaagagatgatagcaacagatattttcaagaagatattgatgctgaaaaacttgtacctgaaggcgttgagggtagggttccttataaaggatgggctatcaatgttattaaccaacttattggaggtcttagacagagtatgggctatgttggttgtaaaaatattcaagaaatgaaagaaaatagcaggttcgttgaaattacaaatgctggaatgactgaaagccatgtgcatgatgttcaaatcactaaagaagcaccaaactatcaaagaagttaa

SEQ ID NO: 205113 - DNA, 985 bp, Unknown
  Bacterial polypeptide expressing nucleotide sequence isolated from the Sargasso Sea
gggagagtacacaattcaggggatatgcttgataaaacatacactgactctcttttgttgatgaaagatggagtaataatttacgaaaaatattttaatggaatgaccgaacaaagcgtccatctgatgaattcagtatctaagtcttttttaggaattttgataggaactttagtagacgaggggctagttaaaacagaaaaactattaacagattatttaccagattttaaagatacaggtttttcaggaactacagtacagcaggcactagatatgacaggttcagttaaatatggagaagtttatcttgagagggaatcagatttctggaaagaaacgtctgtggttggttggagaccagcattggtaaacgataaaacccctgaaacactttacgaatacgcaagaggactaaaagaagttgagcaagagaatggttcagcttttcattacagaactgtttatacaaacattttaggtatggttgctgagaaagtaacaggcaagaccctaaaagatttattacaaaagaaactttgggaaaagatatgtcctgaacagaatgcttacatagtatgcgataaagatgaatttccttatatgggggcgggaatgaatgcgtgcaccagagatttagcaagatttggtcagatgattgttaataggggcatgtttggaaatgaaagagtagtttcggaagattggatagtaaaaaccttagctggtacagacaaagctaggcagaacttcgaagttactgaatacacaccattaattcctggtggccattatatgaatcagttttgggcttcttctaattcagagatattagcttgtgttggtattcatggacaagggatctatatgaatatggccaataaaactgtagcggttaagttctcatctcatccagatccagatgatgggcctttatttatagaaacttttactgctcttgatgctttaaccagaagtatttaat

SEQ ID NO: 205114 - DNA, 577 bp, Unknown
  Bacterial polypeptide expressing nucleotide sequence isolated from the Sargasso Sea
atgaggaaaattgtgatagtaggtacgggttatgttggtttagttactggagcagggatatctgaatttggccatcatgttacttgcgttgacattgataaagataaaatcaatcaattaaatgatgggaaaattcctatttatgaaccaggcttaagttctttgataaaagaaaattgcaaaaagaaaagattatatttttcagtagatatagaaaacgcaattaaagaatcagatatcatttttatagctgtaggaactcctcaaaaaaaaagtggtgaagttgatttaagttatgttaaatcagtttctaaaacgatctctaaaaatataaataaatataaaattatttgtactaagagtactgtcccagtcggaacaggtaaaatgattgagaaaatcttattaaaaaataatgatattactgattttaattatgtatctaaccctgaatttttaagagaaggttcagccgttaaagactttttaattcctgatcgattggtaatcggagcaaaaagcgaaaaagctttttctataatgaaagaagtttatagacctattttttgtaaatgaa

SEQ ID NO: 205115 - DNA, 844 bp, Unknown
  Bacterial polypeptide expressing nucleotide sequence isolated from the Sargasso Sea
atgaatattgtcataatcggaactggatatgttgggcttgttacaggtgtaggccttgcaagtttagggaataaagttacatttatcgatttagatacagataaaataagtaagttaaataataaaaaactaccattttatgaaccaggtttggataaatactttgaggatgaacaagtatttgaaagaatgcattttgcttctaattattcagatgttaactgggaagatgaagaaatagtttttgtttgcgtccagacacctaacaaccttgatactaattcagttgatacaaaatttttagaatcagcaataacagaagtaagcaatgtaaataacaaaaacttagtaataactattaaatctacaattcctccttatgaaattgaaaaaatatgtaataaggttggtttagatgttgactctctgacttttaatcctgagtttttaagagaaggaacagctgtagaagatttctttaagccagataggatagtaattggtggaaacgactcttcaaaagttaaaaaattagaagatttatatagcaattttaaagcagaaataataattaccgatccaataagttcacagttaataaaatatttagcaaatacatatcttcctttaaggttatcttttgttaacgaagccgcaaggctagttaatagttctggaggcaatctagatgatgtattaaaaggtgtaggaatggatacaagaattggtcaacattattttaggccatctcctgcttggggaggatcatgttttccaaaagacgttgttgaagtaaataatttttatgatccgaatgaggtaaatgtaccattaattgcgaaca

SEQ ID NO: 205116 - DNA, 901 bp, Unknown
  Bacterial polypeptide expressing nucleotide sequence isolated from the Sargasso Sea
aatgaatcttactatcgttggaacaggctatgttgggttagtaactggagcatgctttgccgaatttggttattctgtaacatgtgtagacaacgatattaaacgccttgaaatacttaaatcaggtaagtgtccattttttgaacctggtatggatgagcttttggataagcatattaacaaaacaaaattaataacttttgaatcaaccattaaaaataacttagataatacagatataatttttattactgtgggaactccaacaagaagattagaggatgaggctgatttaagttttgtctggcaagttgctgaagaaattgcagaaaatataaaaaaatattgtttagttgtaactaagtctactgttccagttggaactacaagagaagtacaaaaaattatttcaaataaaattgatcaaaaactttttgatgtagtatccaacccagaatttcttcgagagggatctgcaattaatgattttattaggccagatagagtagttataggaacagaaaataaaaaatctgaaaatattatgaaggagctttacagacctttattccttaaagaaactccaattgtagctacatccattgagacttcagagatcattaaatatgcatctaatagttttctagcaactaaaatagcttttattaacgaggttgctgatttgtgtgaagttgttggagctgatgttcagcaagttgcgtatgcaatgggtatagataaaagaattggatctaaatttttgaatgctggacctggatttggtggttcatgttttccaaaggatgttaaggcatttgcttcaactgctaaaaagaaaaatattgatttatcaatcatcgatgcagttaataaatctaaccaagaacgtataataaaaatt

SEQ ID NO: 205117 - DNA, 600 bp, Unknown
  Bacterial polypeptide expressing nucleotide sequence isolated from the Sargasso Sea
aggtgctggttatgtaggtggacccactatggctgtttttgctgagcattgtaaagatataaatattactgttgcagatataaatgaatctagaattaattcatggaatgaaactgatacctcttatttgcccatatatgaaccaggtctagatgaaataattttaaaatgtcgaaataaaaatcttttctttacaacaaatattaaggaatctattcaaaacgcggatatgatatttctttcggtaaatactcctacgaagtcaaaaggtgttggggctggaaaagctagtgatttgaaatgggttgaaatatctgcaagacaaatcgcagagttttcaagaggtcatacaattgttgtcgaaaaaagtactctacccgttcgaactgcaaaaactatagaaaaaattttaattaattcacaaaataagaaatcagaaaataaaaataaaactttttctgtattatcaaatcctgaattcttatcagaaggaactgcaataaatgatcttgaattcccagatagggttcttattggaggggatgatgaattggctataaacttacttgctgatttatataggaattgggtgccagaaga

SEQ ID NO: 205118 - DNA, 954 bp, Unknown
  Bacterial polypeptide expressing nucleotide sequence isolated from the Sargasso Sea
tattggacatcaagttgtatgtgtagataaagatattaataaaattaaaaaacttaatctttgcatatcacctatctatgaacctggattagacgagctgcttaagaaaaattttttgtcgaaaagacttacttttacaactgaaattaatgaagctataaaatcatcagatataatatttatttgcgttggcacgccaacaaaaaaaggttctttaaatgttgatttatcatatgtatataaatgtacaaaagaaattcttaagtataccaaaaaaaaaaagattatagtaacaaagtctactgtgcctattggaactggagactcgatagaaaaaattttaaaaaaaaagaaaaagtatttcacaattgtttccaatcctgaatttcttagagaaggggatgccattcgagactttagattcccagacagaatagtcataggttctaatgacaaaaaagtattcaatacaatgaaaaagctttatatgcctttgatcaataaaggtgctaaatttttcacaacttcaagaagaggtgcggagttaattaagtatgcttctaatgcttttttagcaacaaaaattactttcattaatgaacttgctaatttatgtgagaaatctgaaataaatattgaagatatcgcattaggaatgggttctgataatagaattggtggtagatttttacgagcaggtccggcctatggtggatcgtgctttccaaaagatacaaagggactagtttctgttgcaaataaatttaaaatagacttatcagttgtaaaatctgttatcaaatctaatcataaaagagtagaattacttaaacaaagaattcataaaattctcggttcgaacttaaaaaataaaaaaatctcatttttgggcgtcacctttaagccaaacacagatgacatgagagactcaactagtttaaaaatgatacctta

SEQ ID NO: 205119 - DNA, 184 bp, Unknown
  Bacterial polypeptide expressing nucleotide sequence isolated from the Sargasso Sea
tatgaaattgtgtatgataggaacaggttatgtaggattggtaagtggtgtctgtttttctgatctaggtaatgatgtaatttgtgtagataaagacattaaaaaaatagaattattaaaaaaaggaaaagtcccaatttatgaaccaggattatctgaattagtagccaagaactataaaaat

SEQ ID NO: 205120 - DNA, 937 bp, Unknown
  Bacterial polypeptide expressing nucleotide sequence isolated from the Sargasso Sea
tgcctgctttgctgatcttggtaacattgtttattgcgttgataaagataaagataaaattcaaatgcttacaaatggtagcattcccatttatgaacctggtttaactgaaattgttaaaaaaaattttttatcagagagattaaaatttacaactaatcttgatttagctgtaaaaaattctgatattatatttatctgcgttggaacaccaacttctaaaaaaaataattctgctaatcttcaatatgtttttaaagcagctcaggaaataagcaaaagtattaataaatttaaaattattgttaccaaatctacagtacctgtagctactggcgataaaatagaaaagattatattaaaaaagaaaaaaagaaaattatttgaagtagtctcgaacccggaatttttgcgagagggtgaagctatacgtgattttagatttccagatagaattgttgttggatcaaacaataaaaaaattaatcgtaagctagaatctttatatgagcctttaattaaaaaaggtgcagtatatttttctactaataggagaggtgcagagttaataaaatatgcatcaaatgcttttttagccacaaaaatttcttttattaatgaaattgctaatttatgcgaaaaaactggagtaaatgttgaagatgtttctttaggaatgggcttagataaaagaattggcgctcggtttctacgtgctgggccagcatatggaggctcttgttttcccaaagatactaaagcgattacagttaccggagatttatttgatacaaatttatcaattattaaatctgtagttaaatctaatgcaaaacgtagattgctgctaatacaacgaattaaacatattttatcaaataaattaaaaaataagagaattgctgttttgggagttacttttaaaccccaatactga

SEQ ID NO: 205121 - DNA, 765 bp, Unknown
  Bacterial polypeptide expressing nucleotide sequence isolated from the Sargasso Sea
tatgaagttagttttagttggaacaggctatgttggccttgtatcaggttcttgttttgcagagtttggatatgaagtaatttgtgtagataatgatgaatcaagaatttcaaaattaaaaaaaggtaaatgtcctttttttgaacctggaatggaagaactattatcaaaacatagagatcaaactaaactacttagttttacgacttctttacctgaagctatggaagatgctgatattatatttattactgtaggtactccgtctaaaagattagaagaagaagcagacttaagtgccgtatggaatgttgcaaaagatatagctaacaatatcaagaaatatattttagttgtaactaaatctacagtccctgttggaactactaaagagattaaaaaaattatatcaaaaattgtaactaaagacaattttgatgtagtttctaatccagaatttcttagagaaggatccgctataaatgattttatgcgtccagatcgtataattataggaactgataataaaaaatcagcaaaaattatgaatgaattatatcgccccttatatttattagaaacacctattattacttcatctattgaatcatcagaaataataaaatatgcttctaatagttttttagctacaaaaattagttttataaatcaagttgctgatttatgtgagtctgttggtgcagatgtgcaggaagttgccaaaggaatgggaattgataagcgcataggtgccaaatttcttaa

SEQ ID NO: 205122 - DNA, 814 bp, Unknown
  Bacterial polypeptide expressing nucleotide sequence isolated from the Sargasso Sea
atggttataaaaataaataatatttgttgtattggtgcaggatatgtaggagggcctacaatgtcagtcatagcagataaatgttcagatataactgtaaatgttgtcgataaaaataaaaataaaatagattcatggaatagtgatgaccttagcgaattaccaatttatgaaccagggcttaatgaaattatagaaagatgtaggggtaaaaatcttttcttctctacagatattaaagggaaaatagaaaatgctgacatgatatttatatctgttaataccccgaccaaaaagaaaggaattggagctggcaaagcaagcgatttaaaatgggttgaggcttgcgcccgtgaagttgctaaacattcaaagggatacaccatagttgtagagaaaagtacattacctgttaagactgcagaagttattaaaaatattcttgaagcttcagagacctcttttaaagataatatcaataaatcatttgatgttttatcaaacccagaatttctttctgagggcagcgctatcaaagatcttaaatttcctgatagaattctaataggaggagaaaataaagatgctattattgcacttcataatatttatataaattgggtaagcaaagacaaaatattacataccaatatttggagtagtgaattagctaaattaacggccaatgcatttttagctcaaagaataagttcaatcaattctattggagccatttgcgaagcaacaggagctgatgttagagaagtggctagagcaataggaacagatagtaggataggatcaaaatttctag

SEQ ID NO: 205123 - DNA, 880 bp, Unknown
  Bacterial polypeptide expressing nucleotide sequence isolated from the Sargasso Sea
gtggaagcgaccgtcgcggcggcggacatggtgttcatctctgtgaacacgccgacgaaaacgaagggactgggggcgggacaggccagtgacctgcgctgggtggaggcctgtgctcgcacggtggcccaggcagccaccggccacacgatcgtggtggagaaaagcactctgccggtgcgcaccgccgcagcgatcaagacgatcctcgaggccgcccaggcggatgatcagcagcgcagcttcacggtgctctccaaccctgaattcctggcggagggcacagcgatccgggatcttgaggcacccgaccgggtgctgatcggaggcgacgacacggcatcgatcgaggcgctggcggcggtctacagccattgggtgccggagcagcagatcctgcgcaccaacctctggagcagtgagctctccaagctcacggccaatgcgtttctggcgcagcggatcagttcgatcaactccgtggcggcactctgcgaggccaccggcgccgatgtgcgggaggtggcccgggcgatcggcaccgacagccgcatcggcccgaagtttctcaatgcaggacccggcttcggcggcagctgcttccagaaggacatcctcaacctcgtctatctctgccgtcatttcggcttgccggaggtggccgactactgggaatcggtggtggcgttgaacacctggcagcagcaccggatcgcacagctggtggtgcagaagctgttcggcacggtgaccggcaagcgcttggccattcttgggtttgccttcaaggccgacaccaacgacacccgcgaggctccggcgattcgcatctgcggtgatctattggatgagggggcacagctggccatccacgatccca

SEQ ID NO: 205124 - DNA, 819 bp, Unknown
  Bacterial polypeptide expressing nucleotide sequence isolated from the Sargasso Sea
ccaaattcaaatgacacaaaaaaaaaatttgatgttttatctaatcctgagtttctagcagaaggttctgcaataattgatcttgagaatcctgatagagttttaattggaggtgaaagtgataacgcaataattgctttgagcaatatttatagaaattgggttccaaaagaaaaaatattgcatacaaatatttggagtagtgaattatctaaacttacagcaaatgcatttttagcccaaaggataagctctattaattcaattagtgctttatgcgaatcaacaggcgctgatattagagaggttgcaagtgctattggtctagatagtcggatagggtcaaagtttctaaattgcggccctggatttggcggaagttgctttaaaaaagatattttaaatcttgtatatctctcaaggtattttaacttaaatgatgttgcggatttctgggaaagtgtagtgaaattaaataattggcatcaaaatagattatcgcagttaattattaataatctatttaaaactgtttctgggaaaaaaatatgcatcttaggatttgcatttaaggctaataccaacgacacaagagaatcagcagcaataaaaatatgcaaagatcttttagaagaaggtgcatttctctctatacatgatcccaaagttagcaaagaacaaataaataaaaatttgggatttgaatcattaaatgctgctaattactctaatagaaatgatttttttaattttgaagggcaatgggtttttgaggattcaatttacagggccatagaaaattctgatgcagtagttatt

SEQ ID NO: 205125 - DNA, 754 bp, Unknown
  Bacterial polypeptide expressing nucleotide sequence isolated from the Sargasso Sea
aatattgaagcatgtgcaaaagatattgcaaagtattcaaaaaaagataaaattgttgttgaaaagtccactcttcctgttaggactgcagagaagataaaagagattttatatgaaaactcaacagataatcactttgaagttttatctaatcctgaatttttagctgaggggactgctatacaggatttatttaagtcagatagagtattaattggaggagatgattcagaatctggacaaaatgcagtaaaagctttagttgacatttatgctaattggatcccaaaggaaaaaattctaaccacaaatgtctggtcctctgaacttgctaaacttgcttcaaatgccatgttagctcagagaatttcctctataaatagtctctctggactctgtgagaaaacaggagctaatattgatgagctttctcgggctataggcatggatcatagaattgggcctaagtttttaaaggcttctgcaggttttggtgggagctgctttcaaaaagacattcttaatctagtttatttatgcaaattttatggacttgagcaggaagctgaatattggcatcaggttgtaagaataaatgacaatcaaaaaaagcggtttgctcaaaaagttattgattatttcaacggagatttgaacggtgttagaattgcaatattaggttgggcctttaaagcaaatactaatgatagtagagaatctgcatcaataaaagtttctgagatattatataaaa

SEQ ID NO: 205126 - DNA, 367 bp, Unknown
  Bacterial polypeptide expressing nucleotide sequence isolated from the Sargasso Sea
tatgaaactctgcatgataggtacgggatatgttggtcttgtaagtggcgtatgtttttctgatcttggtaatgatgttgtttgtgtcgataaagatgaaaataaaataaataaacttaaaaaaggtataataccaatctatgagcctggattagaagagttagttcagaaaaattttaaaaacaaaagactcaaattttcaacagatataaataattcagttaaaaattcagatatagtttttatatgtgttggaacacctgcaaaaagaaatggttctgatgctgatttaagtcaaatttattcagtagcaaatgaaatatcaaaatcaattaataaatttaagataatttatacaaaatcaacg

SEQ ID NO: 205127 - DNA, 365 bp, Unknown
  Bacterial polypeptide expressing nucleotide sequence isolated from the Sargasso Sea
tatgaaaatttgtattataggaacaggttatgttggcctggtaagcggcacttgcttttccgatatgggaaataaagtaatttgtgtggatacagatataaataaaatcaacaaacttaatagtggtactgtccctatctatgaacctggactcgaagaacttgtattaaaaaataaaaaaaacgacagactttttttctcaacagatataaatggttcaattaagaaatctgatatagtttttatttgtgttggaacacctacaaaaaataataaagcagatttaaaatatgtttttaaagctgtttacagtatttctaaaaatttgaataaatataaaattatagtaactaaatctacagttc

SEQ ID NO: 205128 - DNA, 247 bp, Unknown
  Bacterial polypeptide expressing nucleotide sequence isolated from the Sargasso Sea
tatgaaaatttgcattataggatctggttatgttggtttagttagtggggcttgtttttctgacctaggtaatacagttacatgtgttgatattaacagagaaactatagaaaaattaaagaaaggaatagtaccaatttatgaacctggtcttcaagaattggttgtaagaaatttaaaaaaaaaaagacttttatttacaacagatatttctagctcaataaaaaagtcagatatcatatttatt

SEQ ID NO: 205129 - DNA, 430 bp, Unknown
  Bacterial polypeptide expressing nucleotide sequence isolated from the Sargasso Sea
tatgaaaatttgcattataggatctggttatgttggcttagttagtggggcctgtttttctgacttaggtaatacagttacatgtgttgatattaacagagaaattatagaaaaattaaataaaggaataatcccaatttatgaacctggtcttcaagaattggttgtaagaaatataaaaaaaaaaagacttttatttacaacagatatttctagctcaataaaaaagtcagatatcatatttatttgtgttggaactcctaccaaaaataataaagctgatttgaaatatgtatttaatgttaccaaaagtataaaatccaatctaaataggtataaaataatagttactaaatctacagtcccagttaccacaggtgataaaattacaaaaatcttaaaatcaaataaaaataaaaataaagtttga

SEQ ID NO: 205130 - DNA, 914 bp, Unknown
  Bacterial polypeptide expressing nucleotide sequence isolated from the Sargasso Sea
tcctggagcaatttctgaggcggatatcatttttgtttctgtaaatacgcctaccaagaagtttggagaaggtgcaggtaaagcagcagatctgcaatattgggaaaaaacgtcacgtgatattttgcagaatagccgcaagccagatgttattgttgttgaaaaaagcactttgccggtacgtactgcagaggccatggccagaattcttgagtccggaaacagtaaaaccaaattttcagttgtttctaatccagagtttttagctgagggaacggccattcaggatttggcaaatccggaccgcgtcttgataggcggggaagagaatgaaaatggacaaaaagcagcgaataaagtggcagaaatttacgcccactgggtaccacaagatcgaattttgctgactagtgtctggagcagtgaactttcaaaactcgttgccaacgctatgctagctcagcgcatatcttctgtaaacagtatctctgcgctttgtgaacgtactgaagcagacattacagaagtttccagtgcgattggtatggacactagaatcggagctaaatttttgcaagccagtattggttttggaggctcatgctttcgcaaggatattttgcatctgtcatatctttgcgaattttatggacttccggaagttgctgattactgggccagcgttgtaaatattaatgaatggcagattaatcggttttttcagagtattctaaatgaattgttcaatactttggcaggcaagacaattaccatgttgggatttgcttttaagcagaatacaggagacacacgtgattctcctgcaattcctttatgtgaaagactagtaggagaaaacgcaaaggtcaggattcatgatccaaaagcgcttgagaacgcccgcttgaactaaa

SEQ ID NO: 205131 - DNA, 796 bp, Unknown
  Bacterial polypeptide expressing nucleotide sequence isolated from the Sargasso Sea
atgaaactttgcgtgattggtactggttatgttggtcttgtaagtggggtttgtttttctgatgttggcaacacagtttattgtgtagataaagataaaaaaaaaatcgagttattaaataaaggaattgttccaatttttgaacctggtcttgaagaaattctaaaaaaaaattataagcaaaaaaaattaatatttacaacagatttaaatgaagctgtaataaattcagatataatttttatttgtgttggaacaccaacaaaaaaaaattcgaattcggctgatcttaaaaatatttatagtgttgcaaaagatttaaaaaaaattataaacaaatacaaaatcttagttacaaaatcgacagttcctgtatcaactggtgatcaaatagaaaaaattctatttagtctcaagaaaaaaaaattattagatattgtttcaaatcctgaatttttaagggagggagaggcaatacgtgattttgtttatccagatagagtaataattggaacagatagtaaaaaagcaaatagaattttaaaatccctttatttaccaatcattaaaaaaaacagtagatattttcatacatcaagaaggggtgctgaattaataaaatatgcttctaatgcttttttagccacaaagatttcatttattaatgaaatggcgaatttatgtgaaaaaactggtattgatgtcaaagatatatctttaggcatgggttctgatcaacgtataggagatagatttttaagagctggtcctgcatatggtggatcttgttttccaa

SEQ ID NO: 205132 - DNA, 787 bp, Unknown
  Bacterial polypeptide expressing nucleotide sequence isolated from the Sargasso Sea
atgaaaatttgtattataggttcaggttatgttggtttagtcagtggagcatgtttttctgagttaggaaataacgtaatttgtgtagatatcaataaacaaaagatagaaaacttaaaaaaaggaataataccaatcttcgaacctggactagaagaattaattaaaagaaatgtaaaacaaaatagacttcagtttactacaaatttatctatatccgttcgaaaggcggatattatttttatttgtgtgggcacacccacaaacaagaaaacttacaatgctgacttaaattatgtttttcaagttgcaaatgatattaaaaaaaatttgaacaaatataaaattattataatgaagtcaacagtacccgtcactacaggtgataaaattgaaaatttattaaattcaaaaaataataaaaacaaattcgatgtagtatcaaatcctgaattcctaagagaaggtgaggcaataagagattttatgtttcctgatagagttgtaattggtactagcagcaaaaaagcaaacaatattttaaaaaatttgtattttccattaataaagaaaactaaccgatatttccatacctcaagaagagcagctgagttaataaaatatgctgctaacgcttttttggctactaaaattacatacataaatgaaatcgcaaatttatgtgaaaagcttaaagtaaatgttaatgatatttcacttggaattggattagatgatagaattggatcaagatttttaagagctggacctggttatggtggctcat

SEQ ID NO: 205133 - DNA, 817 bp, Unknown
  Bacterial polypeptide expressing nucleotide sequence isolated from the Sargasso Sea
attccaatatatgaaccaggtttagaagaaatggtacttagaaatattaaaaataaaagaatagaattttcaacaaacttagaaagctcaattagaaattctgatatagtttttatttgcgtaggtacacccaccaaaaaagggagctcctcagctgatttaagccaaatatataacgttgcaaaaatcataggaaaatttataaataaatttaaaattatcgttaccaaatctacagtaccagttacaacaggtgataatattgaaaaaattttgaaaaaaaaaaataaaaaaaataaattttcagttatatcgaatccagaatttttaagagaaggagaagcgattagagactttacttatccagacagaatagtaataggaacaaatgacaaaagatcaaatcggattatgaataacttatattcacctttaatttctaaaggtgcaaaatatattcatacaaatagaagggctgccgaattaattaaatatgcctctaatgcttttttagctacaaaaataacttttataaatgaaattgcgaatttatgtgaaaaaacaaatataaatgtagaggatatatctataggaatgggattagataaaagaattggcagtcgctttctaagagccggaccagcttatggaggctcatgttttccaaaagatacgaaggcaattattaatactgcagataagttcaataccaatctatcagttattaaaacagttgttaaatccaatgaaaatagatcaaatctacttttgggtagagtttatgacatattaaataacaaagttagaaataaaaaaa

SEQ ID NO: 205134 - DNA, 781 bp, Unknown
  Bacterial polypeptide expressing nucleotide sequence isolated from the Sargasso Sea
gaggcagtaaaaaaatctgatattatatttatttgtgtggggaccccaaccaaaaaaaaaagtaattcagctgatttaaaatatgtatttaatgtagcaaaacaattaaaaaaaagtatttctaaatataagatcattataacaaaatcaactgttcctgtgacaactggagataaaattgaaaaaattttaagaaatctaaagaaaaaaaaacttatagatgttgtttcaaatcctgaatttttaagagagggagaagctataagggattttatttatcctgatagagttgttattggcactgacagtggcaaagctaataaaattttaaaatctctgtacttacccataataaagaaatctagcaggtattttaaaacttcaaggagaggtgctgaaatgataaaatatgcttctaatgcttttctagcaacaaaaatttcatacataaacgaattagctaatttatgtgagaaaactggggtaaatgttcaagatatttctattggaatgggtttggaccaaagaattggagataggtttttaagagcagggcccgcttatggaggttcatgctttcctaaagatacaagagctttaattgacgttgcaaataaatataaaattgatctttcgatagtaaaaagtgttgttaaatcgaataatcaaagaaaaataattcttacaaaaagaattgataaaattttgaacaataagcttaagaataaaattattacatttttaggtgtaacttttaaacctaatacagatgatatgaggg

SEQ ID NO: 205135 - DNA, 622 bp, Unknown
  Bacterial polypeptide expressing nucleotide sequence isolated from the Sargasso Sea
tatgaagttagttttagttggaacaggctatgttggccttgtgtcaggctcttgttttgccgagtttggatacgaagtgatctgcgtagataaagataagtctagaattttagaattaaaaaaaggaaaatgtcctttttttgaacctggaatagaagaactattattgaaacatagggaccaaactaaactgcttagttttacatcttctttgcctgaagctatggaaggtgctgatattatatttattactgtaggcactccatctaaaagattagaagaagatgcagacttgagtgctgtatggaatgttgcaaaagatatagctaacaatataaagaaatactgtttagttgtaacgaaatcaactgtccctgttggaaccactaaggagattaaaaaaattatatcaaaaattgtacctacagaaaattttgatgttgtatccaatccagaatttcttagagaaggatcggctataaatgattttatgcgtccagatcgtataattattggaactgataatgagaaatcaacgaaaattatgaaagaattatatcgtcctttatatttattagaaactcctattataacttcatctatagaatcttcagaaataata

SEQ ID NO: 205136 - DNA, 799 bp, Unknown
  Bacterial polypeptide expressing nucleotide sequence isolated from the Sargasso Sea
cttttctctcaactggttatggagcaatattagaatatatgattctaatccagaaaattcccataattctcttgaggatactgtaaataattctgaatttatttttctatctgtaccaacaccagcggataaagatggtttcaatgatctttcgatagttaaatcggttttaaaaaatatcgactcagtttgcactagcccagataatattgttcttgttagatcgacagttgttcctggaactactagagatttacaaaaaaaatttcctaatcttaggctcgtctttaatcccgaatttttaactgaacgttcagcttcctttgatttcatcaatcagacgagagtaatccttggcggagaaaaaaattatactcaacgagttaaatatctttataaacaccgatttggggactatttacccgtaattgaaactgactttgaaacggcagagatgattaaatatatgaataatcttttctttgcaacaaaagtctcttttttaaatgaaatgaaacttttaggcgataaagttggtgtaaattggaatgaagctgtagatggatttgtccttgatggaagagttggtcattcacacttatctgttccaggccctgatgggaagtttgggtttggtggaagttgttttccaaaagatatccaagctcttattaaatttggagaaataaatggagttgacatgaatgttcttaagggagcatggaaaactaacctaaatgttagacctgaaagagattgggaaaaattaaaggggagagctgtctcttctgaagattaa

SEQ ID NO: 205137 - DNA, 709 bp, Unknown
  Bacterial polypeptide expressing nucleotide sequence isolated from the Sargasso Sea
atgaataagattgttataattggtgctggttatgtaggtttggtctcaagtgcgggatttgccgaactaggattcaaaataatctgtatagaaaataaccgtgaaaaatatagtgatttgcaacaagggattattccaatttacgagccgcaacttgaggatttgataagcaaaggacaaaaggcagggaatctggtttttgcttctgattataaaaatcatcttgatgatgcgacggcggtgataattgctgttgggacgccaacaaatgaacttacacaaaatgttgatctgtctgccgttttttctgtagtggaagagttagctttacaactgaatccaaacacggtgatcatcacaaagtctacagtgccaattggaacaaatagaaaaatcctttccattctacaacgaaaaagaagcggcattagattttcagtagcttcaaatcctgaatttttaagagaaggttcggccgttgatgatttttttaatcctgatagaataatttttggggttagtgatgagcgggcaaggcaaatcggaacccttatctacgaggatttttgcaaacaaaaaaagacttctcttctttttacaaatctagagtcctcggagacaataaaatatgcagcaaatgcttttttggctacaaaaatagctttcataaatgaaatgtcggacctttgcgaaaagtcaggtgaagcat

SEQ ID NO: 205138 - DNA, 934 bp, Unknown
  Bacterial polypeptide expressing nucleotide sequence isolated from the Sargasso Sea
gttgatactaataaaaataaaattaagaagttaatttctggacttattccaatttacgaacctgggttagatgaattggtaaaaaaaaattttacacaaagaagactatcttttactaccaatattgatgaagctataaaaaaatcagatataatattcatttgtgttggcactcctacaaataaaaaaactaatacagcagatttaaaatttgtttttcaagtagcaaatagaataagcaaaaatataaatagttataaaattattgtaaataaatctacagtgcctgttaccacaggcgataaaattgaatcaatattaaaaaacaaaaataaaaataaaagttttgaagttgtttcaaatccagagtttttaagagaaggtgaagcaatcagagattttatttatccggatagagttgttgtaggtacaaataataaaaaagcaaataaaattatgaaatctctttatttacctataataaaaaaagcaactagatattttcatacttctagaagaggtgccgagttagttaaatatgcttctaacgcttttttagcaacaaaaattgccttcattaacgaactagccaacttatgtgaaaaaacctctgtagatattaaagatatctctttaggcatgggtttagaccaaagaattggagaaagatttttaagagcaggaccagcttatggcggatcatgttttccgaaagatacacgtgctttagttaaaactgcagataaatttaaaatcgatctatcaatagtaaaaaatgttattaaatcgaatgaaaaaagaaaacttttattaattaataaaataaatgaaatcataggtaaaaatataaaaaataaaaaaataacttttttaggagttacatttaaaccaaatactgatgatatgcgtgaagcttcgagcttaatcatgatac

SEQ ID NO: 205139 - DNA, 755 bp, Unknown
  Bacterial polypeptide expressing nucleotide sequence isolated from the Sargasso Sea
aatgaaatcaaaagaaatatgttgtattggggctggttatgttggtggaccaactatggcagtaatcgcccataattgtcctgattataatattactgttgttgattcaaatgagaaacgaattgctgagtggaatggtcctgaaaattctttacccatttatgaaccaggtttaaaagagattataagaaatgttaggggaaaaaacttaacatttagtaatgatgttgaaaaatcaattaataaagcagatattatttttatagcagtcaatacaccgactaaaacccatggagagggaaagggaatggctgcagacctaactaatattgaaaagtgcgcaaaattaattgcacaatcatcttcatcaaataaaataattgttgaaaaatcaacagcacctgtaggaacgggcaaaaaaataaaatcagttttaaattctgaaaattctaaaattaaatttcaaattgtttctaacccagaatttcttgcagagggaactgctataaatgatctaatgaatcccgacagggttttaataggaggagaagagtctgaggaaggtcataaggctgtaaaaactattgcggacatatatagagaatggctcccagagaataaaataattttaacaaacctatggtcttcagaactttcaaagttagcatcaaatgcttttttagctcagagaatatcatcaattaatagcctttctgctttatgtgaaaaatcaggtgcagatatcgatgaagttt

SEQ ID NO: 205140 - DNA, 397 bp, Unknown
  Bacterial polypeptide expressing nucleotide sequence isolated from the Sargasso Sea
tatgaaaatatgcatgattggtactggctatgttggtttggtaagtggaacttgttttgcagatttaggtaataaagttttttgtgtagataaagataaaataaaaataaataaattaaaaaatatcatttccccaatttacgaaccaggtttagatgatttaataagaaataatgttagagcaaaaagattaaatttcacaaatgacttagaaaaagcagttaaagaatcacaaattatttttatttgcgtaggaactccaacaaaaaaaggttctaacatggttgatctttctcaagtatttaatgttgcaaaatcaatatcaaagtatattaaaaactataaaataattgttaataaatctactgtcccagtatctacaggagatcaaatagaa

SEQ ID NO: 205141 - DNA, 274 bp, Unknown
  Bacterial polypeptide expressing nucleotide sequence isolated from the Sargasso Sea
atgaagatttgcatgataggtactggttatgttggtttggtgtctggatctagttttgctgaattaggcaatgatgtaatttgcactgatataaataaaataaaaataaataaactaaatgaaggcatgattcctatatatgaacctggtcttgaagaattagttagaagaaacttcaagcaaggtagattaaaattttctactgatataccttcatcaattaaatattgtgatattatttttatttgtgtaggaacaccaactaataaaaaaa

SEQ ID NO: 205142 - DNA, 394 bp, Unknown
  Bacterial polypeptide expressing nucleotide sequence isolated from the Sargasso Sea
aatgaaaatttgtatgattggtactggttatgtaggtttagtaagcggaacatgttttgctgagcttggaaatgatgtgatctgcgttgatattgataaaaaaaaaattgataaactaaatagtggaataattccaatttacgaacctgggcttgaagaacttgtcaaaagaaatttaaaacatggaagattaaaattttctactaatatatctttagctattaaaaattgtaatgttattttcatttgtgtagggactcctaccaataaaattactaaaaaagcagacttaaaatatgtatttaatgtaacaaaaaatattaaaaataatttaaataatttcaaattgattgttacaaaatctacagttcctgtcatgactggtgataaaata

SEQ ID NO: 205143 - DNA, 706 bp, Unknown
  Bacterial polypeptide expressing nucleotide sequence isolated from the Sargasso Sea
atgaaaatttgcattattggctcaggatatgtgggcttagtaactggtgtatgtttttctgaattaggaaatagtgttatttgtgttgatgtagataaaccaaaaattgaaaatcttaaaaaagggataatccctatttatgaacctggattggaagaattaatattaagaaattataaacaaaaaagacttcatttttcaacacaaattagttcagcaataaaaaactctaatattatttttatttgcgttggaacacctttagataaaaatttaaataaagctaatttaaaatatgtttttaaagttgtgtcagatattaaaaagaatctaaataattacaaagtcgttgttaccaaatctacagttccagttactacaggtgaccaaattgaaaaaatattaagctcaaaaaaaaataaaaaaaatttcgatgtagtttctaatcctgaattcttaagagagggtgaggcaatcagagattttatgtaccccgacagagtaataataggtacgagtagtaataaagcaaataatattatgaaaaatttgtatttaccacttatcaaaaaatctaacagatattttcatacctcaagaagagctgctgaattaataaaatactctgccaatgcatttttagctactaaaatttcgtacataaatgagatagctaacttatgtgaaaacttaaatatagacataa

SEQ ID NO: 205144 - DNA, 782 bp, Unknown
  Bacterial polypeptide expressing nucleotide sequence isolated from the Sargasso Sea
aatagtaagtaaaaattttatttcaggaagattaaaatttacaactaattttgcttcagctgttcgcaattctgatcttatatttatttgtgtgggtaccccaactgctaaaaatggttctgctaatttaaagtatgtttattccgtagctaaagaaatatcaaaaaatattaataagtttaaaataattgtaaataaatctacagttccagttactaccggagattatgttgaaaatattattgccaaaaaggtaaaaagaaataattttgaagttatatccaaccctgaattcttacgtgagggtgaagcggttagagattttagatttccagataggatagtaattggaaccaataatacaaaaattctaaaaaaaattaagttattgtatgaaccattaattaaaaaaggtgctgtatttttttcaacaagcagaagatcagcagaaatgattaagtatgcatcaaatgcttttttagctactaaaattacatttataaacgaaataagtaatttatgtgaaaatataaatgttaatattgaggatgtatcgttaggtataggattagataaaaggataggagggcgttttctcagagctggtccggcatacggtggatcttgttttccaaaagatacaaaagctatagtagttactgcaaataaatataaaactgatttttcattaataaaatctgtgattaaatctaacgacaaacgacagagtcttttaactaaaaaagttgaaaaattttatctaataaatttaaaaaaaaaat

SEQ ID NO: 205145 - DNA, 376 bp, Unknown
  Bacterial polypeptide expressing nucleotide sequence isolated from the Sargasso Sea
tatgaaactttgcatgataggtacaggttatgttggtttggtaagtggggtttgtttttctgatttaggaaatgatgttatctgtattgataaagacaaaaataaaattaataatttaaaaaatggtaaaattccaatttatgaaccaggtttagaggagttagtaagaaaaaatttacaaaataaaagattaaatttttcaacaaatttaaaagaatctgtaagtaaatctgatataatttttatatgtgttggtacaccaaccaaaaaaaatagttacagcgctgacctgtctcaagtttattcagtcgcaaaagaaatatctaaatcaattaaaaagtttaaaataattataacaaaatcaactgttccagtt

SEQ ID NO: 205146 - DNA, 909 bp, Unknown
  Bacterial polypeptide expressing nucleotide sequence isolated from the Sargasso Sea
tggtcttgttagtggagtttgtttttctgatttaggtaatactgtttattgtgttgataaaaataaagaaaaaattaattctttaaataatggaaatatacctatttatgagccaggcttagaagaaatattaaaaaaaaattttaaacaaaaaagattaatttttacatcagatttaaaaatggcagtaaataactcagatattatttttatatgcgtcggtactccaactaaaaaaaaaagcaattctgcagatttaaaatatgtatttcaagtagctaatgaattaaaaaaatatattaaaaaatataaaatagtcattactaaatctacagtcccggttacaacaggagataaaatagaaaaaattcttataaaacagaaaaataaaaagttagtagatgtagtatcaaatccagaatttttaagagaaggagaggcgattagagattttgtttacccagatagagttgttattggtacagatagcaataaagcaaatagaatacttaaatccctatatttacctataattaaaaaaactagcaggtattttaatacatcgagaagaggtgctgaattgataaaatatgcatctaatgcttttttagctactaaaatttcttatattaacgaacttgctaatttatgtgaaaaaacaggcgttgatattaaaaatgtttcttttggcatgggattggatcaacgtataggagaaaggtttttacgcgcaggtccagcttatggaggatcatgttttccaaaagacactagagctttagtggatacatcaaaatattttaaaactaatttatcaatagttaagactgttattaaatcaaatgatgatagaaaggtacttctaacaaaaaaagttgaaaaaatattaagtaaaaaaataaaaaataa

SEQ ID NO: 205147 - DNA, 925 bp, Unknown
  Bacterial polypeptide expressing nucleotide sequence isolated from the Sargasso Sea
aaagatttagataagattagttcccttaaaaaaggaaaagttccaatttatgagcctggactttcagaattagtaattaaaaattttagaaataaaagattaaatttttcaacagatctaaaaaaatctgttaaagagtcggacataatttttatttgtgttggaacacctacaaaaaaaggtggaagctcagcagatttgagtcaaatctataatgtaactaaggagataagttcctctattaatagatttaaaattattataacaaaatcaacagtccctgtaaccacaggtgatgagattgaaaaaattttatctagaaaaaacagtaaaaaaaaattttcagtagtttctaatccagaatttttgagagaaggtgaggctataagagatttttcttatcctgatagagtggtaattggaacgaatgacaaaaaagctggcaaaattatgaaaaatctttataacccacttatttctaaaggagcttcatatttacaaacatctagaagagcagcagaattaatcaaatacgcctctaacgctttcttagcgaccaaaataacttttattaatgaaatagcaaatctatgcgaaaaaactgggattaatgtggaagatatatctataggaatgggtttagataaaagaataggtagtagatttctcagagcaggccctgcctacggcggatcttgttttccaaaagatacaaaagcaatcatttcaactgctgacaaatttaaaactaacttatcagtggtaaaatctgtaattaaatcgaatgaaaatagatcaaagattttattagatcgaatttatcgaatgttaaataaaaaaataaagaataagaaaataacttttttaggtgtaacatttaagggcaatactgatgatatgagagattccatcagtcttaaatgat

SEQ ID NO: 205148 - DNA, 263 bp, Unknown
  Bacterial polypeptide expressing nucleotide sequence isolated from the Sargasso Sea
gatgaatatagtaatgttaggagcaggatatgttggtttagtctcgggagcttgtttttctgagcttggatttaatgttacttgtttagataatgatgttgaaaaaatagataatttaaagaaaggtattctccccatttatgaacctggattggaagtgttggtaaagaaaaatatttctacaggaaggttgagcttcaatattgaaaaaaaagaatatataaaaaaagctgatgcaatttttatagctgtaggaacgcctg

SEQ ID NO: 205149 - DNA, 882 bp, Unknown
  Bacterial polypeptide expressing nucleotide sequence isolated from the Sargasso Sea
atttataacagtaggcactccttctaaaagaatagatcatcaagctgatttttctcaagtatttaaagttgctaaagaaatctcaaaaaatctaaaaaaatattctgttattgtcacaaaatcaacagtacctgttggcacaactagaaaaataaaagaaataatttctaaatataaatcttctgatgattttgatgtggtatctaatcctgagtttttaagagaaggttcagcaataaatgattttatgaggcctgatagaattattattggagttgaaagtaaaaaagctgaaaatattatgcgacgattatacaaacctttgtatttattaaaaacgccaattgtaactacttcttttgagactgctgaaataataaaatacgcatcaaatagttttttagctaccaaaatttcatttattaatcaggttgcagattattgtgaaaaagctggtggaaatgttcaagatgtagctaaagcaatgggaatagataaaagaataggttcaaaatttttacatgcagggccaggttttggaggatcttgttttccaaaggatgcaaaagcattcatagcttctgcaaataaatttaatgttgatctctctattttaaaagcagttaattattctaatgaacaaaggcctaaaatgattttaaagaaaattaaaaagtgtttttcaaataatttaagtaataaaacattttgccttttaggtttaagttttaaaccaaatacagatgatgtgagaagttctatatccattaaaattgctaaattactaatcaatgcaaaatcttcggtaaaatcctatgatcctgtagctatggaagctgctaaaaaaatacttcctaagataatttattgtgactcagttaa

SEQ ID NO: 205150 - DNA, 154 bp, Unknown
  Bacterial polypeptide expressing nucleotide sequence isolated from the Sargasso Sea
catgaagttatgtatgatcggaactggctacgtaggattagttagcggtgtatgttttgctgatctaggtaatgaagtaatttgcgtagataaagatttaaataagattaattcccttaaaaaaggaaaagttccaatttacgaacctgggctt

SEQ ID NO: 205151 - DNA, 766 bp, Unknown
  Bacterial polypeptide expressing nucleotide sequence isolated from the Sargasso Sea
caggcagcgactggccacaccatcgtggtggagaagagcacgctgccggtgcggacggccgctgcgatcaagacgattctggaagccgcccaggcggatgatcagcagcgcagcttctcggtgctctccaatcccgagttcctggcggagggaacggcgatttgtgacctggaggcgccggaccgggtgctgatcggaggcgaggatgcagcctcgattgaggctctggcaggggtctacagccactgggtgccggagccgcagatcctgcgcaccaacctctggagcagtgagctgtccaagctcacggccaatgcgtttctggcgcagcggatcagttcgatcaactccgtggcggcactctgcgaggccaccggcgccgatgtgcgggaggtggcgcgggccatcggcactgacagccgcatcggcccgaagtttctcaatgccggccctggcttcggcggcagctgcttccagaaggacattctcaacctggtgtacctgtgccgccatttcggtttgccggaggtggccgactactgggaatcggtggtggcgctgaacacctggcagcagcaccggatcgcccggttggtggtgcagaagctcttcggcacggtgacgggcaagcgtctggcggtgttggggtttgccttcaaggcggacaccaacgacacccgcgaggcgccggcgatccgtatctgcggagatctgttggaggagggagcgcagctggcgatccatgaccccaaggtggaccccgccc

SEQ ID NO: 205152 - DNA, 853 bp, Unknown
  Bacterial polypeptide expressing nucleotide sequence isolated from the Sargasso Sea
taggaataatgttgtgtgtgttgatgtcgataaaaataaaattaaaaatttgaacaaaggaattataccaatatatgagccaggtttagaggaacttgttggaagaaacacaaaacaaaatagattaaaattttcaattgatattaataaatccataaaatcttccgacataatatttatctgcgtaggcactcctacgaataaaaaaacaaataaatctaatcttaatcatgtttataatgtagcaaatcaaataaaaattaatttaaataaattcaaaatagttgtaaacaaatcaactgtacctgttggcactggtgatacgatagaaaaaataataagttcaaaaaaaaataaaaataaatttgaagtcgtttcaaatcctgaatttctaagagaaggtgaggctataagagattttttatatccagacagagttgtaataggaacaggaagtaaaaaggcaaataataaaatgaaaagtctttatttgcctataataaagaaaaaaaatagatattttaatacaagtcgaaaagcagctgagctaataaaatatgcatcaaatgcatttcttgctactaaaattacctttattaatgagatagcgaatttatgcgaaaaagcttctattgatgttaaagaggtttccatcggcatgggtcttgatgaaagaataggcggcagatttttgcgtgcgggacctggatatggcggttcttgttttcccaaagatactagagccttacttacaaccgctaaaaaatttaatacagctttgtcagtagttaagtcagtagtcgcctctaacaataataggaacaaaatattgttttctagaattaaaaaaatt

SEQ ID NO: 205153 - DNA, 684 bp, Unknown
  Bacterial polypeptide expressing nucleotide sequence isolated from the Sargasso Sea
taacaaggataagattgctaattggaatagcgataatttaccaatatatgagcctggattattagaattagttttagaagcaagggggaaaaatttattttttgttaccgacgttgaaaaagaaattaaggattctgatattatttttgtttcagtaaatactcctactaagtcctttggagagggtgctggaagagcagctgatttgcaatattgggaaaaaactgcgagagatattttagaaaattgtcagaagccttgggtagttgttgttgaaaaaagtactttgcctgttagaacagcagaagctatggcaaaaatacttaaatctggtaactctaaaaccgaattttctatagtctcaaatccagaatttttggctgaagggacagctattgaagatctaaaaaatccagatagagttttgattggtggtgaagaaaatgaaaatggtcaaaaggccgcagaaaaagtggcgaaactttattctcattgggtaccagaagatcgtttgttgatgaccaatgtctggagcagtgaactttcaaagctagttgcaaacgccatgcttgctcaacggatttcctctgttaacagtatttctgcactttgtgaaagaacagaagcagacattacagaagtttcgaaagctgttggaatggattcgagaatcggtgcaaggtt

SEQ ID NO: 205154 - DNA, 760 bp, Unknown
  Bacterial polypeptide expressing nucleotide sequence isolated from the Sargasso Sea
atgaatacaagaaataaaattgtagttgtcggttctggctatgttggaatgtcgcttgccacaatgctttcaaaaaaatatcaggtatgtgtattagatattgatgagagcagagtaaatgcaattaatgaaagaacatccacaattagagataaggatatccagaagactctatcaagtgctgatctcaaacttcatgcaacaaaaaataaagaagaggcctataaagatgcagattttattattgtttgtactccaacaaattttgatgaatctacatatttttttgatacaagcatagtcgaccttgtttctaaggaagcaaattcaatgtgcccaaatgctcttgtagtaattaaatcaacaataccagtaggccatacattgaaattacaaaatgagctaaagacaagaaatatagtcttttcgcctgagtttttaagagagggttcagctcttagagataatttacatccatcaagaattattgttgggaatgaaagtaataaatcagaagagtttgctgaaatcctttccgagtctgcatcaatagatattgagccaattttaatgacttcttctgatgcagaggcagtcaagctattttcaaatacctatttagcgatgaggatagctttcttcaatgagttagatacctttgcattagccaaaaatttaaatacacaaaaaattattaatggcatatctttagaccccaaggataggaaagggctacaacaatccttcttttggttatggc

SEQ ID NO: 205155 - DNA, 649 bp, Unknown
  Bacterial polypeptide expressing nucleotide sequence isolated from the Sargasso Sea
atgacatttgaaattaaaaatatttgttgtattggagcaggatatgttggaggaccaactatgtcggtaatagctgataagtgtcctaatattaacattaatgttgttgataaaagtcctgaaagaattgcgttatggaatagctcaaaccttgaattacttcctatttacgagcccggtttagataagataattgcaagatgcagagataaaaatttaacattctctacaaaaataaaagaaaaaatatctgatgctgacatgattttcatatcagtaaatactccaaccaaaacaaagggtattggagcaggacaagcaagtgatctcaaatgggttgaagcatgtgcaagagaagttgcattgtcggctaaaggtcatacaatagtcgttgaaaaaagcactcttcctgtaaaaactgctgaagtaataaaaactatattagaggcttctcaactaaattcaaatgaattaaaaaaaacatttgatgttttatctaatccagaatttttagcagaaggttctgctattagtgatctggagagtcctgacagagttttaattggaggcgaaagtgatgatgcaattattgctttgagtaatatttatagaaattgggttccaatagaaaaaatattacataccaaca

SEQ ID NO: 205156 - DNA, 691 bp, Unknown
  Bacterial polypeptide expressing nucleotide sequence isolated from the Sargasso Sea
tgtgggaggtgaatgtgaatctagtcttgaattttctgatcttttaagagagggagctattgaagattctattgaagttctctccatgaaatcaacagaagctgaggctgttaaactatttgcaaatacctatttagcaatgcgagtatctttttttaatgaattagactcttatgcgttagccaataatcttgatactaaaagtattattgaaggagtgagcttagataagagaattggaagtgattataacaatccttcttttggttacggaggttattgtcttccaaaagatacaaagcagctattagccaactatgagcatgtgccacaaacgctcattaaggcaattgtttcctcaaatactacgagaaaagattttattgctgacgagataaggaggcttaatccaagagttgttggcttttacaggcttgtaatgaaaatgaacagcgataattttagatcttctgcaatacagggaataatgaaacgaattaaagcaaaaggaattgaagtagttgtttttgagcctgagttagatgagactgaattttttggctcgaaggtgattaccgatttaaatgagtttaaaaaattgagtgatgtgattgttgcaaatagaatgtcagatgcactgaatgatgttcaatcaaaatgtttttcaagagacttatttggagagaattaa

SEQ ID NO: 205157 - DNA, 865 bp, Unknown
  Bacterial polypeptide expressing nucleotide sequence isolated from the Sargasso Sea
aaaatcgatcgactgaatgccggtgaagtgccgatctatgagcccggcctgaatggctatatccagcgcaatcgggaagcgggcaggctcgaatttacgacagacgtcgagaagggcgtcgatcatggcttgttccagtttatctcggttggcacgccacccgatgaggacgggtctgctgatctgcaacacgtcctggccgtcgcccgaacgattggcggccatatgacggagtaccggatcatcgtcgacaagtcgacggtgccggtgggaacggcggataaggtaacccatgagataaacacagcgctggcggagcgaggcgcttcagtcgaattcgatgttgtctcaaatccggagtttctaaaagaaggcgccgcgatcaatgactttgtcaaaccagacagaatcgtcgttggcacgaacaacccacgcacgaacgagctgttacgtgctttgtacgagccgttcaatcgaaatcgcgaccggatgattacgatggatgtgcggtcggcagagctgaccaagtatgcggccaatgcaatgcttgcgaccaagatcagcttcatgaatgaactcgcaaatctcgcagaaggtgtcggtgcagacatcgagatggttcgactgggcatcggttccgatccgcgtatcggttatcagttcatttatcccggcgccggctatggtgggtcctgttttccaaaggacgtgcgggcactcaccagatcggccgagcaggcagggtacaaggctgaattgctggacgctgttgaagcggtcaacaatcgacagaaacatcgtatgttcgacaaagtttccggccattttggcgatgacctggcagggaagacgctggcagtctggg

SEQ ID NO: 205158 - DNA, 277 bp, Unknown
  Bacterial polypeptide expressing nucleotide sequence isolated from the Sargasso Sea
tatgaaaatttgtatgattggaacaggttatgttggacttgtaagcggagcttgctttgctgatttaggaaacaatgtttggtgcgttgacaaaaatcatcaaaaaattgatatgcttaatgatggtcatatacctatttacgagcctggtttagaagaagtagtaaataaaaattcgatatctggaagattaaaatttactactgatttacaattagcagttaatagttctgatataatttttatatgtgttggcacaccaacttctaaaaaaaca

SEQ ID NO: 205159 - DNA, 154 bp, Unknown
  Bacterial polypeptide expressing nucleotide sequence isolated from the Sargasso Sea
tatgaaactttgcatgataggaacagggtatgtaggccttgtaagtggtacttgttttgctgacttgggtaatgatgttatctgtgttgataaagatgatgataaaattattaaattaaaaaaaggaattataccaatctatgagccaggtcta

SEQ ID NO: 205160 - DNA, 865 bp, Unknown
  Bacterial polypeptide expressing nucleotide sequence isolated from the Sargasso Sea
gatacaaaatttcttgaatcagcaatcagtgaagtaaatagtgttaaaaataaagatttagttataacaattaagtcaacaattccaccatacgaaatagataaaatttgtgaaaaagtaggtcttgatagtgaaatcctaacatttaaccctgaatttttaagagagggtactgctgttaaagatttttttaatcctgacagaattgttataggaggtaatgataaaaagaaagtaaataagttgaaagacttatacaaagattttaaagcagaaattataataacagaccctataagttctcaattaataaaatatttagcaaatacatatcttcctttaagattgtcattcgtaaatgaagctacaagattaataaatgactccggaggtaatttatctgatgtccttcaaggtgttggaatggattctagaattgggtctcagtattttaggccttcacctgcttggggtggttcttgtttccctaaagatgttgtagaagtaaataatttttatgattcaagtgaactgaatcttccacttatttcaaatataattgagtcaaacaaaattcaaacaaactggacgaccacaatgattaaaaatattattgagaaagaaaatcttaatggagcaatacttgtaggtgcagcatttaaggaagatactgatgatttgagaaattctcctactttagatattaagaaacaattaactgagataggagtaaatgtcagcatttatgatgaattaatagattctgaagaatttattaagttaaatgattttgaaaaaatagatagcccacatttaatcgcattaatgtacccaataaatgaaagtctgttaaacaaaaataaat

SEQ ID NO: 205161 - DNA, 168 bp, Unknown
  Bacterial polypeptide expressing nucleotide sequence isolated from the Sargasso Sea
tatgaaattatgcatgattggcacaggttatgttggtttagttagtggcgtttgtttttccgatttaggtaatgatgtcatatgtgttgataaagatttaaaaaaaattaacaatttaaaaaatggtattgttcctatttatgagccaggtttagaagagttagtctt

SEQ ID NO: 205162 - DNA, 912 bp, Unknown
  Bacterial polypeptide expressing nucleotide sequence isolated from the Sargasso Sea
aggtaaaattccaatatacgaacccggcctgtcagaattagtaattaaaaattataagaataaaagattaactttttccaccaatttaaaaaaatcagttaaagaatcagatattatttttatttgtgttggcacacctaccaagaaaggaggaggttctgcagatttaagtcagatttataatgtctcaaaagaaatatcttcctcaattattaaatttaagattattataacaaagtccactgtaccagtaactacaggtgatgaaattgaaaaaattttatctaaaaaaaataataaaaaaaatttttcagttgtctcaaaccctgaatttttgagagagggagaagcaataagagattttatatatcctgatagaatagtaatcggcactagtgataaaaagacaggaaaaattttaaaaaatctatatggtccacttatttcaaagggagcgtcttatttacaaacttctagaagagcagcagaattaatcaaatatgcttctaatgcttttttggctactaaaattacttttataaatgaaatagcaaatttatgtgaaaaaactggcattaatgttgaagatatatcaattggcatgggtctagataaaagaataggaagtcgatttctaagagcaggacccgcctatggtggatcttgttttccaaaagataccaaagctattatcacaacagctgataagtttaaaacaaatctatcagtgataaaatctgtaataaaatcaaacgaaaatagatcaaaaattttactcgatagagtaaatcgaattttgaataataaaataagaaataaaagaataacttttttaggggttacattcaaggcaaatactgatgatatgagagactcatcaagtcttaaaatgataccttacttatcaaaaaa

SEQ ID NO: 205163 - DNA, 193 bp, Unknown
  Bacterial polypeptide expressing nucleotide sequence isolated from the Sargasso Sea
atgaaaatatgtattgtaggaacaggatatgttggtctcgtaagtggggtatgttttgcagatcttggcaatatagtatattgcgttgacaaaaataaagataaagtacaatctttaaataatggaaatattccaatctacgaacctggtctagaagaaattcttaaaagaaatcaaaaacaaaaaagattaa

SEQ ID NO: 205164 - DNA, 652 bp, Unknown
  Bacterial polypeptide expressing nucleotide sequence isolated from the Sargasso Sea
aatgaaaattgctattgccggaacaggttatgtcggactctcgaatgctattttattagcccaacacaatgaagtggtggcgcttgatattattcaagccaaagtggataagctcaatcaaaaaatttctccgattgtcgacactgaaattgaacattatctgcagcataaaacgctgaactttcgtgccaccactgataaacatgaagcttacctcggtgctgattatgtggtgattgccacaccaaccgattatgacccggtgaccaataacttcgatacacgttctgtggaagcggtgatccaggatgtgatgaccattaacccaaccgcagtgatggtgattaaatcgacggtaccagtgggttacaccaaaaaaattaagcaaaagctgtgctgcaataacctgatgttttcgccggagtttttacgcgaaggcaaagcgttgtatgacaatttatacccgtcacgcattattgttggcgaacaatcggagcgtgcccgggtttttgccggtttactggcgcaaggtgcagtgaagcaagacgtggcgactttgtttgttgacagtaccgaagccgaagcggtgaagttattttctaatacctatctggcgatgcgggtatcgttttttacgaactggatacttatg

SEQ ID NO: 205165 - DNA, 641 bp, Unknown
  Bacterial polypeptide expressing nucleotide sequence isolated from the Sargasso Sea
agatagttctttatcatcatgcgattcgatagatgatcttatttctaaagtgcaaataatttttgtatgtgttcctactcccatgaataagaatggttcttgtgatttgagtattgtagaaaatattattgataaaataaattgttgcattgaagctaaatctgataaaattgttattattaaatctacaatacctcctggaacgacagaagaattgaacaataaatatcagaattttaatattatatttaatccagaatttttaactgaagcaaattttatagaagattttaaaaatcaaaacagaattattttaggtggttcaaaggttattacagataaagttaaagaaatatatattaaaatttttccggaggctaagattgttgaaacaggttctacttatgctgaaatggttaaatatttttctaatacatttttagctactaaagtatcttttgcaaatgaaatgaaaatgatatgtgacaaacttaatattgattatactaaagtagttgaatattctacttatgataatagattaggtgattctcattggtctgttccagggcctgatggaaaattaggctttggaggtagttgttttccaaaagatattaatgctcttatttttttagctt

SEQ ID NO: 205166 - DNA, 858 bp, Unknown
  Bacterial polypeptide expressing nucleotide sequence isolated from the Sargasso Sea
gttgagtaaacatttaaatgatactaaacttttaagttttacaccatcgatcgctgaagctgttgaagatgcaaatgttgttttcattacagtaggaactcctacaaaaagattagaaaatgatgcagatttaagtgcagtttgggatgtagctgaagaacttagtcaacatattaaaaattattgtgttgttgttacaaagtctactgtaccagttggaacaacaactaaattaaaaaaaataatttcaaaaaaattagatctaaataaatttgatgttgtttcaaatccagagtttttgagagagggttctgcaattaatgattttatgcgccctgatagaattgttttaggaactgagtcaaaaaaatcagaaaatattatgtgtgaattatacaggccacttaatttaattggcactccaatagtctcaacatctattgaaacatctgaggtgattaaatatgcttcaaatagttttttagctacaaaaattggatttattaatcaaattgctgatttatgtgaaaaggtaggagctaatgttcaagatgtttcaaaagctatgggaatagataaacgtattggttctaaatttcttgatgccggtccaggttttggaggttcttgctttcctaaagatgttaaggcatttgtaaatactgcttacaaacatgatttagatttttcaattttagatgcagttatgaaatctaatgaggctagaccaaccaatattgcgaaaaaaataataaaattaaaaaattttaaaccaggtaataccatagccttgttaggattaagctttaagccaatacaaacgatgtacgcgagtctacttccattaaaattgcaaaa

SEQ ID NO: 205167 - DNA, 655 bp, Unknown
  Bacterial polypeptide expressing nucleotide sequence isolated from the Sargasso Sea
atgggcataaaaatttctatagttgaaatgggctacgttggttgtggaaatgctctaatgcttgcaagagataatgaagtttcaattgttgatattgataaagagaaagttaacaattttaataataagaaattgcctattcaagataattttgcgcaagatttttttgagtctgaaaatttaaatttatctgcaacttgtgatttatttgaatcaattgtcgatgcttcatatatcatcctctcgcttcctacaaactttgatgaagaaactaaagaattcgatacttctataatagaaaaggtaatagctgatatattacataaaaattcaaaagcattaattatcataaaatcaacagttaatattggcttcacaaagtctttaagaaaaaagtttgaaactacaaggattatatttagcccagaatttttaagggagggtcatgctcttgaagataatctttatccttccagaattatagttggcggattaagtgctgatgctaaattattcggaaatattctaattaattcttcgaaagataagaaagtgccattattattcatggagtccactgaggcggaatcagtaaagttgttttcaaacacatatttagcaatgcgtgtagcatattttaaaaagcttgatgggt

SEQ ID NO: 205168 - DNA, 174 bp, Unknown
  Bacterial polypeptide expressing nucleotide sequence isolated from the Sargasso Sea
tatgaagctttgcatgataggaactggatatgtagggcttgtaagcggcgtttgtttcgctgatttgggcaacgatgttatctgtgttgataaggatgaagataaaattaataaattaaaaaaaggaattataccaatctacgaacctggtcttgaagaattagttaaaaaaaa

SEQ ID NO: 205169 - DNA, 253 bp, Unknown
  Bacterial polypeptide expressing nucleotide sequence isolated from the Sargasso Sea
atgtgttggatcgattcgtggcttttctcgcgcgtagtatgctgcatcggcgccggatacgtcggtgggcccaccatggcgatgattgccaagaagtgcccggagatcagcgtcaccgttgtggacatctcgcaaccgagaatcgacgcgtggaactcgagcgagttgcccatctatgagcccggtttggatgagatcgtcttcgcgtgccgtgggaagaatttgttcttctccacagccgtcgaggacgcta

SEQ ID NO: 205170 - DNA, 781 bp, Unknown
  Bacterial polypeptide expressing nucleotide sequence isolated from the Sargasso Sea
aatgaaaatatcaattataggtgttggatatgttggcttagttactggattatgttttgctgaaaaaggtcataaagttattgcttatgatattaataaaaaaatagttgataaaattaatgataaaaatttgactatttatgagcctaaattaaaaaaaattttaaataaaaatataaataaaaacttttattgtacaaataatttgcaaagtgcaatatttaattctgaaataacttttgttgcagttcccactccttatactaataaaggttttgatttaaaatatattagactagcttcagtaaatattgctaaaatattgaatataaaaaataataaacatttggttgtttttaaaagcactatacttccagatacgtgtgataaaataatcataccattgtttaaaaaaaagttaaaaaaacagatttataaaaaaacaagttttgcctttaatccagaatttttacgtgaaggatctgctgtaaatgattttatgtatcctgatagattggtaataggtgctaataataaaaaaacctttagtttattaaaagatgtttattcctcatttaattttgataatatttttacaactaatattaaaacagctgaaatgattaaatatgcctcgaatgcattttttgcaaatttgatttctttttctaacgagattgccaatttgtcatcaactttagaaaatgtagatagcaaagatgttatttatggaaaaaaattggataatagattttatactaaaattaaaaataatctgatt

SEQ ID NO: 205171 - DNA, 892 bp, Unknown
  Bacterial polypeptide expressing nucleotide sequence isolated from the Sargasso Sea
tccgaaagtgtttttatttgtgtgggtactcccagtaatcctgatggatcagctaatattaatcatgttgagaggtctttgaaacaaatattgctagtagataatttaaaaatagaagacatagttataaagagcacagtacctcccggcacagcagatagacttactagtgaaatatgtgaaaaaagaaatatcgacttagtcagttgtcctgagtttttaagggaaggttccgctgttcaggattttttgaagcctcaacgaattatactaggactacatgatcaacgtaaaagggataaattccgcagtattttttctccatttaataggaaacaagacagaataatttttatggatcctgtatctgctgaactaaccaagtatgcatcaaatgctatgctagcaaccaaaatcagttttattaacgaactgtctagatattcggaccttaagggagctaatattgaaagtgtcagaatgggaatgggtttggacagcagaataggattagaatatttatatcctggatgtggatttggaggttcttgttttcctaaagatattgatgctctgatatcttccgcaaaagaaagtaaccttaatcttgatctcattaaggtagtaaaaagaataaatcaatctcagccagactatcttattgataaactttcagatcattacaaaaatcaattaaatggcaaaacaatttctctatgggggctttctttcaagccaaacacagacgatttgagaagtgcacccgcactaaagattatttccaaacttttagatttaggttgctttttgaagatatatgatcccaaagcgatggaaaactttaagaattccccactttattctcccaatacattgttatgtaattctgcat

SEQ ID NO: 205172 - DNA, 396 bp, Unknown
  Bacterial polypeptide expressing nucleotide sequence isolated from the Sargasso Sea
tatgaaattatgtatgataggaacaggttacgttggtttagttagtggagtttgtttttcggacttaggaaatgaagttatttgtgttgataaagatttaaataaaattaatctacttaaaaaaggtaaaattcctatttatgaacctggtctttcagagttggttgttaaaaattataagaataaaagattatcattctcatcagatttaaaaacttcagttaaaaaaagtgatattatttttatttgtgttggtacaccaacaaaaaaaaaaggaagttctgctgatttaagtcaagtttttaacgttgcaaaagaacttagttcatcaattgataaatttaaaattataattactaaatcaactgtgccagttaccactggtgatgaaattga

SEQ ID NO: 205173 - DNA, 430 bp, Unknown
  Bacterial polypeptide expressing nucleotide sequence isolated from the Sargasso Sea
atgaaaatatgtgtaataggatcaggttatgtgggattagtaagtggtgcatgttttgctgaacttggtaacaatgtcacttgtgtagacaatgacttaaataaaatagcaaatctaaagaagggaataattccaatttacgagccaggattagaagaattaattttaagaaatttaaagcaaaaaaggcttcaattttcatcaaatatatcagagtctattaaaaaaggagatcttatatttatatgtgttggaactccgactaaaactaaatctaacgaagcggatctaaaatatgtatttcaagttgtaaaagatataaaaaagaatctaaacaaatataaagtaatcgttactaaatctacagtgccagtaactactggtgacaaaattgaaaaattattaacaactaacaaaaataaaaaatatt

SEQ ID NO: 205174 - DNA, 720 bp, Unknown
  Bacterial polypeptide expressing nucleotide sequence isolated from the Sargasso Sea
gaatttttagcagaaggaactgcaattaaggatttatttaaatctgacagggttctaataggtggagaatcaacagagtctggtaaggaagccattaagtctttggttaaaatttatagtaaatggataccaaaagataaaatattaacaactaatgtctggtcttctgaactttcaaaattagcttcaaatgctatgcttgcacaaagaatatcgtcaattaatagtctttcagctttatgtgaaaaaacaggtgcagatattgaagagctttcaaaagctattggcatggatcatcgaattggaccatattttttaaaagcttcagtgggttttggaggtagttgctttaaaaaagatattttaaatttagtttatttatgtaagcattatggacttgatgaagtagcagaatattggcatcaagttgttaaaataaatacctaccaaagaaatagatttgcaaaaaaaattattgacggcttaggtggaaacctaaaaggaaaaaagatactaattctaggatgggcttttaaagcaaacacaaatgatagtagagaatctgcctcaatatatgtttgtgaacaactttatttaaaagctgcagatattgaaatttatgatccaatggtctcagaaaagagtattaaaaatgatattaaagattattggaatattgatagaaaaaacaattttattgaaaaaaggattaaaatttta

SEQ ID NO: 205175 - DNA, 742 bp, Unknown
  Bacterial polypeptide expressing nucleotide sequence isolated from the Sargasso Sea
tttgagagaaacaaaagctctttatgataatttatacccatctagaattgtagttggagatttttcaaataaggcaaaagaatttggaaatattctctacaaatgttctaataaaaaaaagattcagatgctttttatggagtctaaagaggctgaagctgtaaaattattttcaaacacgtttcttgccatgagggtttccttctttaatgaattagatagttttgcagaaatacaaggtctttcatcaagaaacattattgacggtattagttcggatccaagagtgggtcattattataataatccatcatttggttatggcggatattgtcttccaaaagatacaaaacaacttttagataatttcagtaaaatcccaaataatataattaaagcaacggttgaggcaaataacactagaaaggaatttattgtcaattcgatattgaaaaggtcacctaaaacggtaggaatatataggctcacaatgaaaaagggttcagataattttagagagagtgctgtccttgatattgtttcaaaactcgaaataaaaaaaattaatatggttatttatgagccatttatcaacaataatacttttaatggtataccagtaattaatgaaataggctcctttataaaaaaatcagacttaattattgcgaataggttctcaaaagaactagatcatgttgctggcaaggtatattcgagagatttatttcaagaaaactag

SEQ ID NO: 205176 - DNA, 661 bp, Unknown
  Bacterial polypeptide expressing nucleotide sequence isolated from the Sargasso Sea
aatgaaaatttgttttatcggtacaggttatgttggcttagtttcaggagtgcttttttctgattttgggaatagggtagtatgcgtagataataatagaaagaaaatagaaaacttaaaaaaaggaattattcccatttttgaacctggcctagatgagcttgttattagaaactgtaagtcaaaaagacttttttttacaacagatattaacaaagcaattaaagattctgacatagtatttatagcggttggaactccaacggctaaagacggagtttctgctgatttaaaaaatgtttatgcagtggctaaaataatatctaaaaatatcaataaatacaaaatagtaattacaaaatctactgtacctgtctgtaccggagatgaagttgaaaatattattaaaaaaaataatccaatctccaaatttgatgtagtttcaaatcctgagtttttaagagaaggagaagctataagagattttagatatcctgatagagttgtaatcggttctaataatttaaaaaaaacaaagccaattctggaaaaactatatgaaccaataacaaaaaaaggttcaaaatttatagcaaccactagaagaagctcagaattaataaagtatgcagctaatgcttttttagctactaaaattaca

SEQ ID NO: 205177 - DNA, 798 bp, Unknown
  Bacterial polypeptide expressing nucleotide sequence isolated from the Sargasso Sea
tctagttagcggtgtttgtttttcagatttaggtaatgatgtaatttgtgttgataaagatttagataaaattcaattacttcaaaatggaaaagtcccaatatatgaacctggattatcagaacttgttgttaaaaattataagaataaaagattaaaattttctaatgatttaaaaaaatcggtaatcgagtctgaaattatttttatttgcgtaggtacaccaactaaaaaaggaagttcgtctgctgatttggcacaagtatacaatgttgctaaagaaataagtaaatcaattaataaatataaagtaattgttacaaaatccacagttccagtaactactggtgataaaattgaaaaaattttgcaaaaaaaaaataaaaaaaataaattttctgtagtatcaaatcctgaatttttaagagaaggagaggctataagagattttatttatccagacagaatagtaattgggtcaaacgataaaagatcaagtaaacttatgaaaagtctttataatccgttaatatcaaaaggagcacaatttttgttaactaagagaagagctgctgaattaattaaatatgcttcaaactcttttttagctacaaaaattacttttataaatgaaatagcaaatttatgtgagcaaactggcattaacgttgaggatatttcaataggtattggtttagataaaagaattggaggacgttttttacgagcaggcccagcttatgggggatcatgttttcctaaagataccaaggcaatagtttcaactgctgaaaaatt

SEQ ID NO: 205178 - DNA, 754 bp, Unknown
  Bacterial polypeptide expressing nucleotide sequence isolated from the Sargasso Sea
tatgaaaattgtggttgttggatgtggctatgttggcctaagtcttgctacattaatgtccgaaaagtacgaggttactgcgattgatgttgatcaagaaaaaatagatcgtatcaataatagagttgcaccaattaatgaaccacaaattcaaaatttttataatgacaaaaatttaaatttaaaagccacaaagaactttgtaaatgcatacaaagaggctagtttcatcataatctgtactccaactaattacgatgaagtgaccaatcaatttaatctcgactctatatattcagtcttagaagatatcgtaaaatcagagacaagttctgctattgtaattagatctacaataccagttgggttttgcaattctttaaacatcaaatttcctaacaatgatatatttttttcaccagaatttctcagagaaggtaatgctctagaggataatttaaatccatccagaatagttattggaagcagcagtagcaatgcaaagaaattttcagaaatactgctacaaatatctggaagcagtaaaaagaatattcctgtagaatttatggaatcgtctgaagctgaagcagttaaactctttgctaatacttacttggcaatgcgaatctctttttttaatgagttagacagctactgtgaatcttttggcttagatactagcaatgtaataagaggcatttgtcatgataatcgaataggtgattattataataacccctccatttggtta

SEQ ID NO: 205179 - DNA, 877 bp, Unknown
  Bacterial polypeptide expressing nucleotide sequence isolated from the Sargasso Sea
ttctaatccagaatttttagctgaaggaacggccattcaggatttgtcaaatccagaccgcgtcttgataggcggggaagagaacgaaaatggacataaagcagcaaattcagtggcagaactttatgcccactgggttcctcgagaacgtattttacttacaagtgtctggagcagtgaactttcaaaactcgttgctaatgcgatgctagcgcagcgaatatcttctgtaaatagtatttctgcgctttgcgaacgtactgaagcagacattacggaagtttctagggcaattggtatggattccagaatcggagctaaatttttacaagccagtattggttttggaggttcatgctttcgcaaggatattttgcatctatcatatctttgtgaattttatggacttccggaagttgctgattactgggccagcgttgtacatataaatgaatggcaaactaatcggttttttcagaatattctacatgaattattcaatactttggcaggcaagacaattaccatgttgggatttgcttttaagcaggatacaggggatacgcgcgattctcctgcaattcccttatgtgaaagactagtaggagaaaacgcaaaggtcagaattcatgatccaaaagcgcttgaaaacgcccgaattgaactaaagaatctcaagggtgatttatcatttgttgaggacgtttacgaagctgtcgacggcgcacatgcacttgctcttgttacacagtgggatgaataccttgaccttgattacgagaaaattcatcaagcaatggtagagccagcatttatctttgacgggcgtaatcatctagatcatgataagctttataaaattggttttaatgtttcc

SEQ ID NO: 205180 - DNA, 562 bp, Unknown
  Bacterial polypeptide expressing nucleotide sequence isolated from the Sargasso Sea
tatgaaactttgcatgataggtactggttatgttggtcttgtaagtggagtatgtttttctgatgttggaaatacagtttactgtgtagataaagatcaaaaaaaaattgatttactaaataaaggaattgttccaatatttgaaccaggtcttgaagaaatattaaaaagaaattttaaacaaaaaagattaatatttacatcaaatttaaaaaatgctgtaataaattcagatataatttttatttgcgttggaacacccacaaaaaaaaataccaactctgctgatttgaaatacgtttttagtgttgctaaagatttaaaaaaaattataaaaaaatataaaataataattactaaatctaccgtacccgtttccacaggagatcaaattgagaaaattttgattaatttaaagaaaaacaaattagttgatgttgtatcaaatcctgaatttttaagagaaggtgaggccataagagattttatctatccagatagggttattgttggaacagacagcaagaaagctaataaaattctaaaatctctctatttacca

SEQ ID NO: 205181 - DNA, 889 bp, Unknown
  Bacterial polypeptide expressing nucleotide sequence isolated from the Sargasso Sea
aaaatcaacaaaaaagaatcaactatttctgacaaagacattcaaaatttcttagcaacaaaagatctttcactttcctcaacggcagacaaaaagaaagcatatgaggattcagattttatagttattgctacgccaacagactataacagcgataccaatttttttgaaactaatagcgttgattcttgcataaaagatgcactttcaataaacaaagaagcacttattgtaattaagtctacaattcctattggacacacaaaactgcttcaggagagatacgaaactgaccacataatattttcacctgagttttcacgcgagggcaaagcattgcatgataatctttatccttctcgtattatcattggctgcgataatgaaaaaggaaaacagttttatgaccttctaattcagggcgctcaaaaggataaaataccaagtttgtttatttcatctactgaagcagaagcgataaaattattttcaaattcttatttagcaatgagggtagcattctttaatgagttagattctttcgctttggcaaataaattgaatacaaaaaatataatcaatggagtatctttagataaaaggattggagatacatataataatccatcatttggttatggtggttattgtttgccaaaagatacaaaacaacttttggctaactataatgatgtaccgcaaaaacttataaatgctattgttgaatcaaatatcacacgcaagaattttattgccaatgaaataataaataaaaatcctaatccagtgggtatttatagacttcagatgaaaaaagatagcgataatcttaggtcttcttcaactcaggggatcattaaaaggatcgttaatgaaggtttgaaattat

SEQ ID NO: 205182 - DNA, 849 bp, Unknown
  Bacterial polypeptide expressing nucleotide sequence isolated from the Sargasso Sea
atccagacgctaatatagttattaagtcaactataccaattggatttactgatctaatgaggaaaaagtataaaaattcaaaagtatttttttctccagagtttctaagagaaaacaatgctcttttggataatttgaacccttccagaatagtagtgggtgatacaactaaagaagctacagaatttgcaaacatactttcaagttgtgcagaaaaaaaagaagatataccaattctctacatgcaatcaaaagaggctgaggcggtaaagttattttcaaatacatatctagcaatgcgagtttctttttttaatgagcttgatagttttgctgagatacaaaacttgtctgcacgaaagattattgagggtgttagcctggatccaagaataggtaatttctacaataacccatcttttggatatggaggatattgtcttccaaaggacacaaagcagctattagcaaattttgacaaaattccaaataatatcattaaagctgttgtggcggccaatgagacaagaaaagattttattgttgagacaattttaaaaaaaagtccatcaacggttggagtctatgggttaagtatgaaacacgggtctgataatcacagggaaagcgcagtaatagatgtattaaataaaattatacaaaaaaatataaaagtaattttgtttgagccaaatattaaaaatttaaaaattaaaaatgtacaaattgctaatgatgtaaatgaactaataaatttatcagatttaattattgctaaccgttacactagggaattagatagtgttgtagataaagtctatagtagagatttatttaatgagaattgag

SEQ ID NO: 205183 - DNA, 779 bp, Unknown
  Bacterial polypeptide expressing nucleotide sequence isolated from the Sargasso Sea
tatgagaattaccgtagctggtacagggtatgtagggttatcactagctgtactaatttctaaatatcacgatgttattgcttatgataaaaataaagaagtagttaatctgataaagaaaagtaaatcaccgttcaaagatgtagaattagaaaacttcttaaaaaaagaaaaattaaatttatacgcaactagcgataggacagaggcttttgataagtctgatgtagtaattgtatgtacacctacagattatgatcatgaaagtggaaaatttgacaccagttctgtagaagatgtagtaaaacattctctagaactaaataaaaatacattaattgtcattaagtctacaattccaatgggttttacaagtaaattaagagacaaatataaaacagataaaataattttctcgccggaatttttaagggaaaccaaagctatttatgataatttatacccttcacgaattatagttggttcgaattgtgagaatggaaaaaaatttgctaaaattttagagaaatgcgcaataaaaaaagatgttcctattatttttatgaaatctgaagaagcagaatctgtaaaacttttttctaactcatatttagctatgagaatttcttacttcaatgaacttgatgccttttgtcaggtccattcactggatacaagaaaagtaatacttggagtatcaaacgatcctcgtattggaaattattataataatccatctttttggttatggcggatactgtcttccaaaagatacgaaa

SEQ ID NO: 205184 - DNA, 850 bp, Unknown
  Bacterial polypeptide expressing nucleotide sequence isolated from the Sargasso Sea
ggaccaacaatggccgttattgctaaacattgtccagaaatagaaataaaaattgttgatattaatgaagatagaattcgattatggaatagtaagaaccttaatgatctgcccgtttttgaacctggtttaggtgaaattataagagaagttagaaataagaatttatctttttctacaaatgtagatgattctataaaagaagcggatatgatttttatttctgtaaatactcctattaaaaaaaatggactaggagctggtgaaacaagtgatttaaggtggattgaatcatgtgcaagacaaataaataaaattgcaattgggcatactattgttgttgaaaaaagtaccttgcctgtaaaaactgctcagactataaaggagattttatttagctcagaaatacatgatagaacctttacagttttgtctaatcccgagtttcttgctgagggtacagcgattaaagatcttgagaatcctgatagggttttaataggaggagatgatgaagaatctatggaagagctaaagaaaatatatttaagatggattcctgataataaaattatttttacaaatttatggagtagcgagttgtccaagcttagtgctaacgcattcttagctcaacgcataagttctataaactcaatttctgcaatttgtgaatttactggggcaaatataaatgaggtctcaaatgctattggaaaagattcgcgaattggcagtaaatttttaagggcaggtcctggttttggaggaagttgttttaaaaaagacatattaaatcttgtttatctttcaaaattttatggtttaaatgaggtcgcaaattttggaa

SEQ ID NO: 205185 - DNA, 864 bp, Unknown
  Bacterial polypeptide expressing nucleotide sequence isolated from the Sargasso Sea
tatgttggtttagtaagcggcgtatgtttttctgatttaggaaacgaagttatatgcgtagataaagatttaaataaaataaataatttaaaaaattctatcatcccgatatatgagccaggtttagatgagttagttaaaaaaaattataagtctggcagattatcttttacaacaaatttatctaatgcagtaaaaagatcagatataatatttatttgcgtaggaacacctacaaaaaaaaatggtattgaagctgatttaagtcaaatctttaatgcctctaagaaaataagcaattatattacaaagtttaagattataattaacaagtcaacagttccagttacaacaggtgataaggttgaaaaaattatatcaaaaaaagttaaaaaaaaattgttttctgtagtatctaaccctgaatttttaagagaaggcgaagccattagagattttatttatcccgacagaatagtaattggtactgataataatagatcaaacaagattttaaagcagctatattcaccattaatttcaaaaggtgcaaaatatttaaatacttcaagaagagctgcagaattaattaaatacgcatcaaatgcttttttagctactaaaattacttatataaatgagatcgctaatatgtgcgaaaaactaaatgttaatgtagaagatgtttctatcggaatgggtttagacaaaagaattggtggcagatttctgagagcaggaccggcttatgggggatcttgttttccaaaagatactagagcaattctacatacagctaatgaaattaaatcaaatctttcattaattaaatcagtaataaaatctaatgataatcgttccaaa

SEQ ID NO: 205186 - DNA, 226 bp, Unknown
  Bacterial polypeptide expressing nucleotide sequence isolated from the Sargasso Sea
atgaaaatttgcatgataggaacaggttatgtaggtctggtttctggaacttgctttgcagaattaggaaatcaagtaatttgtactgatataaataaaattaaaataggcaaactaaatgaatgtgtaatacctatttatgaacctggtcttgaggaattggttaaaagaaattttaagcaaggaagattgaaattctcttctgatatttcttcatcaattaaaa

SEQ ID NO: 205187 - DNA, 256 bp, Unknown
  Bacterial polypeptide expressing nucleotide sequence isolated from the Sargasso Sea
tatgaaattatgtatgataggtacaggttatgttggtcttgtcagcggagtttgtttctctgatttaggaaatacagtttactgtgtggataaagatcaaaataaaattgaattattaaataaaggaactgttccaatatatgaacctggtctagaagaaattttaaaaagaaactataaagaaaaaaggttaatatttactactgatttaaaaaaagctgtttctaattcagatattatatttatttgtgttgga

SEQ ID NO: 205188 - DNA, 410 bp, Unknown
  Bacterial polypeptide expressing nucleotide sequence isolated from the Sargasso Sea
catgaaactttgtatgataggtactggatatgttggtttggttagcggcacatgcttctctgatttaggaaataaagttatttgtgttgatattgataaaaataaaattaacaagctaaactctggaataattcctatatatgaacccgggttagatgaattggtgaaaaaaaattttaatcaaaaaagattatcattttctactgatataaattcatctgttaaggaatcggatattatttttatatgtgtaggtactcctactaaaaaaaaatctaacatggctaatttaaactatgtttataatgcagcaaaattaatagcatccaatataaataaatataaaattatagtaactaaatctacagttccagttacaacaggtgataaaattgaaaaaataattaaac

SEQ ID NO: 205189 - DNA, 686 bp, Unknown
  Bacterial polypeptide expressing nucleotide sequence isolated from the Sargasso Sea
tttgccggtacgtactgcagaggccatggctagaattcttgagtctggaaacagtacaaccaatttttcagttgtttctaatccagaatttttagctgaaggaacggctataaaggatttggcaaatccagaccgagtcttgataggcggagaagagaacgaaaatggacataaagcagcaaatacagtggcagatctttatgcccactgggttcctcgagaacgtattttacttacaagtgtctggagcagtgaactttcaaaactcgttgctaatgctatgctagcgcagcgcatatcttctgtaaacagtatctctgcgctttgcgaacgtacggaagcagacattacggaagtttccagggcaattggcatggatactagaatcggcgctaaatttttacaagccagtattggttttggaggttcatgttttcgcaaggacattttgcatctgtcatatctttgtgaattttatggacttccggaagttgctgattactgggccagcgttgtacgcataaatgaatggcaaactaatcggttttttcagaatattctacatgaattatttaatactttggcaggcaagacaattaccatgttgggatttgcttttaagcaggatacaggtgacacgcgtgattctcctgcaattaccttatgtgaaagactagtaggagaaa

SEQ ID NO: 205190 - DNA, 374 bp, Unknown
  Bacterial polypeptide expressing nucleotide sequence isolated from the Sargasso Sea
tatgaaaatttgtatgattggatctggttatgttggtctcgtaagtggagcctgcttttcagatttgggtaatatagtaacatgtgtagatattaatcaagaaataataagtaaattaaataaaggaattattcctatttacgagcctggtttacatgaattaattataagaaatttaaaacaaaagagactttttttttcaactgatatttctaatagcataaaaaaatctgatattatatttatatgtgtaggcactcctacaaaaaaaaataaagctgttttaaagtatgtctataaagtagttaaaaatatcaaatctaatcttaataagtataaaattatagttactaaatctacagtgccagtgagta

SEQ ID NO: 205191 - DNA, 637 bp, Unknown
  Bacterial polypeptide expressing nucleotide sequence isolated from the Sargasso Sea
atgaagttagtattagttggaacaggttatgttgggcttgtatcaggctcttgttttgctgagtttggatatgaagtaatctgcgtagataaagataaatctagaatttcagaattaaaaaaaggaaaatgtcctttttttgaacccggaatgaaagaattattattaaaacatagaaaccaaactaaactactgagttttacgacatctttgcctgaagccatggaaggtgctgacataatatttattacagtaggcacaccatctaaaagattagaagaagaagcagacttaagtgctgtatggaatgttgcaaaagatatagcttacaatataaaaaaatactgtttagttgtaactaaatcaactgttcctgtgggaactactaaagagattaaaaaaattatatcaaaaattgtaactaaagaaaattttgatgttgtttctaacccagaatttcttagagaggggtctgctataaatgattttatgcgtccagatcgtataatcataggaactgataatgaaaaatcaacaaaaattatgaaagaattatatcgtccattatatttattagaaactcctattattacttcatctatagaatcttcagaaaataataaaatatgcctctaat

SEQ ID NO: 205192 - DNA, 214 bp, Unknown
  Bacterial polypeptide expressing nucleotide sequence isolated from the Sargasso Sea
aatgaatattacaataattgggtgtggatatgtagggcttgtctctggcacttgtttttctgaatttggtgctgatgtatcatgttacgatattgataaagatagaattgaaaaattatctaatggagagattccgatatatgagcctggtttagataatttagtaaaaaaaaatataaaaacaaggaagattaaaattcacatctcaaattga

SEQ ID NO: 205193 - DNA, 481 bp, Unknown
  Bacterial polypeptide expressing nucleotide sequence isolated from the Sargasso Sea
tgaaggtgttggcttagacccgcgcattggtaatcactacaacaaccctagttttggttacggtggctactgcttacctaaagataccaagcagctactagctaactacagtgaagtgccgaacaacatgatacaggccattgtagatgctaaccgtacgcgtaaagactttattgccgattcaatagtaagccgtaagcctaaaattgtaggcatttatcggcttatcatgaagtcaggttctgataacttccgtgcaagtgcgattcaaggcatcatgaagcgtattaaggcgaaaggtattgaagtggtagtttacgagccagtgcttaaggaagaagatttctttaattcacgcgtagtaaacgacttagaagagtttaagaaaatctctgacgtaatcgtagcaaaccgtgtaacgggcgatatcgaagacgtactagataaagtatacagtcgcgacctgttcaacgcggactaa

SEQ ID NO: 205194 - DNA, 888 bp, Unknown
  Bacterial polypeptide expressing nucleotide sequence isolated from the Sargasso Sea
ttttctgatttaggaaatgaagttatatgtgtagataaagataatcaaaaaattgaaaatttaaaaaaaggaattgtaccaatttatgaaccaggattaaatgaattagtaaaaaaaaattttaaagctaaaagactttcattcactactgatatatctgaagcaattaaaaaatctaatataatttttgtttgtgttggtactcctactaagaaaaatagttatgctgctgatttaagccaagtttttactgttgcaaaaataattgctaaaaatattaaatcacataaaattattataaataaatccactgtaccagtaacaacaggtgatcaggtagagaatataatttcaaaaaaagtttctaaaaagttattttcagtagtatcaaaccctgaatttttaagagaaggagaagcaataagagattttatatatcctgatagaattgttattggaacctcaaataaaaaaattaataatatattaaaatcactctatgcccctttaatatccaaaggtgccaaatatgttaatacatcaagaagaggtgctgaactaattaagtatgcttctaatgcttttttagctacaaaaatatcatttataaacgaaattgctaatttatgcgaaaaaatcaatgtaaatgttgaggatgtttcaattggaatgggtcttgataaacgtattggtggaaggtttttaagagcaggcccagcttatggagggtcgtgttttcccaaggatacaagagctattttagatactgctataaaatttaaaacagacttatcaatagttaaaagtgtaattaagtcaaatagcaaaagatcaaaattgctactaaatagagttttaaaacttttgaataataaaattagaaataaa

SEQ ID NO: 205195 - DNA, 912 bp, Unknown
  Bacterial polypeptide expressing nucleotide sequence isolated from the Sargasso Sea
aagattaatgagtcgtactcaaatgctgattatataattattgcaactccaactgactatgatatcgaaagtggagaatttgatacatcaacaatagaaaaaactctttctgatattttaaaaataaataaatcgtcaacaataataataaaatccacaataccacttggctatactgaaaagttaagaaataagttttcatatactgatatttatttttctcctgaatttcttagagaaggtcacgctttatatgataatttatatccctcgcgaattgtgatgggaggaacaaatgcacaatctaagacgttttcaaatatactttcagagttagcgttaaaagataagaatgaaattagtcaatattttatgagttctacagaagctgaggcagtgaaattatttgcgaacacacatcttgcaatgagaatagctttttttaatgaattggatagctattgtgaaaagtataatatttctacacgtaaagttatagaaggagtaagctctgatcctcgaataggtaatttttataacaatccgtcatttggttatggtggatactgtctaccaaaagatactatgcaattacttaaaaactatgaaaaggttccaaataatcttattaaagcaatagtagatgcaaactctacaagaaaagattttatttctgagagtatcatatcaaaaaaccctgagattgtaggaatctacagactgattatgaaagagggttcagataactttagaacaagtgcaattcaaggagtaatgaaaagaataaagtctaaaggtattaaaataatcatatatgaacctctttgtcataaaaaacttttttttaattctgaggttattaatgatatacagaaattcaaaaaaaatagcactattataatgctaaccgaa

SEQ ID NO: 205196 - DNA, 892 bp, Unknown
  Bacterial polypeptide expressing nucleotide sequence isolated from the Sargasso Sea
tattctacaaaaacgcaccaatttgacacttcggtagttgaatcttctattaaagctgcattaaaagttaataaaagagcgattatctttatcaaatctacaatacctgtaggctttactgataaactaagaaggaagttaaaatatgaaaatatttatttttcaccagaatttttacgtgagggaagtgcgattctagataataaaaaaccatcgcgaataattgtcggtggatttacaaaacaagcaaaaaaatttggtaagttactgttaagtataacagtaaataaaaatgtacctgtagaatttatgaattctaaagatgcagaggcagttaagctattttccaatacctatcttgcccttcgcattgcattttttaatgagctagatacttattgtgagacaaaagatttgaatgctaaaaatgttattaaaggaattggacttgatagtaggattggtaatttttacaacaatccatcatttggttacggaggttattgtttgccaaaagatacacagcaacttcttaaaaattatgagaatgttcccaataatataatcaaagctactgttcaagcaaacacaacacgaaaacaattcatagccgataaagttatacaaaagaaaccaagtgtggttggtatttatagattagcaatgaaggaaggatctgacaattttagagagagtgctgttcagggtgttatgaaaaggataaaagctaaaggtataaaagtaattatttacgagcctaattataaaaaagacaagttctttatgtcagatgtaatacaagatctaaaatattttaagaatgtatccgatataattttagctaaccggtttcataaagatttaaaaaatgtgaagtctaaagtatattcaa

SEQ ID NO: 205197 - DNA, 739 bp, Unknown
  Bacterial polypeptide expressing nucleotide sequence isolated from the Sargasso Sea
atgataggtacgggttatgttggattagtaagcggtgtttgcttttctgatgctggaaataaagtgtactgtgttgacaataataaaaaaaaaattgatttattaaataaaggaattgttccaatctttgaacctggtttagaggaaatcttaaaaaaaaatcaaaaacaaaaaagactaatttttacaactgacctaaaagaagcagtaaaaaattctgacataatttttatttgtgtaggtactcctacaaaaaaaaatagtaattcagctgatttaagatatgtccttcaagttgcaaaccagttaaaaaaaattataaaaaaatataagattgtaattatgaaatctacagttcccgtaacaaccggtgataaaattgaaaaaattttaaataaattgaaaaataaaaatttagtagatgtagtatcaaatccagaatttttaagagaaggggaagctataagagattttatttttccagatagggtgataattggcactgacagcaaaaaagcaaacaatatattaaaatctctttatttacctataatcaaaaaaactaatagatattttaatacgtctcgtagaagtgcagaattaattaaatatgcttcaaatgcttttctagcaactaaaattacttttataaacgaactagcaaatctatcagaaaaaactggcgtagatattaaagatatatctttgggaatgggctctgatcaacgtattggagaaa

SEQ ID NO: 205198 - DNA, 812 bp, Unknown
  Bacterial polypeptide expressing nucleotide sequence isolated from the Sargasso Sea
ttatgttggtctagtaagtggctcttgttttgctgatttaggtaacaaagtatggtgcgtggataatgataaaaataaaatagaaaaattaaaaaattcaatttctccaatttatgagccaggtttagatgatttaattcgaaataattatagatcaaaaagattaatttttacagataacttagaaaaagctgttaaggaggcacaaataattttcatttgtgttggcacaccaactaaaaagaattcaaatttggttgatctaagccaggtatataaagttgctaaaactatatctaagtatattaaaaattataaaatcattgttaccaaatctacagtcccagttacaaccggtgatcaaattgaaaaaataattagaaaaagagtaaaaagaaatctatttgacgttatatcaaatccagagtttttaagggagggagaggcaataagagattttaaatatccagacagaattataattggttctaataataaaaaagtttttaaaaagatgaaagttctgtatgaacctttgattaaaaagggagctaaatatttttgtgcttctagaaaagcagctgaattaataaaatatgcttctaatgcttttttagctacaaaaataagctttataaatgaaatagctaacttgtgtgagactgtgggtataaacgtggaggatgtatctgttggtattggttctgacgctagaattggaagtagatttttaagggcaggaccagcatacggtggctcttgttttccaaaagatacaaaaggcttagtttcaacaggagataaatttaaaa

SEQ ID NO: 205199 - DNA, 876 bp, Unknown
  Bacterial polypeptide expressing nucleotide sequence isolated from the Sargasso Sea
tgttggtttagtcagtggagtttgtttttcagatttaggtaatgatgtaatatgtgttgataaagatattaataaaattaataatttgaaaaatggcataataccaatttatgaaccgggtctagaagagttagttttaaaaaattataagaataaaagattaaatttttcaacaaatataaaagactctgtaagaaaatcagatatcatatttatctgtgtagggaccccaacaaaaaaaaatggtaatagtgcagatttaagtcaagtatatgcggctggaaatgaaatatcaaaatctataaataaatttaaaattataataaataaatctacagtacctgttactacaggtgatgaacttgaaaagattatatcaaaaaaagtaaataaaaaatatttttcagtagtttctaatcctgaatttttgagagaaggtgaggctattagagattttatctatccagacagaatagtagtaggatctaatgatgataaatctcaaaaaatactaaaaaatttatattcaccattaatttctaaaggtgcaaaatttatttccacaaaaagaagagctgctgaattgataaaatatgcttctaatgctttcctagcaacgaaaattacctttataaatgaaattgcaaacttatgtgaaaaaacaggtattgacgtcgaagatatctcaattggtattgggcttgataaaagaattggtagcagatttttaagagctggtccttcatatggtggatcttgtttcccaaaagatactaaagccatagtttctactgctgaaaaatttaaaactaatttatcaattataaaaagcgttataagatctaatgatttaagatctgatttattatccaaaaa

SEQ ID NO: 205200 - DNA, 178 bp, Unknown
  Bacterial polypeptide expressing nucleotide sequence isolated from the Sargasso Sea
atgaaaatttgtattataggatctggatatgttggtttagttagtggtgcttgtttttctgacttaggtaatacagttacatgtgttgatattaataaagaaattgtagaaaaattaaagaaaggaataataccaatttatgagcctggtcttcaagaattggtgaaagaaatttaaa

SEQ ID NO: 205201 - DNA, 937 bp, Unknown
  Bacterial polypeptide expressing nucleotide sequence isolated from the Sargasso Sea
gctgacagaaagaaaaaaaattacaatagtaggtgctggctatgtaggcatgtcaatcgcagcagctttggcagtaaaagaagatattctaattttagaaagcaataaagagaaaatcgataggataaactccggcaaacctagcattaatgattccgatattaattcattttgccatgaccaaagtctatccattaaagccacggaaaataaaaaagacgcatatcatgaagcagactttattattatttgtgttcccacagactttgatgaagaaagtgcttctttcgatactactattcttgaaagtgttctgaatgatgccattacaattaatagtaatgcattggtcataattagatctaccattccagttggttattcagaccaggcgagagaaaaacaccaaacaaaaaacattattttttctcctgaatttttgagagagcattccgccatgcatgatgtattaaatccatcaagaatcattgttggtaatgattcagaattatctactgattttgctgaactcatatcagagtcaaccgagaataaaccagagataattctaatgccatcttctgatgcagaagctgtaaagctcttttcgaatacttaccttgcgatgagagtggcattttttaatgaattagatacattctcaattgctaaaggcctatcaactaaaaatgttatcaaaggtgtttcagcggattatagaattgggatgaaatataataacccatcatttggatatggagggtattgccttccaaaagatactaagcagctcctagcaaattttgaagatcttcctcaaactattattcagtcagttatcagctcaaacgaggcaagaaagaaattcatgatcaatgaaattacaaagcattctccaaaagtagttggcatttataaactgaccaataatagaaat

SEQ ID NO: 205202 - DNA, 743 bp, Unknown
  Bacterial polypeptide expressing nucleotide sequence isolated from the Sargasso Sea
tatgaaattatgtatgataggtacgggttatgttggattagtaagcggtgtttgcttttctgatgctggaaataaagtgtactgtgttgacaataataaaaaaaaaattgatttattaaaaaaaggtattgttccaatctttgaacctggtctagaggaaatcttaaaaaaaaatcaaaaacaaaaaagactaatttttacaactgaccttaaagaagcagtaaaaaattctgatataatttttatttgtgtgggcaccccaacaaaaaaaaatagtaattcggctgatttaaaatatgtctttaaagttgcaaatgatttaaaaaaaattataaaaaaatacaagattgtagttatgaaatctactgttcctgtaactactggtgataaaattgaaaaaattttaagtaaattaaaaaataaaaatttagtagatgtggtatcaaatccagaatttttaagagaaggagaggctataagagactttatttttcctgacagggtaataattggtactgacagtaaaaaagcaaacaataaattaaaatctctttatttgcctataatcaaaaaaactagtagatactttagtacatctcgaagaagtgcagaattaattaagtatgcttcaaatgcttttctagcaactaaaattacttttataaacgaattagctaatttatctgaaaaaactggcgtagatattaaagatatatccttgggaatgggttctgatcaacgta

SEQ ID NO: 205203 - DNA, 225 bp, Unknown
  Bacterial polypeptide expressing nucleotide sequence isolated from the Sargasso Sea
tatgaaattgtgtatgattggaacaggttatgttggattagtaagtggagtttgtttttccgatttaggtaatgatgtaatatgtgttgataaagacattagaaaaattaacaatttaaaaaaaggtattattcctatttacgaaccaggtttagaagaattagttttaaaaaactataagaatgaaagattgagtttttcaacaaaccttaaagaatcagtaaa

SEQ ID NO: 205204 - DNA, 415 bp, Unknown
  Bacterial polypeptide expressing nucleotide sequence isolated from the Sargasso Sea
catgaaaataacaatgttaggaactggctatgttggattagtgtctggaacttgtttttctgagtttggttttgatgtatgttgtgtagacaaagacaaaaacaaaatcacaaacttaaaaaaaaatattatacctatctatgaaccgggtcttgagaatttagtaaaaaaaaacaaagatgctaatcggctcacttttagtaatgatgtaaaaaaaaatatagcagacgcagaaatagtatttattgcagtgggaacacctgcaagacggggtgacggttatgccgatttatcatatgtttatgaagctgcagaagaaatagcagaaaacttaatgggctacacagtaattgttaccaagtctacagtaccaaaagggacaggaaacaaaattaaaaaaattattaaaaaaaca

SEQ ID NO: 205205 - DNA, 619 bp, Unknown
  Bacterial polypeptide expressing nucleotide sequence isolated from the Sargasso Sea
actgacaaaaagaagaaaaattacagttgtcggagctggttatgtaggaatgtccattgcatcatcattggctagaaaagacgaaattctaattttagaaactaataaagataaaattcagagaattaattctgggaaatctagcattgatgatcccgatatcagtgcattttgcaatcagcatgatctaactataaaagccatagaaaaaaaagaggaagcatatcagggggcagattttattattatttgtgttcctactgattttaatgacaaaacctcatcttttgataccgatattcttgagggtgttataagtgatgctataagcaataataatgatgcattaatcataatcaaatctaccattccagtaggctatacaagccaagctagagaaaaatatcaaacaaaaaatattatcttttcacctgagtttctcagagagcattctgctatgaatgatgtattaaatccatcaagagtcattgttggaaatgactcagagttatcagctgattttgctgaactcatagcagagttaactgagaatgagcctgagataattctaatgccatcatctgatgcagaggcagttaagctcttttcgaatacttac

SEQ ID NO: 205206 - DNA, 394 bp, Unknown
  Bacterial polypeptide expressing nucleotide sequence isolated from the Sargasso Sea
aatgaaaaaaattacgattttaggtacaggctacgtagggcttgtaagcggagcagggatttctgactttggtcataaggtcacctgcgcagatatagctaaagataaaataaatctgttaaaaagtggagtcataccgatttatgaacctggccttgaagaattagtaaagaagaacgtagatgctaaaagactagcttttacttcaaatacagacttagctattcagaatgcagaagtagtttttattgcggtaggcacgcctgaaggcaaagatggggtggctgatatatcagcagtagaatctgttgccgcatccattggaaaaaacttaaatgaatataaagtaatgtgtacaaagagcacagtgcctgttggtactggtgaattgatt

SEQ ID NO: 205207 - DNA, 578 bp, Unknown
  Bacterial polypeptide expressing nucleotide sequence isolated from the Sargasso Sea
aatgaaaaaaataacagtagttggttcaggatatgtggggatgtcattatcagctcttttgagcagcaagcatgaagtacaagttttagatatagatgaaaaaaaagtaaaaaaaataaatcagaaaaagactacagttgctgatgttgatatagaaaaagtactaaaagacaaaaacctctcactttgcgcaaccctagataaaaaagaagcatataaagatgcagactttataattgtgtgtactccaacagactttgattcaaatgctaacagatttaatacaagcgttgtggataaagtaatatctgatgcaatagagcaaaatgataaagcgctgatagtaattaaatcaactctacccatcggccatacacaatacttacaaaagaaattcaaaactaagagaattatcttttcacctgaatttttaagagaaggtaaagcgctatttgataatttaaatcctactaggatcgtcataggaggagattgcgaatcatcaattaattttgctgagattctggaggattgttctaataagtctaatgttttaaaacttttcatgaatgcctctg

SEQ ID NO: 205208 - DNA, 900 bp, Unknown
  Bacterial polypeptide expressing nucleotide sequence isolated from the Sargasso Sea
cttctctaacgatatagaaaaaacgattaaagaatcagatattatttttatagcagttgggactcctcagaataataatggtgatgttgatttaaactatgttgaatcggtctctaaaacgatttccaaaaatttaaataaatataaaattatttgtactaaaagtactgttccagttggaacaggtaaattaattgaaaaaactttattaaagaataatgatagatctgatttcgactacgtatctaaccctgagtttttgagagaaggttcagccgttaaagattttttaataccagatagattagtaattggagcaagaaatgaaaaagctttttctattatgaaggaagtttatagaccattttttattaatgagacaccaatattaaatacttctgttgaaacggctgaattgattaaatatgcgtcgaatgcatttttagcattaaaaattagttatattaatgaaattgcgaatctatgtgaaacagttggtgcagatatacaccatgttgccaaggctatggggcaagatggtagaattagtgcaaagtttcttcatccaggaccaggttttggaggatcttgctttccaaaggatactatggcattagttaatatgggtaaaaaatttaatcatccggtcagaacagttgaagcagcaatagaagtaaataaaaaacaatttttaaggatgattaataaaatagatagcttattagataatcaaatttcaggtaaaaaaattgcaatcctaggtctttcttttaaacctcaaacagacgatataagggaagcgccctcaacaaaaataattcctaaattaattattaaaggtgcaaaaattaatgcttacgatcctgtagcaatagaaaattttagaactaattatccaga

SEQ ID NO: 205209 - DNA, 460 bp, Unknown
  Bacterial polypeptide expressing nucleotide sequence isolated from the Sargasso Sea
atgaaactatgtatgatcgggacaggctatgttggactcgtaagtggagtatgtttttctgatttaggtaatactgtttattgtgtagataaagataaagaaaaaattgatcatttaaataatggcaaaattccaatctacgagcccggtttagaagaaatattaaaaaaaaattttaagcaaaaaagattaatattcacaactgatttaaaaactgcagtaaataattctgatattatttttatatgcgtaggtacaccaactaaaaaaaatagcaattcagctgatctaaaatatgtttttcaagttgctaatgaattaaaaaaatgtatcaaaaaatataaaataataattaccaaatctactgttccagttacaactggtgataaaatcgaaaagattcttaaaaaattaaaaatgaaaaaattagtagatattgtttcaaatccagaattttaag

SEQ ID NO: 205210 - DNA, 460 bp, Unknown
  Bacterial polypeptide expressing nucleotide sequence isolated from the Sargasso Sea
atgaaaatatgcatgataggtacaggctatgttggtttagtgagcggaacctgttttgcagatcttggaaataaagtctattgtgttgataaagataaatctaaaataaacaaacttaaaaattctatttcaccaatatacgaacctggtttagaagatttaataaaaaataaccttagagcaaaaagacttatttttactgatgatttaaaaaaagcaatagaagactcgcaaataatttttatttgtgttggtacaccaacaaaaaaaggatcaaatttagttgatctttcacaagtatacagggttacaaaatcaatatctaaacacattaaaaattataaaatcatagtaacaaaatcaacagttccagttacaactggggaccagatagagagaataattagaaaaagagttaaaaaatctttatttgaagttgtatctaatcctgaattttaag

SEQ ID NO: 205211 - DNA, 898 bp, Unknown
  Bacterial polypeptide expressing nucleotide sequence isolated from the Sargasso Sea
aagaatagctcagtggaatagcaccgatttaaacaaattgcccgtatatgagcctggtttagctgaaataattgaaaaatgtagaggtttaaatcttaatttctcgacaaaagttactaagaacatttctgaagcagatatgatatttatttctgtcaatactcccacgaagagaaaaggaataggtgcaggaaaagctagtaatcttaagtggatagaaagctgcacgagagaaatatctaaatatgcaaaaggtgaaactatagttgttgaaaaaagcacattacccgtgagaacagcggaggtaataagtaatatattagaagttgcagataaatatgatagtaaatcaaatcctagaagctttacagttctctctaatccagaattcttagctgaaggtagtgcaataaatgatcttgagaatccagacagagttttaattggaggagataatgaagattccatccaagctttaatagaaatctatttaaattgggttaatcctgacaaaatcttaactactgatttatggagttctgaattagcaaaattaacctctaacgcttttctagctcaaagaataagttccataaactcaatctcttcattatgtgaggcaactggagctgatattaaagatgtttcattggctgtagggaaagattcaagaattggagataaatttcttaatgctgggcctggatttggaggaagttgctttaaaaaagatatattaaatcttgtttatatttgcgattattatggattaaaagaagttgcattatattggcaaaaggtagtagatataaatagttggcagcaaaaaagaatcacagaaatagttgttgaaaagctttttaaaaatctctctgggaagaaaatcgcgatactaggt

SEQ ID NO: 205212 - DNA, 818 bp, Unknown
  Bacterial polypeptide expressing nucleotide sequence isolated from the Sargasso Sea
tattatcaggaaatgtagggggcaaaatttatttttctcttcagatatagaaacaaaaatagcttctgcagatatggtatttatctctgtaaatactcctacaaaaaaaaaaggaattggagcaggtaaagcaagtgatctcagatgggtagaagaatgtgcaagaacagtagcaaagttttcaactggtcataccatagtagttgagaaaagtacactcccagtaaaaactgctgagacaattaaatcgattttaaaaactgctaataactcaaaaaattctaatcatgctacttttgatgtgctatctaatccagagtttttagcagaaggttcggctattaatgatcttgaaaatcccgatagagttcttattggaggagaaaatcaagactcaatagccgcattaagtaatatctataagaattgggttccagagaataaaatattacaaacaaatatttggagcagtgaattagcaaaacttacagctaatgcttttttagcgcaaagaataagttccattaactctataggggcattgtgtgaggcgactggggccgatgttagagaagttgcaagagctataggaacagattctaggataggctcaagatttctagactcaggaccaggatttggaggaagctgttttaaaaaagatatacttaatcttgtttatttatctacatattttgggttgccagaagttgcttgtttttgggaagaggtagtcaaattaaataactggcatcaacatcgaatatctaatttagtagtaaaaaaactttttggaactataactgggaaaaaaattg

SEQ ID NO: 205213 - DNA, 788 bp, Unknown
  Bacterial polypeptide expressing nucleotide sequence isolated from the Sargasso Sea
tctggaggcgccggaccgggtgctgatcggaggcgacgatgcagcatcgatcgaggccttagcggcggtctacagccactgggtgcccgagtcgcagatcctgcgcaccaatctctggagcagtgaactgtccaagctcacggccaatgcttttctggcgcagcgaattagttcgatcaattccgtggcggcgctctgcgaggccaccggcgctgatgtgcgggaggtggctcgggcgatcggtaccgacagccgcatcggtccgaagtttctcaatgccggcccaggcttcggcggcagctgcttccagaaggacatcctcaacctggtgtatctctgccgccatttcggcttgcctgaggtggccgactactgggaatcggtggtggcgttgaacacctggcagcagcaccggatcgcccggttggtggtgcagaagctgttcggcacggtgacgggcaagcgtctggcggtgctggggtttgccttcaaggcagacaccaacgacacccgcgaggcgccggcgatccggatctgcggtgatctgttggaggagggagcccagctggcaatccatgaccccaaggtggaacccgcccagatggcctccgatctgaagcaggaggaggcaccgacggcggatgccctcagcgggaccggcagctgggcgctggcggagtccgtggaggaggccgtcattggggccgatgcagtgctgatcctgacggagtggaacgactaccggcagttgaactgggctgagctggcgaaacggatgcgaaaaccgg

SEQ ID NO: 205214 - DNA, 791 bp, Unknown
  Bacterial polypeptide expressing nucleotide sequence isolated from the Sargasso Sea
gttgatattaataagagaaattataaaaaaattgaataaaggaacaatacccatttatgaacctggtcttcaagaattggttgtaagaaatttaaaaaaaaaaagacttttatttacaaccgatatttctagctcaataaaaaagtcagatatcatatttatttgtgttggaactcctaccaaaaataataaagctgatttgaaatatgtatttaatgttaccaaaagtataaaatctaatctaaataggtataaaataatagttactaaatctacagttccagtgactacaggtgataaaataacaaaaatcttaaaatcaaataaaaataaaaataagtttgatgttgtatccaatcctgaatttttaagagaaggtgaagctattcgagattttcaatttccagatagagttattgtcggtactagcagcaataaagcaaataaaattatgaaaaaattatatctacctttaattaaaaaaggtggaagatattttcacacttctagacgatcagcagaactaattaaatatgcatcaaacgcttttttagcaactaaaattacatttattaatgaaatagccaatttatgtgaaaaatcaaacatagacgttaaagaagttgcaattggcatgggtctagatgaaaggattggaagcagatttctacgagctggcccagcctatggtggatcatgttttccaaaggatacaagggcacttgtttcaactggtcgaatatttaaaacaaatctttcagttgtaaaatcagtaattaattcaaatgata

SEQ ID NO: 205215 - DNA, 807 bp, Unknown
  Bacterial polypeptide expressing nucleotide sequence isolated from the Sargasso Sea
ttccccaatctatgaaccaggattagatgaattaataaaaaaaaattttacagctaaacgtctcacattcactacaaatattgatagtgctataaacacatcagacataatttttatatgtgtaggtacgcctacaagaaaagggtcaataaaagttgatttatcttttgtttataaatgcacaaaagaaatattaaaattttcaaaaagaaaaaaaattattgtaacaaaatctactgtaccagtaggaacaggcgatgagattgaaaaaattgtaaaaagaaagaaaaaactttttacagtaatttctaatcctgaatttttgcgagagggtgaagcaataagagatttcagatacccagatagaattgtaattggatctgacgaaaaaaaagcctttaatattatgaaaaaactttatacaccattaactaacaaaggctcaaaattttttactacttcaagaagaggagctgaattaattaagtatgcatcaaacgcttttcttgcaaccaaaattacttttattaatgaacttgctaacttatgtgaaaagtctggagtaaatatagaggatatttcattaggtatgggctctgatagtagaataggtggtaggtttttacgtgctggcccagcttatggaggatcgtgttttccaaaagataccaaaggtcttgtgtctgctgcagagaaatataaaataaatctatcagttgtaaaatcagtaattaaatctaaccaagaaagagtgagtttacttacccaaagaattcataaaattttaggttcaaatataagaaataa

SEQ ID NO: 205216 - DNA, 880 bp, Unknown
  Bacterial polypeptide expressing nucleotide sequence isolated from the Sargasso Sea
attggtgtagataaagataaagataaaatagattttcttaataaaggtaagatacctatctacgaacctggactagatgaattaataaaaaaaaattttaaacaaaaaagattattttttacaacagatttgaaacttgctgtacaaaagtcagatattatttttatatgtgtcggcactccaacaaataaaaatagcgattcagcaaacttaaagtatgtatttcaagtagcaaatgaattaaaaaaaattattaaaaaatataaaattatagtaacaaaatctactgtaccagttaccactggtgataaaattgaaaaaattttaattaaacttaaaagaaaaaaattagttgatatagtttctaatcctgaatttttgagagagggtgaggcaataagagattttgtttatccagatagagttgtaattggaaccaatagtaaaaaagccaacaaaataattaaaaatttatacttacctataattaaaaaaaatagccgataccttcaaacttctagaagaggagcagaattaattaaatatgcatctaattctttcttagcaactaaaatttcttttataaatgagcttgctaatttatgtgaaaaaacgaatgtagatataaaagatatttcaaacggaatgggtttagatcaacgtataggagatcgttttttaagagcaggacccgcatatggaggatcatgttttccgaaagataccagagctttaattgatacagccactaaatataaaatagatttatcaattgtaaaaagtacaattaaatcaaataatttaagaaaaattcaattaacaaaaaagattgaaaaaattttaaataataaagtcaaaaataaaaagataacttttttag

SEQ ID NO: 205217 - DNA, 334 bp, Unknown
  Bacterial polypeptide expressing nucleotide sequence isolated from the Sargasso Sea
tatgaaaatctgtattttaggaactggttatgttggtttagtaagtggtgcttgtttttctgatataggaaataaagttatatgtgttgacacagataaaagaaaaattaataatcttaataacggtgttatcccaatttatgaacctggcctagaagacctggtgataaaaaataaaaaacaaaatagactttttttttcaacggatattaataattcaataaaaaaatcagatataatatttatttgtgtaggaactcctacaaaaaataataaggctgatttaaaaaatgtttttaagtcaattaataatattaaaaaaaatttgaataag

SEQ ID NO: 205218 - DNA, 427 bp, Unknown
  Bacterial polypeptide expressing nucleotide sequence isolated from the Sargasso Sea
atgaaattatgtatgataggaactggctatgtaggattagttagtggtgtatgttttgcagatttaggtaatgaagttatttgtgtagataaagatttaaataagattaattctcttaaaaaaggaaaagttccaatttatgaacctggactttcggaattagtaattaaaaactatagaaacaaaagattaaatttttcaacagatttaaaaaaatctgtcaaagattctgacataattttcatttgcgttggaacgcctacaaaaaaaaaagagaactcagcagatttgagtcaaatctacaatgtaattaaagaaataagtacttcaattaaaagttttaaaattattataacgaaatcaactgtcccggtaaccacaggtgatgaaattgaaaaaattctttcaagaaaaaacaacaaaaaaa

SEQ ID NO: 205219 - DNA, 349 bp, Unknown
  Bacterial polypeptide expressing nucleotide sequence isolated from the Sargasso Sea
atgaagctatgcatgattggtactggttatgtgggtttagtaagtggagtgtgcttttctgacctgggaaatgatgtgatttgtgtagacaaagataaaaataaaattgatttacttcagagaggaaaagttccaatttatgaacctggattatctgaattagtggtaaaaaattttaaaaacaaaagattatcattttcaacaaatttacaaaaatctattaaagactctgatataattttcatttgtgttggtactccaacaaaaaaaggtggaagttctgcagatttaagtcagatttataaggtagctaaagaaattgcctcatcaataaataaatttaagatta

SEQ ID NO: 205220 - DNA, 196 bp, Unknown
  Bacterial polypeptide expressing nucleotide sequence isolated from the Sargasso Sea
tatgaaattatgtatgattggaactggttatgtgggtttagtgagtggtgtctgcttttcggatttgggtaatgatgttatttgtgttgataaggatcaaaataaaattaattcacttcaaaaaggcaaaatcccaatttatgaacctgggttatctgaattggtattaaaaaattttagaaatggaagattatct

SEQ ID NO: 205221 - DNA, 656 bp, Unknown
  Bacterial polypeptide expressing nucleotide sequence isolated from the Sargasso Sea
aatgaaattagttattgttggtacgggttatgtaggtcttgtcagcggtgcctgctttgctgagtttggatatcaaactatatgcgtggataaggacaaagacagaattgaaagtctcaattctggaaaatgtccattttttgaacctggaatggatgatttactatataagcatcttaagatttcaaaactgctatctttttcatcttcattaagtgactctataaaagatgcagatataattttcatcactgtaggaacccctaatagaagattggaggacgacgctgatttaacttctgtttggtcagtagcagaagaaatcagtgaaaatattaaacattattgtcttgttgtcacaaaatcaacagtgcctattggcacatctgatgaaataaaaaaaattatcgaaaaaaaaatttctaaagataattttgatgtagtttctaaccctgaatttctaagagaaggatcagcaataaaagattttatgcatcctgatagagtggttattggcactgaaaatcaaagatcagaaaatataatgaaaaaactttacaatccattaattataaaaaaaacacctattatatttacttcaataaaatcttctgaaattataaaatatgcttcaaatagttttttagctacaaaaa

SEQ ID NO: 205222 - DNA, 823 bp, Unknown
  Bacterial polypeptide expressing nucleotide sequence isolated from the Sargasso Sea
ataatcaaatctactattccagtaggctatacaagccaagctagagaaaaataccaaacaaaaaatattatcttttctcccgagtttcttagagagcattctgctttgcatgatgtattaaatccatcaagaattattgttggaaatgactcagagttatcaactgattttgctgaacacatatcagaatcaactgagaatgagtctgagataattctaatgccttcttctgatgcagaggcagtcaagctcttttcgaatacctaccttgcaatgagagtcgcgttttttaatgaattggatacattttcaattgctaaagagatatcaactgaaaatgttattaagggtgtttcgacagatccaagaatagggaagcaatacaataatccttcattcggatatggtggttattgcttaccaaaagatgccaagcagctgctcgcaaattttgaagaccttcctcaaaccattatccagtcagtgattagctcaaatgaggcaagaaaaaatttcatcatcgaagaaatcaaaaagcttcgtccagaagtagttggtatttataaacttgccagtaatccgaaggtcaaaaattttagaagttcagaaatgctagatattatcactggtttatcaaactattttgatgatttgattatctttgagccattaataagtgaaaaggattatatgggttttaaggtaataaatgacatcgatatatttaagaaagaatccgatttaattgtgacaaatagaaaatgtgatcaactgaatgatgtatctgaaaagttatattgcagagatatttttagaggatgat

SEQ ID NO: 205223 - DNA, 211 bp, Unknown
  Bacterial polypeptide expressing nucleotide sequence isolated from the Sargasso Sea
atgaagctatgcatgataggaacaggatatgtaggattagttagtggtgtatgttttgctgatcttggaaatgatgttatttgtgttgataaagatgttaagaaaattaattcacttacaaagggaaatattccaatttatgaacctggattatcagaattagtcgtaaagaattataaaaataaaagattatctttttcaactgattaaa

SEQ ID NO: 205224 - DNA, 1003 bp, Unknown
  Bacterial polypeptide expressing nucleotide sequence isolated from the Sargasso Sea
cgatgtgatctttattgccgtcggcacgccgccacgggaaagtgacgggcatgcggatctgacctttgtttatgatgtggcgcgtgcggtggcacgttgtctggacggctataaggtgattgtcacgaaatcgactgtgccggttggaacggcctgcgaggtggagcgtattatccgtgaagaaaatccggatgctgattttgacgttgtgtcgaacccagaatttttgcgcgaaggggcggcaatcggcgattttatgcgccctgatcgtgtggtcgtcggcacacaatctgcccgtgcacagcaagtgctggagacagtctatcgcccgctttatctgaatgaaacaccgattgtatttaccagccgtgaaacggccgagatcaccaaatatgcggccaatgcgtttttagcgacaaagatcacattcatgaacgaaattgcggatttgtgcgaagccgcaggcggcaatgtgcaggaagttgcgcgtgcgctggggcttgatggccggatcagtgggaaattcctgcatgccggtccgggttttggcgggtcgtgcttcccgaaagatacgctggcattggcgcaaaccgggcagaagctcggggcaccgcagaaaattgttgaatcggttgtctctgtgaacgaagaccgcaaaatccgtatggccgaaaaagtcattaaggcgtgcggcgggtcggttgacggtaagaagatcggcgttctcggtgtagcgttcaaaccgaaaacagacgatgtgcgtgatgcgccgtcgcttaaaattatcccgcatttacagcaggcaggtggtcgtatcgcggcctatgatcccgaagcgatggatgaagccgccaagcatctctcagatgttgactggcaggataatgcctatgccgtggccgaggatgcggatgtgctggttatcattacggaatggaacgcgttccgcgcgcttgatctgtctgtcctgaaagagcgcatggctacgcccgctgatcgttga

SEQ ID NO: 205225 - DNA, 442 bp, Unknown
  Bacterial polypeptide expressing nucleotide sequence isolated from the Sargasso Sea
atgaaactgtgcatgataggaactggatatgttggtcttgttagtggagtttgtttttctgatttaggtaacaccgtatattgtgttgataataataaagaaaaaattaagtcactaaataattgtgttgttccaatatatgaaccaggacttgaggagatcttaaaaagaaactataagaaaaaaagattaatttttacaactgatataaaaaaagctgtcttaaactctgatgttatattcatttgtgtaggcactcctacaaaaaaaaatgctaattctgctgatttaagatatgtattttcagttactcgaaaattaaaaaaaattatatccaaatataaaattataataacaaaatctacagtcccagttacaactggagataaaattgagaaaattttaagtactttaaaaaaaaagaaattagtagatgtagttt

SEQ ID NO: 205226 - DNA, 825 bp, Unknown
  Bacterial polypeptide expressing nucleotide sequence isolated from the Sargasso Sea
atcaaatccagagtttcttgcagagggtacagcaattaatgatttaattaatccagatagggttctaattggaggcgataacactaaaaatggtaaaaaagcaatagaagagatatttaatatatataatcactggattgattctgaaaaaatattaacaacaaactcgtggtcatctgaattatcaaaattagcatccaatgcatttcttgctcaacgaatttcatctattaatagtttatcattattatgtgatgtttcaggagctaatattaaagaagtttcaaaagcagttggtgcagactcaagaattggagataaatttttaaatgcttcagttgggtttggtgggtcctgctttaaaaaagatattttgaatctcgtttacttatgtaagcactatggattggaggaggtttcagattattggagtcaagtgctaaaaataaattcatatcagaaatatagattttctaaaagaattattgatgagtttaatggtaatattcgttccaagaatataactattcttggatgggcctttaaaaaggatacaaatgatagtcgagaatctgcagcaatagatattgcaaatacgtttttgaaaaatagatgcataataaaaatatatgatcctatggtttcaaaagaaagaatatatcaagatctaaagaatacaaataaaattgaagattataagagcataattaaaagagtcgaaatatttgataatctttatgatgcatcaaagaattcagattgcattacaatattgactgagtgggatgagtttaaaaatatagattggaataaaataaaaaaatt

SEQ ID NO: 205227 - DNA, 577 bp, Unknown
  Bacterial polypeptide expressing nucleotide sequence isolated from the Sargasso Sea
atgagaatttgtatgattgggaccggatatgttggattagtaagcggaacatgttttgccgacttaggaaataaagtttactgtatagacaaagataatgaaaaaataaaaaaattaaactctggtatatctcctatatttgaacctggtttaaacgaaattttaaaaaaaaactttaatgctggaagactaattttttcgactgacttaaaagaagcagtaaacaattcagacataatttttatttgcgtaggaactcctactaaaaaaggatcacattctgtggatttgaagtatgttttcaaagcagttaaagaaatagcaaaagtttctaaaagaaaaaaaataattgtaaataaatcaaccgttccagtaggcactggcgataaagtagaaaagattctaaaaaaattaaaaaaaagaaaatttgatataatatctaatccagaatttttaagagaaggtgaggctataagagattttagatatcctgatagaattgtaattggttcagataataaaaaagttttttctgttatgagaaaactttatcaacccattaattatgaaaggagct

SEQ ID NO: 205228 - DNA, 799 bp, Unknown
  Bacterial polypeptide expressing nucleotide sequence isolated from the Sargasso Sea
gattatgattttgttttattatgcctgccaactgattatgactatgattctaatgaattagatacaagtgtaattgagagttatattgagttttttattaataattcgaattcaaaaataataattaaatcaacaatccctattggatttactcaatcacaactagaaagacataattctgaaagaatttcattttcaccagaatttctccgagaaggaagctctttggacgatgttatgaatccatcgagagtaatatatggaccaagaaattccagctctaatgaatttaatgaaattattaaagaatcatacaaaaacagctcttacgaaacaaggtttatgcactctagtgaggctgaagctgtaaagttattctcaaatacatatttagcacttcgtgtcgcattttttaatgaattagacaatttttcaataaaagaagatctcaatactgagaacataattaagggtatttgtgatgatgaaaggataggcatgtattacaacaatccatcttttggttttggaggatattgtcttccaaaagattcaaaagaactttcaagttttctttctaaaaaagatattcctgctaatttaatcaaaacaataaatcattccaaccttgagcggaagaaatttatctcacaagatattcttataaataatcctgaggttataggaatctacaggattagcatgaaagcaaattcaactaactttagatattcatctactatagatataatagattcgctaaaaaatgaaaatgttaaagtaatgatatacgagcctc

SEQ ID NO: 205229 - DNA, 844 bp, Unknown
  Bacterial polypeptide expressing nucleotide sequence isolated from the Sargasso Sea
attaaaaaaacaaaattaatttctttttcatcaaaaatagaaaataatttagattatacagatataatttttattaccgtaggaactccaacaagaagattagaggatgaggccgatttaagttttgtatggcaagttgctgaagaaattgcaaataatattaataaatattgtttagtagttactaagtccactgttccagttggaactacaagggaagtaaaaaagattatttcaaaaaaaattgatcaaaatctttttgatgtagtatccaatccagaatttcttcgagagggatctgccattaatgattttataagaccagatagagttgttattggaacagaaaataaaaaatctgaaaatatgatgaaggaactttatagacctttatttcttaaagaaacgccaattgtagctacttctattgaaacttcagaaataattaaatatgcatctaatagctttctagcaacaaaaatagctttcattaatgaggttgctgatttgtgcgaagttgtaggcgctgatgttcagcaagtagcatatgcgatgggcattgataaaagaattggatctaagtttttgaatgctggacctggatttggcggttcgtgttttccaaaggatgtaaaagcttttgcttcaacagctaaaaagaaaaacattgatctatcaatagttaatgccgtgaataaatcaaatcaagatcgtataaataaaatttcaaataaaattatttcaaaaataaaaaataattctactgttacttttcttggtttaagctttaaacctaatactgatgacgtaagagattctacatcgatgaaaattgcatcaacaa

SEQ ID NO: 205230 - DNA, 805 bp, Unknown
  Bacterial polypeptide expressing nucleotide sequence isolated from the Sargasso Sea
gatggaaaaaatttgtattattggagttggatatgttggtttagtctcagctgcaggactttcagaatttggaaatgaagtaacatgtgttgatttagatgaggaaaaaataaagcaattaaataatggtgaaattcatatctacgaacctggtttaaaatcattagttaaaacaaattttaataataaaaaacttcgttttactactgacattaataagtcaattaaaaattcaaaaattatttttattgctgttggtacaccgcagaaaaaaaatggagaagctgatttaagttatgtgtattctgtcgcaaattctattgcagataatttgaacaactataaaataattagtactaaaagcactgttcctgtaggcactggagaagaaattgaaaaagtactttcatctaaaagtgatactaaactatttgattatgtatctaatcctgaattaataagagaaggttcagcagttaatgattttatgattcctgatcgtttagtcattggttccagatctaataaggcttttaaccttatgaaaaatgtatacagaccattgtttattaatgaaacacctattctccattcttcagttgaaactgctgaaatgatcaaatatgcttctaatgcttttttagcacttaaaattagttatattaatgagattgcgaatttatgtgaaattgttggagcagatgtacaccaggtagcaaaagccatgggtcaagatggtagaattagctcaaaatttcttcatccaggacctggattcggaggatcttgttttcctaaggacaca

SEQ ID NO: 205231 - DNA, 198 bp, Unknown
  Bacterial polypeptide expressing nucleotide sequence isolated from the Sargasso Sea
tatgaaaatagcaatgatcggtgcaggatatgttggtctcgtttcaggcgcatgcttttcggaattcggggtcgatgttgtttgcgtcgataaagatgacaataagatcaaacaattaaattcatgtgtctgtcccatttatgagcccggattggagaatttgattacgagtaacgttaattcgaaacgtcttttttt

SEQ ID NO: 205232 - DNA, 934 bp, Unknown
  Bacterial polypeptide expressing nucleotide sequence isolated from the Sargasso Sea
agctagacaaatagctgaatatgcaactggacatacgatagtagttgaaaaaagtacattgccagtaagaacagcaaaaactataaaaaaaattttgtttaattctcaaattaataaagaagatagtgatacagataagactttttcagtattatctaatcctgagttcttatctgaaggtaatgccattaatgatctacaaaaaccagatagggtcctaattggaggtgatgatgaaattgctattgagtcgttggctgatttgtatttaaaatggatccccaatgagaaaattattagaactaatatttggagttcagagttatctaaattaacagctaatgcttttttggctcaaagaatatcttctattaatgcaatgtcagctctttgtgaactaacagaagcagatataaaacaagtatctgaggctataggtttagatagcaggattgggaaaaaattcttaaaccctggccctggttttggaggtagctgctttcaaaaagatattctaaacttagtatatttatgtgaatattataatcttaatgaagttgctagatactgggaacaagttttaactatcaataactggcaaaaagatagaatttctaaattaatagttaatagtttattcggaacagtttcagataaaaaattagctgtacttggtttttcatttaaagcgaatacaaacgatacaagaaattctgcttgtataaaaatttgtaaggatttaatagaagaaggggccattctatctatatatgatccaaaggttagcaaaaatcaaattgaagcagatttaggaagtcctccttatgatatggaaattaatttgatgaatgaagcatggacatattctaaatctattgaaagttctattaaagattctcatgcgattataatccttacagattggtcagaattt

SEQ ID NO: 205233 - DNA, 466 bp, Unknown
  Bacterial polypeptide expressing nucleotide sequence isolated from the Sargasso Sea
atgatagctagagttttgataattggagcgggttacgttggcatctctcatgcagttgctcttgctgaaaataatgaaataattattcttgataataatcaggacaaagttaataaaataaataatggcgattctgtaataaatgaaccagatcttaatgaaagtttcaatataagaaggacaaatataacagcaacttgcgataaatcgcttatattagagaaccatgagttcatcttaatttgccttccaactgatttaaataatgaatctggagaattagatacaagcattatttctgattatattgaatatattgttaaaaataccaaatcaaaaattattattaagtccactgtcccaattgggtatacccaaaaccagattgataggtatggagatgacagaattatcttttcacctgaattcttaagagaaggaaattctttagatagatatttataat

SEQ ID NO: 205234 - DNA, 466 bp, Unknown
  Bacterial polypeptide expressing nucleotide sequence isolated from the Sargasso Sea
atgaaatataaaaaaaatatcactgtagtaggcctaggttatgttggactatcgatgagcatccttttagctcaaagcaataatataatagcattggatattgatagaaataaaataaataaaatcaataagagaatttcacctttaagtgatgattttatgagtcattatttaaggactaaaaaattaaatttagagggtaccctagaaaaagataaggcatatcaaaatgctcaatttataattatatgtgttcctactgattataatcatatgaaaaaaagatttgatacagaattaattgaccaaattatctctgatattttgtctataaataattctgcaaatataattataaagtcaacaattccaattggttttacagaaaaactgagaaaaaaatttaactatgagaatataatttttgcacctgaatttcttagagaaggccatgctctttatgata

SEQ ID NO: 205235 - DNA, 487 bp, Unknown
  Bacterial polypeptide expressing nucleotide sequence isolated from the Sargasso Sea
atgaaaatttgtattataggctcaggttatgttggtttagtcagtggagcatgtttttctgaattagggaatcaagtagtttgtgttgataataataaacaaaaaatcgaaaacctcaaaaaaggaattattccaatttatgaaccaggtttagaagaacttcttttacgaaattacaaaaataaaagacttaatttttctgctgaaataaattcatcaataaaaaaatcggatattatctttatttgtgtaggcactccaacaaataagaattcaaataatgcaaacttaaagtatgtttttaaagttgtttctagtattaaagagaacctgaataaatataaaatcattgttacaaaatcaactgttccggtaatgacaggtgataaaatcgaaaaagtattaaacctaaataaaaataaaataaaaattgatgttatttccaaccccctgaatttcttcgagaaggagaagctattagagactt

SEQ ID NO: 205236 - DNA, 367 bp, Unknown
  Bacterial polypeptide expressing nucleotide sequence isolated from the Sargasso Sea
tatgaaattatgcatgataggaacaggctatgttggacttgtgagtggagtctgcttttcagatataggtaatactgtttattgtgtagacaaagataaagaaaaaattaatttattaaacaatgggaaagtccctatatacgaaccaggattagaagaaattcttaaaagaaactataaaaaaaaaagattaatttttacaacagatttaaaaaaagctgtaaataattcagatatgatatttatatgcgttggaacaccaacaaaaaaaaataccaattctgcagatttaaaatatgtttttgcagttgcccgtcaattaaaaaaaattatatgtaaatataaaatcattattacaaaatcaaca

SEQ ID NO: 205237 - DNA, 451 bp, Unknown
  Bacterial polypeptide expressing nucleotide sequence isolated from the Sargasso Sea
catgaaactttgcatgataggaacagggtatgtaggtttggttagcggtgtatgctttgctgatctaggtaataatgtgatttgtgttgataaagacttaaaaaaaatagatatactctcaaaaggtaaaattcctatttatgaacctggactaactgaattagttaataaaaattataaaaataaacgattaaaattttcatcagatttaaaaaaatcagtaaaagattctgatatagtttttatttgtgttggaacacccaccaagaaaggaggaagtaacgcagatttaactcaaatttataaagttgcaaaagaaataagttcatcgataaataagtttaaagtaatagtaacaaagtcaactgtacctgtaacgacaggtgatgaaatagaaaaaattttattaagaaataagaaaaataaaaataagttttccattgtttcaaat

SEQ ID NO: 205238 - DNA, 840 bp, Unknown
  Bacterial polypeptide expressing nucleotide sequence isolated from the Sargasso Sea
catgaaattaactatagtaggcacaggatatgtaggtttggtatcaggagcatgttttgctgaatttggatataaaactatatgtatagataaagatgaaaaaagaattgaaagtttaaaatctggaaaatgcccattttatgaaccaggtatggataatttgttatacaaacatcttagcaatacaaaactattaaccttttcctcatctataagtgactccattaaggatgcagatgtagtatttattaccgtcggcactccaagcagaagattggaggatgaagctgatctaactaatgtgtggtcagtggcagaagaaataagtcaaaatataaataaatattgtttagtagttacaaagtcaaccgtcccagtagggacttcaaaagaaataaagagaattattggcaataatatatctaatgatttatttgacgttgtgtccaacccagaatttttaagggagggatcggctatagacgattttatgagacctgatagggtagttattggatcagaaaatgtaaaatctgaaaaaattatgaaggaactctatagaccattgtatttaaaagaaactcctttggtttccacttctattgaaacggctgaaattattaagtatgcatcaaatagttttttagcaacaaaaattggttttattaatgaagttgcagatttgtgtgaagctgttggtgctaatgttcaagaagtttcaagagcaatgggtattgatcaaagaattggagcgaagtttttaaatgcaggacctggatatggaggttcatgcttcccaaaagatgttaaagcatttgcctcaactgcaaaaaaatttaa

SEQ ID NO: 205239 - DNA, 357 bp, Unknown
  Bacterial polypeptide expressing nucleotide sequence isolated from the Sargasso Sea
tatgaaactgtgtatgataggcacaggttatgttggacttgttagtggggtttgtttctctgatttgggtaatacagtttattgtgtagataaagataagaaaaaaattgattcattaaataatggtattattccaatatatgaacctggtttagaggaaattttaaaaagaaactataaagcaaatagattaattttcactacagattttaaaaaagctgtttcaaactcagatgttatttttatttgtgttggaactcctacaaaaagaaatagtaactcagctaatcttaagtatgtatttgatgttgccccatcactaaaaaagactatatcaaaatataaaattatagttac

SEQ ID NO: 205240 - DNA, 714 bp, Unknown
  Bacterial polypeptide expressing nucleotide sequence isolated from the Sargasso Sea
tgataaagatttaaaaaaaattaacaatttaaaaaagggtattgtccctatttacgaacctggtttagaagagttagttttaaaaaattataaaaataaaagactgaatttttcaataaacctaaaagagtcggtaaaaaaatcagatattgtttttatatgcgtaggaacaccaaccaaaaaaaatagtaatagtgctgatttaagccaagtatatgctgctgcaaaagaaatatctaaatctattaaaaaatttaaaattattgttaataaatcgactgtgcccgtgacaacaggtgatgagattgaaaaaattatatcaaaaaaagtaaataaaaaatttttttcagtagtatctaatcctgaatttttaagagaaggtgaggctattagagattttatctatccagatagagttgtagttggatcaaatgatagtaaatcccagagaatattaaaaagtttatattcaccactaatatcaaaaggtgcaaaatttctttctacaaaaagaagagcagctgaattaattaaatatgcttctaatgcttttttagcaacaaagattacctttataaatgaaatatcaaatttatgtgaaaaaactggtatagatattgaggatatctcaataggaattggattagataaaagaattggtagcagatttttaagagctggacccgcatacggtgggtcatgttttccaaaaga

SEQ ID NO: 205241 - DNA, 364 bp, Unknown
  Bacterial polypeptide expressing nucleotide sequence isolated from the Sargasso Sea
atgaaactatgcatgataggcacaggttatgttggactcgttagtggagtttgcttttctgatcttggaaataatgttgtttgtgttgataaagataaagaaaaaattaattcattaaataatggaattattcctatatatgaacctggattagaagaaatattaaaaaggaactttaaagcaagtagactaacttttactactgacttaaaaaaagctgtatctaactcagatattatatttatttgcgttggaaccccaactaaaaagaaaagtaattctgctgatctaaaatatgtattcgctgttgcacataaattaaaaaaaattatctctaaatataaaattataattacaaaatcta

SEQ ID NO: 205242 - DNA, 352 bp, Unknown
  Bacterial polypeptide expressing nucleotide sequence isolated from the Sargasso Sea
atgaaattatgtatgataggtactggttatgtaggattagtaagcggggtatgttttgctgatttaggaaacgaagtaatttgtgtagataataacacaaataaaatagatttactaaaaaaaggtaaaataccaatatatgaacctggtctttcagaattagtaattaaaaattataagaataaaagattaactttttctactaatttaaaaaaatcagttaaagaatcagatattatttttatttgtgttggcacaccaactaaaaaaggtggaggttctgcagatttgagtcagatttataatgtttctaaggaaatatcttcttcaattaataaatttaaaattatta

SEQ ID NO: 205243 - DNA, 416 bp, Unknown
  Bacterial polypeptide expressing nucleotide sequence isolated from the Sargasso Sea
catgaaactatgtatggtaggaactggttatgtaggattagttagcggtgtatgctttgcagatttaggtaatgaagttatttgtgtagataaggattcgaataaaatcaattctcttaaaaaaggaaaagttccaatttacgaacctggactttcggaattagtaattaaaaattatagaaataagagattaaatttttcaacagatttaaaaaaatctgtaagagagtcggatataattttcatttgtgttggaacacctacaaaaaaaggagggggttcagcagatttgagtcaaatctacaatgtaactaaagagataagttcttcaattaatagatttaaaattattataacgaaatctactgttccagtaaccacaggtgacgaaattgaaaaaattctttcaagaaaaa

SEQ ID NO: 205244 - DNA, 382 bp, Unknown
  Bacterial polypeptide expressing nucleotide sequence isolated from the Sargasso Sea
tatgattggtactggttatgtaggtttagtaagcggaacatgttttgctgagcttggaaatgatgtgatctgcgttgatattgataaaaaaaaaattgataaactaaatagtggaataattccaatttacgaacctgggcttgaagaacttgtcaaaagaaatttaaaacatggaagattaaaattttctactaatatatctttagctattaaaaattgtaatgttattttcatttgtgtagggactcctaccaataaaattactaaaaaagcagacttaaaatatgtatttaatgtaacaaaaaatattaaaaataatttaaataatttcaaattgattgttacaaaatctacagttcctgtcatgactggtgataaaata

SEQ ID NO: 205245 - DNA, 1297 bp, Unknown
  Bacterial polypeptide expressing nucleotide sequence isolated from the Sargasso Sea
atgaatcttactatcgttggaacaggttatgttgggttagtaactggagcatgctttgccgaatttggttattctgtaacatgtgtagacaacaatattaaacgcctagaaatacttaaatcaggtaagtgtcctttttttgaaccaggtatggatgagcttttggataagcacattaacaaaacaaaattaataacttttgaatcaaccattaaaaataacttagataacacagatataatttttattactgtgggaactccaacaagaagattagaggatgaggctgatttaagttttgtctggcaagttgctgaagaaattgcagaaaatataaaaaaatattgtttagttgtaactaagtctactgttccagttggaactacaagagaagtacaaaaaattatttcaaataaaattgatcaaaaactttttgatgtagtttctaatcctgaatttttgcgggaaggatctgcaattgatgatttcattaggccagatagagttgtgataggaacagataatcaaaattctgaaaatataatgagagaactttatagaccattatttctgaaagaaactccaattgtagctacatcaatagaaacttctgaaataatcaaatatgcatccaatagttttcttgcaacaaaaattgcctttataaatgaagttgctgacttatgtgaagtagtgggagctgatgttcagcaagtagcacgtggaatgggtatagataaaagaattggatctaaatttttaaatgcaggacctggatttggcggctcgtgttttccaaaggatgtaaaagcttttgcttcaacagctaaaaagaaaaatattgatctatcaataattaatgccgtgaataaatcaaatcaagatcgtataaataaaatttcaaataaaattatttcaaaaataaaaaataattctacagttacttttcttggtctaagctttaaacctaatacagatgacgtaagggattctacatcgatgaaaattgcatcaacaatttttgaaaaaggaattaaagttcaatgttatgatcctgaagcaatggataatgctaaaaaagagaattctaatcttatcttgtttaactctgcatacgaagcttgtgaagggtcgtctgcaataattattggaacagaatggaatgaattcagagcattaaattttgaaaaaatatccaaattattaaaagaaaaaattatttttgatctaagaaatatttatattccagaaaatttaaaagaaatgggatatgaatactatggaacaggtaaataaa

SEQ ID NO: 205246 - DNA, 1297 bp, Unknown
  Bacterial polypeptide expressing nucleotide sequence isolated from the Sargasso Sea
atgaaaatttgtatgattggatcaggttatgtagggttagtcagtggtgcatgttttgctgaacttggtaacaatgtcacttgtgtagatagtaacttaaataaaataactaatctaaagaagggaataattccactttacaagccagggttagaggaattaattataagaaatttaaagcaaaaaaggcttcaattttcatcaaatatatcaaagtctattaaaaaaggagatcttatatttatatgtgttggaactccgacaaaaactaaatctaacgaaacacatctaaaatatgtatttcaagttgtaaaagatataaaaaagaatctaaacaaatataaaataatcgttactaaatctacagtgccagttactactggtgacaaaattgaaaaattattaacaactaataaaaataaaaaattattcgatgttgcttccaatccagaatttctaagggaaggtgaggctatcagagatttcatgtttcctgatcgagttgtagttggtacaaatagtaaaaaagctaataatattttaaaaaatttatattctccaattgttaaaaaaaaaagcagatatttcaatacatcaagacgtgctgccgaagttataaaatatgcatctaatgcattcctggcaacaaaaattacatttattaatgaaatttcaaatttatgtgaaaaacttaacgtcgatgtaactgatgtttcggttggaattggagctgatgagagaattggaggaaggtttttaagagctggaccaggttatggtggttcttgttttccaaaagatacacgtgctttaatttctacttcaaaaaaatttaaaactaatctatctatagttaaatcaacaattaacgctaatgacaataggtacaaatatttattagccaaaattagagaaatattgaataataatctaaaaagtaagaaaatcacttttttaggcgttacttttaaggctggtactgacgatatgagagactcagcatctctaaaattaattccatatttgatcaaaaaaggatccaaagtttcatattatgaacctactggaattaaaaatgattttgataaaaaaaaagtaacctattttaataatattaaagatgcatgtaaaaatagtgatcttctgattatacatacagagtggaatgagtttaagcagttaaactttaaaaagttgaataacaaaaagaaatttaagatttatgatttaagaaatttatattcaccctcaaaaatgaaaagtaaaaatatcgaatattatagtataggtagataac

SEQ ID NO: 205247 - DNA, 1273 bp, Unknown
  Bacterial polypeptide expressing nucleotide sequence isolated from the Sargasso Sea
ctatgttggtcttgtcagcggaacttgttttgctgatataggcaatgaagtaatctgtgtggatgttgataataaaaaaattaataatttaagttctggaattattccaatttatgagcctggcttagaagagatggtaaaaagaaatttaaagcaaggacgattgaaattttcaactaatgtatcgaacgcaattaaaaaatcaaatttaatttttatctgtgttggtacgccaattattaaaaagacaaatgctgctaatttaaaatatgtttttcaagttgctaaaaaaattaaatctaatttaattaattataaaattattgtaacaaaatcaactgtaccagtaacgacaggtgataaaattgaaaacatcttaaaaaaaaataagtttaaatctaaatttgacgttgtttcaaatcctgaatttttaagagaaggtgaagctattagagattttgtagttccagacagagtagttgtaggcactacaagtaaaaaagctattaagattatgaagtctctatatttgcctataattaaaaaatctactcgttttttttcaacatctagaaggggcgctgaattgataaaatatgcctcaaatgcttttttagctactaaaatctcctttattaatgaaatggcaaatctatgtgaagaatgtaacattaatattgaagatatatccgttggaatgggattagatcaaagaattggtgaaagatttctaagagcaggccctggttatggaggctcatgctttccaaaagatactagagctattgttacattagcaaaaaaatttagaacaaatttaagtatcgttaattccgtaataaaatctaatgaaaatagatcaaaaattctttttaatagaattttaaaaattctcaaaaataaaattaaaaataaacaaataacttttctaggcactacatttaaagctaatactgatgatatgcgagaatctccatgtcttagtttgatgccagctttacttttaagaggagctaaaattaattattatgaacctactggtgcaaaaaaagaactacataaatttaaaaaagttaattattcaaaaaatatagttaatgccactaagaaagcagatctcataataattcacactgaatggaatgagtttaagcatttaaacctaaaaaaattaattaaaaataaaaacgtaattatctatgacatgagaaatatttattcgccagaaaagatgaaaaaaaatggtattaaatattatggaataggaaaataa

SEQ ID NO: 205248 - DNA, 1123 bp, Unknown
  Bacterial polypeptide expressing nucleotide sequence isolated from the Sargasso Sea
gtaagcggggtatgttttgccgaccttggaaatgaagtaatttgtgttgataaaaatgctgacaagataaatttacttaaaaaaggaaaaattccaatttatgaacctggtttatctgaactagttatcaaaaattttaaaaataaaagattaaatttttcaactaatttaaaaaaatcagtcagtgaatctgatatcatttttatttgtgtcggaaccccaagtaaaaaaggaagttcaactgcggatcttagccagatttataacgttgctaaagaaatcagttcctcaattaacaaatttaaattagtaattaccaaatcaacagtcccagttactacaggagatgaaatagaaaaaattttatcaagaaaaaataacaaaaataaattttcagtggtatcaaatcctgagtttcttagagaaggagaggcaataagagattttatatatccagatagagtggtaatcggaactctagataaaaaatctaatcgtattttaaagaatctttatagcccattgatttctaagggggcttcatatttacaaacatcaagaagagctgctgaattaataaaatatgcatctaatgcttttttagctacaaaaattacatttattaatgaaattgctaatttatgtgaaaaaaccggcgttaatgttgaggatatatcgattggtatgggccttgataaaagaataggaagtcgatttttaagagcagggcctgcttatgggggatcgtgttttccgaaagatacaaaagctataacttctactgcagataagtttaaaacaaatttgtctgttgttaagtcagtgattaaatcaaataaaaatagatcaaaaatattacttaatagagtttacgaaattttaaacaaaaaaatcaaaaataaaaaaataacctttttaggagttacatttaaagctaacacagatgatatgagagactcttcaagtcttataatgatacctgctttatctaaaaaaggcgctcaaattaaatattttgatccaacaggtattaaaaaagagttttctaaaattaaaaatgtctataattcaaatacaattaaagatgctataaagggttcagaccttgttattattcatactg

SEQ ID NO: 205249 - DNA, 1171 bp, Unknown
  Bacterial polypeptide expressing nucleotide sequence isolated from the Sargasso Sea
aatgagtaaaagaattattatatttggtttgggatatgttggaacatccatggctattctactttctcaaaaaaattatgtaagagctattgatatagatgaaaagaaggttaatttacttaataacaaagtttcacctataaaagacaacttaattgatagattcttagataaaaaaaatcttaatcttgaagcctctttagatattgaagactttgataactttgattttgtagtaattgctactccaacagattatgatgaagataaggattattttgatgtttcaactgtcaaagacatagttgcaaaagttaaagatagaaataaaaatattccaattataattaaatccacaattcctgtaggtttcacagatgaaattaattctcttcacaagtgtgacaatatttatttctcaccagaatttttaagagagaattcagctttggaagataacctctctccaacaaggattattattagcggcaaatccaaacaggcaaaagactttgtaaatacaatatcaaactgcaccagaaataaagattatccaattctttatattggcagaaatgaagctgaatcagtcaagttatttgcaaatacctacctagcaatgagagtctcttttatcaatgagctagataattttggtatacataagaaattaaacgttgacgaaataattaaaggcatttcttctgatccaagaataggggacttctacaataatccctcgtttgggtatggtggttattgtcttcctaaggatagtaagcaacttttggcaaatttcgatgaggtgcctcaagcattgatttcttccattataaaatcaaacaaacttagaaaagattttattgctgaacaaattattttattaaaaccaaaaatggttacattctacagactggctatgaaatcagagtccgataattatagatcagctgcaataagaggagttattgataggctaaagaataaaaaaattaagttacagatttatgaaccaaccttagatgtcgattattatgatgatatttctgtagagaataatcttgatttagttaagaaagaatctgatttaattgtctgcaataggctttatgatgagcttgaggatgtcaaaaataaagtttttaccagagatatatttggcaataactag

SEQ ID NO: 205250 - DNA, 1168 bp, Unknown
  Bacterial polypeptide expressing nucleotide sequence isolated from the Sargasso Sea
atgaagatttctatttttggtgcaggttatgtaggcttatcacttgcagctctattcatggattcacatgaagttagcattattgaaagtgatgccgataaaattaataaactcaaaaaacgtataagtccaatagaagacttaaacatccaaaaaactttaaaaaatagtaaaagcaaacttcacattttttcatcaatgcccgaaaaatatgatagcgatttaacaatactgtgtcttcctaccaattatgatgcacaagcaaatttctttgatacaagcattatcgagaatgtcattagtgagatatttcaaaataaagagaataattctccaattttaattaaatctacagttcctgtaggatttacagataatttaaataaatctttaaaaacaaatagaatttatttttccccagagtttcttagagaaggaaattctcttgaagacaatcttttcccttcaagaataatagttggaggcagtgataataattcagaaatgattggcaatctttttcttgatgctgcaaagaataagcctgatctaatgtacatgggcaatatggaagcagagtctgtaaaattattttcaaacacttatttggctcttagagtcgctttctttaatgaattagatagttattgcatgaaaaaagatattgatgtagcttctgttataaaaggggttagtagtgacacaagaattggtaatttttataacaatccttcttttggttatggaggatattgtctgccaaaagatacaaagcagttattagcaaattatgatagtgttccacaaaatctaatcaaggctattgtcgagtcaaattctactagaaaagactttatctctgaatatattgacaaaaaggacaataaaactattggtatttttagaatggtgatgaaagaggggtctgataatattagggattcatctattcaaggagtaattaaaaggttaaatgcaaaaggcaatcgtatgttaatttatgagcctctgcttgataaaaatgaaggtttttttggaattgaagtaactcatgacctagagcatctcaaacaacaatcatcaattataatttcaaatagaatgagtaaaaagcttatcgatgttaaagaaaaggtattcacaagaagtatatttgatatagattagt

SEQ ID NO: 205251 - DNA, 679 bp, Unknown
  Bacterial polypeptide expressing nucleotide sequence isolated from the Sargasso Sea
atgaaattatgtattattggtactggttacgttggtttggtgagtggagcttgcttttcagatctaggaaataatgtaatttgtgtcgataaagataaaaaaaaaataaataatcttaagaaaggactgatacctatttttgaaccaggtttagaagaattagtcgctaaaaattataaaaataaaagattaaattttacaactaatttagataatgctgttaaaaaatcagacataatttttatatgtgtaggaactccatcaaaaaagaatagcaaacaggccgaccttagtcagattttttctgttgcaaaagaaatatctaaatcgattaataaatttaaaattataattactaaatcaactgttcctgttactacaggagatgatatagaaaaaactattttaaaaagagtaccaataaataaattttctgtcgtttcaaatccagaatttttaagagaaggtgaggctataagagattttatttatccagatagagttattgttggatcaaatgataaaaaatctaatttaataataaaaaatctttattcaccattagtgtcaaaaggtgctaaatacatgtctactaatagaagatctgcagaactgattaaatatgcttctaattcatttttagcgacaaaagtcactttcattaatgaaatcgctaatt

SEQ ID NO: 205252 - DNA, 1303 bp, Unknown
  Bacterial polypeptide expressing nucleotide sequence isolated from the Sargasso Sea
atgaaactttgcatgataggtactggttacgttggtcttgtcagtggagtatgtttttctgatataggaaatacagtttattgtgtagataaagaccagaaaaaaattgatttattaaataaaggtattatccctatttttgaaccaggtcttgaagagattttaaaaagaaattataaacaaaagcgattaatttttacgtcagatttaaaaaaagcggtgataaattcagatataatttttatctgtgttgggacacccactaaaaaaaatgctaattcagctgatttgaaatatgtttatagtgtagccaaagatttaaaaaaaataattaaaaaaaaatataaaataataattaccaaatccacagtacccgtatcaacaggagataaaattgagaagattttaactaatttaaagaaaaagaaattagttgatgttgtatcaaatcctgaatttttaagagagggagaagcaataagagatttcatttatcctgacagagttattattggaacagacagtaataaagctaacagaatattaaaatctctttatttaccaattattaaaaaaaaaagtagatactttaatacttcaagaagaggtgcagagcttataaaatacgcttctaatgcttttctagcaacaaagatttcatttattaatgaaatagctaatttgtgtgaaaaaacaggtgttgatatcaaagatgtatctcaaggtatgggttcagatgaaagaataggtgataggtttttgagagcaggtccagcctatggtggatcttgttttccaaaggatactcgtgcattgattgatactggaaatcaatttaaaactgatttaaccataattaaaagtgtagttaattcaaatgataatcgaaaaactttactaattaaaagagttgtaaaaattcttggtggtaatttaaaaaataaaattataacttttttaggtgtaacatttaaaccaaatacagatgatatgcgtgaagcaacaagtataccaatgattaaatatctaaataaaaaaaatagtaaaatcaaatattatgatccatcaggagaaaaagctgattttaaaaatttaaagaatgttaattactgcaatacaatttcttttgcttgtttaaatgcagatatggttattttacacactgagtggaacgattttaaattattaaacttcaaaaaattagtaaaaaaacagaaatttaaaatattcgatatgcgtaatatgtattcaccttcaagaatgaaaaaattgaatattgattattatggtgttggtaggtaaa

SEQ ID NO: 205253 - DNA, 1093 bp, Unknown
  Bacterial polypeptide expressing nucleotide sequence isolated from the Sargasso Sea
atgaatattgtcataatcgggactggatatgttggccttgtaacaggggtagggctagctagtttgggcaataaagtaacatttattgatttagacgaagacaaaatagaaaatttaaataataaaaaactcacattttatgaaccaggtcttgataaatattttgaagatgataaaacttttaaaaatatggagtttgtttctagttatacagatattgattggcaaggtaaagaaatagtatttatatgtgtccagacacctaataacgttgaaactaattcagtagatacaaaatttcttgagtcagcaataaatgaagtaagcagtgttcaaaatgaaaatttggtaataactattaaatctactattcctccttatgaaatagaaaaaatatgtaatcaggtaggtctagacatggattcactgacctttaatcctgaatttttaagggaaggaacagcagtagaagatttctttaaaccagataggattgtcattggaggtaatgattcttcaaaagtacaaaaattaaaagacttatattctgattttgaagccgaaatattaattacagacccaataagttcacagttaataaagtatttagcaaatacctatcttcctttgagattatcttttgtaaacgaagcagcgagacttgttaatagctctggaggtaatttagatgatgtattaaagggggtgggcatggattcaagaataggtcaacattactttaggccttctcctgcttggggaggatcatgtttcccaaaagatgttgtagaggttaataatttttacgactctgaggaagtaaatcttccattaattgcaaatataattgaatctaataaaattcaaacacaatggacagcaaaaatgcttaaatcaattcataacgaaaagaagttatctgggataatacttgttggagcagcatttaaagaagacactgatgacttaaggaattctccaaccatagatatatataatgaattaaaagctgaaaatatgaatacgatgatttacgatgatctaattaaatcagaagaatatctttctatagaagattttgaaaacttagaag

SEQ ID NO: 205254 - DNA, 603 bp, Unknown
  Bacterial polypeptide expressing nucleotide sequence isolated from the Sargasso Sea
tatgaagttagttttagttggaacaggctatgttggtcttgtctcaggttcttgttttgctgagtttggatacgaagttatctgcgtagataaagacgagtttagaatttcagaattaaaaaaagggaaatgccccttttttgaacctggaatagaggaattattatcaaaacatagggaccaaactaaactacttagttttacatcttctttgactgaagctatggaaggtgctgatattatatttattactgtaggcactccctctaaaagattagaaggagaagctgacttaagtgctgtatggaatgttgcaaaagatatagctaataatataaaaaaatacactttagttgtaactaaatcaactgttcctgttggaactactcaagagattaaaaaaattatttcaaaaattgtacctaaagaaaattttgatgttgtatccaatccagaatttcttagagaaggatcggctataaatgattttatgcgtccagatcgtataattattggaactgataatgaaaaatcaacaaaaattatgaaagaattatatcgccctttatatttattagaaactcccaattattacttcatcga

SEQ ID NO: 205255 - DNA, 1303 bp, Unknown
  Bacterial polypeptide expressing nucleotide sequence isolated from the Sargasso Sea
tatgaaactttgcatgataggtactggttacgttggtcttgtaagtggagtatgtttttctgatataggaaatacggtttattgtgtggatagagatcagaaaaaaattgatttattaaataaaggtattatccctatttttgaaccaggtcttgaagagattttaaaaaaaaattataaacaaaagcgattaattttcacatcagacttaaaaaaagcagtaacaaattcagatataatttttatctgtgttgggacacccacaaaaaaaaatactaattctgctgatttgaaatatgtttatagtgtagctaaagatttaaagaaaataattaaaaaaaaatataaaataataattactaaatctacggtgcctgtatctacgggtgataaaatcgagaagattttgtctaatttaaagaaaaagaaattagttgatgttgtatcaaatcctgaatttttaagagagggagaagcaataagagattttatttatcctgatagagttgttattggaacagacagcaaaaaagctaacagaatattaaaatccctttattttccaataattaaaaaaacgactagatactttaatacttcaagaagaggtgcagagctaataaaatatgcttctaatgcttttttagctacaaagatttcatttattaatgaaatagctaatttatgtgaaaaaacaggagttgatatcaaagatgtatcactaggtatgggttcagatgaaagaataggtgaaaggtttttgagagcaggtccagcctatggtggatcttgttttccaaaggacacacgtgcattaattgatactggaaatcaatttaaaactgatttaaccatagttaaaagtgtagttaattcaaatgataatcgaaaaaaattactaattgagagagttgtaaaaattcttggtggtaatttaaaaaacaaaattataacttttttgggtgtaacatttaaaccaaacacagatgatatgcgtgaagcaacaagtataccaatgattaaatatctaaataaaaaaaatagtaaaatcaaatattatgatccatcaggagaaaaagttgattttaaagatttaaagaatgttaattactgcaatacaatttcttctgcttgtttaaatgcagatatggttattttacacactgaatggaacgattttaaattattaaatttcaaaaaattagtaaaaaaacagagatttaaaatatacgatatgcgtaatatgtattcacctttaagaatgaaaaaattgaatattgattattatggtgtcggtaggtaa

SEQ ID NO: 205256 - DNA, 1171 bp, Unknown
  Bacterial polypeptide expressing nucleotide sequence isolated from the Sargasso Sea
ttggttaaaaaaaatatatttgctaataggcttcattttgatattggtttatctaaatcttttgataaatgtgattctatatttatagcagtaggtaccccaactaattccagagataattcagctaatttagtatatgtttataaagttattgaggaaatcgtcagtttaataaatatcaaaaataaatctaaacttatagtaactaaatcaacagttccggtaggtacagggcaagaaataattaagtttatttcaaacctccgacctgaattaaaattatataaacattttgatatagctagtaatccagaatttttaagagaggggtcagcgatagaagattttatgagacctgacagagtagtttgcggtgtagaatctgaatttgcaaaaaatattatgcaaaaactttataggcctctaaatttaagagaaacaccaattttgtttactggaagagaaactgcagaattaattaaatatgcatctaatggtttcttagctactaaaatttcttttataaatgaaatctctgatatttgtgaaaaggttggtgctgatgtgcagcaagtagctaaaggtattggtttagatggaagaattggttcaaagtttttacatcctggtcctggctttggaggttcttgttttcctaaagatacaagggctcttgcagaaattggaaaaaaatataaagccagatctaggatcattgagagtgtaatagatataaacgaaaatcgaaaattaaatatggttaaaaaaatccaagatgctattggtaatttaaaaaataaatctatttctatattaggtcttacctttaaaccaaatactgatgatatgagagaatctccatctataattattgtttcagagttgttaaatatgtgtaaaaaattaagagtttatgaccctgctggtatggataatgctaaaaaaatgagtgagtttaatggagtagaatggtgtcagaatgcctatgattgtataaaggatactgatgctatggtgttaattactgaatggaatgaatttagagctttagatttaataaaagttaaaactttgttaaagcagccaataatcattgatttaagaaatgtttatagtaaagaatatatgcaagaagttggtattaattatgtttccgttggaagaaattaaa

SEQ ID NO: 205257 - DNA, 1039 bp, Unknown
  Bacterial polypeptide expressing nucleotide sequence isolated from the Sargasso Sea
atgaatattgtcataattgggactggatatgttggcctcgtaacaggggtgggtttagctagtttaggtaataaagtaacgtttattgatttagacgaagacaaaataggcaatttaaataataaaaaacttacattttacgaaccaggtctagataaatattttgaagatgatgaaacttttaaaaatatggaatttgtttctagttattcagatattgattggaaagataaagaaatagtatttatatgcgttcagacacctaataacgttgaaactaattcagtagatacaaaatttcttgagtcagcaataacggaagtaagcagtcttcaaaatgaaaatttggtaataactattaaatctacgattcctccttatgaaatagaaaaaatatgtaatcaggtaggtctagacatggatttactgaccttcaatcctgaatttttaagagaaggaacagcagtagaagacttctttaaaccagacaggattgtaattggaggtaatgattcttcaaaagtacaaaaactaaaagatttatactctgattttgaagccgaaataataattactgacccaataagttcacagttaataaagtatttagcaaatacttatcttcctctgagattatcttttgtaaatgaagcagcgagacttgttaagagctctggagggaacctagatgatgtattaaaaggagtaggaatggattcaagaataggtcaacattactttagaccttctcctgcctggggaggatcatgttttccaaaagacgttgttgaagtaaataatttttatgattctgacgaagtaaaccttccattaattgcaaacataatagaatctaataaaattcaaacacaatggacagcaaatatgcttaaatcaattcataatgaaaagaagttaaatgggataattcttgttggagcagcattcaaagaagatacagatgatttaaggaattctccaaccatagatatatataatcaattattagctgaaaatatgaatatcatgattttatgat

SEQ ID NO: 205258 - DNA, 584 bp, Unknown
  Bacterial polypeptide expressing nucleotide sequence isolated from the Sargasso Sea
aataaaactttttgctaatacatatcttgcaatgagagtttctttttttaatgagcttgatagcttttgcttgttaaataatctaaattcttatgatgtaataaatggtgtatgtttagacgaaaggattggaaaaaattacaataacccctcatttggctatggaggttattgtttacctaaggacactaaacagctactttctaattttaaaaatacgccacaaaatataattagtgcaattgttgattcaaataatacaagaaagaaagtcatatctgacaccataatctctaagggaatttctattgttggtatatataggctagtaatgaaaaaaaacagcgataatattaggtcgtccagtatcgttgatgttattgataatcttaagaaaagtaatgttcagatcatcatttacgaaccagaaattaaggatgatttttttgagggttgtaagatagaaaatgatattaatttgtttaaaaataaatcagaaattattgtgtgtaatagactatcaagtgaaatcgaagatgttaaagacaaagtttttacaagagacatatttaatgagaattaaa

SEQ ID NO: 205259 - DNA, 1201 bp, Unknown
  Bacterial polypeptide expressing nucleotide sequence isolated from the Sargasso Sea
gatgactgagctgatagaaagaaaaaaaattacaatagtgggtgctggctatgtaggtatgtcaatcgcagttgctttagcagtaaaagaagatgttctaattttagaaagcaataaagagaaaattgataggataaactctggcaaacctagcattaatgattccgatattaatttattttgccatgaccaaagtttttccattaaagccacagataataaaaaagaggcatatcatgaagcagacttcattattatttgtgttcccacagactttgatgaagaaagctcttctttcgatacttctattcttgaaagtgttctcgatgatgccattacaaataatagtgatgcattggtcataattagatctaccattccagttggttattcagaccaggcacgagaaaaataccaaacaaaaaacattattttttctcctgaatttctgagagagtattccgccatgcatgatgtattgaatccatcaagaatcattgttgggaatgattcagaattatccattgattttgctgaactcatatcagagtcaaccgagaataaaccagagataattctaatgccatcttctgatgcagaagctgtaaaactattttcgaatacttaccttgcgatgagagtggcattttttaacgaattggatacattctcaatcgctaaaggtctatcaactgagaatgttatcaagggtgtttcagcggatcctaggattggtatgaaatataataacccatcatttggatatggagggtattgccttccaaaagatactaagcaactgctagcaaattttgaagatcttcctcaaaccattattcagtcagttattagctcaaacgaggcaagaaagaaattcatgatcgatgatattaaaaagcatggaccaaaagttgttggcatttataaactgactaataatagaaaagctgaaaattttagaagctcagaaatgctagatatcattaatggcctatcaaacgatgttgatgagttaattatctttgagccattaattaaggaagatgattatatgggctttaaggtaatcaatgacatagatagatttaagtctaaatctgatttgattattgcaaacagaaatgattcacaactcagtgatgtcactgataagttatattgcagagatatttttagtgaggacggagagggaactatctaa

SEQ ID NO: 205260 - DNA, 196 bp, Unknown
  Bacterial polypeptide expressing nucleotide sequence isolated from the Sargasso Sea
tatgaaactttgcatgataggtacaggttatgttggactcgtcagcggtgtatgtttctctgatttaggcaacactgtttattgcgtagataataataaagcaaaaataaattctttaaattcaggaaaaattccaatctacgagcctggcttagaagaaatattaaagaaaaattataaacaaaaaagattaatt

SEQ ID NO: 205261 - DNA, 1345 bp, Unknown
  Bacterial polypeptide expressing nucleotide sequence isolated from the Sargasso Sea
atgagtgtaaaatcaatatgttgtataggagcaggatatgttgggggaccgacaatggctgtgatagcattaaagtgtccagaaattaaaatagttgtagttgataaaaataaagagaaaatcaatttatggaatggagacttggataaacttccagtttttgagccaggtttaaaagatataattgctaatgttagaggagttaatctattcttttcaacagacatagacactgcaattgatgaaagcgaaataatttttatggcagttaacactcctactaagacaaaaggtgaaggagcaggaatggctgctgaccttacttatgttgaattatgtgctcaagatattgcaagagtttctaaatcagataaaattgttgttgaaaaatcaactcttccagttagaacagctgaaaaaattaagaacatactgacaaccaatggtaatggagtaaattttgaagtaatatcaaatccagagtttttagctgaaggctctgcaatagaagatttgtttaaatctgatagggttttaattggaggagataaaacgccgtctgggcagaaggcagtgaaaaaacttgtagatatatattctcaatggataccaaaagaaaaaatatttactaccaatgtatggtcttcagaactatctaaacttgcatcaaatgcaatgttagctcaaagaatatcttccattaatagtttatctgcactttgtgaaaaaactgaggcagatattcaagaagtatcaaaggccatagggatggatcaccgtataggaccttattttcttaatccatcacctggttttggaggaagctgtttccaaaaagacattttaaacttagtctatttatgtcaattttatggtttacatgaggtagctgattactggcatcaagttttaaaaattaatgactaccagagagatagaattaccaataaaattatggaagttatagaaggtagcaataataaggtagttacagtattggggtggtcatttaagaaaaatacaaatgacagtagagaatcttcttcaatatacataacatttaatctattgaaaaagggaattactgttaatgtttatgacccaaaggtaaagtatcaaagaattatttctgatctagaaaatttaatatctgagaataatgaaaaaaatataaacattaaaaggaatctaaatatatataactctattgatgaatctattgctgattctgaattaatagtagtactaactgaatgggatgaatttaaaagtattaaaacaaataaaaaaattattgatacaagggatgttgtgaaagactcaattgcttattttaaattataga

SEQ ID NO: 205262 - DNA, 466 bp, Unknown
  Bacterial polypeptide expressing nucleotide sequence isolated from the Sargasso Sea
catgaaattgtgtatgattggtactggttatgtaggtttagtaagcggagtatgttttgctgatttaggaaatgatgtaatttgtgtagataataatgttgacaaaataaatttactaaaaaaaggaaagattccaatttatgaacctggtttatcagaattagtaataaagaattttaagaataaaaaattaaatttttctacagatttaaaaaaatcaattaaagactcagacataattttcatttgtgttggtacaccaataaaaaaaggcggtagttcagcagatttaagtcaaatttacaaagtttctaaagaaataagttcttcaattaataaatttaaaattatcataacaaaatcaacagtccccgtgacgacaggagatgaaattgaaaaaatattatctaaaaaaaatagtaaaaagaaattttctgttgtttcaaatcctgaatttctaagagaa

SEQ ID NO: 205263 - DNA, 654 bp, Unknown
  Bacterial polypeptide expressing nucleotide sequence isolated from the Sargasso Sea
atttacttgttcaaggtgccaagaagaaaaatatagaaactttgtttattcaatcaactgaagctgaggctgttaagttattcgcaaatacataccttgcaatgcgtgtgtcgttctttaatgaattagattcttatgctgaagccaatgaacttaattctagagaaataattgagggaatgtgcttagaccctcgtataggatctcattacaataatccatcatttggttatggcggctattgtttgccaaaagacactaagcagttgaaagcgaattatcaagatgtgcctcatagcttaataagtgctgtcgttgatgcaaactctactcgaaaagattttattgcaaattcaattatagccaagagtccaaaagtggtcggcgttcataggctgataatgaaaagtggctcagacaattatagagcatctgccatccatggtattatggagcgcattaaggctaaaggtattgaggttattatttttgagcctgttatcgaagaagttgatttttttaattccaaagttataagagatttagatgagtttaagaagctgtctgacctgattataactaatcgtatgtcagatgaacttattagtgtaaaaaacaaagtttatacaagagatttgtttaataattattaac

SEQ ID NO: 205264 - DNA, 1351 bp, Unknown
  Bacterial polypeptide expressing nucleotide sequence isolated from the Sargasso Sea
tatgaaaattaacgttattggcgcaggatatgttggtttggtaactgcagcatgttttgcccactcaggacatgaggttaaatgttatgacatagataaggataagattgatcttctaaaaaaaggcaaaactaatatttatgagcctcagctcgaatctttgctaaaagaaaatttagaaaaaagtcgattgagtttttcagataatttaaatgatatttccgctttttcaaatatcttttttatttgtgtcggcacaccacccagaggttctggtgaagcaaacttactagctctctacaaatcaattttttctatttctgaaaatacaaaagatgcttttttcattattaaatctactgttcctcctggtacatgtgaagaattatcagcaatgattgattcgtcaaagaatatcaatatttcaatgtgcccagaatttttaagagaaggcactgcagtaaaggatttcttaaaacctgacagaatagtcattggtaaaaatcctgatatctcagaagatttttttctaactattttttctcctttcataaaagaaaataaatccatcatttttatggatacactttcggcagagttgactaaatatgcttcaaattcttttttggccactaaaataagttttatgaatgagctttcaatttatgccgacttgaagggagctgatattgagaaagtaagaatgggtataggacttgataaaaggataggctatgaatacctatatcccggattgggatttggtggctcatgttttcctaaagatatcagagcgttaattgataatgctaatgatgcaaatctagatctgaaactattaaaatctgtaattgagattaatgatttccaggtagacatttttactaaaaagattacagaatatttcaaatctgatgatttgtctggttttactctttctatatggggtgtatctttcaaacctaatacagacgatattcgtttcgctcctgcaattaaattgattaaaaatcttcttaacaaaggagcgcttgttaaagcttatgaccctaaggcccttgataatttaagagaaactattcagcataaaaatttgtctttttgtcagaatcccttcgatgcagccaaggaatcaaacgcattgattatcgctactgaatggaaggaattttttaacattaacttggaagagttaaaaacttatttaaaaaatgctgttattttcgatggaaggaatatctacgatcctaatcttctgtctgagaaaggatttgattacatatgtattggcaggcctactaaaattaatgacacaaaagagttttccaattctttgaatgtcgtaaaatga

SEQ ID NO: 205265 - DNA, 1204 bp, Unknown
  Bacterial polypeptide expressing nucleotide sequence isolated from the Sargasso Sea
atgaatattgtcataatcgggactggatatgttggccttgtaacaggggtgggcttagctagtttgggtaataaagtaacgtttattgatttagatgaagacaaaataagtaatttaaataataaaaaactcacattttacgaaccaggtctagataaatattttgaagaagataaaacttttacaaatatggaatttgtttctagttattcagatattgactggaaagataaagaaatagtatttatatgtgtccaaacacctaataacgttgaaactaattcagtcgatacaaaatttcttgagtcagcaataacagaagtaagtagtgttcaaaacgaaaatttggtaataactattaaatctacgattcctccttatgaaatagaaaaaatatgtaatcaggtaggtctagacatggattcactgactttcaatcctgaatttttaagagaaggaacagcagtagaagatttctttaaaccagacaggattgtaattggaggtaatgattcttcaaaagtacaaaaactaaaagatttatactctaattttgaagccgaaattataattactgacccaataagttcacagttaataaagtatttagcaaatacctatcttcctatgagattatcttttgtaaatgaagcagcaagacttgttaacagctccggagggaatctagatgatgtattaaaaggagtaggaatggattctagaataggtcaacattattttaggccttctcccgcctggggaggatcatgttttccaaaagacgttgttgaagtaaataatttttatgattctgaagaagtaaaccttccattaattgcaaacataatagaatctaataaaattcaaacaaaatggacagcaaatatgcttaaatcaattcataatgaaaagaagttaaatgggataattcttgttggagcagcattcaaagaagacacagacgatttaaggaattccccaaccatagatatatataatcaattattagctgaaaatatgaataccatgatttatgatgatctcattaaatcagaggaatatctttctatagaagattttgaaaaattagaaggagctcacttaattgctttaatgtacccagtaaaagaaaatcttatgttaaaaattaatagtattgtatctaatacgaattcatttttatatactccttggcaattatgaa

SEQ ID NO: 205266 - DNA, 240 bp, Unknown
  Bacterial polypeptide expressing nucleotide sequence isolated from the Sargasso Sea
tatgaaaatatgtatgataggtacaggctatgttggtttagttagcggaacttgttttgcagatcttggaaacaaagtttactgtgttgataaagataaatcaaaaataaacaaacttaaaaattctatttcaccgatatacgaacctggtttagaagatctaataagaaataacttaagagcaaaaagacttatttttactgatgatctacaaaaagcaatagaagactcgcaaataat

SEQ ID NO: 205267 - DNA, 1020 bp, Unknown
  Bacterial polypeptide expressing nucleotide sequence isolated from the Sargasso Sea
tatgctcgaaaagataacagttgtgggctctggttttgttggattttcattagcagttctaatgagccaaaaaaaagaaatcactattgttgaccttgataaggaaaagcttaaaaagattaatcaaaaaatttcacccatcaaggataaaaatattcaagaatttttagataccaaaaaacttaaattaaaaacttcaaataatttaaaagattctattgaggatgtcgacctagtaattttagctttgccaacaaattttgataacgatagtaacaattttgatacttccataattgacgaaactgttaaggaaattctttcacatgataaaagtattccaattttaattaaatcaactgttccaattggctatacaaatattttaagaaacaaatatcgtaattcggaaattatattttctcctgaatttcttagagagggccatgcattgcatgataatttatttcctaataggattattattggttcaaagaataagttcgcaatagagttatcagaattatttttagattttgctcaaaataagccaaagattttttttatgggtagtgacgaggctgaatcagtaaagcttttttctaatacttatctagccaatagggtgaatttttttaatgaactcgattcttttgcaatagaaaaaggattggacacaaaatcaataattgatggcgttacaagtgatgagaggataggagatggttatcataatccatcttttggttatggaggatactgtttaccaaaagattcaaggcagctagagtctaattttggttcaattccacaaatgtcaattacagcaactattgaaggtaactcattacgaaaatcttttttagctaactatatcaattcacttggtaagaagaatattggaatatatagattaattatgaaaaaggactcagataattttcgtgaatcatcaattattgatttaataagtcttctaaaagaaataaatccaacaataaattttgctatatatgaacc

SEQ ID NO: 205268 - DNA, 247 bp, Unknown
  Bacterial polypeptide expressing nucleotide sequence isolated from the Sargasso Sea
catgaaactttgtatgataggaacaggttatgtgggtttagttagtggtgtatgctttgctgacttaggtaataatgtaatttgcgttgataaagatctaaacaaaatagatttactatctaaaggaaagattcctatttatgaacctggactaacagaattagtaaaaaaaaattataagaataaaagattaaaattttcttcagatttgaaaaaatcaataaaaaattcggatataatttttatt

SEQ ID NO: 205269 - DNA, 562 bp, Unknown
  Bacterial polypeptide expressing nucleotide sequence isolated from the Sargasso Sea
atgttgaacatattagtaataggactgggttatgtagggacagcaaacgctgtacttctatctcaacaaaatgaggtaacttgctttgatatagatgtctcaaaatcaaataaccttgttaatggtatttcaccaatagaagataaagaagtatcagaatatttatcatcaaagaaattaaatttaaaaacagtcaataattatccaactgaaattgataattttgatattgctattatagctactccaactaactacgatattgaaacaaacaaatttgatacttcgtcaatcgaacaatcattagataatattcaaaaatctaattctaatccaactgtaattattcgatcaacaataccagttggatatataaaaaaaatacaaaagaaataccctaattttgaaattatttttgtacctgaatttttaagagagggtagggctttgaaagatagtctttatccatctagaatagttataggctcgcattctaaaaaaggcaaagagttcgcaaaactattaatggatgcctcattagataaaaatgttcaaactattt

SEQ ID NO: 205270 - DNA, 496 bp, Unknown
  Bacterial polypeptide expressing nucleotide sequence isolated from the Sargasso Sea
atgaaagtatctattattggaatgggctatgtagggctgtcaaatgcagtattgctatcattaaagaataatgttgtctgtcatgatattgacacttcaaagcttgattgcataaataaacgtatatcaccaataaaagacagcttaatttcaagttactttaaaaataaaaaactaagattaactacatcagagtacataaataaagaaatgtcgaattcagactttataattatctcaacaccaactgactttgatgttcagaagaagactttcaatacctcgtctattgatgtaattttaaaaaaactaaattctttaaaatctacagcacatattattattaaatctacattacctatcggatatacaaaaaaagttaatagtttatataaaaaacttaaaatatatttctctccggaattccttagagaaggcaaagcattatatgataatctttacccatctaggataatagtgggtggtaaagataaag

SEQ ID NO: 205271 - DNA, 652 bp, Unknown
  Bacterial polypeptide expressing nucleotide sequence isolated from the Sargasso Sea
atgaaattagtaatggttggaacaggctatgtcggccttgttagtggagcttgctttgctgaatttggatatcaaactatttgtgtagataatgactctaatagaatttctgaactgaattctggtaagtgcccattttatgagccaggaatggatgacctaatctctaaacatttaaatacaacaaaattattaacattttcgaattctttaaatgaatcaatgaaaaatgcagatataatttttataacagttggtacaccaagcagaagattggaagatgaagctaatttaggttatgtttggtcggcagctgaagagattggtaataatattaaaaaatattgtttagttgtaactaaatcaacagttcctgttggaacatctcaagaaataaaaaaaattatacaaaaaaaagtttctgatgaaaattttgatgttgtctcaaatccagaatttttaagagaaggttcagccataaatgatttcatgagacctgatagagtagtcatcggcactgaaaataaaaaatcagaaaatattatgaagaaactttatagacctttgtatttacgtgaaaccccattggtatccacttccatagaaacctcagaaattataaagtatgcatctaatagctttctggctacaa

SEQ ID NO: 205272 - DNA, 514 bp, Unknown
  Bacterial polypeptide expressing nucleotide sequence isolated from the Sargasso Sea
atgaaaaagataactattattggcacgggttatgttggccttgttagtggtgcaggaatctccgattttggtcattcggttatatgtgttgatataattaaagaaaaaatatcacggctaaaaaatggtatgataccaatctttgagcctggtttacaagaattggtgaataagaatgtagatgctggtaggctctcattcacatcaaatatagccgctgctattaaagagggagaggtgatttttattgcagttggcacaccagaagctgaagatggaactgcagatatatcagcagtggaatctgtcgctaaagctattgggaaaaatataaatgggtataaagtaatttgtactaaaagtacagtaccagtaggtacaggcaagctggttacaaaagtcataaatgaaactaaagatagtaaatatgaatttgattatgtttctaatcccgagtttttaagagaaggatccgctgttaaagattttttatggccagatagagagttgtaat

SEQ ID NO: 205273 - DNA, 1084 bp, Unknown
  Bacterial polypeptide expressing nucleotide sequence isolated from the Sargasso Sea
attttaccaatatatgaaccaggtctagatgaattaattaaaaaaaattattccgttggtagattaatttttaccaatgaccttaaaaatgcaatctccaagtctgaattaatctttatttgtgttggtacaccaaataaaaaaaaatctaatgaagtcgatttatcatatgtatttaaagccacaaaagaaattgctaagagtacaaaaaataaaaagattttaataactaaatcaacagttcctgtaggaactggtgacgctattgaaaaattgttgaaaaaatttaagaaaaaaaatattgatattatctctaatccagaatttttaagagagggagaagcagtaagagattttagatttccagatagaatagtaataggatctaataagaaaaaatattttaaaacattaaaaaggttgtaccaacctttgataaataaaggggccaatttttttactacatctcgtagaggagcagaattaataaaatatgcatctaatgcttttttagcgacaaaaattacttttataaacgaattagcgaatttgtgcgaaaaagccaatattaatatcgaggacatagctcttggtatgggcagtgatagccgtattggtagcagatttttaagggcggggccagcatatggtggatcctgttttccaaaagataccaaaggtttagtttctactggcgatagatttaagactaatctttcaattgtaaaatctgtgataaaatctaatgaaaatagaaaaaaaatacacactgaacgaattaaaaaaatattaggaaccctaaaaggaaaaaaaattgcttttttaggtgttacttttaaacctaataccgatgacatgagagattctgtaagtctgaaaatgatacctaatttgtgtaaaaaaggatctataataacttattacgacccaactggcccaaaacaacattttaaaggtatcaaaaattgtcaatataaaaaaagtattaaagaaacttgtaacaatgttgatttgatagttctccacacagaatgggatgaatttaaatccttagaatttaataaaatagtaaaaaaagtataaa

SEQ ID NO: 205274 - DNA, 460 bp, Unknown
  Bacterial polypeptide expressing nucleotide sequence isolated from the Sargasso Sea
tatgaaactatgtatgattggaacaggttatgttggtttagtaagtggagtatgcttttctgatttaggtaataaagtttattgtgttgataaagatgttaataaaatcaattctttaaataaaggattagtcccaatatacgaacctggcctagaggaaatcttaaaaaaaaatcacaagcaaaaaagattattttttacatctaacttaaaaaaagcagttcaaaattcagatgtaatttttatttgtgtgggaactcctacaaaaaaaaatagtaattctgctgatttaaagtctgtatttaatgttgcaaatgatcttaaaaaattaatatccaagtataaaattattgttacaaaatcaactgttcctgtaactacaggagataaaattgaaaaaattttatacaatttaaaaaaaaaaaatttaattgatgttgtttcaaatcctgaattttga

SEQ ID NO: 205275 - DNA, 220 bp, Unknown
  Bacterial polypeptide expressing nucleotide sequence isolated from the Sargasso Sea
atgagtaacatcctttgtatcggagccggttatgtaggtggaccgacaatggcgatgatagctaaatattgtccggaacacactataactattgtcgacatcaaccaggaacgaatagatcattggaacagcgacgatttacctatttatgaacctggattactggatgtggttcagcagacacgtgggaaaaacttatttttccaaactgatattgccg

SEQ ID NO: 205276 - DNA, 385 bp, Unknown
  Bacterial polypeptide expressing nucleotide sequence isolated from the Sargasso Sea
atgaaaataactatagtcggaacaggatatgttggcttagtctctggtgcttgcctttctgattttggccatcaagtagtctgtgtagataaaaatctagaaaggattcaagacttaaaaaaaggaataattcctatatatgaaccaggactagatattctagtaaagaagaatgtaaaatctagacgccttacatttacagataatatagacgactcattaagaagctctgaggttgtatttatagctgttggaactccttctagaaggggagaggggggtgctgatttatcttatgtacatgaagctgctcaagagattgcaaagatgtcagataactatattttatttgttacaaaatcaactgttccagtgggctcaaata

SEQ ID NO: 205277 - DNA, 364 bp, Unknown
  Bacterial polypeptide expressing nucleotide sequence isolated from the Sargasso Sea
atgaaaatttgtattattggatcgggctacgttggtttagttagtggaacatgtttttcagaactaggaaataaggtcatttgtgtagataaaaataaacaaaaaattgaaaatcttataaatggaataattccaatatatgaacctggcttagaggaactaataataagaaatgtcaaacaaaagagacttaatttttctacagatgtagataattcaataagaaattcagatgttatatttatttgcgtaggtacaccaactagcaaaaaatccaataaggctaacttaaaatatgtttataaagttgttaatgatataagtaaaaatttaaataaatacaaaattatagtcacaaaatcta

SEQ ID NO: 205278 - DNA, 1216 bp, Unknown
  Bacterial polypeptide expressing nucleotide sequence isolated from the Sargasso Sea
gttgataaagatataaaaaaaattaacaatttaaaaaaggggattattcctatttacgaacctggtctagaagaattagtattaaaaaactataagaataaaagactgaatttttcaacaaacttaaaagaatcggtgaaaaaatcagatattgtttttatatgtgtgggtacaccatcaaaaaaaaatagtaatagcgctgatttaagtcaagtatatgctgttgcaaaagaaatatccaaatctattaaaaaatttaaaattataattaataaatcgactgttcctataacaacaggtgatgaacttgaaaaaattatatctaaaaaagttaataaaaaatttttttcagtagtatcaaatccagaatttttaagagagggtgaggctattagagattttatttatccagatagagtggtagttggatcaaatgatagcagatcccagagaatattaaaaagtttatattcaccattaatttcaaaaggtgcaaaatttgtatctacaaaaaggagagcggcagaattaattaaatatgcttcgaatgcctttttggcaacaaagattacctttataaatgaaatagcaaatttatgtgaaaaaaccggcatagatattgaagatatttcaatagggattggactggataaaagaattggaagcagatttttaagagctggacctgcatatggtggatcatgttttcccaaagatactaaagctttagtttctactgcggataaatttaaaactaatttatcagtcataaaaagcgttatcagatcaaatcgtataagatctgatttactatctaaaagagttagtttgattttgaaaaataaaattaaaaataaagtcgtatcctttttaggtgtaacttttaaagcaaataccgatgatatgagagactcgtctagccttaaattaatcccattcttatcaaaaaaaggtgctaaaattaaatattttgatcctactggatcaaaaaaagaatttaaaaaattaaaaaatgttgaattttctaattcaatacaggaatcaatcaaaggatcagatattgtaattatacatactgaatggaatgattttaaatcaattaatttcaaaaaattttcaaaaaataaaaaacttattatttacgatatgagaaatatttattcaccaaataaaattaaaaaactaggtttaaaatattttggtattggaagataat

SEQ ID NO: 205279 - DNA, 1183 bp, Unknown
  Bacterial polypeptide expressing nucleotide sequence isolated from the Sargasso Sea
gaatttccccctatctatgaaccaggattagatgaattaataaaaaaaaattttacatctaaacgtctctcattcactacaaatattgataatgctataaacacatcagacataatttttatatgtgtaggcactcctacaagaaaagggtcaataaaagttgatttatcttttgtttataaatgtacaaaagaaatattaaaatattcaaaaagaaaaaaaattattgtaacaaagtcaactgtaccggtaggaacaggtgatgagattgaaaaaattataaaaaaaaagaaaaaactttttacagtaatctctaatcctgaatttttacgagaaggcgaagcaatacgagattttagatacccagatagaattataattggttctaacgaaaaaaaagcctttaatattatgaaaaaactttatgcaccattaactaacaagggctcaaaattttttactacttcaagaagaggagcagaattaataaagtatgcatccaatgcttttcttgcaactaaaattactttcattaatgaacttgctaacttatgtgaaaagtctggagttaatgtagaagatatttcattaggtatgggctctgatagtagaataggtggtaggtttttacgtgctggaccagcttatggtggttcatgttttccaaaagataccaaagggcttgtatccgcagcagagaaatacaaaataaatttatcagttgtaaaatcagttattagatctaatcgacaaagagtaaatttacttacaaaaagagttcataaaattttaggtccaaatttaaaaaataaaaagatttcttttttaggtgttacatttaaaccaaacactgacgatatgagggactcctctagccttaaaatgataccctatctatgtaaaaaaggcgccaaagttagatattatgacccatctggagaaaaaaatgagtttaaaagaatcaaaaactgcaattacagaaataatataaaatctaattgtaatgatacagatttagtagttctactcactgagtgggatgaatttaaatcaatagatttcaaaaaggttgttaaaaatactaaatttaaagtttatgatttaagaaacctttattctgctgaagaaatgaaaaaaaaaaagattaaatactactctgttggcagacctaacactaattaag

SEQ ID NO: 205280 - DNA, 634 bp, Unknown
  Bacterial polypeptide expressing nucleotide sequence isolated from the Sargasso Sea
aatgaaactttgcatgataggaacaggatatgtaggtctagtaagcggtgtatgtttttcagatttaggaaatactgtttattgcgttgataaggataaaaaaaaaattaacttactaaattcaggaaaagttccaatatatgagcctggtctggaagaaatactcaaaaaaaattttaaacaaaagagactaatttttacaaccgatcttaaatcagctgttactagttcagatataatttttatatgcgttggaacacctacaaaaaaaaaaggaaattctgcagatcttaaatatatttttcaagtagcaaatgaaataaaaaaatacatcaaaaaatataaaatagttattaccaaatctactgttcctattaccactggagataaaattgaaaaagttcttttgaacttaaaaagaaaaaagttagttgatattgtatctaaccctgagtttttgagagaaggcgaggcaataagggatttcatttatcccgatagggtagtaataggaactgatagcaacaaggcaaacaaaattttaaaatcactttacttaccaataattaaaaaaactagtagatattttaatacttctagaaggggtgctgaattaatcaaatatgcttcaaat

SEQ ID NO: 205281 - DNA, 934 bp, Unknown
  Bacterial polypeptide expressing nucleotide sequence isolated from the Sargasso Sea
atgaaaatatgtatgataggtacaggctatgttggtttagttagcggcacctgttttgcagatcttggaaacaaagtttattgtgttgataaagataaatctaaaataaacaaacttaaaaattctatttcaccgatatacgaacctggtttagaagatttaataagaaataacctaagagcaaaaagacttttttttactgatgatttaaaaaaagcaatacaagactcgcaaataatttttatttgtgttggtacaccaacaaaaaaaggatcaaatttagttgatctatcacaagtatacagcgttacaaaatcaatatctaaatacattaaaaattataaaatcatagtaacaaaatcaacagttccagttacaactggtgatcagatagagaaaataattagcaaaagagttaaaaaatctttatttgaagttgtatccaatcctgaatttttaagagaaggcgaagctataagagactttaaataccctgacagaatagttattggatcgaataacaaaaaaattttcaaaaaaatggaacttttatatgaacctttaattaaaaaaggtgctaaatttttttgttcatcaagaaaaggtgctgaactaattaaatatgcatctaatgcatttttggcaacaaaaattacatttataaatgaaattgcaaatttatgtgaaacagcaggtataaatgttgaggatatatctgtaggaatgggctccgatgcacgaattggaagcagatttttgagagcaggcccagcctatggaggctcttgttttccaaaagatactaaagggctagtttctattgctgaaaaatttaaatctaatctttcaattgtaaaatctgtaattaaatcaaatcaaaatcgaaaaatgttgttaactaaaagagtattaaaaattatgaataataaaataa

SEQ ID NO: 205282 - DNA, 910 bp, Unknown
  Bacterial polypeptide expressing nucleotide sequence isolated from the Sargasso Sea
atcaactgttgaaggggtaattttagattgtatagaaataaaccccaaagggctaatagtcatcaagtcaactattcctctaggtttcacagacaatatgagaaataagtttaacaaggcagatataattttttctccagagtttttaagagagagcaaggctctttacgataatctatacccgtcacggattgtgattggaggagagtcaaagaaagcagtaaagtttggtgagatgctattagaatgttccttttattctaaaaaagatgtacaagtaataataatggagcccaaagaagctgaagcagtcaagcttttttctaatacttttcttgctatgagaatatctttcttcaatgaattagatagttttgcggaaataaagaaattatcaactgagaagattattgaaggagtaagtacagatcctagaataggaaattactataataatccttcttttggatatggaggttactgtttgcctaaagatacaaagcaattactagataattttaataaaattccaaataatattataaaagctgtagtagagtccaataagacaaggaaaaatttcattataaactcaattttaaataaatatccagatactgttggcgtatatagattaattatgaaagagggttctgacaattttagagaaagtgctgttttagatatactcaataatttaaaaagaaaaaaaataaaaattatactgttcgaaccgtttgttaaagagaactattttaatgatatagaggttgtacctaacattagaagttttatagaaagatctgatttaattatcgcgaacaggttgtcagatgatctaaaacctggttctgaacaaagtatattcaagagatattttccaagagaactaattgactttaagaaataa

SEQ ID NO: 205283 - DNA, 541 bp, Unknown
  Bacterial polypeptide expressing nucleotide sequence isolated from the Sargasso Sea
gatgaaaaagtacaaaatagctgttgcaggaacgggttacgtgggcttatctaacgcggttctgttggcgcaacacaatgaagtgaaggctattgacttagtacctgaaaaagttgagatgctaaataaccgacagtctcctattgaagacatcgagatttcagattatctagcgaccaaagagcttgatttagaagcaacgctagacgctaacatagcttaccgcgacgcggactatgtaatcattgccacgccgacagactatgatgcccaaactaattactttaataccagcagtgttgatgcagtaattaaaagcgtgttggcggttaacccaaaagcagtgatggtaattaaatctaccgtgcctgttgggtttacgcgagaggctaaagcgcgccacggcagcgataacattatcttctcacctgagtttttacgagaaggcaaagccctttacgacaacttgcacccaagccgtattattgtaggcgagcgttcagagcgagctgaaattttcgccaagctattagagcagggc

SEQ ID NO: 205284 - DNA, 658 bp, Unknown
  Bacterial polypeptide expressing nucleotide sequence isolated from the Sargasso Sea
tatgaagctgtgcatgattgggacaggttatgttggtttagttagtggagtatgtttctctgatttaggtaatacagtttattgtgttgataaagattttaataaaataaatctcttaaacaaaggcctagtcccaatatatgagccaggtctagaggaaattttaaaaaaaaacttcaaacaaaaaagattaatttttacaaataatcttaaaaaagctgtttctaattcagatttaatttttatttgtgtaggaacaccgacaaaaaaaaatagtaattctgctgatttaaaatatgtatttaaagttgcaagagaactaaaaaatattattaataaatataaaattattattactaaatctacagttccagttacaactggtgataaaattgaaaaaatattaaaaaatttaaaaaataaaaaactcattgatgttgtatctaatcccgaatttcttcgagaaggtgaggctataagggattttatatatcccgatcgcgtaataattggtacagatagtaaaaaagcaaataaaatccttaaaactctttatatgccaataattaaaaaaactagtagatattttaatacatctcgaagaggtgcagaattaattaaatatgcatcaaactcatttttagcaactaagatttcg

SEQ ID NO: 205285 - DNA, 1023 bp, Unknown
  Bacterial polypeptide expressing nucleotide sequence isolated from the Sargasso Sea
actgttttgctgacttggcataatgttatttgtgttgataataattcaaataagatttctaaacttaaaaatggagaaattcctatttatgaacctggtttagaagaacttattaaacgaaatttgaggcaaaaaaggttagaattctcaacaaatatatcagcgtcaattaaaaaatcagatcttatatttatatgtgttggtactcctaccaatcctaaatctaataaagctgatttgaaatatgtttatcaagttttaacggatataaaaaagaatttaaataaatataaaataatagttactaaatccacagttccagtaactactggtgataatattcaaaatttattaacaacaaaaaataataaaaaattatttgatgttgtttcaaatccagaatttctaagagaaggtgaagctatcagagatttcatgtttcctgaccgagttgtagttggaactaacagtaaaaaggccaataatgtgttaaaaaatttatattctccaattattaaaaagaagggaagatatttcaatacatcaagacgtgcagcagagattataaaatatgcatctaatgcatttctagcaacaaaaattacttttataaatgaaatttcaaatttatgtgaaaaacttaacgttgatgttactgatatttcagttggtatgggcgctgatgaaagaattggtggaagatttttaagagctggaccaggttatggtggttcttgttttccaaaagatacacgtgcattagtttctacttcaaaaaaatttaaaaccaatttatcaatagttaaatcaacaatttactctaatgataataggtacaaatatttattaaataatattaaacaaatattaaataataagataaaaaataaaaaaattacatttttgggtgttacttttaaggctggtactgatgatatgagagactcggcatctctaaaattaatcccatatttgactaaaaaaggtgcaaaagtttcatactatgaacctacaggaataaaa

SEQ ID NO: 205286 - DNA, 948 bp, Unknown
  Bacterial polypeptide expressing nucleotide sequence isolated from the Sargasso Sea
aacaggctatgttggcttggttagtggagtttgtttttcagatctaggaaatactgtttattgtgtagataataatattgaaaaaattaatgcacttaataaaggaatactccccatatatgaaccaggtctagaggaaattttaaaacgtaattataaacaaaaaagattaatttttacaaataatctaaaagaggcagtagaaaactctgatattgtatttatttgcgttggtacacccactaaaaaaaatagtaactcagctgatttgaaatatgtttttaatgttgccaataatttaaaaaaatttattaaaaaatataaaattattatcacaaagtctacagtacctgtcactactggtgataaaattgaaaaaattttgataaaacaaaaaagaaaaaaattggtagatgttgtttctaatcctgaatttttaagagagggtgaagcaattagagattttttgagccctgatagagttgtagttggaactgatagtaataaggcaaataaatatcttaaaaacctttatttacccatagttaaaaagacaagcagatattttagaacttcaagacgtggagctgaactaattaaatatgcatcaaatgcttttctagctacaaagatatcctatatcaatgaattagcaaatctttgcgaaaaaacgaatgttgatattaaggaaatttctcaaggtatgggctcagatcaacgaataggggatagatttttaagggcgggcccagcatatggtggctcttgttttcctaaagatactagagcaataatagatacctcaaataagtttaaatcaaatttatcaattataaaagctgtaattaaatcgaatgaagatagaaaaaaattattaacagaaaaagtataccaaattttaaataataatctaaaaaataaattaataacttttttaggagttacttt

SEQ ID NO: 205287 - DNA, 876 bp, Unknown
  Bacterial polypeptide expressing nucleotide sequence isolated from the Sargasso Sea
aaagtgtaattgaaaaagtcttagaatttaataataattgcacaatagttattaaatcaactatccctataggttatactgaccatttaaaaaataagtttaaatataagaaaatattcttctcgcctgagttcttaagagaaggctcagctctttatgataatctttatccatcaagaataattataggtgataccggtgaagaagcagcgattttttatcagcttatttctaaaagtgcaaaaaaagataatataccagtactttacatgaattcaaatgaagcagaggcagtaaaattattcgcaaatacttatttagcaatgagaatatctttttttaacgaattagacagtcttagcgaaagttctagtatggatacattaaaaataattcaaggagtttgtctcgatccaagaattggagattactataataatccatcttttggttatggaggttattgtttgccaaaagataccaagcagcttcttaaaaattatgagtcagttccaaattcgattataaagtctattgtaagctccaattcgattaggaaagattttattgctgactcaattatgaaaaggaaaataaaaaccgttggtgtttatagattgataatgaagtttggttcagacaattggagaaatagcgcaattaaagacgtaataagtagaattaaatcaaaaggtttagatgtaattgtttatgagcccacttttgaaaaaaagactttttttggtttagatatagttaatgatattgccaaatttaaagaagatagtgacctaatcatagcaaatagaattgataacggaatttctgacgtgatttctaaggtatattctagggatttatttaatcgagattaat

SEQ ID NO: 205288 - DNA, 553 bp, Unknown
  Bacterial polypeptide expressing nucleotide sequence isolated from the Sargasso Sea
tatgaaaatatgcatgattggtactggttatgttggtttggtaagtggaacttgttttgcagatttaggtaataaagttttttgtgtagacaaagataaaataaaaataaataaattaaaaaacgtcatttcaccaatttatgaacccggtttagatgatttaattagaaacaatgttaaaacaaaaagattaaatttcacaaacgatttatcaaaagcagttaaagagtcacaaattatttttatttgtgtgggaacaccaacaattaaaggttctaataaagttgatctttcccaagtttatagtgttgctaaatcagtagcgaagtacattaaaaactataaaataattgtcaataaatctacggtcccagttactacgggagaccaaatagaaaaaataattggtaaaaaggttaagaaatctttatttgatgttatatcaaatccagaatttttaagagagggcgatgcgataagagattttaagtatccagacaggattgttataggctcagataacaaaaaagtatttaagaggatgaatcttcta

SEQ ID NO: 205289 - DNA, 661 bp, Unknown
  Bacterial polypeptide expressing nucleotide sequence isolated from the Sargasso Sea
tatggaattcactgttgtcggcgcaggatatgttggactaagtttggctactctcatttcacaaaattataacgtaattttatacgatattgatgaacaaaaaatttcttcaattaataaaaaaaaatcgcccatcaaagacaaaaaaattcaagattttcttaaatataagaaacttaaattgttttctacctctaaaatagaagaagcttacaatagaactgattttgttataattgctactccaacaaattatgattatgaaaggggaacttttgatacgtcttctgtagagaaatcaataaagcagagtctttcatatcagccaaatgcctgcataataatcaaatcaaccgttcctttgggattttcagaaaaaatgaggctaaaatttaaatataaaaaaatttttttttcacctgaatttttaagagaaggtagtgcgttgcatgataatctatttccttccagaattatcgtaggcggtaatcaaccagaattaaaaatctttgcaaatgttctagccgaatgtgcagagataaaaaaaaataatatcaagatgttgttcatggaatcttcagaggctgaggcggttaaattatttgctaatacataccttgcaatgagagtatccttttttaatgaattagatagttctcac

SEQ ID NO: 205290 - DNA, 943 bp, Unknown
  Bacterial polypeptide expressing nucleotide sequence isolated from the Sargasso Sea
tatgaaaatatgtgtgattggatcaggctatgtcgggttagtcagtggtgcatgttttgctgaactaggtaacaatgtcattggcgtagacaaaaacttaaataaaatatctaatctaaagaatggagtaattccaatttacgaaccaggattagaagaattaattcaaagaaacgtaaagcaaaaaagactccaattttcagagaatatatcaacctcaattataaaatcagatgttatatttatctgtgttggcactccaacaaaagttaaatctaacgaagcagatctaaaatatatatttcaagtagtaaaagatttaaaacaaaatttaaaaaaatataaaataatcgttactaaatctacagtaccagtcaccactggtgacaaaattcaaaaattattaacgactaaaaaaaataaaaaattattcgatgttgtttccaatccagaatttctgagggaaggcgaagctatcagagattttatgtttcctgatcgggttgtagttggaacaaacagcaaaaaggctaataatgtattaaaaaatttatattctccaattattaaaaaaaagggtagatatttcaatacatcaagacgtgctgctgaggttataaaatatgcagctaatgcgtttctagcaacaaaaattacatttattaatgaaatttcaaatttatgtgaaaaacttaatgtagacgttactgatgttgcagtaggtattggagctgacgagaggattggaggaagatttctaagagctggaccaggttatggtgggtcctgttttccaaaagacacacgagctttagtctctacttcaaaaaagtttaaaagtaacctatctattgttaaatctacaatttactcaaatgataataggtacaaatatttattaactaagattaaagaaatattaaataataaccttaaaaataag

SEQ ID NO: 205291 - DNA, 793 bp, Unknown
  Bacterial polypeptide expressing nucleotide sequence isolated from the Sargasso Sea
tatgaaactttgcatgataggaacaggatatgtgggtctagtaagtggtgtatgtttttcagatttaggaaatactgtttattgcgttgataaggataaaaaaaaaattaatttattaaactcaggaaaagttccaatatatgaaccaggtttggaagaaatacttaaaaaaaattttaaacaaaagagactaatttttactaccgatcttaaatcagctgtgattaattcagatataatttttatatgtgttggaactccgacaaaaaaaaagggaaattctgctgatcttaaatatgtttttcaagtagcaaaagacataaaaaaatacataaaaaaatataaaataattattaccaaatctactgttcctgttaccacaggagataaaattgaaaaagttcttttgaaattaaaaagaaaaaaattagttgatattgtgtctaatcccgagtttttaagagaaggtgaggcgataagagatttcatttatcctgatagagtagtaataggaactgatagtaataaggcaaacaaaattttaaaatcactttacttaccaataattaaaaaaactagtagatattttaatacttctagaagaggtgctgaattaatcaaatatgcttcaaatgcatttttagcaacaaaaattacatatattaatgagctttcaaatttatgcgaaaaaaccgatgttgatataaaagatgtgtcttttggaatgggtttggatcagcgtattggagatagatttttacgagcaggtccagcttatggtgggtcatgtttt

SEQ ID NO: 205292 - DNA, 535 bp, Unknown
  Bacterial polypeptide expressing nucleotide sequence isolated from the Sargasso Sea
aatgaaactttgtatgataggaacaggatatgtaggtctagtgagtggagtatgtttttcagatttaggaaatactgtttattgtgttgataaggataaaaaaaagattaacttactaaattcaggaaaagttccaatatatgagccaggtttggaagaaatacttaaaagaaattttaaacaaaatagactaatttttacaacagatcttaaatcagctgtgactagttcagatgtaatatttatatgtgttggaactccaacaaaaaaaaaaggaaattctgcaaatcttaaatatgtttttcaagtagcaaatgaaataaaaaaatatattaaaaaatataaaataattattaccaaatctactgttcctattaccactggtgataaaattgaaaaagttcttttgaacttaaaaagaaaaaaattagttgatattgtgtctaaccctgagtttttgagagaaggtgaggcgataagggatttcatttatccagatagagtagtaataggaactgatagcaacaaggcaaac

SEQ ID NO: 205293 - DNA, 891 bp, Unknown
  Bacterial polypeptide expressing nucleotide sequence isolated from the Sargasso Sea
tgcacgttattgcccggaacataaaatcactgttgtcgatatcaacgaagagcggatccgtcgctggaacagcgaagatcttccgatctacgaacctggattagatgaatgggtccgagaaacccgcggaaagaacctgtttttcagcaccattatccatcagtcgattgcagaagcggacatcatttttgtttcggtcaacactccgaccaagatgttcggccagggagcaggaagggccgcagacctccagtattgggaaaagaccgcaagggacatcctaagccatgccagacaacccgaggtggtggtggtggaaaaaagcaccctgccggtaagaacggcacaagcgatggccaggattctggactctggagacagcaaaactcatttcgaggtggtctccaatcctgagttccttgcagaagggaccgcgattcaggatctggaaaatcccgaccgggttttgattggcggacgggaaagtgaagagggctcttgggccgcggaaaccgttgccaagctttatgcgcattgggtcccggaagataggatcctgctcaccaatgtctggtccagcgaactcgcgaaactggtctccaacgcgatgcttgcccagcggatatcctcgatcaattcgatttcagctctctgtgaaaaaacagaagccgatatcggacaaatcgcaaaggcaatcggaatggacagacgcatcggttcaaaattcctccagaccagcataggcttcgggggttcatgctttcgcaaggacattcttcacctggcatacctttgcgaatactatggcctgcctgaggtgagtgattactgggaaagcgtagtccggatcaatgaatggcaaaccgagcgttttttccagaacattctgaa

SEQ ID NO: 205294 - DNA, 742 bp, Unknown
  Bacterial polypeptide expressing nucleotide sequence isolated from the Sargasso Sea
tatgaaaatatgtatgataggtacaggctatgttggtttagttagtgggacctgttttgctgatcttggaaataaagtttactgtgttgataaagataaatctaaaataaacaagcttaaaaaagctatttcaccgatatacgaacctggtttaaaagatttaataagaaataacctaagagcaaagagacttttttttactgacgatctaaaaaaagcaatacaagagtcacaaataatttttatttgtgttggtacaccaacaaaaaagggatcaaatttagttgatctttcacaagtatacagtgttacaaaatcaatatctaaatacattaaaaattataaaataatagtaacaaaatcaactgttcctgttacaactggagatcagatagagaaaataattagcaaaagagtaaaaaaatctctatttgaagtagtatctaatcctgaatttttaagagaaggtgaagcgataagagattttaaataccctgatagaattgtaattggatcgaataacaaaaagattttcaaaaaaatggagctcttatatgaacctttaataaaaaaaggtgctaaatttttttgttcttcaagaaaaggtgccgaactaattaaatatgcctctaatgcatttttggcaacaaaaattacatttataaacgaaatagcaaatttatgcgaaacagctggtataagtgttgaggatatttctgttggaatgggtaccgatgcaaga

SEQ ID NO: 205295 - DNA, 583 bp, Unknown
  Bacterial polypeptide expressing nucleotide sequence isolated from the Sargasso Sea
tatgaaattatgtatgattggtacaggttatgttggtttagtgagtggtgcttgcttttcagatttaggaaacaatgtaatttgcgttgataaagataaaaaaaaaataattaatcttaagaatggattaatacctatttacgaaccaggtttggatgaattagttgctaaaaattataaaaataaaagattaaattttacaaccgatttagttagtgctgttaaaaaatcagatataatttttatatgtgtgggaactccatctaaaaggaatagcaaaaaagctgatcttagtcagattttttctgtagcaaaagaaatatctaaatcaattaataaatttaaaattataattactaaatcaacagtccctgttacaacaggagatgatatcgaaaaaattattttaaaaaaagtttcaaaaaataaattttctgtagtttcaaatccagaatttctaagagaaggtgaggctataagagattttatttacccagacagagttgttgttggaacaaatgataaaaaatctaatttaataataaaaaaccttttattcaccattagtgtcaaaaggtgctaa

SEQ ID NO: 205296 - DNA, 659 bp, Unknown
  Bacterial polypeptide expressing nucleotide sequence isolated from the Sargasso Sea
tatgaaaaatgctttagttataggattgggttttgttggattatcaaatgcaatatttctttcaaagaatataaaaattactgcatatgacaatgacaaagataagattaatttattaaaacataataagccaccatttaaagataagagcattgagaactaccttaaagatgacactattaactttaaagtatcatcagataaatttgtattaactaagtcatatgaccttgtaataattgcacttccaacaaattactcagaaaatgataaatgttttgatacgtcttctatagaatattatctagactttttctcaaaaaataatccaaatacaatagttttaatcaaatcaactattccaattggcttttgcaactcaatggaaaaaagatttgatggcttgaaattaattttttctccagaatttttaagggaagggcatgctttaactgactgcttttatccatcgaggctaataatttctggagaaaaattatcagctaataaatttgcaaaattgtgtaccaaatcttttaagattaaaaatgttcctacaatgctgattgatcactctgaagcagaatcaataaagttatttagtaatgcttatctagcaaacagagtagctttctttaatgaacttgatagtttttcat

SEQ ID NO: 205297 - DNA, 718 bp, Unknown
  Bacterial polypeptide expressing nucleotide sequence isolated from the Sargasso Sea
atgaaactatgcatgataggaacaggctacgttggcttagttagtggagtttgttttgcggatttaggaaatgaggtcatatgtattgataaagatgcatcaaaaattagtaaattaaaaaaatccattgtaccaatttatgaacctggtcttgatgaacttgttaaaaaaaattctaaagcaggaagattaaagttttcaacaaatcttgcagatgctattaaagaatctagtattatttttatttgcgttggtactccaactaaaaaaaatacttttgaagcagatttgtctcaagtttattctgcatctaatcaaattagtaaaaatataaaatcttttaaaataatcattaataaatcaacagtaccagtaatgactggtgataaagttgaaaaaataatttctaaaaaagtttctaaaaaattgttttccgtcgtatcaaatcctgaatttttaagagaaggagaggcaataagagactttatatatcctgacaggatagtaattggtacttcaagtaaaaagtctagcaagatattaaaaaacctttattccccactaatttcaaagggcgcaaaatttatatctacctcaagacgtgcagctgagttaattaaatatgcttcaaattcatttttagctacaaaaataacatttattaatgagttggctaatttatgtgaaaaattaaatattaatgttgaggatgtatcaa

SEQ ID NO: 205298 - DNA, 973 bp, Unknown
  Bacterial polypeptide expressing nucleotide sequence isolated from the Sargasso Sea
gtctgtaatagcgagtaaatgttcgaaaatacaagttagtgtagttgatataaataaggaaaggattgatctttggaatagtaaagatttaaaaaatcttccaatatatgaacctggtttagatttaattattaaaaaatacagaggtaaaaaccttactttttcaacagacatagaaagagaaattgctcttgcagatatgattttcatatctgtaaatacaccaacaaaaacaaaagggcttggagcaggtcaagcaagtgaccttaagtgggttgaagcatgtgcgagacaagtagcaaaatttgccaaaggtcacactatagttgttgaaaaaagtacccttccagttaaaacagctcaagttataaaaaaaatactggtaagttcacaaaacccagaacaaacatcttctttcgatatactttcaaatcctgagtttctcgctgagggctcagcaataaaagatcttgagaatcctgatagagttttaattggaggagaaagagaagaagcaattattgcattgaataatatatatcttaattgggtacctaagaataaaatacttaatacgaatatttggagtagcgaattagcaaaacttactgctaatgcttttttagcccaaagaattagttctataaactccatagcagctttatgtgaagttacaggtgcagatataagagaagtatcaagagcaataggttctgatagccgcatcggttcaaaatttcttgattcaggacctggttttggaggaagctgcttcaaaaaagatattctaaatcttgtatatctttgtaaatattacgatctgcatgaagtcgctaatttttgggaaagtgtcgttacattgaataattggcatcaacatcgtttatctagtttaatagtcaaagaactttttggtacagtttctggtaagaaaatttgtatcttaggttttgccttcaaatcaaataccaac

SEQ ID NO: 205299 - DNA, 502 bp, Unknown
  Bacterial polypeptide expressing nucleotide sequence isolated from the Sargasso Sea
tttgtctacaacaacttcagcgatcaaagcatttaaaaattctaattttattgttatttgtacgccaacaaattacgatccaataaataaccagtttgatacatcatcaatagaaaaagttataaatcaagtcattaagcataatctaagtaatgctacaatagtaataaagtcaacaatacccgttggctacacaaataaaataagaaaaattttctcatacaaaaaaatatttttttctcctgaatttttaagagaagggtcagcattaaatgataatttatatccatcacgaattataattggaagtaaacaatcctacgcaaaaaaatttgcagaattacttatagattctgcagaattaaataaagatgaaattcctttgttaattatgaattcaaatgaagccgaggcagtaaagctttttgcgaatacctacctcgccatgagaattgcatattttaatgaattagatagttactgtgctgctcgcaagcttgat

SEQ ID NO: 205300 - DNA, 685 bp, Unknown
  Bacterial polypeptide expressing nucleotide sequence isolated from the Sargasso Sea
atgaaactttgtatgataggaactggttatgtcggattggttagcggggtatgcttcgctgatataggaaatcaggttatttgcgttgataaggataaaaataaaatagacaaacttaactctggtatttctccaatctatgaaccaggattagatgaattaataaaaaaaaatttcatagctaaacgtctctcatttactactaatattgataaagctataagcttatcagatataatttttatatgtgtgggaactccaacaaaaaaaggatcaattaaagttgatttatcttttgtaaataaatgcactaaagaaatattaaagtattcaaaaaagaaaaaaattatagttaccaagtcaacagtccctgtaggaacaggcgatgagatcgaaaaaattttaaaaaaaaagaaaaaactttttacagtaatctcaaatcctgaattcttaagagaaggcgaagctattcatgattttagatatcctgataggattgtaataggatctaatgaaaaaaaaatctttaatattatgagaaaactttatgcaccattaacaaataagggttcaaaattttttatcacatcaagaagaggagctgagttaataaagtatgcatctaatgcttttcttgcaaccaaaattacttttattaatgaacttgctaacttgtgtgaaaatc

SEQ ID NO: 205301 - DNA, 742 bp, Unknown
  Bacterial polypeptide expressing nucleotide sequence isolated from the Sargasso Sea
atgaaactatgtatgattgggactggttatgttggattagttagcggagtctgctttgctgacataggcaaccaggttgtttgtgttgataaagataaaaacaaaatagaaaaactcaactctggaatttctccaatttatgaaccaggattagatgaattaattcaaaaaaattttacagctaaacgtctttcatttacttcaaatatcgatagagccataaactcatcagatataatttttatatgcgtggggactcctacaaaaaaaggatcaattaaagttgatttatctttcgtttataaatgtacgaaagagatattaaaatattcaaaaagaaaaaaaattatcattaccaagtccactgtgcctgtaggaactggtgatgagattgaaaaaattttaaaaaaaaagaaaaaactttttacagtaatctctaatcctgaattcttaagagagggtgaagcaatacgagattttagatatccggacagaattgtaataggatctaacgaaaaaagaaccttcaatattatgagaaaactttatgcaccattaactaataaaggttcaaaattttttactacctcaagaagaggagctgaattaataaaatatgcatcaaatgcttttctcgcaactaagattacttttataaatgaacttgcaaacttatgtgaaaaatctggtgttaatatagaagatatttcattaggaatgggatctgatagtagaataggcg

SEQ ID NO: 205302 - DNA, 638 bp, Unknown
  Bacterial polypeptide expressing nucleotide sequence isolated from the Sargasso Sea
tatgaaactttgtatggtaggtacaggatatgtgggccttgtaagcggtgtttgttttgctgatttgggtaatgatgttatttgtgttgataacgatattagtaaaattaataatttaaaaaaaggaatcatacccatatatgaacctggtttagaagaattagttaaaaaaaattataaatctaaaagattatcatttacatcaaatattgctgaggcgattaaaaaatctaatgttatttttatatgtgttggtactcctacaaaaaaaaatagtaatgctgcagatttgagccaaatatacaatgtagctaaagaaattagaaaaaatattaaatctttcaaaattattattaacaaatcaactgttccagttacaacaggcgatgaagttgaaaaaattatctctaaaaaagttaataaaaaattattttctgtagtttctaatcctgaatttttaagggaaggagaagcaattagagattttatatatcccgatagagttgttattgggacatctaacaaaaaaaccaataaagttttaaaattactttactcaccattgatatccaaaggtgcaaaatacattaacacctcaagacgtggagcagaattaataaaatatgcatcaaatgctt

SEQ ID NO: 205303 - DNA, 779 bp, Unknown
  Bacterial polypeptide expressing nucleotide sequence isolated from the Sargasso Sea
tatgaaattatgtatgataggaactggttatgttggccttgttagcggtgtatgttttgctgatttgggaaatgatgtaatttgtgtagacaaagatttatcaaaaattaatagtcttcaaaaatctattattcctatttatgaaccaggtttagaagaacttgtaagaaaaaattcaaaatcgggtagattaaaattctcaacagatttgtctacttcaatacaaaaatccgatataatatttatttgcgtaggtactcctacaaaaaaaaataaatatgaggctgatttatctcaagtttattctgttgcaaatataataagtaagaatataaaatcttttaaaattataattaataagtcaacagttcctgttatgacaggtgataagttggaaaaaattatatctaaaaaaacaaaaaaaaatcttttcagtgtggtttctaatcccgaattcctaagagagggcgaagctataagggacttcatatatcctgaccgtgttgtgattggtacaactgacaaaaggtctaatagaattttaaaaaatctttatagtcctttaatatctaagggcgcaaaatacttgaatacttcacgtagagctgctgaattaattaaatatgcatctaatgcatttttagcgacaaaaataacatttataaatgaattggctaatttgagtgaaaaattggacataaatattgaggatgtttctataggaattggttcggataaaagaatagggagtagatttttaagagctggacctgcttatg

SEQ ID NO: 205304 - DNA, 927 bp, Unknown
  Bacterial polypeptide expressing nucleotide sequence isolated from the Sargasso Sea
gaaaagatgaaattctaattttagaaaccaataaagagaaaattcaaagaattaattctgggaaatccagtattgatgatcctgatatcagtgcattttgcaatgaacataatctaactttaaaagccatagaaaataaagaagaggcataccaggaagcagattttattattatctgtgttccttctgatttcaataacgaaacatcatcttttgacacccatattattgaggatgttataaatgatgctgtaagaaacaataatgatgcattaatcataatcaaatctaccattccagtaggatatacaagccaggctagagaaaaataccaaacaaaaaatattatcttttcacccgagtttctcagagagcattctgctatacatgatgtattaaatccatcaagagtcattgttggaaatgactcagagttatcaactgcttttgctgaactcatagcagaatcagttgagaatgagcctgagataattttaatgccatcttctgatgcagaggcagttaagctcttttcgaatacttaccttgcaatgagagtcgcgttttttaatgaactcgatacattttcaattgctaaaggcatatcaactgaaaatgttattaatggtgtttcaacagatccgagaatagggaagcaatataataatccttcattcggatatggcggatattgcttaccaaaagatactaagcagttgctcgcaaattttgaagaccttcctcaaaccataatccagtcagtgatcagctcaaatgaggcaagaaaaaatttcattatcgaggaaatcaaaaagcttcgtccagaagtagttggtatttataagcttgctagtaatccgaaagttaaaaattttagaaattcagaaatgctagatattatcactggtttatcaaacttatgttgat

SEQ ID NO: 205305 - DNA, 796 bp, Unknown
  Bacterial polypeptide expressing nucleotide sequence isolated from the Sargasso Sea
atgagagtatctattataggtatgggctatgtagggctgtcaaatgcagtaatgctgtcacaaaaaaataatgtcatttgtcatgatatagatatatcaagacttgaatgtataaataaacgtgtatcaccaataaaagacagtttaatttccagttactttaaaaataaaaaactaagattaaccacatcagagcgcataaataaagaaatgtcgaaatcagactttataattatctcaacaccaactgactttgatgttcaaaagaagactttcaatactttgtctattgatgtaattttaaaaaaactaaattctttaaaatctacagcatatattattattaaatctacattacctatcggatatacaaaaaaagttaatagtttatataaaaaacttaaaatatatttctctccagaattccttcgtgaaggcaaagcattgtatgataatctttacccatctaggataatagtgagtggcaaagataaaggtgcaaaacaatttgctaatttgttaaaaaattctagtttaaaaaaaaatataaaaactctatttatgaatagtagtgaggctgagtctgtaaaacttttttcaaatagttatcttgcggcacgaatttctttttttaatgagcttgattccttctctatgtctaataatcttgattctaaacaaataattgatggtatttgctctgatccaagaataggcgatggatataataatccatcatttggatatggcggttactgcctccctaaagataccaaacagctgaagctagcttcga

SEQ ID NO: 205306 - DNA, 681 bp, Unknown
  Bacterial polypeptide expressing nucleotide sequence isolated from the Sargasso Sea
tatgaaaatttgcatgataggatctggttacgttggcttagtaagtggcgcttgtttttctgatttaggtaacacagttacatgtgttgatattgacaaagatattatagaaaaattaaataaaggaataataccaatttatgaacctggtcttcatgaattgattttaagaaattttaaaaaaaaaagacttttattttcaacagatatttctagctcaataagaaagtctgatattatttttatttgcgttggaactcctactaaaaataataaagctgatttgaaatatgtaattaatgttgtcaatactataaaatctaatctaaatagatataaaataatagttactaaatctacagtcccagttaccaccggtgataaaattactaaaatcttaaaatcaaataaaaataaaaataagtttgatgttgtatcaaatcctgaatttttaagagaaggtgaagctattagagattttcaatttccagacagagttgtagtaggtactaacagcaataaagcaaataaaattatgaaaaaactatatcttcctttaattaagaagggtggaagatattttcatacttccagaagatcagcagaattaattaagtatgcttcaaacgcctttttagccactaaaataacttttattaatgaaatagctaatttatgtga

SEQ ID NO: 205307 - DNA, 932 bp, Unknown
  Bacterial polypeptide expressing nucleotide sequence isolated from the Sargasso Sea
gaaaatttgcattataggctcaggttatgtcggtttagtcagcggaacatgtttttctgaattaggaaataaggttatttgtgtagatattaacaaacaaaagattgaaaaccttaaaagaggaataataccaatttacgaacctggattagaagaattaattaaaagaaatgttaaacaaaataggcttaagtttactacaaatttatccatatctgttcgcaagtcggatattattttcatttgtgtgggcacacccacaaacaagaaaacttacaatgctgacttaaattatgtttttcaagttgcaaatgatattaaaaaaaatttgaacaaatataaaattattataatgaaatcgacagtacccgtcactactggtgataaaattgaaagtttattaaattcaaaaaataataaaaacaaattcgatgtagtatcaaatcctgaatttctaagagaaggtgaggcaataagagattttatgtatccagatagagttgtaattggtactagcagcaaaagagcaaacaatattttaaaaaatttgtatgttcctttaataaagaaaaccaatcgatatttccatacttcaagaagagcagcagagttaattaaatatgcagctaatgcatttttggccactaaaattacatacataaatgaaatcgcaaatttatgtgaaaaacttaatgttaatgttaatgacatttctcttggaattggatcagatgatagaattggatcaaggtttttaagagctgggcctggttatggtggttcatgttttccaaaagatacacgggctttactttcaatttcaaaaaagttaaaaacaaatctctcaattgttaaatcaactgtcaaatctaacgattcacgatataaatacttattaaatagaattaggggaatactaaaaaataaattta

SEQ ID NO: 205308 - DNA, 733 bp, Unknown
  Bacterial polypeptide expressing nucleotide sequence isolated from the Sargasso Sea
ggaaaggccttgtacgataacctttatccttcttggatcattgttggcgatcacagcgatgaggctcgcacatttgctgaacttttaaaagaaggggctatcaggaaagatatacccgtggtctttaccagccctgctgaggctgaggcgatcaaattgtttgctaatacttatctagccatgcgggtggcttacttcaatgagttggatagttatgctgtccattacgggctagacacgtgccagattatcgagggggtgtgcttggatccgcgtattggtgaccactacaataatccatcttttggttatggtggctattgcttgccaaaagatactaagcagctcctggccaattacaaggatgtgcccaacaacctgattcaggccattgtggatgcgaaccgcacccgcaaggactttgtggctgacgatatccttaagcgtaagccgcgaagggtgggagtatacaggttgattatgaaagcgggttctgacaatttccgcgcctcatctgtacagggaatcatgaagcgtattaaggctaaaggggtcgaggttgtggtgtatgagccagcactggaagaggatacttttttcggctccactgtgatgcgcgattttgacgcctttgctcaatcctgcgatgtgattatttccaatcgcatggtcgatgtattaaaaccttatgctgaaaaggtttatacccgtgatctttttggcagtgattgat

SEQ ID NO: 205309 - DNA, 787 bp, Unknown
  Bacterial polypeptide expressing nucleotide sequence isolated from the Sargasso Sea
tatgaaaatttgtatcataggatctggttatgttggattagttagcggggcttgtttttctgatttaggtaataaagtaacatgtgttgatattaataaagaaattatagaaaaattaaatagaggaataataccaatttatgagcctggtcttcaagaattggttgaaagaaatttaaaaaaaaaaagacttttattttcaactaatatttctagctcaataaaaaagtcagatatcatctttatttgcgtaggaactcctaccaaaaataataaagctgatttgaagtacgtatttaatgtcgtcaaaagtataaaatctaatctaaacaagtataaaataatagttactaaatctacagtcccagttaccacaggtgataaaattacaaaaatcttaaaatcaaataaaaataaaaataagtttgatgttgtatcaaatcctgaatttttaagagagggtgaagcaattcgagattttcaattcccagatagagttgttgtcggtactagcagcaataaagcaaataaaattatgaaaaaattatatctacctttaattaagaagggtggaagatattttcatacttctagacgatcagcggaactaattaaatatgcatcaaacgcttttttagcaactaaaattacatttattaatgaaatagccaatttatgtgaaaaatcaaacatagacgttaaagaagtttgcattggcatgggtttagatgaaagaattggaagcagatttctacgtgcaggcccagcttacggtggatcatgtttt

SEQ ID NO: 205310 - DNA, 748 bp, Unknown
  Bacterial polypeptide expressing nucleotide sequence isolated from the Sargasso Sea
atgaaagtagtcatgattggtgctggttatgttggtttagtttctggtgcttgtttttctgaatttggtgctgatgtaacttgtatagatcttttgcaagagaaaattgatcaattaaataaaggtaaaatacctatttatgagccaggccttgataatttagtaacaagaaatttaaatgctggtaggttaagtttttctacctcacttgatcaatttgtacctaatgctgatattatttttatagctgtcggtactccaacacgaagaggtgatgggcatgcagatttaaaatatgtatacgaagcagcaaggaatatagctaaccatctatcaggttatacagtgatagtaaataaatctactgtaccagttggtaccgctcgtcaagtttcacgtataattcgacaggaaaattcaaaagcggaattttctgttgcatccaatcccgagtttttaagggaaggagccgcaatttctgattttatgcgtccagaccgagttgtattgggagttgaagataagcgctcagaaaatttattaaaagaattatatagacctatcaatttaatcgaagcaccaattcttgtaacggactgggaaagtgctgagctaataaaatattcagctaatgcatttctagctacgaaaataagtttcattaatgagattgcaaatctttgcgaatcagttggtgctgatgtacacagtgttgctaagggtatgggtttagatggtagaattggga

SEQ ID NO: 205311 - DNA, 601 bp, Unknown
  Bacterial polypeptide expressing nucleotide sequence isolated from the Sargasso Sea
atgaaattgtgtatgattggtactggctatgttggtttagtaagtggagtctgtttttcagatttaggcaatgatgtaatatgtgttgataaagataaaaaaaaaattaacaatttaaaaaaaggcataattcctatttacgaacctggtttagaagaattagttttaaaaaactttaagaataaaagattgaatttttcaacaaacataaaagaatcggtgaaaaaatcagatattgtttttatatgtgtaggtacaccaacaaaaaaaaatagtaatagtgcagatttaagtcaagtatatgctgctgcaaaagaaatatctaaatctgttaaaaaatttaaaattataattaataaatcgactgtgcctgtaacaacgggtgatgaaattgaaaaaattatatctaaaaaagttaataaaaaatttttttcagttgtatcaaatcctgaatttttaagagaaggtgatgctattagagattttatttttccagatagagtggtagttggatcaaatgatagtaagtctaagagaatattaaaaaatttatattcacctttaatttcaaagggtgcaaaattcgtttccacaaaaagaa

SEQ ID NO: 205312 - DNA, 757 bp, Unknown
  Bacterial polypeptide expressing nucleotide sequence isolated from the Sargasso Sea
tttctctccagaattcttaagagaaggcaaagcactttatgataatttattcccctcaagaataatcatggggagtgagagtagaaatgcaaaagaatttgcaagtatattgtcaggatgtgctgaaaaaaaagatattaagaatttacacatgagtgctgatgaggcggaggctgttaaattgtttgcaaacacttatttagcaatgagggtatcattttttaatgaacttgacagttattcaatgaaacaccaacttcagacaaagaatgtaattgaaggtgtgtgcagcgacgaaagaattggcagtacatataacaatccatcatttggatatggaggttattgcttaccaaaggatacaaaacaattgcttgcaaactatgctgaagtcccacaaaatctcataaaggccatagttcaatcaaattcaaccagaaaagattttattgctgaagaaataattaaattaaaaccaaaaataattggtatttatcgattagccatgaagactaattctgacaattttaaattttcttcagtacaaggaattatgaaaagattaaaagcaaagggcataaaaattattatctacgaacctctatacaataagaaagaattttttaactccttaattgaaaataatcttgaaaactttaaaaatatttctgatctcattttggcaaatagaaattcttcagatttagacgacgttactgaaaaaatttttacaagagatttatttaataaggattaa

SEQ ID NO: 205313 - DNA, 626 bp, Unknown
  Bacterial polypeptide expressing nucleotide sequence isolated from the Sargasso Sea
tgcaattaaggatcttgaaaatccagatagagttttaattggtggatcggataaaaaagcaataaatttgttgagctccatttacaagagatggattcctgaagataagatattaattacgaacgtatggagtagtgaactatctaagttaattgcaaatgcatttttggctcagagaattagctccataaattcaatttcagctttgtgcgaagcgactggagctgacattaaagaagttgtaaaagcaattggttctgataaaagaataggggaaaagtttcttgctccaggtcctggatttggaggaagttgttttaaaaaagacatattaaatttagtatatctatgtcgtttttatggtcttgaaacagtagcaaattattgggaacaaattttgtatataaatgaatggcaaaagaaacgaatttctacattgattattgaaaagttttttggaactgtttctaacaaaaagattgttattcttggttttgcttttaaatcttctactaatgatacaagagaatctcccgctattgaaattgtaaaagacttgatcgagaatggagctaatttatttattaatgacccaaaagtatctgctttacaaattgaaaaagaag

SEQ ID NO: 205314 - DNA, 600 bp, Unknown
  Bacterial polypeptide expressing nucleotide sequence isolated from the Sargasso Sea
aatgagcactcgacagaacattacaatttttggcgcaggatacgtaggaatgtcacttgctgtacttttagctgaaaagaatattgttcaaatttttgacatagatcaacaaaaagttgaactaattaatgaggggcattccacaattgaagattctttgataagcgatttcattctcaagaaaaatataaaattacaagctactgatattccaagtaatgccattaatcattcagactactacattatcgcaaccccgactgactataatcctgaaacacaattttttgatacatcttcagttgaaaaatgtatccagatgattattgcttcaggtttaaatggcaccattattattaagtctacaattccaattggattcactgaactgatgagaaaaaaatttaattatgaaaagataattttttctcctgagtttctcagagagggctcagcattagaagataacttaaatcctagcagaattattgttggcggcaagtgtaagttttctaagaaatttggaaaattattagctgaatctgctgaaaaagaagatgtttcaattttgtatatggattcgaagtctgctgaaagtac

SEQ ID NO: 205315 - DNA, 747 bp, Unknown
  Bacterial polypeptide expressing nucleotide sequence isolated from the Sargasso Sea
tatgaaaatttgtatgataggaactggttatgtaggtttggtaagcgggacatgttttgcggaccttgggaataaagttatctgtgttgataaagaaagaaataaaataaataagttaaaaaatgctgtttcaccaatttacgaacctggcttggatgatttaataagaaataattttaggtcaaaaagattggattttactgataatttagaaaaagcaattaaagattcacaaataatttttatttgtgttggaacacctaccaaaaaggggtcaaattttgttgatctttcacaagtatatagtgtggcaaaatcaatatcaaaatatattaaaaattataaaatcattgttacaaaatcaactgtacctgtaacaaccggagataaaattgaaaaaataattggaaaaaaagttaagaaatctttgtttgatgttatttctaatcctgaatttttaagggagggagaagcaataagagattttaaatatccagacagaattgttatcggttctaataataataaagtttttaaaaagatggaacttttatacgaaccactaattaaaaaaggtgctaaatttttttgtacatcaagaaaaggtgcggaattaatcaaatatgcttcaaatgcttttttagcaacaaaaattacatttataaacgaaattgctaatctttgcgagtctgcgggaataaatgttgaagacatctctgtaggaatgggatctgatgctagaattgg

SEQ ID NO: 205316 - DNA, 562 bp, Unknown
  Bacterial polypeptide expressing nucleotide sequence isolated from the Sargasso Sea
atgaagatatgtatgataggaacaggatatgttggtttagttagcggaacctgttttgcagatttaggtaacaaagttctttgtgttgataaagacttaaaaaaaattagtaaacttaaaaaagctatttctccaatttatgaacctggtttagatgacttaattaaaaataattttcgtgcaaaaagattagattttactgataatatagaaaaagcagtaaaagattcccaaattatttttatttgtgttggcaccccaacaaaaaaaggttcaaatttagttgatctttcccaagtgtataatgttgcaaaagctatatctaaatatattaaaacatataaagtcatagtaacaaaatctactgtcccagtaacaactggtgatgaaatagaaagaattattggaaataaagtaaaaagatctttatttgatgtcatatcaaatccagaatttttaagggaaggcgaagctataagagattttaaatatccagatagaattgtaattggatccaataataaaaaaatctttaagaaaatggagcttctttatgaacctc

SEQ ID NO: 205317 - DNA, 784 bp, Unknown
  Bacterial polypeptide expressing nucleotide sequence isolated from the Sargasso Sea
tatgaaccataaaatagttatatatggtgctgggtatgtaggattttcacttgctgttttattagcagaaaaaaatcaagttacattaattgaaaaggatattgataagctaggattaataaatagaggaatttctcctattgtagaaaatgacatcgataaaatatttgcaccctcacaaaataacctaaagctatattctcaagactctttttcagatgacttaattgatgctgactttattattttagccttaccaacagactttgatgaatccacttcgtcctttaacacgtcaattatagaaaaggtggtaaaagagcttttaacaaaaaaaattcaatctacaattgtaattaaatccactattccagtgggctttacaaataaattaaggtctgaaacaggatataaaaatatcatattctcgccagaatttttgagagaaggatcatccattcatgatcacagattcccatcaagaattattgttggaaatgaatcagatcgctctgataactttgctaacgtactttatgatttatgtaattccagtcataaaacaaagattattagtatgtcttctactgatgcggaagctgtaaaactttttgcaaattcttatcttgcaaccagggtagctttctttaatgagctagacaattttgcattcaaaaatggtttgtgtacaaaagatataattaaaggtgtttgtgaagatgttcgaattggagatcattacaataatccttcctttggttacgggggttattgtttgccaaaa

SEQ ID NO: 205318 - DNA, 754 bp, Unknown
  Bacterial polypeptide expressing nucleotide sequence isolated from the Sargasso Sea
tacgtcggattggttagtggagcatgttttgctgaacttggaaacaatgttgcttgtgtggacagtaacttaaacaaaatatctaatttaaagaatggagtaattccaatttatgagccaggtttagaagaattaattacgagaaacttaaagcaaaaaaggcttttatttacaacaaatatatcagcatcaattaaaaaagcagatcttatatttatatgtgttggcactccaactaaaactaaatctaacgatgctgatctaaaatatgtatttcaagttataaaagatataaaaaagaatttaaataaatataaagtaatcgttactaaatctacagttccagttactactggcgataaaattcataaactattaacaacaaaaaaaaataaaaaattatttgatgttgtatctaatccagaatttctaagggaaggcgaagctatcagagattttatgtttcctgatcgggtggtagttggtacaaatagtaaaaaggcaaataatattttaaaaaatttatattctccaataattaaaaaaaaaggtagatatttcaatacatcaagacgagctgccgagattataaagtatgcatcaaatgcatttctagcaacaaagattacatttattaatgaaatttcaaatttatgtgaaaaacttaatgtcgacgttactgatgtttcggtaggaatcggagctgatgaaagaattggagcaagatttttaagagctggaccaggttatgaag

SEQ ID NO: 205319 - DNA, 919 bp, Unknown
  Bacterial polypeptide expressing nucleotide sequence isolated from the Sargasso Sea
ggatatgttggattagttagtggtgtctgcttttctgatttaggcaatgttgtttattgtgttgataaaaatatagaaaaaattaataaattaaataatggtaatgtcccaatatatgaaccaggtctagaagaaattctaaaaaaaaattttaagcaaaaaagattaatatttactacagatcttaaaaacgcagtaattaattctgatattatttttatttgtgttggtacaccaactaaaaagaatcaaaattctgctgacttaaaatatgtttttcatgtagcaaaagaattaaaaaaatatattaaaaagtataaagtaatagttactaaatctaccgtaccagttaccactggagacaaaattgaaaatgttcttaaaaatttaaaaaagaaaaagttagttgatattgtttcaaatccagaatttttgagagaaggtgaagctatccgcgactttctttatcctgatagagttgtaataggtacagatagtaataaagcaaataaaatacttagatctttatatttaccgataataaaaaaaactagtagatactttaatacatctagaagaggggctgaattaattaaatatgcttcaaacgctttcttagcaacaaaaatttcttatataaatgaactagctaacctgtgtgaaaaaactggagttgatgtaaaagatgtgtcatttggaatgggcttagatcaacgtattggtgaaagatttttacgagcgggccctgcttacggcggttcatgttttccaaaagacacaaaagcactcgttgatacagcaaattcatttaaaataaatttatcaatagttaaaagagttattaaatctaatgaagaaagaaaattattattaactaatagagtaacaaaaatattaaaaggtaatatcaaaataaaaa

SEQ ID NO: 205320 - DNA, 838 bp, Unknown
  Bacterial polypeptide expressing nucleotide sequence isolated from the Sargasso Sea
aatgaaaaagattacaattattggaactggttatgttggtttagtcaccggagctgggttgtcagactttggtaattacgtgacttgtgtagatacaataaaatcaaaaattaagttattagctagtggatcaattcctatctatgaacctggtttaagagatttgataaagcataatatgttagaacaaaggctaagctttacaatagatataaaaaaagcaatcaaaaactcagaagttatatttatagctgtaggtactcctgaattaccaaatggagatgcggatctttcgtttattgaaaaagtcgctgaacaaataggtgaaaatataaatggttataaggtgatatgtaccaagagcactgtacctgtaggcactggagatattatttgtaaaataattaaatcaaagaataaaaaagatattccttttgattatgtctcaaatccagagtttttaagagagggttcagcggttaaggactttttatggccagatagggtagttattggagcatctaataaaaaatcattttctgttatgaaaaatgtatatagaccattatatataaatgaaaaacctataattcatacaaatattgaaacagctgaaatgattaaatatgctgcaaattcattcttggcattaaaaataagttatataaatgaaattgcgaacctctgtgaagaagttggtgcagatgtacatcaagtagctaatggaatgggtgaagatgggagaattagttctaagtttcttcatccaggacctggtttagaggttcatgctttccaaaaagatactagagcttttgcaaacttagcctcagaaaac

SEQ ID NO: 205321 - DNA, 762 bp, Unknown
  Bacterial polypeptide expressing nucleotide sequence isolated from the Sargasso Sea
tatgaaaatatgtatgataggaacaggatatgtaggtttagtaagcggtgcatgttttgcagatttaggtaacactgtttggtgtgttgataaaaatgttaaaaaaattaatatgttaaatgataataagatcccaatttatgaaccaggattacaagaagtagttacaaaaaattataaatctggcagattgaagtttactactaatttaaaaaaagctgtacaggactccgaacttatttttatttgtgttggaacccccacatccaaaaatggttccgctgaccttaaatatgtatttgctgctgcgtcagaaatatctaaatatattaatagtttcaaagttattataaataagtcaaccgttccagtctctaccggtgataaagttgaacaaataatttcaaaaaaaaataaaaaaaataagtttgttgttatatctaatcctgaatttttaagggaaggagaagccattagagatttcaggtttccagatagaatagttgttggctcaaatgataaaaaggttattaaaaagattagatacttgtaccaacctttaataagtaagggtgctgtctttttttctacgaataggaggggagctgaaattataaaatatgcatcaaatgcattcttagctacaaagatatcttttataaatgaaatagctaatttatgtgaaaaaactaatgttgatgttgaagatgtcgctttaggcattggattagataaaagaataggaccgcgttttttgcgagt

SEQ ID NO: 205322 - DNA, 956 bp, Unknown
  Bacterial polypeptide expressing nucleotide sequence isolated from the Sargasso Sea
tatgaaactttgcatgataggaacaggatatgttggactagtgagcggcgtttgttttgctgatttaggcaatgatgttatttgtgttgataaagatgaagataaaattactaagttaaaaaaaggaattataccaatctatgaacctggtcttgaagaattggttagaaaaaattataaatcaaaaaaattatcatttacatcaaatatttcagaagcgattaaaaaatctaacattatttttatatgcgtgggtacacctacaaagaaaaatagtaatgctgcagacttaagtcaaatatttgcagtagctaaagaaattagtaaaaatattaaatcttttaaaattattattaataaatcgactgttccagtcacaacaggagatgaagtcgaaaaaattatctcaaaaaatgttaagaaaaaattattttctgtagtttctaatcctgagtttttaagggaaggtgaagcaattagagattttatttatcctgatagagttgttattggaacatctaataaaaaaaccaataaaattttaaaatctctttactcaccattaatatctaaaggtgcaaaatacattaatacctcacgacgtggagctgaattaataaaatatgcatcaaatgcttttttagctacaaaaatttcatttattaatgagttagctaatttatgtgaaaaaacagacgtaaatgtagaagatatttcaataggtatgggattagacaaaagaataggtggcagatttttaagggctggacctgcttatggtgggtcatgctttccaaaagatacgagagctatagttgatacaggaagtaaatttaaaactaatttatcaataatcaaagctgtaattaaatctaataaaaatagatcaaaattattattagatcgtgtttcaagaatattaaaaaacaaaataagaaataaaaaaatttcttttt

SEQ ID NO: 205323 - DNA, 651 bp, Unknown
  Bacterial polypeptide expressing nucleotide sequence isolated from the Sargasso Sea
tatgaaaataccaacaaaaatttcaatcattggtgctggctacgttggtatgtcactagctctagttctttcaagaagtcactacgtaacaatcctcgacataaatcaagatagggttaatgctattaataatagagaaagtttttttgaagatgagaagattgaaatttttctacaaaatcaatcaattaatcttcaagcagtttcttcacaaaatgaatcatttcgaaaaagcgaattattcctaatatgtacaccaacagattttgatgcaaatactcagagctttaatacaaaagacatcgagcaaattgtaaaagatatttttagtttttcgaatgatgctcttatagtcattaaatccaccattccgattggttttatagataaattacaagatagatataatacggggaacatattgtattctcctgagttccttagagagggttctgcattgaacgataatctaaagccttcaaggatagttataggcagtaaatcaaaaaaagcaaaattatttggattgcttatgatgcaagccgcagatatagatgatgttcctattttatataccgatcctaatgaggctgaagctataaaacttttcgctaatacatatcttgcaatgcgggttgcttttttcaatga

SEQ ID NO: 205324 - DNA, 781 bp, Unknown
  Bacterial polypeptide expressing nucleotide sequence isolated from the Sargasso Sea
tatgaagctttgcatgataggcacgggctatgttggtttggtaagtggcgtttgtttttctgacttaggtaatgatgttatttgtgtggataaagatgataataaaattaataatttaaaaaatggtgaaattccaatttatgaaccaggtttggaggaattagttcgaaagaattcaaaaaataaacgactaaatttttcaacaaatttaagagaatctgtaaaaaaatcagatataatttttatatgcgtaggtacaccaactaaaagaaatagtaatagcgctgacctttctcaagttttttcagttggaaaagaaatatctaaatcaattaataaatttaaaataattataacaaaatcaactgttccagttacaacaggtgatgaactagaaaagattatatcaaaaaaagtaaataaaaaattgttttcagtggtatctaatcctgaattcttaagagagggtgaggcaattagagattttatatatcctgatagagttgtagttggttctaacgaagaaaaatctaaaaaaattctaagtaatttatattcccctttaatttccaagggtgctaaatatgtttctacaaatagaagagctgctgaattaatcaaatatgcttctaatgcttttttagcaaccaaaattacatttataaatgaaattgccaatttatgcgaaaaaactggtatagatgttgaagatatatccatagggattggactagataaaagaataggaagtagatttttaagagctggtcctgccctatga

SEQ ID NO: 205325 - DNA, 880 bp, Unknown
  Bacterial polypeptide expressing nucleotide sequence isolated from the Sargasso Sea
aatataaataatgatagattatctttttcttcaaatgtgaaagaatcaatactgaaatctgatgtaatagtgattgcagtcggtacaccggaaggacagaatggtcaggcagacatgagtttcgttttttctgttgctgaaactatttcaaacaatttaaataattataagttggtagttaccaagagtacagttccgattggaagtgggaagaaaatagtagatttgatttacaatcgagttaatgataaaaaatcattcgattatgtttctaacccagaatttttaagggaaggttcagcattaaaagactttttatggccagatagagtaataatcggcaccgatagtaaaaaagcatatgaaataatgcgtaatgtatatagaccattatacattaataagaatcctataacacatacttctattgaaacagccgaaatgattaaatatgcatcaaattcatttttagctttaaagataagttatataaatgaaattgcaaatctatgcgaggctgtaggtgcagatgttcataaagttgcgaatgctatgggccaggatggtagaataagtgataagtttcttcatcccgggcctggctttggaggttcttgttttccaaaggatttagaggctttattatcaatatcagaaaataataatgtaaaaatgaagactgtggaggctgcaattatagctaataataatcaaaaaaagagaatggttgaaaagctcattaatctttttgatggtgatataaaaaataaaaagatagctattcttggcttggcgtttaaggccaataccgatgatataagagaatcctcatcaataaatatgataacgagtttagtcagtaaaggtggagtaattagtg

SEQ ID NO: 205326 - DNA, 688 bp, Unknown
  Bacterial polypeptide expressing nucleotide sequence isolated from the Sargasso Sea
gataggcacaggttatgttggcttagtaagtggaacttgttttgcagacataggcaatcaagtaatatgtgttgataaagatatagataaaataaaaaaattaaattctggaatttctccgatctacgagccaggtttagatgaattaattaaaaaaaattatctagcgaagagattatcttttaccactaatattaaaaaagctgttaatgactctgatataatatttatttgtgtaggcacacctacaatgaagagttctttaaaagtagaccttacatacgtatacaaatgttctaaagaaattctaaaatatacaaaaaaaaagaaaatcctcattacaaaatcaactgtgcctgtaggaaccggggatgaaattgaaaaaataataaagaaaaaaaagagatttcttactgttatttctaacccagaatttttacgtgaaggagaggctataagagattttagatatccggacagaatagttattggttcaaatgaaaaaaaaatattcaatacaatgaaaaaactatacttgcctttaacaaataaaggttcaaaattttttaaaacttcaagaagaggtgcagaattaattaaatatgcatcaaatgctttccttgctacgaaaattacatttataaatgaactagctaatttgtgtgaaaaatctggaataaaatattga

SEQ ID NO: 205327 - DNA, 700 bp, Unknown
  Bacterial polypeptide expressing nucleotide sequence isolated from the Sargasso Sea
tatgaaattgtgcatgatcggtacaggttatgttggtttagttagtggagcatgttttgcagatttaggtaatgatgttatttgtgtagataaagatttaattaaaataaataatttaaaaaaaggcattatcccaatttatgaacctggtttagaagaattagttttaaaaaactacaaaaataaaagattaaacttttcaacagacttaatcaactctgtaaaaaaatcagatattgtatttatatgtgttggaactcctaccaaaaaaaatagcaataaagcggacctttctcaagtatacaatgttagtagagaaatatctaaatcaattgataaatttaaaattatagtaaataagtcaactgtacctgtaactacaggcgatgaaatagaaaaaattatagcaaaaaaagtgaataaaaaaaatttttctgtggtgtctaatcctgagtttttgagggaaggggaagcgataagagattttatttatcctgatagaattattgttggatctaattatgaaaaatctacgagaatattaaaaaatttatattcacctcttgtatcaaaaggtgcaaaatttcaatcaacgaagagaagggctgctgaattgattaaatacgcatcaaatgcttttctagcaactaaaatcacatttataaatgaaattgcaaatttatgtgaaaaaattggaatt

SEQ ID NO: 205328 - DNA, 734 bp, Unknown
  Bacterial polypeptide expressing nucleotide sequence isolated from the Sargasso Sea
gggccagtttggtctagggatgaatccagaatttctacgagaaggaaatgcgattgatgattttatgaaacctgatcggattgttcttgggcatgatgatgaaaatactcttaagttgctaaaaaaattatataagccttggacttgtgataaaatttccgtgaatactagaaccgcagagatgattaaatatgctaataattcattgttagctacacagatttcttctgtaaatgaactagcaaatattgcggctgctattgaaggtattgatatattagatgtcatgaatgccgtacatctagataaacgctggagtccaatttcccctaataatgttcgtatttctcccgaaattctgacttatctggtacctggatgtggttttggtggtagttgttttccaaaagatgtacaggctttaagaagtctggcacatgtcgttggtgtgcaaccagacatattagacgcagttctaaatgtaaataaaaaacaaccttatgaagttgtgaaattgctaaagaaatcattggttgatttaaaagctaaaaagattttgttgttgggattggcttttaaacatggtactgatgatgttcgtgaatcagtatcacttaaaataatagagtatttgctaaagaataaagcgcaaatatttgcacatgatcctgtcgcaatagaaaacacaaaaaaagtaattaataatcataagaatttaaatttttccgtataaa

SEQ ID NO: 205329 - DNA, 823 bp, Unknown
  Bacterial polypeptide expressing nucleotide sequence isolated from the Sargasso Sea
tggaagtggaaagcgaatagttaatttgattaatgataaagttgataacagtgaattatttgattatgtttcaaatccagaattcttaagagagggttctgcattaaaagattttttatggccagacagagtaataattggaactgatagtaaaaaagcatatgaaataatgcgcaacgtatataggccgctatatataaataaaaatcctataatgcatacttctattgagacagcagaaatgattaaatatgcatcaaattcattcttagctttaaaaataagctatataaatgaaatagccaatctatgcgaagctgttggtgcagatgttcacaaagttgctagtgcgatgggtcaggatggtcgaataagtgataagtttcttcatccagggcctggttttggaggttcttgttttcctaaggatctagaggcattgttatcaatatcagaagtcaataacgtaaaaatgaggacagttgaggcagcaatcatagccaatgataatcaaaaaaagagaatggtgaaaaagattactcaactttttggtggcgatataataaataaaaaaatagctattcttggtttagcatttaaagcgaatacagatgatataagagagtcttcctcaataaatatgataaatagtttaatatttaagggtgcagccattaatgcttatgatccaattgcaaataatgaaatggctaagataattagtaatattaactattttgatagtttatatgatgctgtcaatgaagtagatgcggtagttgtcatgactgaatggaatgaatttcgttctttagatttagaa

SEQ ID NO: 205330 - DNA, 583 bp, Unknown
  Bacterial polypeptide expressing nucleotide sequence isolated from the Sargasso Sea
atgaaactttgtatgatcggaacaggatatgttggtctagtatcgggagtctgtttttctgatttaggtaatacagtatattgtgtagataataatgaagataaaataaaaaaattaaatgatggaattgttcctatttacgaaccaggccttgaggaattaattaagaaaaattatagacaaaaaagattaatttttactactgatattaaaaaagcagttacaaaagcagatataattttcatttgtgttggaacacctactaaaaagaacagcaactctgctgatttaaaatatgttttccaggtagcaaaacaaattaataaatttataaataaatataaaattgtaataaccaaatcaacagttccagttaccacaggagataagttagaaaaaatttttaaatcaaaaattaaaaaaaagcttgttgatgttgtttctaatccagaatttttaagagaaggagaggctattaaagattttacatcaccagacagagtggtaattggtacaaatagcaaaagagcaaacttgaaattaaaatccttgtattttccaattgttaaaaaaactagcagat

SEQ ID NO: 205331 - DNA, 817 bp, Unknown
  Bacterial polypeptide expressing nucleotide sequence isolated from the Sargasso Sea
tcttggaatcaagaagacatttctaaacttccaatatatgagccaggattagatcaaattattaaaaaaacaaggaataaaaatcttttctttacaacaaatataagagaatcaattgccaaagctgatttgatttttttatctgtaaatactccaacgaaacttaaaggagttggagctggtaaagctagtgacttaaggtgggttgaggcatcagctagacaaatagctgaatttgcaactggatatacgatagtagtagaaaaaagtacattaccagtaagaacagcaaaaactataaaaaaaattttatttaattctcagataaataaagaagataaacatataaaaaagactttttcagtattatcaaatcctgagttcttatctgaaggtaatgcaattaatgatctacaaaatccagatagggtccttattggcggtgatgatgaaattgccattaaatctttagctgatttgtatttaaaatggattcccaatgagaaaattattagaactaacatttggagttcagaattatctaaattaacagctaacgcttttttggctcaaaggatatcatctattaacgcgatgtccgcgctttgtgaactaactgaagcggatattaaacaagtagctgaggctatagggttagatagtaggataggaagaaaatttttaaatccaggccctgggtttggaggtagctgctttcaaaaggatattctaaatttagtatatttatgtgaatactataatctcaacgaagttgctagatactgggaacaagtattaacgataaataattggcaaa

SEQ ID NO: 205332 - DNA, 580 bp, Unknown
  Bacterial polypeptide expressing nucleotide sequence isolated from the Sargasso Sea
atgaaaatatgtgtgattggaacaggttatgttggtttagtgagtggaacttgttttgcagatttaggtaataaagtcttttgtgtagataaagataaaataaaaataaataaattaaaaaatatcatttctccaatttacgaaccaggtttagatgatttaataagaaataatgttagagcaaaaagattaaatttcacaaatgacttagaaaacgcagttaaagaatcacaaattatttttatttgcgtaggaactccaacaaaaaaaggttctaacacggttgatctttcacaagtatttaatgttgcaaaatcaatatcaaagtacattaaaaattataaaataattgttaataaatctactgtcccagtatctacaggagatcaaatagaaaaaataattctaaaaaaagtcaagaggtctttgtttgatgtcatatcaaacccggaatttttaagagaaggagatgctataagagattttaagtatccagataggattgtaataggatcagataacaaaaaagtttttaaaaaaatgcaacttctatacgaacctcttataaaaaaaggggcca

SEQ ID NO: 205333 - DNA, 945 bp, Unknown
  Bacterial polypeptide expressing nucleotide sequence isolated from the Sargasso Sea
ataaatgtagttgataataatgaagatcgaataattaattggaataacagtgacttatcaaaattacctatttatgaaccaggcttagcggctattttggagaggtgcagaggaaaaaatttacacttttcaacttctgttgaagaaaaaataagatctgcagatatgattttcatttcagttaatactccaaccaaaacaaaaggtataggggcaggtaaagctagcgaccttaagtgggttgaagcatgtgccagacaagtcgcaaggttttcatcaggacataccatagttgtagaaaaaagcacattacctgtaaaaacagctgaggtaatcaaatcaattctaaaagcacctcataatataaataaaagtgatgaaaataatttgacctttgatgttttatcaaatccggaatttcttgcagaaggtaccgcgattaatgatctaaatattcccgatagggtacttattggaggagagagcaatgaagcaatagaagcccttgctaaaatttatcaagaatgggttccagccgaaaagattttgagaacaaatatttggagtagtgagttagcaaagctaactgctaatgcctttttagctcaaaggataagttcaataaactcaattagcgctttatgtgaagcaacaggtgcggacgttagagaagttgcccgggcaataggatctgacagtaggataggctcaaaattccttgcttctggccctggatttggtgggagttgttttaaaaaagatattctaaatttggtttatttgtgcgagcattttggcttagaggaagttgcaaacttctggaatagcgtagtgactctaaataactggcatcaaaaaagaatatcgcagttaataacaaaaaaattatatggttctttatcaaataagatcattattgtgttgggattctcttgcaaggcaaat

SEQ ID NO: 205334 - DNA, 689 bp, Unknown
  Bacterial polypeptide expressing nucleotide sequence isolated from the Sargasso Sea
tatgaaaatatgtatgattggttcaggctatgttgggttagttagtggaacttgttttgctgaacttggaaacaatgttatttgtgtagacaaaaaccttaataaaatatccaatcttaaaaagggtgtaattccaatttatgaaccaggcttagaagaattaattataagaaacttaaaccaaaaaaggttacaattttccacaaatatatcagagtcaattaaaaaatcagatcttatatttatatgtgttggcactccgactaaaacaaaatctaatgatgcgaatttaaaatttgtatttcaagttgtaaaagatattaaaaagaatttaaataaatacaaaattattgttacaaaatcaacagtcccagttaccactggtgacaaaattcaaaaactattaacaactaaaagtaataaaaaattatttgatgttatttccaatccagaatttctgagagaaggtgaggctatcagggattttatgtttcctgatcgggttgtagttggtacaaatagtaaaaaagcaaataatattttaaaaaatttatattctccaataattaaaaagaaaggtagatatttcaatacatcaagaagagctgctgaagttataaagtatgcatcaaatgcatttctagcaacaaagattacatttataaatgaaatttccaatttatgtgaaa

SEQ ID NO: 205335 - DNA, 742 bp, Unknown
  Bacterial polypeptide expressing nucleotide sequence isolated from the Sargasso Sea
atgaaattatgtatgataggtactggttatgtcggtttagtaagcggcacctgttttgctgatattggcaatcaagtttattgtgtagacaaagataaaaataaaatagataaacttaattcgggtgtttctccaatttatgaacctggtttagatgaattaatcaaaaaaaactatgatgctaatcgtttaatttttactaccgatataaaaaaagctatcaacgcctctgatttgatatttatctgtgtgggcactccaacaaagaaaggatcattaaaagttgatttatcttttgtttacaaatgtgtaaaagaagtacttaaacatacaaaaaaaaaaaagataattataactaaatctacagttccagtaggaaccggtgctgaaatcgagaaaattataaaaaaaaagaaaaaattattttctgttatttcaaatcctgaattcttaagagaaggcgaggctattagagattttaggtatccagatcgtatagtcatcggatctgataataaaagtcaatttaaaacgatgaaaaaattgtactctcctttgatcagtaaaggagcgaaattttttacaacaacaagaaagggggctgaattaattaaatatgcttcaaatgcttttctagcaacaaaaattaccttcattaatgaactagcaaacttatgtgaaaaaaccggcatcaatgttgaggatatatctttaggtattggatctgactctagaatggcag

SEQ ID NO: 205336 - DNA, 500 bp, Unknown
  Bacterial polypeptide expressing nucleotide sequence isolated from the Sargasso Sea
tatgaaattatgtatgataggtaccggatatgtagggctagtaagtggtgtttgtttttctgatttaggtaacgatgtagtttgtgtagataaggataaaaaaaagattgatttactccaaaaaggtaaagttcctatttatgaacccggtttatctgaattagtaattaaaaactttaaaaataaaaaaatatcattttcaacaaacttaaaaaaatctgttaatgattctgatataatttttatttgtgttggcactccaaccaagcaaggtggcagttcagctgatttaagtcaaatttataaagtagcaaaagaaataagctcctcaattaataaatttaagataattataaccaaatcaactgtcccagttaccactggtgatgaaatagaaaaaattattgctaaaaaaaattcaaaaaaaaagttttcggtagtatctaatccagaatttttaagagaaggtgaggccataagagattttacctatccagata

SEQ ID NO: 205337 - DNA, 815 bp, Unknown
  Bacterial polypeptide expressing nucleotide sequence isolated from the Sargasso Sea
ctcagaaaatgacaaagatattccaatcttgattaaatctactgtagatgttggatttacagatagattaagaaaacagacaagtaatcagaaaattatattctctcctgaatttctaagagaagggaatgcactaagagataatttatacccctctagaattgtttttggttcacactctgatagcgcaagagaaataatggaatttatcaaatcattttgtctaaatgacccaaaatctttttttatgtcatcaagcgaagcagagtcagtaaagttattttccaactcatttcttgctatgagagtagcatacttcaatgagttagatacttacgctatgaacttagatttgaatacaaagaatataattgatgctgtatgtagcgatcctagaatttcagatggatacaataacccttcttttggatatggcggatattgtcttccaaaggatacaaaacagcttttagcaaactattcatcgttacctcagaacataattagtgcaatagttgaatcaaacgaatcaagaatggatgctattgtagctaacattcttaaacatgatatatccagtattggaatatatcgccttgtaatgaaaaagaattcagataacttgagagaatcttcaattcatggcatcttatcacggctaaaacagagatctatatcaatgatagtttatgagcctctaattaaagagaatgagtatatgggtataagtatttgtaatgatctagaaaggtttaaagaagaatcaatgctgattattgcaaatcggaaagatgaagaaattaaagatgtcagcc

SEQ ID NO: 205338 - DNA, 490 bp, Unknown
  Bacterial polypeptide expressing nucleotide sequence isolated from the Sargasso Sea
catgaaactttgtatgatcggaacaggctatgtaggtttggtaagcggtgtatgttttgctgatctgggcaataatgtcatttgtgttgataaagacttaaaaaaaatagatctactctctagtggaaaaattcccatttacgaacctggacttactgagttagtgaataaaaattataaaaataaaagattaaaattttcatcagatttaaaaaaatcaataaaagactctgatataatttttatttgtgttggaacaccaaccaaaaagggaagtgctagtgcagatttaagtcaaatttttcaagtagcaaaacagataagtttatcaatcaataagtttaagataatagttactaagtcaacggtacctgtaacaacaggtgatgaaattgaaaaaattatattaaaaaaaaagagtaataagaataaattttctgttgtatcaaatccagaatttttaagagaaggtgaagctattcgagatttt

SEQ ID NO: 205339 - DNA, 619 bp, Unknown
  Bacterial polypeptide expressing nucleotide sequence isolated from the Sargasso Sea
atgaaattatgtatgataggaactggttatgttggattagtaagtggtgtctgttttgctgatattggaaatcaagttatctgtgttgataaagataaaaacaaaataaataaacttaactctggaatttctccaatctatgaaccaggattagatgaattaataaaaaaaaattttacggctaaacgcctctcattcacaacagatattaataaagctttaagcatatcagatataatatttatatgtgtaggaactcccacaaaaaaaaaatcaataaaagttgatttatcttttgtttataaatgtgcaaaagaaatattaaaatattcaaaaagaaaaaagattattattaccaagtctactgtcccggtcggaacaggtgatgaaattgaaaaaattctaaaaaaaaagaaaaaactttttacagcaatctctaatcctgaatttttaagagaaggtgaagcaatacgggattttagatatcctgataggatcgtaataggatctaacgaaaaaaaagcctttaatattatgagaaaactttatgcacccttaattaataaaggcgcaaaattttttactacttcaagaagaggagccgaattaattaaatatg

SEQ ID NO: 205340 - DNA, 907 bp, Unknown
  Bacterial polypeptide expressing nucleotide sequence isolated from the Sargasso Sea
aagattgataatcttaaatctgggatacttcctatctatgagcctgggttagaggaaataattaaaagaaatgtaaaatataatagattatccttttcttcaaatgtgaaagaatcaattattgaatcagatgtagtagtgattgcagttggtactcctgaaggagaaaatggtaaggcagacatgagttttgttctttctgttgcagaaactatctcgaatgatttaaatagttataagttggtagttactaagagtacagttccaattggaagtgggaagcaaataatagatttaattaatgatagagttggcgatcgaaaattatttgattatgtttctaatcccgaatttttaagggagggttcagcgttaaaagactttttatggccagatagagtaataattgggaccgatagtgataaggcatatgaaataatgcgtaatgtatacagaccgctttacataaataaaaatcctattactcgtacttctattgagacagcagaaatgattaaatatgcatcaaattcatttttagctttaaaaataagttatataaatgaaattgccaatttatgcgaagctgtaggtgcagatgttcataaagttgcgaacgctatgggtcaggatggtaggataagtgataagtttcttcatccaggccctgggtttggcgggtcctgtttccctaaagatttagaagcattattatcaatatcaaaagataaaaacgtaaaaatgaagactgtagaggctgcaattatagctaatagaagtcaaaaaaagatgatggttaaaaagctcataaaactttttaacggggatattaaaaataaaatgatagctattcttggtttagcatttaaagcaaatactgatgatgtaagagaatcctcatcaatta

SEQ ID NO: 205341 - DNA, 627 bp, Unknown
  Bacterial polypeptide expressing nucleotide sequence isolated from the Sargasso Sea
tatgaagctttgtatgattggaacagggtatgttggtttagtatcaggagtttgtttttcagatttaggtaatacagtatattgtgtagataataattcagataaaataaaaaaattaaacaatggaattgttcccatttatgaaccaggacttgaagaattaattaagaaaaattatagacaaaaaagattaatttttactactgatattaaaaaagcagttttaaaagctgatataatttttatttgtgttggtacacctactaagaaaaatagcaactccgcggatttaaaatatgtttttcaggtagcaaagcaaattaaaaaatttataaataaatataaaattataataactaaatcaacagttccagttactacaggagataaattagaaaaaatttttaaatcaaaaattaaaaataatctggttgatgttgtttctaatccagaatttttaagagaaggagaggctattaaagattttacatcaccagacagagtagtaattggcacaaatagcaaaagagcaaacgcaaaactaaaatctttatattttccaattataaaaaaaactagcagatatattaatacttcaagacgaggtgctgaacttattaagtatgc

SEQ ID NO: 205342 - DNA, 676 bp, Unknown
  Bacterial polypeptide expressing nucleotide sequence isolated from the Sargasso Sea
atgaaaatttgcatgataggaactggatatgttggtttagtaagcggcgcatgctttgctgacttaggaaataatgtttggtgtgttgataggataaaagaaaaaatagatatgctaaacgatggagatataccaatttatgaacccggactcaaagaaattgtaagcaaaaattttgtttctaaaagattaaaatttacaacaaatttaccattagcagtaagagaatcagatctaatttttatttgtgttggtacgccaacatcaaaagatggatctgcaaatcttaaatatgtttataacgtagctaaagaaatatcacgtaatataaataaatttaaaattattataaacaaatctactgtacctgtatgcacaggcgatattgtagaaaaaattatttcgaaaaaaacacaaaaaaaaaattttgaagttatatctaatcccgagtttttaagagagggcgaagctattagagattttaggtttcctgatagaatagttattggcgctaacaataaaaaagttgttaaaaagataaaagttctttatgaaccattgataaaaaaaggagctacttttttttcaacaaacagaagaggagccgagataataaaatatgcatctaatgcatttttggctactaaaatatcgtatatgaatgaaattggaaatt

SEQ ID NO: 205343 - DNA, 469 bp, Unknown
  Bacterial polypeptide expressing nucleotide sequence isolated from the Sargasso Sea
atgaaaaaaattgctgtaattggcactggatacgttggccttgtttcaggtgcaggcttagctgagtttggacatgaagttacatgtattgatattaatgaagaaaagatacataaactgaatgaaggcatgattcctatttatgagcccggcttaaagagcttggtttcaaaaaacgtaaaagataaaagattgtttttttcttcaaatattgaaagcgtcattagagattcgaggataatttttattgctgttggtactccgcaaggctctgacggtaaagcagatttagcttcggttagctcagcagttgataccatcatcagtaatttaagttcatataaaattatttgcacaaaaagcactgttccagttggaacaggaaaatggataagctctaaaataagtgaaaagcacacttctgataaatttgattacgtctcaaaccctgaatttctcagagaagggt

SEQ ID NO: 205344 - DNA, 612 bp, Unknown
  Bacterial polypeptide expressing nucleotide sequence isolated from the Sargasso Sea
catgaaaataacgatgttaggaacgggctatgttggattagtctctggagcctgtttttcagagtttggttttgacgtatgttgtgtagacaaggataaagacaaaatcataaacttagaaaaaaatgtaatacccatttatgaacctggccttgaaaatttagttaaaaaaaataaggatgctaatcgtctcagttttagtattgatgtgaagaaaaatatagcagatgcagatgttatttttatagctgtaggaacaccagccaggcgtggtgaaggtcatgctgatctatcatatatttatgaagctgcagaggaaatagcaaaaaatttaattggttatacattaattgttactaagtccacggtccctattggaacaggaaacaaaattaaaaatataattaaaaaaaataatcccaaagccaaattcgatgtggtttccaatcctgaatttttaagagaaggtaatgctattgaagattttatgagaccagatagggtggttgttgggtgtgaaactgaaaaagccaaaaaagtaatttcaaaaatatataaaccattatatctaattgaaacaccaattttatttactgatttaaaacagcagag

SEQ ID NO: 205345 - DNA, 592 bp, Unknown
  Bacterial polypeptide expressing nucleotide sequence isolated from the Sargasso Sea
aatgaaaatatgcatgataggaacaggatatgttggattagttagcggagtttgctttgctgatataggaaatcaggtcgtttgtgttgacaaagctaaaaacaaaatagaaaagcttaattctggaaaatctccaatctatgagccaggcttagatgaactaataaaaaaaaattttatatctaaacgtctctcatttaccactgatatcaataaagctataagcacatcagatataatttttatatgtgtgggaacgcctacaagaaaaggatcaattaaagttgatttatcttttgtttataaatgtacaaaagagatattaaagtattcaaaaagaaaaaaaattattgtaacaaagtctactgtgccagtaggaacaggtgacgagattgaaaaaattttaaaaaaaaggaaaaaactttttactgtaatttcaaatcctgaattcttacgtgaaggcgaagcaatacgagattttagatatcctgacagaattgttattggatctaacgaaaaaaaagcctttaatattatgagaaaaatttatgcaccattaattaacaagggttcaaaattttttactactaca

SEQ ID NO: 205346 - DNA, 583 bp, Unknown
  Bacterial polypeptide expressing nucleotide sequence isolated from the Sargasso Sea
catgcgtatcgcaatgatcggcaccggatatgtcggcctggtttccggtgcctgtttctccgaatttggcaccgaagtcgcctgcgtcgacaaggataagtcgaagatcgaacgcctactagcgggcgatattccaatctatgaaccgggactggatactctcgtcgaaaagaacgtcgcggccgagcggctttcttttacgacggacctcgaagccgcggttaagggcgcggatgcggtgttcattgccgtcggcacaccaagccgccggggcgacggccacgccgatctttcctatgttttcgccgccgccgccgaaattgcttacgccatcgatgggtataccgtcgtcgtcaccaagtccacggttccggtcagtaccggccggagggttcaccagatcatcagcgaaaatcgtgaccccgatgagttcgacgtcgcttccaacccggaattcctacgtgaaggatctgccattgaggattttatgcggcccgaccgggtggttatcgggacggattccgaacgtgccgcggaagttctgcgccagctttatcgtcccctgtatctgctggaaacgccc

SEQ ID NO: 205347 - DNA, 868 bp, Unknown
  Bacterial polypeptide expressing nucleotide sequence isolated from the Sargasso Sea
aatgaccgttatcgcagataattgtcccaatataaaagttaatgttgttgacataaatcaagaaaggattgatttatggaatagtaataatttaaatgaacttcctatatatgaacctggccttgaagaaattgtttatagatgcagaggaaaaaatctaatattctcgacaaagatagaagaaagcattgcattagcagatatggttttcatatcagtaaatacccctacaaaaacaaagggggtaggtgcaggtcaagcaagcgacttaaaatgggttgaagcttcagcaagacaagtagctaaatttgcaaaaggttataccatagttgttgaaaaaagcacattgcctgttaagactgctgaagttattaaagaaattttagaatcatctcaatctgaactagcagaaaaatctaatgcaaaatttgatgtcttgtctaacccagagtttctgtccgaaggtactgctattcaagatcttcaaaacccagatcgagttttaattggaggtgatagtaaagaagccattatggcactaagtaatatttacaccaattgggttgatgaaaagaaaatattacatacaaatatctggagtagtgaattagctaaactgacctctaatgcttttttagcgcaaagaattagttcgattaattctatagctgcattatgtgaatcgacaggtgctgatataagagaagtttcaagagccataggattagatagtagaataggttcaaaattcttgaactcaagtccaggttttggaggtagctgttttaaaaaagatatattaaatctagtttacctttcgaaattttatggattgaatgaagtggcaacattttgggaaagcgttgtc

SEQ ID NO: 205348 - DNA, 477 bp, Unknown
  Bacterial polypeptide expressing nucleotide sequence isolated from the Sargasso Sea
tatgaaaatttgtatgataggatctggttacgttggtctagttagcggtgcctgcttttctgatttgggcaatatagttacatgtgtagatattaataaagaaataataaataaattaaataatggaataattcctatttatgagcctggattacaagagttagttgctagaaacttaaaacaaagaagattatctttttccattgacatttctaattctataaaaaaatctgatattatctttatttgtgtgggcactcccacaaaaaataataaagctgatctaaaatatgtttttaaagtagtgcataatataaaatctaatcttaataagtataaaattattgttactaaatctacagtccctgtaacaactggcgataaaattgaaaaaattttaaattcaaaaaaaaacaaaaataaatttgatgttgtttcaaacccagaatttctaagagaaggtgaggcaataagaga

SEQ ID NO: 205349 - DNA, 703 bp, Unknown
  Bacterial polypeptide expressing nucleotide sequence isolated from the Sargasso Sea
atgaaaatttgcattataggatcaggttatgttggattggtaagtggcgcatgtttctcagatttgggtaatagtgttatttgtgttgatataaataaagaaattataaataagctaaataaaggcataatcccaatttatgaacctggtttacatgaattggttacaagaaatttaaaaaaaaatagactttttttttcaacagatatttccagctcaataaaaaaatcagacatcatctttatatccgttggaactccaacaaaaaataataaagctgacttaaaatatgtgtttaaagttatcaaaagtattaaatctaaccttaataggtataaaataattgttaccaaatctactgtcccagttaccacaggtgacaaaattgagaaaattttaaaatcaaataaaaataaaaataaatttgatgttgtttcaaatcctgaatttttaagagaaggtgaagctattagagattttcaatttcctgatagagtagttgttggtactagcagtaataaagcaaataaagttatgaagaaattatatcttcctttaattaagaagggtggaagatattttcatacttctagaagatcagctgaattaattaaatatgcttcaaacgcttttttagctactaaaattacgtttattaatgaaatagctaatttatgtgaaaaatcaaatatagacattaaag

SEQ ID NO: 205350 - DNA, 733 bp, Unknown
  Bacterial polypeptide expressing nucleotide sequence isolated from the Sargasso Sea
atgcgtgttgcgatgatcgggaccggatatgtaggtttggtgtccggtgcctgtttttccgaatttggcgtcgacgtggtttgtgtcgataaggatgagtcgaagattgccacgttagaatctggcacgttgcccatctatgagccgggtctggaagacttggtagcgaagaacgtggaggcgggtcgcttgtcgtttaccacgaccctgtcgaacgccgtaaagggtgcagatgcggtattcatagccgttggcacgccgagccgacgcggcgatggacatgctgatctctcctatgtctacgctgccgctaaggagattgccgaggcggttgacggctatacggtggtagtaactaagtcgacagttcccgtggggaccggtcgagaagtggaaaagatcattaaagaagtgggacccagcggcgacgtagacgtggtgtctaatccggaattcctgcgcgaaggctccgccattgaggactttatgcgtcccgaccgcgtcgtcatcggcaccaatagccagcgggcccaggacgtgatgcgcagcctctatcgccccctctacctgatcgaaacccccatcgtattcacatcgcgccagacgtcggagctgattaagtacgccgcgaacaccttcttggcgacaaagatcaccttcattaacgagatcgccgatctctgtgaagtggtcgacgccgacgtccaggatgtagcccggggaattgtctaga

SEQ ID NO: 205351 - DNA, 769 bp, Unknown
  Bacterial polypeptide expressing nucleotide sequence isolated from the Sargasso Sea
attatattttctccagaatttttaagagaagaaaaagctttgtatgataacttatatccatcgagaatagtaattggagataaaacgataaaaggacgtcagtttgcgaaattacttacaaattctacatatatttcaaagaaaaaaataaatatacatttaatggagtctacggaggcggaagcggtgaagctattctctaatacatacttagcaatgagggtagctttttttaatgagcttgatactttttcagaggtttataaagtttcttcaaaagatatcatatctgcagtaagtgacgacccaagaattggcaattactataacaatccttcatttggatatggtggatattgtcttcctaaggatacaaagcaacttttaagaacttataaaaaaattcctaataaattgataaaggctgttatagattcaaacaaaacccgcaagttatttatatcaaattcaattaaaaaaaagtaccccaaaagaattggagtcttcaggctggcaatgaaaagtggatctgataattttagagaaagtgccgttttagatttaattaaaattttgaaaaaacaaaatttgcagatttatttatacgaaccgctcttaaagaaatcaaatatcaagaatgtttcacttataaataattttgaacagtttatatctgtttcagatctgataattgcaaatagaatgtcaaataagcttataaaagttaaaaataaagtctatacaagagatttatttggtgaaaattagt

SEQ ID NO: 205352 - DNA, 896 bp, Unknown
  Bacterial polypeptide expressing nucleotide sequence isolated from the Sargasso Sea
tatgaaaatatgcatgataggtacaggctatgttggtttagttagtggaacctgttttgcagatcttggaaataaagtttactgtgttgataaagataaatctaaaataaacaaacttaaaaatgctatttcaccaatatatgaacctggtttagaagatttaataaggagcaacctgagagcaaaaagacttatttttactgatgatctaaaaaaagcaatacgagactcgaatataatttttatttgtgttggtacaccaacaaaaaaaggctcaaatttagttgacctttcacaagtatacagtgttacaaaatcaatatctaaacacattaaaaactacaaaattatagtaacaaaatctacagtgcctgttacaaccggagatcagattgaaaaaataattagcaaaaaagtaaaaaaatctttatttgaagttgtctctaatcctgagtttttaagggaaggtgaagctataagagactttaaataccctgatagaattgttattggatcgaataacaaaaaaattttcaaaaaaatggaacttttgtatgaacctctaataaaaaaaggtgctaaatttttttgttcaacaagaaaaggtgctgaactaattaaatatgcgtctaatgcattcttggcaacaaaaattacatttataaacgaaattgcaaatttatgtgaaacagctggcataagtgttgaagatatatctgttggaatgggttccgatgcacgaattggaagcagatttttgagagcaggccctgcatatggggggtcttgttttccaaaagacacaaaagggctagtttctattgctgagaaatttaactctaatctttcaattgttaaatctgtaaataaatcaaatcaaaatcgaaaaattttat

SEQ ID NO: 205353 - DNA, 694 bp, Unknown
  Bacterial polypeptide expressing nucleotide sequence isolated from the Sargasso Sea
atgaaaatatgtatgataggtactggatatgtaggattagttagtggaacatgttttgctgacctaggcaacaaagtttattgtgtagacaaagataaaacaaaaatacaaaaattaaaaaaagcaatttcaccaatatatgaaccaggtttagaccatttaataagaaacaattttagatctaaaagattagattttacagataacttagaaaaagctgtaaaagattctcaaataattttcatttgtgttggcacgccaaataaaaaaaattctaacttagttgatttatctcaaatatataatgttgctaaaaaaatatctaaatatattaaaagttataaaattattgttattaaatctactgtgcctgtgactgcaggtgatcaaatagagaaaataataggtaaaagagttaaaagaaatttatttgacgttatatcaaatccggaatttttaagagagggtgatgcaattagagatttcaaatatccagacagaattgtagtagggtcaaacaataaaaaaatttttaaaaaaatggaacttctttatgaaccacttataaaaaaaggagctaaattctttttaacctcaagaaaaggtgcagaattaatcaaatatgcatctaacgcatttttagcaacaaaaatttcatttattaatgaaattgcaaacctgtgcgaagcaacgg

SEQ ID NO: 205354 - DNA, 667 bp, Unknown
  Bacterial polypeptide expressing nucleotide sequence isolated from the Sargasso Sea
aatgaaattatgtatgataggaactggttatgttggtttagtaagcggagtttgctttgctgacataggaaatcaggttgtttgtgttgataaagataaaaataaaataaataaacttaactctggaatttctccaatctacgaaccaggattagatgaattaattaaaaaaaattttacagctaagcgtctttcatttactacaaatattaatgaagccataagttcctcagatataatttttatatgtgtgggaacccctacaagaaaagggtcaattaaagttgatttatcttttgtttataaatgtacaaaagaaatattaaaatattcaaaaagaaaaaaaattattgtaacaaagtccactgtaccagttggaacaggcgacgagattgaaaaaattgtaaaaggaaagaaaaaactttttacagtaatatctaatcctgaatttttacgagagggtgaagcaataagagatttcagatatccagataggattgtaattggatctaatgaaaaaaaaccctttaatattatgaaaaaactttatgcaccattaattaacaagggctctaaattttttactacttcaagaagaggggctgaattaataaagtatgcatcaaatgcttttcttgcaaccaaaattactttcataaatgaactt

SEQ ID NO: 205355 - DNA, 1300 bp, Unknown
  Bacterial polypeptide expressing nucleotide sequence isolated from the Sargasso Sea
atgaaattatgcatgataggaacaggctatgttggcttggttagtggagtttgtttttcagatctaggaaatactgtttattgtgtagataatgatattgaaaaaattaatgcacttaataaaggaatactcccaatatatgaaccaggtctggaggaaattttaaaacgtaattataaacaaaaaagattaatttttacaaataatttaaaagaggcagtagaaaactctgatattatatttatttgtgttggtactcccactaaaaaaaatagtaactcggctgatttgaaatatgtttttaatgttgccaataatttaaaaaaattcataaaaaaatataaagttgttataacaaagtctacagtacccttaactactggtgataaaattgaaaaaattttgataaaacaaaaaagaaaaaaattagtagatgttgtttctaatcctgaatttttaagagagggtgaagcaataagagattttttgagccctgatagagttgtagtaggaactgatagtaataaggcaaataaatatcttaaaaacctttatttacccatagttaaaaagacaagtagatattttagaacttcaagacgtggagctgaactaattaaatatgcatcaaatgcttttctagctacaaaaatatcctatatcaatgaattagcaaatctttgtgaaaaaacgaatgttgatattaaagaaatttctcaaggtatgggctcagatcaacgaataggggatagattcttaagagcaggcccagcatatggtggttcttgttttcctaaagatactagagcaataatagatacctcaaataagtttaaatcaaatttatcaattataaaagctgtaattaaatcaaatgaagatagaaaaaaattattaacagaaaaagtatacaaaattttaaataataatcttaaaaataaattaataacttttttaggagttacttttaagcctaacactgacgatatgagagaagcatcaagtttatatatgataccaaaattattaaaaaaaggggctattattaattattttgatccatcaggtaaaaaaaatgaattcaaaaaatttaaaagagttaaatattgtaaaaatgtatctcaagcatgccttagatcagatttaataatacttcacactgaatggaatgaatttaagactttaaatttcaaaaaattaattaaaaagagcaattttaagatatttgatatgcgtaatctatattcaccaaaatcaatgaaaaaaaaaggtattaattattttggtgtaggaagatagt

SEQ ID NO: 205356 - DNA, 1285 bp, Unknown
  Bacterial polypeptide expressing nucleotide sequence isolated from the Sargasso Sea
atgaaattatgtatgattggcacaggttatgttggtttagttagtggggtttgtttttctgatttaggtaatgatgtcatatgtgttgataaagatttaaaaaaaattaacaatttaaaaaagggtattgttcctatttacgaacctggtttagaagagttagttttaaaaaactataaaaataaaagactgaatttttcaacaaacctaaaagagtcggtgaaaaaatcagatattgtttttatatgtgtaggaacaccaaccaaaaaaaatagtaatagtgctgatttaagtcaagtatatgctgttgcaaaagaaatatctaaatcaattaaaaaatttaaaactataatcaataaatcgactgtgcctgtgacaacaggtgatgagattgaaaaaattatatctaaaaaagtaaataaaaaattgttttcagtagtatctaatcctgaatttttaagagaaggtgaggctattagagattttatctatccagatagagttgtagttggatcaaatgatagtaaatcccagagaatattaaaaaatttatattcaccattaatatcaaaaggtgcaaaatttgtttctacaaaaagaagagcagcagaattaattaaatatgcttcaaatgcttttttagcaacaaagattacctttataaatgaaatatcaaatttatgtgaaaaaactggtatagatattgaggatatctcaataggaattggactggataaaagaattggtagcagatttttaagagccggacctgcatacggcgggtcatgttttccaaaagatactaaagctttagtttcaactgctgataaattcaaaactaatttatcagtcgtaaaaagtgttatcagatctaatgatttaagatctgatttattatccaaaagagttagtctcattttgaataataaaattaaaaataaaattgtatcctttttaggtgtaacttttaaagcaaatactgatgatatgagagactcgtctagcctaaaattaatcccatttttatccaaaaaaggtgcaaaaattaaatattatgatcctactggatcaaaaaaagaatttaaaaaatttaaaaatgttgaattttctaactcaatacaagaatcgatcaaaggatcagatattgtaattatacatacagagtggaacgattttaaatcaattaatttcaaaaaattatcaaaaaataaaaaacttattatttacgatatgagaaatatttattcgccaaataaaattaaaaaactaggttttaaatattttg

SEQ ID NO: 205357 - DNA, 772 bp, Unknown
  Bacterial polypeptide expressing nucleotide sequence isolated from the Sargasso Sea
atgaaattatgcatgatcggaactggttacgttgggcttgtgagtggagcatgcttttctgatatgggcaacaaagtaatttgtgctgatattgataaaaaaaaaataagccaacttaatttaggaaaaataccaatttatgaacctggcttagaagaattagtaaaaaaaaattttaatcaaaaaagattgttttttacaactaatattgattgggctataaaaaattcagatattatttttatttgtgttggaacaccaacttttaaaaattctaataaagcagatttaaaatatgtgtttcaagttgctaacctgatttcaaaaaatatttctaaatataaactaatagtaacaaaatctacagttcccgttaccacaggtgataaaatcgaaaatataattaaaaaaagaaataaaaaaatcttgtttgatgtggtctctaatcctgaatttttaagagaaggagaagctattagagattttatttatcccgacagagtagttgttggaacattaagtaagaaagctaatagagttatgaaatcgctttatttaccaatagtaaagaaagatagcagatattttaacacatctagaagaggtgctgaacttgttaaatatgcatcaaatgcatttttggccacaaaaatttcttatataaacgaattagcaaatttatgtgaaaaagcttctgtggatataaaagatatttctatcggcataggtcttgatcaaagaattggtgaaagatttttaagagctggcccag

SEQ ID NO: 205358 - DNA, 1300 bp, Unknown
  Bacterial polypeptide expressing nucleotide sequence isolated from the Sargasso Sea
tatgaaactatgtatgataggtaccggatatgtagggctagtaagtggtgtttgtttttcagatttaggtaacgatgtaatttgtgtagataatgataaaaaaaagattgatttactcaaaaaaggtaaagttcctatttatgaacccggtttatctgaattagtaattaaaaactttaaaaataaaaaaatatcattttcaacaaacttaaataaatctgttaacgattctgatataatttttatttgtgttggcactccaaccaaacaaggtggcagttcggctgatttaagtcaaatttataatgtggcaaaagaaataagctcctcaattaataaatttaagataattataaccaaatcaactgtcccagttaccactggtgatgaaatagaaaaaattattgctaaaaaaaattcaaaaaaaaagttttcggtagtatctaatccagaatttttaagagaaggtgaggccataagagactttatctatccagatagaatagttgttggttctaatgataaaaaaacaaaccgtattttgaaaaatctatataatcctttaatttcaaaaggagcacaatattttcatactactaggagagccgcagaattgatcaagtatgcttcaaatgcctttttagcaactaagattacatttataaatgaaatcgcaaatttatgtgaaaaaactgggataaatattgaagatatatctattggcatgggtttagacaaaagaataggaagtcgttttttaagatctggtccagcatatggtggatcttgctttccaaaagatacaaaagcaattgtttcaacagctgataaatttaaatcaaacctttcagttataaaatcagttattaaatctaataaaaatagatcaaatattttattaaaaagagtacatcaaattttaaataataaagttaaaaataagaagatatcttttttaggtgtaacatttaaagcaaatactgatgatatgcgagattcttcaagtttaattatgataccctcattatccaaaaaaggtgcgataataaaatattatgaccccacaggttttaaaaaggagtttgcaaaaaatagaaacgtaacttacgaaaattcaattagaaaaacaattgaaggttcagaccttgttataattcatacagaatggaacgattttaaatcaataaattttaaaagtttttccaaaaaaaagaaatttatcatatacgacatgagaaatatatattcttccgaaaaaatcaaagaacatggtttaaaatattatagtataggaagataa

SEQ ID NO: 205359 - DNA, 1300 bp, Unknown
  Bacterial polypeptide expressing nucleotide sequence isolated from the Sargasso Sea
atgaaaatttgcatgattggtactggttacgttggattggtaagtggtgtatgtttttcagatttaggaaacacagtttattgtgttgataaagataaaaccaaaattaaacttctgaattcaggtattataccgatttatgagcctggtttagaagaaattgtaaaaagaaatcataataaaaaaagattaatatttaccacgaatataaaagaagctattaaaaattcaaaaattatatttatttgtgttggtacaccaaccaaaaaaaattctaataaagcagatttaaaatatgtatttcaagttaccaatcaattaaaaaaatatattaacaattataaaattatagttactaaatctacagttccaataactacaggcgataaaatagaaaaaatattaagtaagcaaaaaacaaaaaaattaatagatgtggtttctaatcctgagtttttaagagaaggagaagctataagagactttctttatccagatagagtaatagttggttcaaatagtaaaaaggcaaataaattaatgaaatcactatatttaccaataattaaaaaagagagcagatattttaacacttctagaagggcagctgaaatgatcaagtatgcttctaacgcctttctagcaacaaaaatttcatatatcaacgagatagcaaatttatgtgaaaaggtttctgttgatattaaagatatttcaattggtatgggtctagaccaaagaataggtgaaagatttttacgagcaggacctgcttatggaggctcttgctttccaaaagatacaagagcaattgttgatacagctgataaatttaaaacaaatctctcaataattaaaaatgtaatcaattctaatgaaaaaagaaaaattttcttattaaaaagggttcatgaaatccttggaaaaaatctcaaaggaaaaaaaatttgttttcttggtgttacctttaaacctaacacagatgatatgagagaagcctcaagtttaaaaatgataccttatctttccaaaaaaggtgctattattagatatcacgatccatcaggagaaaaagaattttttaaaaataaaaaaaatgtttcttttaaaaaaaatatcacatcagcctgtgaaaaatctgatcttattataatccatacagagtggaatgactataaacagcttaactttaaaaaattagtaaaaaaaaataattttaaagtttatgacttaagaaatctatactcaccaactaaaatgtttagattaaatattaaatattttgctattggaagatagt

SEQ ID NO: 205360 - DNA, 913 bp, Unknown
  Bacterial polypeptide expressing nucleotide sequence isolated from the Sargasso Sea
gatgcagatacaaatcaatttgatacctcttctgttgattcaactgttttccgagattctaaaaagaaataaagaaagctttatcattataaaatctacgataccgattgggcatactaagcatttaatagagaaacataattatcaaaagatttgcttttcaccagagtttctaagagaaggaaatgctctgtatgataatctttttccatcaaggataatcatgggatcaaataataaagcagcaaaagaattttccaaaatattaaagtctgcagctagtaataaaaattttgaaactctctttgtaaaatcagaagaagctgaagcaattaagctattttcaaattcttacttagcattaagagtagcattctttaatgagcttgatagtttttgtcttaaaaaagatcttaaatctaagaatataattgatggtatctcattagataaaaggattgggagtggttacaataatccttcttttggatacggagggtattgtttaccaaaggatacaaaacaacttctttctaatttccagaatgtcccacaagatataattggagctatagtaaagtcaaatgaaactcgcaaagattttatagctaacattatctacagtttagatattaaaacagttggtttttataggctatcaatgaagaaggggagcgataactatagattttctgccgttctagacattattaaaaaactacaatcaaagggtaagaggatactaatttatgaaccaatgttacagggaaataacttttgggaatgcgaagttattaaagataaagaagacttcctatcaagctctgacttaattgttgcaaatagaatttcttctagtcttaagaactttgaagagaaagtatttactagagatatctataatagagattaa

SEQ ID NO: 205361 - DNA, 1318 bp, Unknown
  Bacterial polypeptide expressing nucleotide sequence isolated from the Sargasso Sea
atgaaagttgtcatggttggaactggttatgtgggcttagtatcaggcgcttgtttttcagagtttggtgcccaagttacatgcgttgataaagatgaaaaaaagatcaaagctctaacagagggaaagattccaatttacgaaccaggacttgatgagattgtcgaaaaaaaccttaagtctggacatcttgagtttacaacagatctaaaatctgctgctgaagatgccgatttgatatttattgcagttggaacaccatcgaggagaggtgatggccatgctgatttgaaatacgtgtttgctgcagctgaagagattgcaaatagtattagtaaatattcggtaattgtaaataaatcaactgtgccagttggaactgctcaaaaagttaaagacataattcaaaagtccaacccaagtgcggattttgatgttgcctctaatcctgagtttctcagagagggttctgcaatagaagattttatgaggcctgatagggttgtaattggtgttgaatcaaagaaggcaaaagaagtaatgatgtccttatatcaaaccctaagcttaataaagacacccatctttttcacaaacttagagagtgctgagttgataaaatatgcctctaatgcttttttagcaacaaaaattagtttcataaatgaactctcaatgctttctgaaaaaacaggagcagatatacactccgttgctcaaggaatgggtttagatgaccgtattggagcaaaatttttacaagctggtccaggatatggaggttcatgctttcctaaagatactcttgctctaattcaaacatttgaagactttgagcttgacaacaagattgtcaaatcagttgttgaaattaacacggcgcaaaaagaaaggatgattaagaagattagaaatagtttaggcggtgatgaatcaggaaaagtcattgcggtttttggattaacttttaagcctgaaacagatgatatgagggatgcaccaagcttgacaatattgccgcctctaattgaagctggcgctcatgtgaaagcgcatgatccagaaggcactgaacaagctcaaactttgttgccaaaatcaatcgagtacttcccagacatttttgaagcggcagatggagctgatgcagttatcctcatgacggaatggaatcaatacaaagatcttgatcttcagctattgaaaaataaaatgaaaggcaaaattttccttgatttaagaaatgtctatgaaccaaacgaaatgaatgatgctggatttgaatactattgcataggaagggggggtaacttttaac

SEQ ID NO: 205362 - DNA, 1366 bp, Unknown
  Bacterial polypeptide expressing nucleotide sequence isolated from the Sargasso Sea
atgaaaatagtagtaattggtacaggatatgtgggcttggtctcaggtgtttgttttgccgaaataggtcataatgttacttgtatagatatagatcaaaataaagtagatttaattaacaatggcatatcgccgatccatgaaaataaattacaggatctccttgaacgaaatattagtcgaaaaaatttggaagcttctttagatcttaatgctgctattaaagatgcagatatttcatttatcactgttagcacaccttttgataatgattcaatagatcttagctatgttaataaagtatctagagatattggtaaagcgcttaaagaattgaatcactatcatgtagtttgtgtgaaaagtacggtggaacctgggactactgaaaaattggttggtcccttaattactaagtattctggaaaaaaacttgggacagattggggattatctatgaatccagaatttttggctgagggttcagcggtgaaggattttatgaatcctgatagaattgtgattggtgcaaacgataaaaaagccagtaaaatgatgcaaaaactttacagtatatttaaagattctgaagttattattaccaatattatgactgcagagatgattaaatatgcgtcaaatacatttttggcaactgttatttcttttgcaaacgaaatagcaaatctatgtgaagtagcaggggatattgatgcagttgatgttgtcaaaggagttcatgctgatagacgtttgtcacccatttttcctgaaggaagaattatccctgatttaatgtcatttctttatccaggaacaggattcggaggttcatgctttccaaaagaccttaaatcattaattgcttatggtaagaaaatagagcaacctatgcatattcttgaagcagtaattgagattaataataatcaacctctacgaacaattgatatgactcgtaaagctattggaaatttgtctggtaaaaagattgctgtattaggattatctttcaagcctggaacagatgatatccgcgaatcaccagcaattcctattataaaaactcttattaatgatggtgcaatggttttagcgcacgacccgattgcaattaataatatggaagtaatattatcagataaatcattaacatatgttagtgatttaaagagtgcaataaatgatattgatgcaattattcttgttacatcatggccagattatcaaaatttgagtatgtatttgaaatcaaataaaatcccaataatagatggtaggcgttttttagataaaaataaatataataaatatagtggaattggtttaggcagcaaattaactattagtgaggtgaatgtatgaa

SEQ ID NO: 205363 - DNA, 960 bp, Unknown
  Bacterial polypeptide expressing nucleotide sequence isolated from the Sargasso Sea
catgaaactttgtatgataggaacaggttatgtaggtttagtcagtggtgtgtgctttgctgatttaggcaattacgtaatttgtgttgataaagatttaaaaaaaatagatctactttctaaaggaaaaattcctatttatgaacctggactcacggaattagtgaataaaaattataaaaacaaaaggttaaaattttcatcagatttaaaaaagtcaataaaagaatctgatataatttttatttgtgttggaacaccaaccaaaaagggaggtagcagtgcagatctaagccaaatttttcaagtggcaaaagagataagtttatcaatcaataagtttaagataatagtcactaagtcaacagtgcctgtgacaactggtgatgaaattgaaaaaattttactaaaaaaaaagagtaataagaataaattttctgttgtatcgaatccagaatttttaagagaaggtgaagctatccgagattttatttttcctgatagaatagttgttggatctaatgataaaaagtctaaccgtttacttaataatttatatgcacctctaatttctaaaggagctcaatatattaatacttcaagaagagctgcagaattaatcaaatatgcatccaatgcttttttggctacgaaaattacatttattaatgaaatcgcaaatttgtgtgaaaaaacaggaataaatgtagaagatatttcaattgggatgggtttagataaaaggataggaagtcgttttttaagggcaggtcctggttatggtggatcatgttttccaaaagatactaaagctataatttctactgctgataagtttaaaataaatctttctgtaataaaatcagtcattaaatctaacgaaaatagatctaattttttacttaataaagtctataaaattttgaataacaaaattaagaataaaaaaataactttctt

SEQ ID NO: 205364 - DNA, 1297 bp, Unknown
  Bacterial polypeptide expressing nucleotide sequence isolated from the Sargasso Sea
atgaaaatatgcatgattggatctggttatgtggggttagtaagtggtgcatgttttgctgaacttggtaacaatgtaatttgtgtagacaaaaacttaaataaaatatctaatctaaagaaaggagcaattccaatttacgaaccaggattagaagaattaattcaaagaaacgtaaagcaagaaagacttcaattttcaacagatatatcaaggtcaattataaaatcagatattatatttatatgtgttggcactccaacaaaaattaaatctaacgaagcagatttaaaatatatatttcaagtagtaaaagatttaaaaaagaatttaaacaaatataaaataatcattactaaatctacagtaccagtaactactggtgacaaaattcaaaaattattaacaactaaaacaaataaaaaattattcgatgttgtttcaaatccagaatttttaagagaaggtgaagctatcagagattttatgtttcctgatcgagttatagttggaacaaatagtaataaggctaataatgttttaaaaaatttatattctccaataattaaaaaaaagggtagatattttaatacatcaagacgtgcagcagaggttattaaatatgcagctaatgcatttctagcaacaaaaattacatttattaatgaaattgcaaatttatgtgaaaaacttaacgttgacgttaccgatgtttcgttaggtataggaactgatgaaagaataggagcaagatttttaagagcagggccaggttatggtggctcttgttttccaaaagatacacgcgctttaatttctacttcaaaaaaatttaaaactaatttatctatagtcaaatcaactattaactctaatgaaaataggcacaaatacttattaaataaaattaaagaaatattgaataataacctgaaaagtaagaaaattacttttttgggtgttactttcaaggctggtactgatgacatgagggattcagcatctctaaaattaattccatatttgatcaaaaaaggcgcaaaagtttcttactatgaacctacaggcattaaaaaagattttgataaaaaaaaaatattttattttaacaatatcaaagatgcatgtaaaaatagtgaccttttaattattcatacggagtggaatgagtttaaacaactaaacttcaataaattgaaaaataagaaaaaatttaagatttatgatttaagaaatttatattcacccaaaaaaatgaaaaataaaaatatcgattactttagcgtaggtagataat

SEQ ID NO: 205365 - DNA, 1297 bp, Unknown
  Bacterial polypeptide expressing nucleotide sequence isolated from the Sargasso Sea
tatgaatatttgcattataggttcaggttatgttggcttagtcagtggagcatgtttttctgaattagggaataaagtagtttgtgtcgataataataaagaaaaaatcgaaaaccttaaaaaaggaattattcccatttatgaaccgggtttagaagaacttgttttacgaaattacaaaaataaaagacttaatttttctactgaaatagattcatcaataaaaaaatcagatattatttttatttgtgtaggcactccaacaaataagaattcaaacaatgccaacttaaagtatgtttttaaagttgtttctagtattaaaaataaccttaataaatataaaatcattgttacaaaatcaactgttccggtaatgacaggtgataaaattgaaaaagtattaaacctaaataaaaataaaataagatttgatgttatttccaaccctgaatttcttcgcgaaggagaagctattagagactttatgtatccagatagagttgtagttggcacaaatagtaaaaaagcaaataatgttatgagaagcttgtatttaccattaataaaaaaatctaatagatattttcaaacatcaagaagagctgcagaattaatcaaatatgcagctaacgcatttttagcaactaaaatttcatttattaatgagatttcaaacttgtgtgaaaaatcaaatatagatgtaaaagatgtatctactggtataggtttagatgaaagaataggggaaagatttttacgtgctggtcctggttatggtggatcttgttttccaaaagataccagagctttggtatatacatcacataaatttaaaacgaatctttctatagtaaaatcagttattaaatccaatgatgatagatataaaatactattaaataaaataaaaaaaattatgaataataatttaaaaggaaaaaatattacttttttaggagttactttcaaagcaggtacagatgatatgagagaagctgcatcattaaaattgattccttatttaactaaaagaggctctaaagtttcttattatgaaccaacaggagaaaaaaaaaacttcaattataaaaaagtaaaatttgtgaacaatttaagagatgcttgcaaaaaagcagatttattaattatacatactgagtggaatgaatttaaacagcttaattttaaaaaaataagcaataaaaaaaattataagatatatgatttaagaaacttatattctccaacaaaaatgaaaaaaaataatgttaattactacagtgttggaagataa

SEQ ID NO: 205366 - DNA, 1157 bp, Unknown
  Bacterial polypeptide expressing nucleotide sequence isolated from the Sargasso Sea
tatgaaactttgcatgataggcactggttatgttggtctagtaagtggtgcatgcttttcagatttgggaaataaagttatctgtgtagatatagataaaaacaaaattaataaacttaattccggaattatccctatatacgaaccaggattagcagaattagtaaaaaaaaattttaatcaaagaaggcttgccttctctacagatataaattcttcaattaaagaatcagatattatttttatttgtgttggcactcctactaaaaaaaaatctaatatggctgatttaaagtatgtttatagtgttgctaaattaattgctaaaaatataaataaatataaaattatagttacaaaatcaactgtacctgtgtctacgggtgatatcatagaaaaaattataagaaataaaaataatagaaaaaaatttgatgttgtttcgaatcctgagtttttaagagaaggagaagcaattagggattttattagccctgatagagtagttgttggaacaaatagtaaaaaagcaaatagaataatgaaatcactttatttgcctataattaaaaaagaaagtagattttttagcagctcaagaagaggagctgaattaattaaatatgcatccaatgcatttttggctactaaaatatcttttataaatgaactagcaaatttttgtgaaaaagcagaagtaaatataaaagacatatcatcaggaatgggtcttgatcagagaattggagaaagatttttacgagctggtccagcttacggtggttcatgctttcctaaagacactagagcattagttaatactggagataagtacaatgttaatttttctatagttaaaagtgtaattaaatcaaatgataataggaaaattcttttattaaaaagagtacataaaattattggaaaaaatattagaaataaaaaaattacttttcttggagttacttttaagcctggcactgatgacatgagagaagcgtcaagtttaaaaatgataccttatctttccaaaaatggagcatatataaattatacagacccatctggcccaaaaaaaattttagataaaattaaaaatgtaaaatttcttaaaagtgttgcagcgagttgcaaaagcgctgatttaataattattc

SEQ ID NO: 205367 - DNA, 1162 bp, Unknown
  Bacterial polypeptide expressing nucleotide sequence isolated from the Sargasso Sea
aatgaaactatgtatgataggaactggttatgttggattagttagcggggtctgctttgctgacataggcaaccaggttgtttgcgttgataaagataaaaataaaatcgataaactcaactctgggatttccccaatttatgaaccaggattagatgaattaataaaaaaaaattttacagctaaacggctctcattcactacaaatattgatagagctataaacacatcagatataatttttatatgtgtaggaacgcctacaagaaaagggtcaattaaagttgatttatcttttgttaataaatgtacaaaagaaatattaaaatattcaaaaagaaaaaaaattattgtaacaaagtctactgtgccagtgggaacaggcgacgagattgaaaaaatcgtaaaaaaaaagaaaaagctttttacagtaatctctaatcctgaatttttaagagaaggtgaagcaataagagattttagatatcctgatagaattgtaataggttctaacgaaaaaaaaaccttcaacattatgagaaaactttatgcaccattaactaacaaaggtgcaaaatttttcgctacttcaagaagaggagcagaattaataaaatatgcatcaaatgcttttcttgcaacaaaaattacttttattaatgaacttgcaaatttatgtgaaaaatctggggttaatatagaggatgtttcattaggaatgggttctgatagtagaataggtggcagatttttacgtgctggcccagcctatggcggttcttgctttccaaaagatactaaaggcctcgtatctgctgcagagaaatataaaataaatttatcagttgtaaaatcagtaattaaatctaaccaaggaagagtaaatttactcacaaaaagagttcataaaattttaggatcaaatttaaaaaataaaaagatttcttttttaggagttacatttaaaccaaacactgatgatatgagagattcgacgagccttaaaatgataccatatctatgcaaaaaaggagcaaaagttagttattacgatccatctggtgaaaaaaaagaatttagaaaaatcaaaaactgcaattacagaaacaatataaaatctaattgtaatggggcagatttagttgttttactcactgaatga

SEQ ID NO: 205368 - DNA, 1300 bp, Unknown
  Bacterial polypeptide expressing nucleotide sequence isolated from the Sargasso Sea
tatgaaactttgcatgataggtgctggatatgttggcttggtaagtggggtatgtttctctgatcttggtaacgttgtttattgtgttgataatgataaaagaaaaattgatcaattaaataatgggaaagtaccgatatatgaaccaggtttagaagaaattttaaaaaaaaattttaaacaaaagaggttaatctttacaactaacttagagaaagcaatttcaaactctgatattgtttttatttgtgtaggcaccccaacaaaaaaaggtagtaactccgcagaccttaaatatgtttttcaagtcgcaaatcaattaaaaaaactgataaagacctataaaattgttattacaaaatcgacagttcctgttacgacaggggataaaattgagaaaattttaataaaacaaaaaaagaaaaatttagtcgatattgtttctaaccctgaatttcttagagaaggtgaagctataagagattttatttatcctgatagagttgttattggaaccgatagcgaaaaagcaaatcgtattttaaaatctttatacttacccataataaaaaaaacgagtagattttttagaacttcaagacgtggcgccgagatgattaaatatgcatcaaatgcattcttagctacaaagatttcttatataaatgaaattgctaacttatgtgaaaaaactggcgtagatgttaaagaaatctcagttggaatgggatctgaccaaagaatcggtgagcgttttttacgtgctggacctgcgtatggtggatcttgttttcctaaagatacaaaggctattgtggatactggaagtaaatttaaaacaaatctatcaataattaaatctgtaattaaatcaaataataatagaaaaaaattacttacaatcaaagctgaaaaattattaaaaggcactttaaaaaaaaagagtataacctttctaggggttacatttaaacctaatacagatgacatgagagaagcctgtagtcttgcaatgatacctcattttagtaaaaaagttttaaaagtaaaatattttgatccgaccggccctaaaaaagaattttcaaaacataaaaatgttgaatattgttcgaacattgagttggcatgtttaaattctgatttaattattttacatacagagtggaatgaatttaaacttttgaattttaaaaaattggtaagaaaaaagaattttattatttacgatatgaggaatttgtattcacctattaatatgaaaaaaaataaaattaaatattttggcgttggtagataa

SEQ ID NO: 205369 - DNA, 832 bp, Unknown
  Bacterial polypeptide expressing nucleotide sequence isolated from the Sargasso Sea
atgaaaatttcagttattggatgtggttatgtagggctagtttctggagtttgttttgcagattctggtcatacagtaacttgcattgataatgataataaaaaaattcagttactaaaagataatcaagttcctatttatgaacctggtcttaatgaattattattgaaaaatattaaaggtaataatttacattttgaattaaatataaatgaaaatatcaaagactcagaaatagttattattacagtaggaactccaacagatgaaaatggagaggcagatttaacatttgtgcgtcagtgcgctaatgaaatagccgaatttatctcaccaaatactcttgtaatagtcaaatctactgttcctgtaggaacttgtgatgaaatcgaaggtattatttatgaaaaatgtgcgcattcagaattttcagtaatttctaatcctgaatttcttagggaaggaaatgctatttatgattttatgaatcccgatagaatagtaatcggtattaaagatcaaaatcacaaaaaaagaataattgatctttacacaaatatttctaatgaagacaaaattttatttacttcaagaagatcatccgagctcatcaaatacgcaagtaactcaatgcttgccatgcggataatttttataaacgaaatagcagatctttgtgaaaaaattggtgcggatgtaactgatatcgcaaaaggaattggattagacaaaagaattggcccacattttcttgaacctggaccaggttttggaggttcttgttttccaaaagatgctagagcattaattgagtcagggaaaaaaatttgat

SEQ ID NO: 205370 - DNA, 686 bp, Unknown
  Bacterial polypeptide expressing nucleotide sequence isolated from the Sargasso Sea
tatgaaattatgtatgataggaactggttatgttggattagtaagtggagtctgtttttctgacgtaggtaatactgtttattgtgttgataaagataaaaataaaataaattctttaaacaaaggtatcgtgccaatctacgaacctggtctagaagaaattttaaaaaaaaatcataaacaaaaaagattaatttttacaactgatttaaaaaaagctgtaataaattcagatatcatatttatttgtgtaggaacaccaacaaaaaaaaatagtaattcagccaatctaaagtatgtatttaatgttgcgcatgaattaaaaaaaataatatcaaagtacaaaattattattaccaaatctacagtaccagtaactactggagatcaaattgaaaaaattttgcataatttaaaaaagaaaaaattagtagatattgtttcaaatcctgagtttttaagagaaggtgaggccattagagattttatttatcctgacagagtaatagtaggtactaatagcaagaaagctaatatgatattaagatctctttatttaccaattataaaaaaaactagtagattttttagcacatcaagaagaggagcagagttaatcaaatatgcttcaaatgcttttttagcaactaaaatttcatttataaatgaaattgctaatttatgtg

SEQ ID NO: 205371 - DNA, 1294 bp, Unknown
  Bacterial polypeptide expressing nucleotide sequence isolated from the Sargasso Sea
tatgataggtaccggttacgttggattagtaagtggtgtttgcttcgcagacataggtaatcaagttgtatgtgttgataaagataaaactaaaatagataaacttaatttcggtgtctccccaatctacgagccagggttagatgaattaataaaaaaaaattttttagctaagcgtctttcttttactacaaatataaataaagctattagcacatcagatataatttttatatgtgtgggaacacctacaagaaaaggatcaatcaaagttgatttatcttttgtttacaaatgcacaaaagatatatttaaatattcaaagagaaagaaaattattgtaaccaaatctactgttccagtaggtacaggcgatgaaattgaaaaaattttaaaaaaaaagaaaaaactttttacagtaatctctaatcctgaattcttaagagaaggagaagcaatacgtgattttagataccctgatagaattgttataggatctaatgaaaaaaaagcctttaacactatgagaaaactttatgcaccattaataaataaaggctcaaaattttttactacttcaagaagaggggctgaactaataaaatatgcatcaaatgcttttcttgcgactaagattacttttataaatgaacttgctaatttgtgtgaaaaaactggagtaaatatagaggatatctctttaggcatgggttctgatagcagaataggcggtagatttttacgagctggcccagcttatggtggctcttgcttccccaaagatactaaaggacttgtatcagcagcagataaatttaagattaacttgtctgttgttaaatcagttattaaatcaaatcaagaaagagtaaatctactaactcaaagaattcataaaattttaggttcaaatataagaaataaaaacatttcttttttaggcgttacatttaaaccaaacactgacgatatgagagattcttctagtctcaaaatgataccttatctttgtaaaaaaggtgcgaaagtgaaatattacgacccatctggagaaaagaatgagtttaaaaagattaaaaactgcaaatacagaaacaatataaaatcttgttgtaatggtgcagatttaataattctactcaccgaatgggatgaatttaaatcaatagatttcaaaaaagttgctaaaaatacaaaatttaaagtgttcgatttaagaaacctttattctgctgaagaaatgaaaagaaataagattaaatactactctgttggtagacctgacgctaattaa

SEQ ID NO: 205372 - DNA, 1297 bp, Unknown
  Bacterial polypeptide expressing nucleotide sequence isolated from the Sargasso Sea
aatgaaaatttcagtgattggatgtggttatgtaggacttgtttctggtttttgcttcgcagattccggtcataaagtaacttgcattgataataatgatcaaaaaattaaattactaaaagataataaaattccaatttatgagcctggccttaatgagctattattgaagaatatagaaaatggtaatttagcttttgaattaaatataagcgaaaatattaaagactcagagattgttctaattgcggttggaacacctacaggtaaaaatggagatgcaaatttaacctttgtatatcaatgtgcaagagaaattgcagagtttatttctccaaatacacaaataataatcaaatctactgtacctgtaggtacttgtgatgaggttgagaatataattaaagagaattgtatacattcagaattttcagtaatttctaatccagaatttttgagggaaggaaatgctattagtgattttattaatccagatagggttgtaattggcaccgacgatcaaactaacaaaagaataatgattaatctttacaaaagcattaccaatgaagataaaatattatttacttcaagaagatcatccgaactaatcaaatacgcaagtaactcaatgcttgcgatgagaataatatttattaacgaaattgcagatctttgtgaaaagattggtgcggatgtaactgacatagcaaaaggtattggattagataaaaggattggtccacatttccttgagcctggaccaggatttggaggctcatgttttccaaaagatgctagggcgttaattgaatcggggaaaaaatatgatgcacctcaaacattacttgaaagtgtaatattaggtaatgaaaatagaaaaaaaaatataagtaaaaaaatcttaaataaattagataaacaaactgaaaatcaaataggaatacttggagtaacttttaaagcagaaacagatgatatgagagaatctccaagccttataataattccagatcttcaagaaaatggaatgaatatttcagtctacgaccctgagggagaaaaggaagcatcaaaaattcttaaagatgtaaattggaagaaaacagcttacgaagctgctgaaaatgttgactgccttgtaattttaacggattgggaagaatttaaaaatttagatttagataaaataaaaaattcaatgaaaagacctttaatatatgattttagaaatatctttgatcctgatatgatgacagaactaggttttgaatatttttctataggcagaggataa

SEQ ID NO: 205373 - DNA, 514 bp, Unknown
  Bacterial polypeptide expressing nucleotide sequence isolated from the Sargasso Sea
tatgaaaatatgtatgattggtactgggtatgttggcttagtaagtggtacctgctttgcagatttaggtaataaagttttatgtgttgataaagataaattaaaaataaataaactaaaaaaatctatttctcctatatacgagcctggtttagatgatctaattaaaaataattatagagctaaaagattagattttacctctgatttacgtaaagcagtaaatgaatcacaaattatttttatctgtgttggtacccctacaaaaaataaatcaaatttagttgatctttcacaggtatataatgttgctaaagcaatttctaaatatataaaaaattacaaaattatagttaccaaatctacggtgcctgttactacaggtgacctaatagagaaaattataagtaaaaaagttagaaaatcgctttttgatgttgtgtctaatcctgagtttttaagagaaggtgaagctataagagattttaaatatcccgatagaattgtaattgga

SEQ ID NO: 205374 - DNA, 1174 bp, Unknown
  Bacterial polypeptide expressing nucleotide sequence isolated from the Sargasso Sea
actgacaaaaagaagaaaaattacaattgttggagctggttatgtaggaatgtcaattgcatcatcgttggctagaaaagatgaaattctaattttagaaaccaataaagagaaaattgagagaattaattctgggcaatccagcattgatgatcccgatatcaatgcattttacaatgaacatgatctaaatataaaagccatagaaagaaaagaggaagcatttcagggggcagattttattattatctgtgttcccactgattttaataacgaaacatcatcttttgataccgatattcttgaggatgttatagatgacgctataagaaacaataatgatgcattaatcataatcaaatctaccattccagtaggctatacaagccaagctagagaaaaataccaaacaaaaaatattatcttttcgcctgagtttctcagagagcattctgctatgcatgatgtgttaaatccatcaagaatcattgttggaaatgactcagagttatcaactgattttgctgaacacatatcagaatcaactgagaatgagtccgagataattctaatgccatcttctgatgcagaggcagttaaactcttttcgaatacttaccttgcaatgagagtcgcattttttaatgaattggatacattctcaattgctaaagacatatcaactgagaatgttattaacggtgtttcaacagatccaagaatagggaagcaatacaataatccttcatttggatatggtggatattgcttaccaaaggatactaagcagttgcttgcaaattttgaagaccttcctcaaaccattatccagtcagtgatcagctcaaatgaggcaagaaaaaatttcatcatcgaagaaatcaaaaagcttcgtccagaagtagttggtatttataaacttgccagtaatccgaaggtcaaaaattttagaagttcagaaatgctagatattatcactggtttatcaaactattttgatgatttgattatctttgagccattaataagtgaaaaggattatatgggtttaaaggtaataaatgacatcgatatatttaagaaagaatccgacttaattgtgacaaatagaaaatgtgatcaactgaatgatgtatctgaaaagttatattgcagagatatttttagaggataa

SEQ ID NO: 205375 - DNA, 602 bp, Unknown
  Bacterial polypeptide expressing nucleotide sequence isolated from the Sargasso Sea
tatgaatatagttgtggttggaatgggctatgttggcctgtcgaacgcggttttactcgcccagcaaaaccatgtagtagcgattgatttgatgcccgagcgcgttgcgttagttaatgcacgtaaaccaacggtcgccgacagcctgattgaagaatatctgcagcataaagccttaaatctcagtgccacgaccgacaaaaacgccgttaaagaagccgattttgtcatcatagcgactcctacggattacgacccacaaactaactactttaatactcagtcggtagaacgggtcgtgaaggaagcgctcaccctgaatcccgacaccaccattgtcatcaaatcgactgtgccagtgggttttaccgaagggctgagaaacaaactcaacagtgacaatatcttattttcgccggagtttttgcgtgaaggtaaggcgctttacgataacctccacccctcgcgcatcatagtgggtgaacgttccgagcgtgcccaagcctttgccgatctgcttgcccgcgccgccattaagcaagatattccgattttactcacagacagcactgaggccgaggcaattaagttatttgccaaca

SEQ ID NO: 205376 - DNA, 1168 bp, Unknown
  Bacterial polypeptide expressing nucleotide sequence isolated from the Sargasso Sea
ttgaaaatattaataatagggcttggttatgtgggtactgcaaacgctgtccttttatcacaacataacgaagttacttgcttcgatttagatatctcaaaatcaaataacctaataaatggtatttcgcctatagaggataaacttgtatctgaatatttatcttctaaaaaattaaatttaaaatcagcagaaagttttcctactgaagttgaaaattatgactttgtgatcatagctacaccaacaaattatgatattgaaacaaataaatttaatacatcctcaatagaacaatcgttagaaagtattcaaaattctaaatcaaatccaactgtaattgttcgatcaacgactccagtaggttatgtgagtaaagttcaaaagaaattccctgatcttgaaattatttttgtacctgaatttttaagagagggaagagctctaaaggatagtctttatccttcaagaattgtaataggctcgcattctgaaaaaggaaaaggttttgcaaaattattaaaagatgcatctcttgataaaaatgttcaaatagtcttcacaaattcaagagaggcagagtcatcaaaattattttccaatgcctatttagcaatgcgagtaacattttttaatgaactagactcatttgcaatgtcaaaagatttaaatacaaaagagattattaaagctgtaagtctagatcctagaataggagatttttacaataatccctcatttggatacgggggatactgtttaccaaaagatacaaaacaattattagcaaacttcgataaagtcccccaaaaaattatggaggcaattatagagtcaaattcaatgcgaaaagatttcattggtttagagattgcaaaattaaaacctaaaacagtgggtgtttataaactcattatgaaagatggatcagataatataagagagtcaagtatgcaaggaattatgaaaagagttaaagctaaaggtataagagtaatagtctatgaacctttaatcaaagataaacaatttttcaattcagaggtttatcaagatttagaattattcaaaaaagatgcagatttaattctttgtaatagaaaccatacagagttaaatgatgtacaggacaagatttttactagagacttgtttaatcaagattaag

SEQ ID NO: 205377 - DNA, 730 bp, Unknown
  Bacterial polypeptide expressing nucleotide sequence isolated from the Sargasso Sea
tatgaagttatgtatgataggaactggatatgtaggcttagttagtggagtatgttttgcagatttaggtaacgatgtcatttgtgttgataaaaatttagataagattaatttacttaaaagaggcaaaattccaatttatgaacctggtttatcagaattagttaataaaaattataaaaacaaaagattaattttttctacagatttaaaaaaatcagttaaagcatctgatataatttttatctgcgtaggcacaccaacaaaaaaaggtgggaattctgctgatctaagtcaaattttcagtgtcgcaaaagaaattgtttcatcaattaataaatttaagataatagtaactaaatcaactgttccagttacaactggcgatgaaatagaaaagattttatctaaaaaaaataatagaaataaattttcaattttatcaaatcctgagtttttgagagagggcgaagctataagagattttacctatcctgatagaatagtagttggttccaacgataaaaagtctaatcgtattatgaaaaatttatatgcaccattaatttctaaaggggcacaatatattaatacctctagaagaggtgctgagttgattaaatacgcttcaaattcttttttggcgacaaaaataacttttattaatgaaatagcaaatttatgtgaaaagactggaattagtattgaagatatatctattggtatgggt

SEQ ID NO: 205378 - DNA, 811 bp, Unknown
  Bacterial polypeptide expressing nucleotide sequence isolated from the Sargasso Sea
tatgaaaaatataactatccttggcacgggttatgtgggtcttgtaagtggtgcaggaatatctgattttggtcattcggtgatatgcgctgatataattaaagaaaaaataaagtcacttaagaatggaaaaataccaatctatgaacctggcttagaagaattggtgaacaaaaatgtagatgttggtagactatcatttacatcaaatatagatgctgctattcaaaaagcagaggtgattattattgcagttggtactccagaagctgaagacggtactgcagacatatcggcagttgaatccgtcgctagagctattggaaaaaatataaatggttacaaagtaatttgtactaaaagtacagtaccagtaggtacaggtaaactgattacaaaaatcataaatgaaactaatgatagtaaatataaatttgattatgtgtcaaatcctgagtttttaagagaaggttctgctgttaaagattttctatggccagatagggtggtaattggtgcagacaatgataaagcttttaaggttatgaaagaagtctatagccctctatatataaatgacaaacctattttgcatacaagcgtaattactgcagagatgataaaatatgcagcaaatgcatttttagcattaaagataagttatatcaatgaagtagcaaacttatgtgatagtatgggtgctgacgtccatcaagttgctaaggcgatgggacaagatggtaggataagtccaaaatttttacatcccaggtccaggatttggtggttcttgttttccaaaagatactaa

SEQ ID NO: 205379 - DNA, 616 bp, Unknown
  Bacterial polypeptide expressing nucleotide sequence isolated from the Sargasso Sea
tatgaaattatgtatgataggagcaggctatgttggattagttagtggtgtatgtttttctgatttaggcaatgaggtagtttgtgtagataaagatcaaaataaaataaataatttaaaaaattccataattccaatatatgaacctggcctagaagaacttgttaaaaaaaattataaggctggtcgtttatcttttacaacaaatttatccaatgcagttaaaagttctgatgtaatatttatttgtgtaggaacacctactaaaaaaaaaggaattggagctgatttaagtcaaatattttcagtttcaaaagaattaagcaattatattaaaaaattcaaaattatagtcaataaatcaaccgttcctgttatcactggtgacaaagttgaaaatattatttcaaaaaaagttaaaaaaaaatttttttcagtggtttctaatccagagtttttgagagagggtgaggctattagagattttatttaccctgacagaattgtaattggaacagacgataaaaaatcaaataaaattctaaagcaattatacgcacccttaatttcaaaaggtgcaaaatatttgaacacttctagaagagcggctgaataa

SEQ ID NO: 205380 - DNA, 1300 bp, Unknown
  Bacterial polypeptide expressing nucleotide sequence isolated from the Sargasso Sea
tatgaagttatgtatgataggcacaggttatgttggtttagtcagtggtgtatgttttgctgaacttggcaatgatgttatttgtgtggataaagatataacaaaaataaataaattaaaaaaatctattattccaatctatgaaccaggtttagaagagttagttaaaaaaaactacaagtctggaagacttaagttttcaaccgatcttgctgaatcagttagaaaatcaaatattatttttatttgtgtggggacaccaacaataaagaataaatatgaggcagatttatcacaagtttactctgtaactaaggagataagtaaaaatattaaatcatttaaaataattataaataaatcaactgttcctgtaacgacaggtgataaagttgaaaaaattatttcactcaaagtaaaaaaacaattatttagcgttgtatcaaatcctgaatttttaagagaaggtgaggctattagagattttatttatccagacagagttgtaatcggcacatctgaaaaaaaatcaaataaaatattaaaaaatttatattcccctttaatttctaaaggagcaaaatatattaatacatcaagaagagcagcagaattaataaagtatgcttcaaatgcctttcttgctactaaaataacatttattaatgaattagctaatttatgtgaaaagttagatataaatatagaagatgtttcaattggaattggtactgataatagaattggtagcagatttcttagagcaggccccgcttatggaggatcttgttttcctaaagacacaagagctttaatagatactgcaaaaaaatcaaaatcaccattatcaataatcaatacagttattaattctaataataaacgatcccatcttcttttaactagaatagctaagatattaaaaaataaaatcaaaaataaaaaaattacttttttgggagtaacatttaaagctaacacggatgatatgagagaatcagcaagtttaaaaatgataccttttcttaataaaaaaggagcaataattaattattatgatccttcaggaaaaaaaaatgaatttgaaaaatataaaaatgtaaaatttaaaaataatattaaagatgcatgtgaaatgtctgatttaattattgttcatacagagtggaacgaattcaaacttttagatttaaaaaaaattgttaaaaaaagaaattttattatatatgatatgagaaatatctattcagctgaaaagatgaaaaaacaaaaaattaaatactttggaattggaaaataa

SEQ ID NO: 205381 - DNA, 1033 bp, Unknown
  Bacterial polypeptide expressing nucleotide sequence isolated from the Sargasso Sea
atgaaactatgtatgataggaactggttacgttggtttagtcagtggagtttgtttttcagacttaggtaatgatgtcatttgtgtagacaaagacaaagataagataaatttacttaaaaaaggaaaagttccaatttatgaacctggtttatcagaattagttgttaaaaattacaggaataaaagattaacgttttcatcagatttaaaaacttcagttagaaacagtgacataatttttatttgtgttggtacgcctacaaaaaaaaatggaagctctgctgatttaagccaagtttataatgtagctaaagagttaagcttatctataaataagttcaaaattattataacaaaatcaactgttccagttactacaggtgatgtaattgaaaaaataattttaaagaaaaataataaaaaaaaattttctgttgtatctaaccctgagtttttgagagagggtgaagctataagagattttatataccctgatagaattgtagttggttctaatgataaaaattcaaatcgaattttaaagaatttatattctcctttaatttcaaaaggtgctcagtatgtaaatacatcaagaagagcagctgaattaataaaatatgcatctaatgcttttttggctacaaaaattacatttataaatgaaatagcaaatttatgtgaaaagactggcataaatgttgaggatatatccattggtatgggtctagataaaagaataggggggcgttttcttagggcaggtccagcctatggaggctcttgttttccaaaagatactaaagcaattgtttcaactgcagataattttaaaataaatttgtctgtgataaaatcagtaattaaatcaaataaaaatcgatcaaatattttacttaaaagagtttatgaaattcttaagaaaagggttaaaaacaaaaaaattacgttcttgggtgttacatttaaagctaatacagatgatatgcgagattcatcaagtttaaactatgataccggccttgtctaaa

SEQ ID NO: 205382 - DNA, 523 bp, Unknown
  Bacterial polypeptide expressing nucleotide sequence isolated from the Sargasso Sea
aatgaaattatgtatgataggtactggttacgttggattagtaagtggcgtttgctttgcagacataggtaatcaggttatttgcgttgataaagataaaactaaaatagataaactaaattttggtgtctccccaatctatgagccagggttagacgaattaatagaaaaaaattttaaagctaaacgcctctcattcactacaaatatgaataaagctattagtacgtcagacataatttttatatgtgtaggaacacctacaagaaaaggatcaatcaaagttgatttatcttttgttatcaaatgcacaaaagaaatatttaaatattcaaaaagaaaaaaaattattgtaaccaagtctactgttccagtagggacaggcgatgaaattgaaaaaattttaaaaaaaaagaaaaaactttttactgtaatctctaatcctgaatttttacgagaaggagaagcaatacgtgattttagataccctgatagaatcgtaataggatccaatgaaaaaaaa

SEQ ID NO: 205383 - DNA, 943 bp, Unknown
  Bacterial polypeptide expressing nucleotide sequence isolated from the Sargasso Sea
tatgaaattatgtatgatcggtactggttatgttggtttagttagtggtgtttgtttttcagatttaggtaatgatgtaatttgtgttgataaagatataaataaaataaataatttaaaaaaaggtgttattccaatttacgagccaggtctagaagaaatggttttaaaaaattttaagaataaaaggttgaacttctcatctaatttaaaagactctgtaagaaaatcagatattatttttatttgtgtgggcactccaacaaaaaaaaatagcaatagtgcagatttgagtcaagtatacgctgttggaaatgaaatatcaaaatttataaataaatttaaaattataataaataaatctactgtacctgttacaactggtgatgaacttgaaaaaattatatcaaaaaaagtaaataaaaaatatttttcagtagtctcaaatcctgaatttttgagagaaggtgaggctattagagattttatttatcctgacagaattgtagtaggatcaaacgatagtagatctcaaactatactaaaaaatttatattcaccactgatttccaaaggtgcaaaatttatttctacacaaagaagagctgctgaattaattaaatatgcctcaaatgcttttttagcaacaaaaattacctttataaatgaaattgcaaatttatgcgaaaaaacaggcattgatgtcgaagatatatcgattggtattggacttgataaaagaattggtagcagatttttaagagccggaccttcatatggcggatcatgttttcccaaagacactaaagctatagtttctactgctcaaaaatttaaaacaaatctatcaattataaaaagtgttattaaatctaatgataaaagatctgacttattatctaaaagaataaatttaattttaaaaaaaaagattaaaaaataa

SEQ ID NO: 205384 - DNA, 1306 bp, Unknown
  Bacterial polypeptide expressing nucleotide sequence isolated from the Sargasso Sea
attgaatatcacaatcattggaacaggttatgtaggtcttgtatcgggaatatgttttgcagagtttggttttaaagtaacttgtgtagataaagagataaaaaaaattcaaaaactgcaagatggggaagttcctatttatgagccaggattagaagtaatacttgaaagaaatattgatgctaatcggataatttttacaacagaattggaaagtgctgttcgaaatgcagatatagtttttattgcagttggtacaccatcaaggagaggtgatgggcatgctgatttaagttttgtatttagtgcagctgaacaaattgcaaaatcaattaatggctatactttggtagttacaaagtcaactgtccctgttgggaccggcaatcaagttaagcaaattattaaaaaagcaaattataaagcagaatttgatatagcttcaaatcctgaatttctaagagaaggatctgctgtagaagactttatgaggcctgatagagttgttgttggagttgaaactgaaagggcaaagaagatgatggccactttgtataggccattgttcttattggaaactccaatcgtctacacttcactagaaagcgcagaattaataaaatatgcttccaatgcgtttcttgcagttaaaatttcttacataaaccagatgtcagatttatgtgaaaaagtggatgcaaacattgatgatattgccaaaggtatgggattagataaaagaattggtaataagtttctgcacactggtccaggttatgggggcagctgtttcccaaaagatacacttgcattagtaaaaactgcacatcaatataaatcagaagtttcaatagtagaacaaactataaaatacaatgatttaagaaaaaaacatatggtcaaaaaaattcaatctagtgtagacagcttatcaaataaggatatagcaattttaggattgtcttttaaacctgaaacagatgatatgagagaaagtccttcaatagatataattaatggccttttagatctaaatgctaatatttttgcttatgatccagaagcaatgaatgaggcaaaaaaaattttttcagacaaaattaactatttacaaaatactcaggaatgtatttctggcaaagatatgctagtagttctgactgagtggaacgagtttagagcactaaatccgaaagaaatatcgaagttaatgagagggaatactgtaattgacttaagaaatatttttgattctaaatctatggctgacgctaaactagattatatatctttgggtaaaaaataa

SEQ ID NO: 205385 - DNA, 1405 bp, Unknown
  Bacterial polypeptide expressing nucleotide sequence isolated from the Sargasso Sea
atgaatgtacggatcgccatcgtcggcacgggctacgtcgggctggtcagcggcgcgtgctttgccgatctcgggcatgacgtcgtctgcatcgacaacaatcgcggcaagatcgacgcactgaacgaaggctgcatgccgatctacgaaccgggcctcgacgccgtcgtcgcccgcaatgtcgaacgcggcacgctgcgcttcagcagcgacctcgcggcgagcgtgcgcgatcgcgacgcggtattcatcgcggtcggcacgccgacgctgccgggcaccgaccaggcggacctgcggtatgtcgaggcggccgcgcgcgagatcgcgtcgaacctgaccggcttcgcggtcgtcgtcacgaagtcgacggtgccggtgggcaccaaccggatcgtcaagcagatcgtcgaacgctgcgcgccggacggcatcgacgcggcgatcgcatcgaatccggagttcctgcgcgaaggctcggcgatcgacgatttcatgcacccggaccgcgtcgtgttcggcgcggagcatccgcgtgcgatcgagatcatgaaggccatctatgcgccgctggaggcgatgggccatctcgtgctcgcgaccgaaatcgaaacggccgaactcgtgaaatacgcggcgaatgcgttcctcgcggtgaagatcagctacatcaacgagatctcggacctgtgcgaagccgtcggcgccgatgtcgaactggtcgcaaacgggatgggcctcgaccgccgcatcggcgcatcgttcctcaaggccggccccggctggggcggctcgtgcttcccgaaggacacgcgcgcgctgaaggcgacggcttccgagcatgcggtgccgctgcgcatcgtcagcgcggcgatcgaatcgaatgcgctgcgcaaggagcagatcctgcgccgcatcgagaaggcgtgcggcggctcgatcaaggacaagcgcatcgcagtgctcggcctcacgttcaaaggccagaccgacgacgtgcgcgaaagcccgagcatcgacgtgatccagctgctcgtcggcgcgggcgcgcatatccgtgcgtacgacccggcgcgtccgcatgaggcatcgcggctgctgccgcaggtattcatggaaggtagcgcgatcgacgcggtgcgcagcgcggacgccgtcgtcgtgatgaccgaatggaaagcgttcgaggcactcgatctcgccgacctcgcggatcacatggccgatcccgtgatgctcgacatgcgcaacctgttcaacgaacggctcgccgtcgacagcggctttcgccgctatgaacgcctgggccgctcgtgcggcgaacgcacgccggccgacccggcaccggaacaaccgcatgccagcgaggacacccggccgccacgcggcctgcttcaggactgat

SEQ ID NO: 205386 - DNA, 802 bp, Unknown
  Bacterial polypeptide expressing nucleotide sequence isolated from the Sargasso Sea
atgaaattatgcatgataggaactggttatgttggtttagttagcggggtctgttttgcagacataggaaaccaggttgtttgcgttgataaagataaaaataaaatagataaacttaattctggaatttctccaatttatgagccaggattagatgaattaataaaaaaaaattttacagctaaacgtctctctttcactacaaatattgaaagagctataagcacatcagatataatttttatatgtgtaggaactccaactagaaaaggatcaattaaagttgatttatcttttgtttataaatgtacaaaagaaattctaaaatattcaaaaagaaaaaaaattattgtaacaaagtctactgtgccagtaggaacaggcgatgagattgaaaaaattataaaaagaaagaaaaaactttttactgttatttcaaatcctgaatttttacgtgaaggtgaagcaatacgtgattttagatatcctgatagaattgtaataggatctaacgaaaaaaaaccctttaatattatgagaaaactttatacaccaataactaataagggctcaaaattttttactacttcaagaagaggagctgaattaataaagtatgcatcaaatgcttttcttgcaactaaaattacatttattaatgaacttgctaacttgtgtgaaaagtgtggagtaaacattgaggatatttcattaggtatgggttctgatagtagaataggtggtaggtttttacgtgctggcccgggcttacggtggatcatgttttccaaaggatactaaa

SEQ ID NO: 205387 - DNA, 1027 bp, Unknown
  Bacterial polypeptide expressing nucleotide sequence isolated from the Sargasso Sea
aatgagtaagcatttagaaatatcaattaaaaaagtaacaatttttggcgctggatatgttggaatgtcatatgcagctctatttgggcaaaagtgttctgtctcaatatatgatttggacagtaaaaaagttgatcaaattaataataagaagtctccaatatcagatgaaatgattagcgaatttcttttgagagataattataagatttccgcatacaccaatatgagagagtctcttaagaatacggatttagtaattatctctttacctactgactttgatgagggaataggagcttttaatacatctataattgagaaatctataaaagaattaagaaaaattaataaagatgctttcgtattaattaagtcaactgttccagttggcttttctgaagctatggttgaaagatatgattctaaaattatattttctccagagtttttgagggagggtaatgctctagaggataatataagaccctctaggataataattgggtctgattctgaagatgcagaacgaattggaaagtttcttttatcttttgcagaaaatgacccccctttactaataatgacgagttctgaagctgaagcggtaaaacttttttcaaatacttatttagcaatgagagttagtttctttaatgaacttgataccttttgtttggaaaatggtatgagctcagatgcgcttattaaaggaatatgttttgatcctagaataggggatttttataataatccatctttcggatatgggggatattgtctcccaaaagattctaagcagatggaaacgagctttaacaataccccacagaatctaatatcagctaccataaaaagtaatatgactagaaaagaatacttatctgaaaagattttagaaagcggtaaaaatatcataggtatatatagattgataatgaaatctaactctgataattttagagagtctgcaatttttgatctaataaacctcttaaaaaaagaaatcaaagacaatcctaatttt

SEQ ID NO: 205388 - DNA, 1318 bp, Unknown
  Bacterial polypeptide expressing nucleotide sequence isolated from the Sargasso Sea
atgaaacagataactattattggcacgggttatgtgggccttgtaactggtgcaggaatatccgattttggtcactcggtgacatgcgctgatataattgaagaaaaaataaagttactaaggaatggaaaaataccaatctttgaacctggcttagaagaattggtgaacaagaatatggatgctggtaggctctcatttacattaaatatagatgctgctattcaagaggcagaggtgattattatcgcagttggtactccagaagctgaagatggtactgcagatatatcggcagtagaatccgttgccagagttattggaaaaaatataaatggttacaaagtaatttgcactaaaagtacagtaccagtaggtacaggtaaattgattacaaaagtcataaatgaaactaaagatagtaaatatgaatttgattatgtgtcaaatccagagtttttaagagaaggttcagctgttaaagattttctatggccagatagagtggtagttggtgcaagtaatgataaagcttttaaggttatgaaagaagtctatagccctctatatataaatgaaaaacctattttgcatacgagcgtaattactgcagagatgataaaatatgcagcaaatgcatttttagcattaaagataagttatataaatgaagtagcaaacttatgcgacagtttgggcgctgatgtccatcaagttgctaaagcgatgggacaagatggtaggataagtccaaaatttttacatccaggtccgggatttggcggttcttgttttccaaaagataccaaagcatttgcggctttatcaagagcgcaggatctcagaatgaatacaattgaggctgccattgaaacaaatgagatacaaaaacaaatcatggtagataagatgaaaaatttaatgggcggaaattttgatggtaagcaaattgcaatacttgggcttgcatttaaaccaaatacagatgatataagagattcagcatcaattactatgattgattcaatcattaaaggtggtgggcatataagggcttatgacccgattgccaatcaatctatgaaaaatatttttccagatttaaattattttatgtcttgggaagatgcaactaaagatgcagatggtgttgctgtaatgactgagtggaatgaatttcgtggaataagtctatcatcgttgaagtccctattgaagtcgccaattatattagatactagaaatatttttagtatagagaatttagaaaaaaatgattttaaatatgataatgtgggtcgaagttcaataaaatgaa

SEQ ID NO: 205389 - DNA, 1258 bp, Unknown
  Bacterial polypeptide expressing nucleotide sequence isolated from the Sargasso Sea
tatgaaactttgtatgataggtacaggttatgttggtttggttagtggcgtctgtttttctgatgttggcaatacagtttactgtgtagataaagataaaaaaaaaatagatgaattgaataaaggtaatgtccctatttacgagcctggtttagaggaaatattaaaaaaaaattataaacaaaatcgtttaaagtttactactgatttaaaaaaagcggttttaagttctgatataatttttatatgtgttggaaccccaactaaaaaaaatagtaattcagctaatttaaaatatgtttttagtgttgcaaaagaattaaaaaagataattaagagttacaaaattattataaccaaatctacagttccggttactactggtgataaaatcgaaaacattctaaaaaatttaaaaaaaaagaaattagttgatatagtttccaatcctgagtttctaagagaaggtgaggccataagagattttgtatacccagatagagttattatcggaactgatagtaataaagctaataagattttaaaatcactttatatgccaattataaaaaaaagcagtagatattttaatacttctcggagagctgctgagttaataaaatatgcttcaaacgcgtttttagctacaaaaatttcatttattaatgagattgcaaatctctgtgaaaaaacgggtatagatgtgaaagatatatctattggtatgggttcagatgagcgtattggtgataggtttttgagagcaggaccagcctatggaggatcatgttttccaaaagatactagagctttaattgatacaggtaaaaaatttaatacagatttatcaatagttaaaactgtagttttatcgaacgataaacgtagatttttatcaatcaaaagagttgagaaaatattaaattataaacttttaaataaaacaatcacatttcttggagtaacatttaaaccaaatacagatgatatgagagaatcttctagcataccaatgattaaatattttaataaaaaaaattgtaagataagatattttgatccttcaggtgagaagaaagaatttaaaaatttaaaaaatgttaattatttcaataatataaataccgcatgcttgaatagtgatttaataattttacatactgaatggaatgattttaaattattaaattttaaaaaattagtaaaaaaaagaaattttaagatttatgacatgagaaacatgtattctccgataaaa

SEQ ID NO: 205390 - DNA, 1372 bp, Unknown
  Bacterial polypeptide expressing nucleotide sequence isolated from the Sargasso Sea
atgagcaacattttatgcataggtgcgggatacgttggcggccccaccatgacggccattgcacgttattgcccggaacataaaatcaccgttgtcgatatcaacgaagagcggatccgtcgctggaacagcgaagatcttccgatctacgaacccggattggatgaatgggtccgggaaacccgcggaaagaacctgtttttcagcaccagcatccatcagtcgattgcagaagcggacatcatttttgtttcggtcaacactccgaccaagatgttcggccagggagcaggaagggccgcggacctccagtattgggaaaagaccgcaagggacatcctcacccatgccagacaacctgaggtggtggtggtggaaaaaagcaccctgccggtaagaacggcacaagcgatggccaggattctggactctggagacagcaagactcatttcgaggtggtctccaatcctgagttccttgcagaagggaccgcgattcaggatctggaaaatcccgaccgggttttgattggcggacgggaaagtgaagagggctcccgggccgcggaaaccgttgccaaactttatgcgcattgggtcccggaagaaagaatcctgcttaccaatgtctggtccagtgaactcgcgaaactggtcgccaacgcgatgcttgcccagcggatatcctcgatcaattcgatttcagctctctgtgaaaaaacagaagccgatatcggacaaatcgcaaaggcaatcgggatggactcccgcatcgggccaaaattcctccagaccagcatcggcttcgggggttcatgctttcgcaaggacatccttcacctggcgtacctttgcgaatactatggcctgcctgaggtgagtgattactgggaaagtgtagtccggatcaatgaatggcaaaccgagcgttttttccagaacattctgaaacagcagttcaacactctggcgggtaagactgtggccgtcctcggatttgcattcaaggctgacaccggagatacccgggactctcctgccattccactttgccaaaaactcctggaggagaaggcgagggttcggattcatgatccaaaagccctcgaaaatgccagagaagatctgcgtgggatgcagggcgacgtggaattcgtggaagacgcataccaggcctgcaagggagcccattccattgccctggtcacccagtggcaggaataccgggagcttgatttccagcggatacatgatgaaatggtcaaaccggcgttcatgtttgacgggaggaatcacctggatcctcaaagcctgcatcaaatcggattcaatgtttttcccctaggaaagaaacctttgctccatctatgat

SEQ ID NO: 205391 - DNA, 1112 bp, Unknown
  Bacterial polypeptide expressing nucleotide sequence isolated from the Sargasso Sea
tatgaaaatttgtataataggatctggttatgttggattggttagtggagcttgcttttcggatttgggtaatactgttacctgtgttgatattaataaagaaattataaataatttaaacaaaggagtaattccaatttatgaacctggtttacaggaattagttgctagaaatttacaaaagaatagactttttttctctacagacatttctagttcaataataaattcagatgtcatctttatatgtgtaggaactccaacaaaaaataataaagctgatttgaaatatgtctataaagttattaaaagtattaaatctaatcttaataaatataaagttattgttactaaatctactgttccagttacaaccggtgataaaattgaaaaaatattaaaatcaaaaaaaaataagaataaatttgatgttgtttctaatcctgaatttttaagggaaggagaggctattagagattttcaatttccagacagagttgttgtaggtaccagtagtaaaaaagctaataaagttatgaaaaatttgtatcttcctttaatcaaaaagggtggcagatattttcatacatcccgaagatcagcagaattgatcaaatatgcatcaaacgcttttttggcgactaaaattacctttattaatgaaatagccaatctgtgtgaaaaatctaatatagatgttaaagaaatttcaattggaatgggtttagatgaaaggattggaagcagatttttgcgtgcaggtccttcatatggaggatcatgcttcccaaaggatactagagcactagttaccaccggtcaatcatttcataccaatctttcagttgtaaaatcagtaataaaatcaaatgataaaagaaataatttattattaaataaagtcattaaaattatgaataataaaattaaaaataaaaatattacatttttaggtgttacgtttaaaccaggcactgatgacattagagaatcaccttcattaaaaatgatacctgctttagtaaaaaaaggtgcactaataagttattatgaaccaacgggaaaaaaaaatatatttaaatcaaaaaatataactttttatgcaaatatta

SEQ ID NO: 205392 - DNA, 1177 bp, Unknown
  Bacterial polypeptide expressing nucleotide sequence isolated from the Sargasso Sea
gatgaaaaatataactatcattggtgctggatatgtgggttattcacttgctcttttattagctaaaagaaatatagtaaaagtaattgatattgatgaaactaaaattgatctaattaataagagtcagccagttataaaggatggctatattgagaaatatttattagataataaattaaaaatatcggcaacaaataataaagaagacgcttataaagaagcagaatttattgttattgctacacctaccgattatgatcctgattcaaatagttttaatacttcagcagttgactgtgttattgatgaagctattaagcacaacccttcagctacaataatcataaaatcaacagttccagtcggatatacagaaaaattaaagagaaaactgaatactaaaaaaataatattttcacctgagtttttacgggaagggcagtctctaaaagataatttatttccatctagagtaatagttggagctaaaaatgaaaaagctaaattatttgctgagttattagtagaaaatatcaaaaaaaagaaagaagatgtttctatcctttttactgattcttcagaagcagaagctataaagctattttcaaatacttatctggctatgcgtgttgcatttttcaatgaattagacacatactgcgagtctctagatctaaatagcaagcagatcatagagggagttagcttggacccaagagttggtaattattataataatccaagttttggttatggagggtattgcttaccaaaagacactaaacaacttctcgcaaactataaagatgtcccaaataatctaattcaagcaattgtaagtgcaaattctacaagaaaagattttattgcagaatcgatccttaaaaagaaaccaaaaatagttggagtctataaattatcaatgaaaaaagagtctgataatttcagatctagctcaattcagggagtgatgaagcgaataaaagcaaaaggagttcaggtaatagtttatgagccatcaattgatgacaaatttttttataactcagaaattgtgaaagatttagacagctttaaacaaagagcagatgtagtaatttctaatcgattctctgaagagttagctgatatagaagaaaaagtttatacccgagatctatttagaaaagattaa

SEQ ID NO: 205393 - DNA, 1297 bp, Unknown
  Bacterial polypeptide expressing nucleotide sequence isolated from the Sargasso Sea
aatgaaaatttcagtgattggatgtggttatgtaggacttgtttctggtttttgcttcgcagattccggtcataaagtaacttgtattgataataatgatcaaaaaattaaattactaaaagataataaaattccaatttatgagcctggccttaatgagctattattgaagaatatagaaaatggtaatttagcttttgaattaaatataagcgaaaatattaaagactcagagattgttctaattgcggttggaactcctacaggtaagaatggagatgcaaatttaaccttcgtatatcaatgtgcaagagaaatagcagagtttatttctccaaatacacaaataataatcaaatctactgtacctgtaggtacttgcgatgaggttgagaatataattaaagagaattgtatacattcagaattttcagtaatttctaatccagaatttttgagagaaggaaatgctattagtgattttattaatccagatagggttgtaattggcaccgacgatcaaacaaacaaaagaataatgattaatctttacaaaagcattaccaatgaagataaaatattatttacttcaagaagatcatccgaactaatcaaatacgcaagtaactcaatgcttgcgatgagaataatatttattaacgaaattgcagatctttgtgaaaagattggtgcggatgtaactgacatagcaaaaggtattggattagataaaaggattggtccacatttccttgagcctggaccaggatttggaggttcatgctttccaaaagatgctagggcgttaattgaatcggggaaaaaatatgatgcacctcaaacattacttgaaagtgtaatattaggtaatgaaaatagaaaaaaaaatataagtcaaaaaattttaaataaattagataaacaaactgaaaatcaaataggaatacttggagtaacttttaaagcagaaacagatgatatgagagaatctccaagccttataataattccagaccttcaggaaaatggaatgaatatttcagtctacgaccctgagggagaaaaggaagcatcaaaaattcttaaagatgtaaattggaagaaaacagcttacgaaactgctgaaaatgttgactgccttgtaattttaactgattgggaagaatttaaaaatttagatttagataaaataaaaaattcaatgaaaagacctttaatatatgattttagaaatatctttgatcctgatatgatgacagaactaggttttgaatatttttctataggcagaggataa

SEQ ID NO: 205394 - DNA, 1165 bp, Unknown
  Bacterial polypeptide expressing nucleotide sequence isolated from the Sargasso Sea
atggtaattggagcaggttatgttggcctttcaatttctgttatgttggcacaaaggaatgatttaactatagttgatatagaccaagagaaaattaatctaattaataatagaaaatctccaattaaagatgatgcaatttcagatttattgcttaatgaagaattatctattaaaggcattattcctggaaacgaaaacttcgaatcatttgattttgtcattttagctaccccaactgatttcaatgaagcaactaaaacttttgatacatctgtgcttgaagagataattggaaagattctaaaaacaaacttcaaaggattaattataataaaatctactattccaataggttttacggatagaatatcaaaaaaatatgatacagataagatctcattttctcccgaattcttgagagaaggatcggcacttgaagataaccagaatccgtcaagaattatagttggtggctccaataaaaataagaatcaagagtttatggaaatgattaaagattcaatctcttcagaacattcaccgccttttttctttatgaaggcagccgaagcagaagcggtcaaattattttcaaacgcgtttttagccatgagagtttctttctttaatgagttagattcattttctatggaaaataagttaaatacatatgaaataattcaaggcgtttcttgcgacccaagaatcggaaatcattataataatccctcttttggctatggcggctattgcttaccaaaagatacaaaacaactcctttcaaactttggagatgtaccgcaaaatatattttcatcaataattgcatcaaatcaaactaggaaggagctcatggttaactcaattctagagagagaaataagtagaatcggggtttacagacttaatatgaaacaaaactcagataattttagagaatcagcaatactagatatattggatatgcttaaagatagggtagcatcaatagtaatttatgaacctttaattaatgaatcaacatttaaagaatattccattataaaagaccttgaaatatttaaagaaaaagcagatttgattatctcaaatagatttaataatgatttggaagatgttaagtggaaggtttttacaagagacatttttaataaagattaat

SEQ ID NO: 205395 - DNA, 1306 bp, Unknown
  Bacterial polypeptide expressing nucleotide sequence isolated from the Sargasso Sea
ttatgtagggttagttacagcaacatgtttttcagagtttgggtacgaagtaatttgtatagataatgataaatataaaattaaacaattaaagaaaaatattattccaatttatgaaccaggactttctgacttagtaaaaaaaaatactaaatcaaaatatcttctatttagtaacagtataagtaaaattaaagatgctcatattatatttgttgctgtgggaacacccagttctagaagaggtgatggtgaagcagatttaaaatttgtatttagcgtcgttaaagatatttctaaatttttaataaaaggaaagaaacagttagtcataaccaaatcaacagttcctgttggtaccggtaaaaaaatacaagatataatgtgtgaattaagaccagacttaattcataacaaagattattttatatcatccaatccagaatttctgagagaagggtcagctatagaagattttatgagaccagatagagtggtttgtggagtgacagataaaaaagcagaagaaactttaaaagaattatataggcctttaaacttaagagaggctccagttctttttactgacttagagagtgcagaaattataaagtatgcttctaattcttttctagctctaaagatttcatttattaacgaggtagcaaatctttgtgaaaatactggaggaaatgtacaaatggttgctaagggtatggggttagataatagaataggtccaaaatttttacatccaggccctggttttggaggaagttgttttccaaaagatacaagagctctttacgcctcatttaaaaaaaataaaattaacaacattttagtcaaatcagtaattaactttaatgaagatagaaaaataagcatagtaaataaaattaaaaatatattaaaacctaatataaaaaataaagtaatagcttttttaggggtaacatttaagcctaatactgatgatttgagagagtctccgagtctagaaattatacctaggttaagaaagctaggtgtaaaaattcatgctcatgatcctgcatttaattcagaatttattaaaatcaagaagtttgataaagttaaatggtacggtaatgttttagatgcaattaaaaacgctgatcttttggtaatacatacggaatggaatgaatatagaggattagacttattaaaagtaaaaaaagaattaaaaaatccaattattttagatttaagaaatatttttaatccagacgatgtgaagaaatttaatataaaatactacggaatagggtttaaaagctaa

SEQ ID NO: 205396 - DNA, 599 bp, Unknown
  Bacterial polypeptide expressing nucleotide sequence isolated from the Sargasso Sea
tatgaaattgtgtatgataggcactggatacgtaggtttggtaagtggtgtctgtttttcagatttaggtaatgaagttatatgtgttgataaagacataaataaaataaacaatttaaaaaaaggtattatacctatttacgagccaggtttagaagagttagttttaaaaaattataagaataaaagattaaatttttctacaaacctaaaagaatcggtcaaaaaatctgacattatttttatatgtgtaggtacaccaactaaaaaaaatagtaatagtgctgatctaagccaagtatatgccgctgcaaaagaaatatctaaagctgttaataaatttaaaatcataataaataagtcaactgtgcctgtaacaacaggtgatgaagttgaaaaaattatatctaaaaaagtaaataaaaaatttttttcagtagtgtcaaatcctgaatttttaagagaaggtgaagctattagagattttatttatcctgatagagttgtagttggatcaaatgatgataagtccaagaaaatattaagaggtttatattcaccattaatttcaaaaggtgcaaaatttgtttctacaaaaa

SEQ ID NO: 205397 - DNA, 580 bp, Unknown
  Bacterial polypeptide expressing nucleotide sequence isolated from the Sargasso Sea
atgaagctttgtatgattggaacaggatatgttggtttagtatcaggagtttgtttttcagatttaggtaatacagtatattgtgtagataataattcagataaaataaaaaaattaaacaatggaattgttcccatttatgaaccaggacttgaagaattaattaagaaaaattatagacaaaaaagattaatttttactactgatattaaaaaagcagttttaaaagctgatataatttttatttgtgttggtacacctactaagaaaaatagtaactctgcggatttaaaatatgtttttcaggtagcaaagcaaattaaaaaatttataaataaatataaaattataataactaaatcaacagttccagttactacaggagataaattagaaaaaatttttaaatcaaaaattaaaaataagctggttgatgttgtttctaatccagaatttttaagagaaggagaggctattaaagattttacatcaccagacagagtagtaattggcacaaatagcaaaagagcaaacgcaaaactaaaatctttatactttccaaattataaaaaaaactagc

SEQ ID NO: 205398 - DNA, 1306 bp, Unknown
  Bacterial polypeptide expressing nucleotide sequence isolated from the Sargasso Sea
aatgaaattatgtatgataggaacaggttatgttggattagtcagtggagtttgttttgctgatataggaaaccaggttgtttgcgttgataaagataaaaataagatagataaacttaactctggaatttctccaatttatgaaccaggtttagatgaattaattaaaaaaaattttacagctaagcgtctttcattcacatcaaatataaatagagctgtaagtacatcagatataatttttatatgtgtaggaacgcctactaggaaaggatcaatgaaagttgatttatcttttgtttataaatgcacaaaagaaattcttaaatattcaaaaagaaaaaaaattattgtaacaaagtctactgtgccagtaggaacaggtgatgagattgaaaaaattgtaaaaaaaaagaaaaaactttttacagtaatttcaaaccctgaatttttacgagaaggtgaggcaatacgtgattttagatatcctgatagaatcgtaataggatctaacgaaaaaaaatccttaaatattatgagaaaactttatgcgccaataattaacaagggctcaaaattttttacttcttcaagaagaggagctgaattaataaagtatgcatcaaatgcttttcttgcaactaaaattacgtttataaatgagcttgctaatttgtgtgaaaagtctggagtaaatgttgaggatatttcactaggtatgggatctgacagcaggataggcggtaggtttctacgtgctggcccagcttatggcggatcatgttttccaaaagataccaaaggccttgtatcagcagcagagaaatacaaaataaatttatcagttgtaaaatcagttataaaatctaatcaagaaagagtaaatttactcacaaaaagagtacataaaattttaggatcaaatttaaaaaataaaaagatttcttttttaggtgtaacatttaaaccaaacactgacgatatgagggactcttctagccttaaaatgataccctatctatgtaaaaaaggcgctaaagttagatattatgacccatctggagaaaaaaatgagtttaaaaagatcaaaaactgtaattacagaaataatataaaatctaattgcaatgatacagatttagtagttctactaactgagtgggatgaatttaaatcaatagatttcaaaaagattgtaaaaaataataaatttaaagtttatgatttaagaaacctttattctgctgaagaaatgaaaaaaaataagattaaatactattctgttggcagacctaacactaattaa

SEQ ID NO: 205399 - DNA, 742 bp, Unknown
  Bacterial polypeptide expressing nucleotide sequence isolated from the Sargasso Sea
atgaagttatgtatgatcggaactggatatgtaggtttagtgagtggtgtatgtttctctgatctaggtaataatgtgatatgcgttgataaagatgcaaataaaattgatcaacttaaaaatggaaaaattccaatttatgaacctggtttagaggagctagttttaaaaaattataaaaataaacttttatctttttcaactaatttaaaagatgcagtgaaaaaatctgacattatttttatttgtgttggaacaccgactaaaagagcaggaagtggtgctgatttgagtcaaatttatagtgttgccaaagaagttagttcttcaattaataagtttaagataataattacaaaatcaactgtaccagtcactactggtgatgaggtagaaaaaattttattaaaaaagaataataaaaaaaagttttcggttgtttccaatcctgaatttctgagagaaggagaggctatcagggattttatatatcccgatagagtagtaattggaactaatgataaaaaatctaataaaattttaaaaaacctttaccaacctttaatttctaaaggtgcaaaatatatcaatacctctcgaagagcagctgaacttataaaatatgcatctaatgcgtttttagccacaaaaattacttttataaatgagattgcaaatttatgtgaaaaaataggtatagatatagaagatatatcaatcggaatgggattgataaaagaat

SEQ ID NO: 205400 - DNA, 487 bp, Unknown
  Bacterial polypeptide expressing nucleotide sequence isolated from the Sargasso Sea
catgaaattatgtatgataggaactggctacgtaggattagttagcggtgtatgttttgcagatttaggtaatgaagttatttgtgtagataaagatttaagtaagattaattcccttaaaaaaggaaaagttccaatttatgaacctggactttcagagttagtaattaaaaactatagaaataagagattaaatttttcaacagatttaaaaaaatctgtcaaagagtctgacataattttcatttgcgttggaacgcctacaaaaaaaggagggagctcagcagatttaagtcaaatttataatgttattaaagaaataagtacctcaattaaaagttttaaaattattataacaaaatcaactgtcccggtaaccacaggtgatgaaattgaaaaaattctttcaagaaaaaacaacaaaaaaaagttttcagtagtctcaaatccagaatttttgagagaaggtgaggctattagagattta

SEQ ID NO: 205401 - DNA, 1108 bp, Unknown
  Bacterial polypeptide expressing nucleotide sequence isolated from the Sargasso Sea
atgagaatatgtatgataggtaccggatacgttggcttggttagtggaacttgtttcgcagatcttggaaataaagtttattgtgtagataaagattcaataaaaataaataaattaaaaaatgccatttctccaatttatgaaccaggattagatgatttaataagaaataatttaagagcaaaaagattaaattttacaaatgatttagaaaaagcaataaaagagtcacaaataatttttatttgtgttggaacaccaactaaaaaaggttcaaatctagttgatctttcacaagtttacagtgttgcaaaatcaatttctaaatacataaatagctataaaattatagttactaaatcaacagtacctgtgacaacaggagatcaggtagaaaaaattataagaaaaaaagtaaagaaatctttatttgatgttgtatctaatcctgaatttttaagagaaggtgaagctataagagactttaagtatccagatagaatcattataggttcgaacaataagaagatttttaaaaaaatagaacttttatatgaaccacttattaaaaaaggagcgaagtttttctgcacatctagaaagggtgcagaattaatcaagtacgcttcaaatgcttttttagctactaagattacatttataaatgaaattgctaatttatgtgagtcagcaggaattaacattgaagatatttcagttggaatgggatcagatgctagaattggaagcagatttttgagagcaggtccggcttatggtggatcttgttttccaaaagacactaaagggttagtttcaattgcagataaatttagaattaatttgtctattgtaaagtctgttataaaatctaaccaaaataggaaaattttattaactaaaaaagtaagtaaaatattaaataataaaattaaaaacaaaaaaatcagtgttttgggggtaacgtttaaagcaaatactgacgatatgagagagtcatcctctcttgttttaatcccctatttattaaaaaaaggtgccacagttaaataccacgatccatctggtccaaaaaaggaatttaaaaaaataaaaatcttcaatttga

SEQ ID NO: 205402 - DNA, 565 bp, Unknown
  Bacterial polypeptide expressing nucleotide sequence isolated from the Sargasso Sea
ttggtgagtaaaaaacaatcaatcacaattgtcggttcaggatatgtaggcatgtcattaagtgtccttttaagtaaaggtaataatcgtgtgaagatcttggagattgataaagaaaaagtaaaaaaaataaataaaggtttatctactgtaagggatgaattaattgaggaatatatttcaaaagaaaaattaaatatttctgcaacattagatccagaggaggcactgaataatgctgattattttataatagcaaccccaacaaattatgatgaaaaaactaataagtttgacaccgaatcagtaaaatcaactattgagaagatacttacattctcaaaaaatggatctatcattattaaatcaacaatacctattggctatacagattacttaaaagaaaaatttaaaactgacagaattatattttcaccagaatttctaagagaaggaaatgcactatatgataacttgtatccgtcaagaattatcatgggggataattcaccagctgcagtatgctttgctgagatgctcaaaaacctatctttaaaaaaatcta

SEQ ID NO: 205403 - DNA, 934 bp, Unknown
  Bacterial polypeptide expressing nucleotide sequence isolated from the Sargasso Sea
tatgaaactttgtatgattggaacaggatatgttggactagtatcgggagtctgtttttctgatttaggcaatacagtatattgtgtagataataatgaagataaaataaaaaaattaaatgatggaattgttcctatttacgaaccaggacttgaggaattaattaagaaaaattatagacaaaaaagattaatttttactactgatattaaaaaagcagttacaaaagcagatataatttttatttgtgttggaacacctactaaaaagaatagtaactctgctgatttaaaatatgttttccaggtagcaaaacaaattaataaatttataaataaatataaaattgtaataactaaatcaacagttcctgttactacaggagataagttagaaaaaatttttaaatcaaaaattaaaaaaaagcttgttgatgttgtttctaatcctgaatttttaagagaaggagaggctattaaagattttacatcaccagatagagtggtaattggtacaaatagcaaaagagcgaacttgaaattaaaatccttgtattttccaattgttaaaaaaactagcagatatattaatacttcaagacgaggcgctgagcttatcaagtacgcatcaaatgcttttttagccaccaaaatatcgtatataaatgaaatggcggacctttgtgaaaaatctggtgtagatataaaagatatatcttatggaatgggttcagatcaaagaataggagagagatttcttagagcaggacccgcctatggaggctcatgtttcccaaaagatactagagctgttcttgatacagctaaaacttttaaggttgaattatcaattataaagagcgttattaaatcaaatgataatagaaaattattattaacaaaaaaactggtaaaaattctaagtggaaattaa

SEQ ID NO: 205404 - DNA, 1168 bp, Unknown
  Bacterial polypeptide expressing nucleotide sequence isolated from the Sargasso Sea
aatgaaaaatatatctattatagggattggttatgtgggtatgtcattagcatgtctatttggtcagaaataccaagtttcagttgtagatatagataaaaaaaaattagaactccttaaagcaaataaatctacaataaaagatcaagcaataacaaaatatctcaaaaaaaatccaaaagcttttaatgttttttctgatattgaaaaaataataaatgctactgatctatacatcttatgtcttccaacaaactacgatcctgagctaaatttctttaatactacagctttagatgaagtgcttgaacaaatttccactaaggaccccactacaactattttaattaaatctacggttccagttggctttacagaaaatgctagaaaaaaatttaataatgaaaatataattttttctcccgaattcttaagagagggaagtgcatatgatgacaatctaagacctgatcgaattgttattggagatgacggagctaaaggtaaaaaaatatcaaaaatatttaatgatttagtgaaaaatgaaccagatgtatatttgatggattcgactgaagcggagtcagttaaacttttttctaatgcttatttggctttaagaatttctttctttaatgagcttgattcttatgcgttaaacaaaaagattagaagtaaaaaaattattgaagcagttggagcagataaaaggatagggcacgattataataatccatcttttggttatggaggttattgcctacccaaagatacaaaacaattactaagcaattatgaggatataccacaaagtttaattgaagctatagtcagatcaaattcaataagaaaagattttatttcagactcaataattaaaagaaaaccaaaagttgttgggatttataggttaataatgaaagaaaaatcagacaatatcagagaatcatcaatacaaggaattatgaaaagaataaaagcaaaagggattgaagtcgttgtttatgagccaatattaaaagaagagagtttttttggttcgaaaattatcagtaacatagatgtatttaaacaagtttcagatttaataatttgcaatagatttaatgaagatcttagggattgcaagaaaaaagtttttacaagagatatctttggtgaagattaa

SEQ ID NO: 205405 - DNA, 1300 bp, Unknown
  Bacterial polypeptide expressing nucleotide sequence isolated from the Sargasso Sea
tatgaagttatgcatgattggaactggttacgttggacttgttagtggagtttgttttgctgatttaggaaatgaagttatatgtgtagacaaagatgttgacaaaatttctaaattaaaaaggggcataattcctatttatgagccaggtttaagtgaacttgttaaaaaaaattacaaagctaaaagattatcatttacaacaagcatttctgatgctgttcaaaagtcaaatataatttttttatgtgtaggcacaccaacaaaaaaaaaaactaacggagctgatttaagtcaaatatttaatgcagctaaggaagtgtcccgtaacataaagtcttcaaaaattataattaataaatcaacagttccagtaactactggcgaccaaatagaaaaaattatttcaaaaaaagttaaaaaaaaatatttttctgtagtttctaatccagaatttttaagagaaggtgaggctattagagattttacttttcctgatagagttattattggtacttccaataaaaaaagcaataggattttaaagtcgctttatagtccattgatatcaaaaggggctaaatatataaatacatctagaagaggtgctgagttgattaaatatgcctcaaatgcatttttagctacaaaaatatcatttattaacgaaatagctaatttatgtgaaaaaactgatgttaatgtagaagatgtttccattggtatgggtctagataaaaggataggtggaaggtttttaagagcaggacccgcttatggcggctcttgctttcctaaggatactcgagctatcgttgatacaggaagtaaatttaaaactgatttgtcgataataaaaagtgtaatcagatcaaacgaaaatagatcaaaattattgttattaaaagtctcaaagattttgaaaaacaaaattaaaaataaaaaaatttgttttttaggcgttacttttaaggcaaatacagatgatatgagggagtcatctagtctaacaatgataccaagtttatcaaaaaaaggagctttaataaagtactacgatcctactggttataaaaatgaattttctaaaaataaaaatgtatttaattgcactacaattgaagaagcatgttttgatgcagatttaataataatacatacagagtggaatgactttaaatctttaaattacaaaaaactatcaaaaaagaaaaattttattatttatgatatgcgtaatattttaccgtatgataaaattaaaaaggataaaataaaatattttggaataggcaagtag

SEQ ID NO: 205406 - DNA, 622 bp, Unknown
  Bacterial polypeptide expressing nucleotide sequence isolated from the Sargasso Sea
tatgaaaatatgtatgataggatcaggatatgttggtttagttagtggaacatgtttcgcagatcttggaaacaaagtttattgcgtagataaagataaaacaaaaataaataaattaaaaaaagctatatcaccaatatacgagcctggtttagatgatttaataagaaataacttcagagctaaaagactgaattttactgataatctagaaacagcaattaaagactcacaaataatttttatttgcgttggtacaccaacaaaaaaaggatcaaatttggttgatctttcgcaagtgtacagtgttgcaaaatcaatatctaaatacattaaaaattataaaataatagtaactaaatcaactgtccctgtgacaaccggagaccagatagagaaaataattagcaaaaaggttaagaagtctttatttgatgttatatctaatcctgaatttttaagagagggtgaagctataagagactttaaatatcctgatagaatagtcattggttcaaataataaaaaaatttttaaaaaaatggaacttttatatgaaccactaattaaaaaaagggctaaatttttttgtacgtcaagaaagggtgctgaatttggttaa

SEQ ID NO: 205407 - DNA, 1348 bp, Unknown
  Bacterial polypeptide expressing nucleotide sequence isolated from the Sargasso Sea
ttgtggaaccatgaatggctatatcaggtcaaatttggagattttaaaaaaatgaaaatatgcatgattggaacaggttatgttggattagtttctggagcctgtttctctgaattaggaaacgatgtcatttgctcagacattgatagcgataaaattgaaaaacttaataatggtaaagttcctatatatgagcccggacttgaggaaattgttaagagaaattttactcaaggaaaattaaaattttcttcagacatatcattatcaatcaaaaaatcagatataatttttatttgtgtaggtacacctacaaacaaaaaaacaaatcaagcaaacttaaaatatgtttatagcgttgctaaaagaattaaaaaaaatttaaataaatataaagttattgtaaacaaatctacagtaccagtcacaactggcgacaaaattgagaaaatattaaatacaagaaaaaataaaaataaatttgatgtaatatctaatcctgaatttttaagagaaggggaggcaataagagattttctatatcctgatagagtagttgttggtactaactctaataggcctaataagattatgaaaaatttataccttccaattattaaaaaaagcaatagatattttaatacctccagaagagcagctgagctcataaaatatgcttctaatgcatttcttgctactaaaattagtttcatcaatgaaatagcaaatctttgcgagaaaattaacattgatgttaaagatatttctgctggtatgggtcttgacgaaagaattggtggtagatttttgagagcaggaccaggatatggtggatcttgttttccaaaagatactaaagctttattatcaactgctagaaaatttaaaacaaacttatctatagtaaaaacagtaataaaatcaaatagcgatcgaaataaacttattattaatagaattaataaaattatgaaaaataaactaaaaaataaaaaaatatcatttttaggcgtaacttttaaagctggaactgatgatgtcagagagtctcctgctttaactttaataccatctttagttaaaagaggggcaaatttacattactacgatccaactggaaaaaaaaaggaattcaaaaataaaaagatcaaattttgctcatcaaccaaagaagcttgcataaatagtgatcttataattattcatactgaatggaatgaatttaaacagttgaattttaaaaagttagtcaataaaccaaacttcaaaatttttgatttaaggaatttgtactcattttcaaaaatgaaaagtaataaattaaattattttagaataggtatataat

SEQ ID NO: 205408 - DNA, 788 bp, Unknown
  Bacterial polypeptide expressing nucleotide sequence isolated from the Sargasso Sea
acgtgagaagtttggcactggaaacctgatattttcaccggagtttttacgcgaaggtaaggctttgtatgacaacctgtacccgtcacgcattattgtgggcgagcgttcagagcgagctgaagagtttgctggcttgttgaagcaaggtgctattaagcaagatattgaaatacttttcaccgacagcactgaggctgaagctattaagttgttttcaaacacttatttggcgatgcgtgtagcctattttaacgagctggacagttacgctgaagctcatggtttaaacagtaaacagattattgaaggggtggggctggacccacgtattggcaaacattacaacaacccaagctttggctacggtggttattgtttacctaaagataccaagcagttgctggctaactatcagaatgtacccaataacatgatccaggccatagtagacgccaaccggacccgcaaagattttgtggcaaatgcgatattaatgcgtaatccgaaagtggtagggatttaccgcttggtgatgaaagccgggtcggacaatttccgggcttctgctattcagggcattatgaagcgcttaaaggccaaaggtattgaagtagtggtgtttgagccagagttaaagcaggatgacttttataattcgcgggtgatccgtgatttggccgagtttaaacagatatcggatgtaatagttgccaacagaagaaatgatgtgctggcagacgtagacgccaaggtatacacccgcgacttgtttggcagcgattgat

SEQ ID NO: 205409 - DNA, 833 bp, Unknown
  Bacterial polypeptide expressing nucleotide sequence isolated from the Sargasso Sea
agtttagctgttcttttagctcaaaaatatgaagtggttgctctagatatttcaaaggatcgtgttgaaagcataaacaaaaaaaaatcgccaattaaagatactgaactggaagattttcttaagaataaatcgcttaatttaaagtcaacaatcaataaaaatgaagcttatgaaaatgctgattatatcattatagcaacgccaactaattatgattctgctactggctcttttgatacatcaactgttgaaggggtaattttagattgcatagaaataaaccccaaagcgctaatagtcatcaagtcaactattcctttaggttttacagacaatatgagaaataagtttgacaaggcagatataattttttctccagagtttttaagagagagtaaggccctttacgataatctatacccgtcacgaattgtgattggaggagagtcaaaaagagcagtaaagtttggtgagatgctattagaatgttccttttattctaaaaaagatgcactaataataacaatggactctaaagaagctgaagcagtcaagcttttttctaatacttttcttgctatgagaatatctttcttcaatgaattagatagttttgcagaaataaagaaattatcctctgaaaagatcattgaaggcgtaagtacagatcctagaataggaaattactataataatccatcttttggatatggaggttactgtttgcctaaagacacaaaacaattactagataattttaataaaattccaaataatattataaaagccatagtagaggctaataagacaagaaaagatttcatcataaa

SEQ ID NO: 205410 - DNA, 1180 bp, Unknown
  Bacterial polypeptide expressing nucleotide sequence isolated from the Sargasso Sea
tatggttaataaaataaaaataactgtagttggatctggatatgtaggaatgtccctttctgtacttttagctcagcacaatgatgtaactgttcttgatattgatactgaaagagtagataaaataaataaaaagcaatctacaattgtagatactgaaattgaacagttcttaaagaataattctttgtccctaaaagcaactgtggacaaaaaaattgcttacaaggatgctaactttattatagttgcaacacccactaattatgatttagatactaatcgcttcgatacgtattcagtagattctgtcgttgaagatgctcttaaattttctcctcaagctttaattgtaattaaatctacaattcctgttggtcatacaaaattgctgcaagaaaaatttaagactaatagagttatcttttcacctgaattcttgagagaaggtcaagccttaaaagataacctctacccatcgagaattattgtgggcagctattgtaagtcaggtcaagaatttgctgaactactcaaacaaggctctaagaaaacagatgttgaaactcttttaataagatctaccgaagctgaagctgtcaaactttttgcaaacacttatcttgccatgagagtttcattttttaatgaacttgactcttatgcgcttgcaaatgatttagatacaagaagtattattgaaggggttagcctcgatgaaaggataggtgataattataataatccatcctttggttatggaggatattgtctaccaaaagatacaaaacaattacttgctaattatgaacatgtaccccagaccttgattaacgcaattgtttcctctaacactacacgaaaggattttattgctgatgagattagaaaactcaatccaaatgttgttggattttataggttggtgatgaaagcagatagcgataacttcaggtcctctgctgttcagggaattatgaaaagaattaaagcgaaaggtgtcgaagtagtagtttacgagccagagcttggcgaagaggaattttttgggtccaaggtaataactgacctagataaatttaaagagatgagtgatgtgattgttgcaaacagaaaagcagattgtttgagtgatgttgaagataaatgtttttctagagatctctttggagataattag

SEQ ID NO: 205411 - DNA, 1165 bp, Unknown
  Bacterial polypeptide expressing nucleotide sequence isolated from the Sargasso Sea
tatgaacatagtggtagttggaatgggctatgttggcctatcgaacgcggttttactcgcccagcaaaaccatgtagtagcgattgatttgatgcccgagcgcatcgcgttagttaatgcgcgtaaaccaacggtcgccgacagtctgattgaagaatacctgcagcataaagccttaaatctcagtgccacgagcgacaaaaacgtcgttaaagaagccgattttgtcatcatagccactcctacggattacgacccacaaaccaactactttaatactcagtcggtcgaacgggtggcgaaggaagtgctcgccctgaatcctgacaccaccattgtcatcaaatctactgtgccagtgggttttaccgaagggctgagaagtaaactcaacagtgacaatatcttattttcgccagagtttttgcgtgaaggtaaggcgctttacgataacctgcacccctcgcggatcatagtgggtgaacgttcagagcgcgcccaagcctttgccgatctgcttgctcgcgccgcaattaagcaagatattccgattttactcacagacagcactgaggctgaggcaattaagttgtttgccaacacttttttagccatgcgcgtcgcctactttaatgagttggacacctatgcggagagtcgacggctcaacacccgccagattatcgaaggcgtatgcttagatccgcgcatcggcgattactataacaatccttccttcggttatggcggttactgcctgcccaaggacactaagcaattgctggccaactataacgatgtgcctaacaatctcatcagcgccattgtcgattccaacacgacccgcaaagattttatcgccaacgcgattatcagtaagcaaccgaagcgagtgggtatctatcgcttaatcatgaaatccgactcagacaacttccgcgcctcggcggtacaaggtgtaatgaaacgtataaaggccaagggcatcgaagtcgtggtctatgagcccgtactcaaggaagacgagttttttaactcgaaagtgatccgcgatttacacgaatttaaagccatgtgcgatgtgattatttctaaccgtatggccaatgaactcgaagatgtcgccgctaaggtgtacacccgggatctgttccatcacgactaa

SEQ ID NO: 205412 - DNA, 1168 bp, Unknown
  Bacterial polypeptide expressing nucleotide sequence isolated from the Sargasso Sea
atgaaaattgctattgctggtactggctacgttggcctttctaatgctattttattagctcagtaccatcaagttattgctgttgatgttatcgctgagaaggttgcgttaatcaacgctcgcaaatcaccgattgttgatactgagattgaagactttttagcacattgcgagcttgatttaaccgcgtcactggataagcaacttgcttatcaagatgctgagtttgtgattatcgccacgccaactgattacgatccaaaaacgaattattttaacacttctactgtggagtcggtcattcaagatgtgttagccattaaccctatggcggtgatggtgattaaaagcacagtaccagttggttttaccgccaaggttaagcaaaagttccagtgcgataatattttgttctcgcccgagtttttacgtgagggtaaagcgctttacgataacttacatccatcacggattattgttggtgagcgcagcgagcgcgcaaaaatatttgctgatttattagtgcaaggcgcaataaaaaaagatattcaagtgttatttactgattctactgaggctgaagcggttaaattattctctaatacttatcttgcgatgcgtgttgcttactttaatgagcttgatacttatgctgagacccatgggttagattcgcgccaaataattgagggtgtgtgtttagatcctcgtattggtaatcactacaataatccatcctttggttatggtggttactgtttacctaaagatactaagcaattacgggctaattatgcagatgtacctaatagcattattggcgctatcgttgagtcaaacacgacccgtaaagattttattgctgaatctattttaagtcgtaatccaaaggtcgtgggcatttatcgcctaattatgaaatctggttcggataattttcgcgcgtccagcattcaaggcattatgaaacgccttaaagctaaaggtattgaggtgattgtgtatgagccagtacttaaagagaaagaatttttccattctcgtgttgtaactgatttgaccgctttcaaagcggttgcagatgttattgtgtcaaaccgtatggctaaggaactggctgatgtgacggataaggtttatacccgggatttgtttgggaatgattgat

SEQ ID NO: 205413 - DNA, 832 bp, Unknown
  Bacterial polypeptide expressing nucleotide sequence isolated from the Sargasso Sea
atgtgttggatcgattcgtggcttttctcgcgcgtagtatgctgcatcggcgccggatacgtcggtgggcccaccatggcgatgattgccaagaagtgcccggagatcagcgtcaccgttgtggacatctcgcaaccgagaatcgacgcatggaactcgagcgagttgcccatctatgagcccggtttggatgagatcgtcttcgcgtgccgtgggaagaatttgttcttctccacagccgtcgaggacgctatccgcgactgcgagatgatcttcgtctccgtgaacacgccgacgaagaagaccggtttgggtaagggaaaggcggctgacttgacgtactgggaattggcggcgagaacgatcgcttcgtgctccgatagtgataagattatcgttgagaagtcgacggtgccggtgcgcaccgctgaggccatcgagaaggtgctccaacgcaactgcccaaacaagggtgttcggttcgatatcctctccaacccggaattcttggcggaaggtacggccatgaccgacttggacgctccggaccgcgtcttgatcgggggtaaaatcgaaaacccggagggacaagcggccgtggacgcgctcgtcggcgtctactcgcactgggtgccaaaggaaaacattctcaccgccaacttgtggtccgccgagctttcgaagctcgcggcgaacgccttcttagcccagcgtatctcttccatcaacgccatgagtgcgctctgcgaagcgaccggtgcggatgtccagcaagtgtcttacgccatcggtacccgataccagaatcggctccaagttcttgaacgcctcc

SEQ ID NO: 205414 - DNA, 619 bp, Unknown
  Bacterial polypeptide expressing nucleotide sequence isolated from the Sargasso Sea
tatgcagaagcttaaaatagctgtagcaggcacaggctatgtagggctttcaaatgcagtgctacttgcacaacacaatgaagtgaaagcggtcgacttagtacctgaaaaagtcgagatgctgaataacaaaaagtctccaattgaagacaaagagatagccgaatacctgacaacaaaagagttaaacctaaaagcaactttggatgcgcaagaagcatataaagatgctgactatgtggtaattgctactcctacggattacgacccgcaaacgaattacttcaatacgggtagtgtagaagcggtaatcaaaaccgtgatggaagttaaccctgatgcggtaatggttgtaaaatcgaccgtaccggtagggtttaccaaagacgcaaaagcccgttttggttctgacaatattatcttttcgcctgaatttttgcgtgaagggaaagcactttacgacaacctttacccaagccgtattatcgtaggtgagcgtagtgagcgagctgaaatttttgcgaatttacttcagcaaggtgcaattaaagaagaaattgatgtgttgtttaccgacagcactgaagctgaagctataaagcttttcgctaatacttat

SEQ ID NO: 205415 - DNA, 1165 bp, Unknown
  Bacterial polypeptide expressing nucleotide sequence isolated from the Sargasso Sea
atgaacatagttgtggttggaatgggctatgttggcctgtcgaacgcggttttactcgcccagcaaaaccatgtagtagcaattgatttgatgcccgagcgcgttgcgttagttaatgcacgtaaaccaacggtcgccgacagcctgattgaagaatatctgcagcataaagccttaaatctcagtgccacgaccgacaaaaacgtcgtcaaagaagccgattttgtcatcatagccactcctacggattacgacccacaaactaactactttaatactcagtcggtagaacgaatcgcgaaggaagtgctcgacctgaatcccgataccaccattgttatcaaatcgactgtgccagtgggttttaccgaagggctgagaaacaaactcaacagtgacaatatcttattttcgccggagtttttgcgtgaaggtaaggcgctttacgataacctccacccctcgcgcatcatagtaggtgaacgttccgagcgggcccaagcctttgccaatctgcttgcccgcgccgccattaaacaagatattccgattttactcacagatagcactgaggccgaggcgattaagttgtttgccaacacctttttagccatgcgcgtcgcctactttaatgagttggacacctatgcggagagccgagggctcaacacccgtcagattatcgaaggcgtatgtttagatccgcgcatcggcgattactataacaacccgtccttcggttatggcggttactgcctgcccaaggacactaagcaattgttagccaactataacgatgtgcctaacaatctcatcagcgccattgtcgattccaacacgacccgcaaagactttatcgccaacgctattatcagtaagcaaccgaagcgagtagggatctatcgcttaatcatgaaatccgactcagacaacttccgcgcctcggcggtacagggcgtgatgaaacgcattaaggccaagggcatcgaagtcgtagtctatgagcccgtactcaaggaagacgagttttttaactcgaaagtgatccgcgatttacacgagtttaaagccatgtgcgatgtgatcatttctaaccgtatggctaatgaactcgaagatgtcgccgctaaagtctacactcgggatctgttccatcacgactaag

SEQ ID NO: 205416 - DNA, 835 bp, Unknown
  Bacterial polypeptide expressing nucleotide sequence isolated from the Sargasso Sea
atgacaattaaatatttaaaaaaagcaactaaaactgcttcaacggatgacactaaaacaaaagagattgtacaaaatcttttaaaagaacttgaaaaatcaaaagaagaaggttgtaaagaattaacaaaaaagtttgacaaatacgatggtgaaataattgtttctaaagaaaaaattgaagatattaaaaagaaattagataaaaagactaaggacgatattaagttttcttatgatagagttaaaaaatttgctgaagctcaattaaaaaattatgggaaagattttgaagtagaactttcaaatggattatatgctggacaaaaactagtaccagtaaatacagctggatgttatatacccggtggtagatatgcgcacattgcttcagctgtgatgagtgtaactactgcaaaagtagctggagtaaaaaacattatcgcatgcagtccaccaaaagaaaatataggcgcccacccatctataatttatacggctgacttatgtggtgcagatgtaattttaaatctaggtggtgtgccagctatagctgcaatgacttatggtttatttggtaatgcgcctgcagatattttagttggacctggaaatcaatttgttgctgaagctaaaagaattttattcggtaaagttggtatagatttatttgctggaccaacagagattggaattatagctgatgaaacagcagatccggagattgttgcggttgacttagtaggacaagcagaacatggttacaactcaccagcatggctatacacaacaagtcaaaagttggctgatgctgtaatgaaaagagttcctgaat

SEQ ID NO: 205417 - DNA, 495 bp, Unknown
  Bacterial polypeptide expressing nucleotide sequence isolated from the Sargasso Sea
gtaaaaaattagcagaagaagttatgaaaagagtgcctgagttaattgcagatttaccagaactaccgaaacaaagcgctggggatgcctggagagattttggtgaagttattctttgtgatactgatgaagaaatggcaaaaattagtgatgagtacgcgccagaacatttagaagttcaaacaaaaaatttaaaatggtttcatgagagattaaaaaattatggatctttatttataggtgaagaaacaacagttgcttacggtgataaatgttcaggaacaaaccacattcttccaactaaaggtgctggaagatatacaggtggattgtttgtaggtaaatttattaaaacattaagctttcaaagaatgacaaaggaatctacgaaagaagttggtgctgcagctgcaagaatttctagatatgaaggaatggaagcccacgcacgaactggcgatgtaagacttagaaaatacggtttttcaaattaaa

SEQ ID NO: 205418 - DNA, 220 bp, Unknown
  Bacterial polypeptide expressing nucleotide sequence isolated from the Sargasso Sea
ggattattttgcagggccgaatcataccctaccaacatcaggatgtgccaagtttgcttcaccactgggagtgcaggactttaccaaatcaagttctgtgcttgcttattctgaggagcgtctccaacgtgaaggttccgcgatcataagatttgccgaggaggaaaaactttttgctcatgcggaatcaattcgcgttaggatgagaacaacagaatag

SEQ ID NO: 205419 - DNA, 505 bp, Unknown
  Bacterial polypeptide expressing nucleotide sequence isolated from the Sargasso Sea
gctcaatcaatattaataactgataataagaatttcgcaaacaaggtattgtcttcaattaaggatttaattactaatttgccaaaaaagaatactattaaaaaaagtcttgatacatatggattaataattttagtagatgattttaaaaattgtcataatataattaacaatattgctcctgaacatttacatcttcaaaataaagatcgaaataaaatttataagaaagtaattaatgctggagctattttcttaggtaaatattcatcagaagtttttggcgattatattgttggaacaaatcatattttacctacatcaggagcggctaagttttcttcaggccttggtgttttagattttatgaaaagaacttcaatagttgagatgaatttttctggctaccaaaaatatgcttctaaagttgctaagatggcaaatattgaaaaccttgaaggccataaattatctgtaaaaattagacaaaatgataaaaaataaa

SEQ ID NO: 205420 - DNA, 415 bp, Unknown
  Bacterial polypeptide expressing nucleotide sequence isolated from the Sargasso Sea
tgaggcagcttggagagattatggagaagttattctatgcgatacagatgaagaaatggcaaatataagtgatgattatgcaccagagcatctagaagttcaaactaaaaatttaaagtggtttcatgaaagattacaaaattatggatctttattcattggagaggaaacaacggttgcatatggagacaaatgttcaggaacgaatcatattcttccaacaaaaggtgctggaaaatatactggaggattatttgttggtaaatttattaaaactttaagcttccaaagaatgaccaaagaatctactaaagaagtaggttcagcagctgctagaatttcaagatatgaaggaatggaagctcatgcaagaactggtgatgtaagacttagaaaatatggtttttcaaattaa

SEQ ID NO: 205421 - DNA, 412 bp, Unknown
  Bacterial polypeptide expressing nucleotide sequence isolated from the Sargasso Sea
agcgtggaaagattatggtgaagttatattatgtgataacgatgaagatatggctaaaatcagcgatgaatacgctccagaacaccttgaagttcaagctaaaaatttaaaatggtttcatgatagattaaaaaattatggatcattgtttattggagaagagacaacggttgcttatggtgacaagtgttctggtacaaatcatatattgccaacgaaaggtgcgggaaagtatacaggtggtttatttgttggtaagtttattaagacattaagttttcaaagaatgacaaaagagtctacaaaagaagttggctcgacagccgcaagaatttcaagatatgagggtatggaagctcatgctcgaactggtgacgttagattgagaaaatacggattttcaaacaaataa

SEQ ID NO: 205422 - DNA, 502 bp, Unknown
  Bacterial polypeptide expressing nucleotide sequence isolated from the Sargasso Sea
atgaactcaaaagataaaatagaatacattgtaaattggattaaaaattatacaaaaactattaaatcacaacctgttacgcttgtaattggtgtgtctggaggtgtagattcagcacttactagtactttgtgtgctcatactggacttaaaacaattgctatttcaatgcccattaaacaaaattcatcacaacatgatttaagtcttagacatttagattatcttaaaaaaaactttgataatgttgattgcaagataattggtttagataatatttttaaaacttttgagagtactatgcaggattttgatagcgaacttgcctttgcaaattctagatcaagattgagaatggtgactttgtatcaggcagcacaaagtaataatggtattgtagttggaacaggaaataaagttgaagattttggtgtaggtttctatactaaaaaaggagatggtggggtagatatatctccaatagcagatttactaagtcaga

SEQ ID NO: 205423 - DNA, 414 bp, Unknown
  Bacterial polypeptide expressing nucleotide sequence isolated from the Sargasso Sea
atgctgcatggagagattatggagaagtaattatgtgtgataccaaagaagaaatgatgaaagtaagtgatgaatatgcacctgaacatttggaggttcaagctgaaaacttagactggtatttaaaaaatcttaaaaattatggttctttatttttaggtgaagaaacaacagttgcatatggagataaatgctctggaccaaatcatattctaccaacaaaaggtgcaggaaaatatactggaggcttatacgttggaaaatttataaaaacagttacttaccaaaagatgaataaagaatctaacaaagaagttggtgctgcagcagctagaatttctagatatgaaggtatggaggctcatgctagaactggtgatgtgagacttcgaaaatatggtttttcaaattaga

SEQ ID NO: 205424 - DNA, 784 bp, Unknown
  Bacterial polypeptide expressing nucleotide sequence isolated from the Sargasso Sea
ctctgtggagcagatgtaattttaaatttaggaggaattgctgcaattgcttctatggcatatggatgttttaataatcctgcagttgattttttagtcggcgctggaaatcaatatgtagctgaagcaaaacgtattttgtttggaaaggttggtattgatctttttgcaggcccaaccgaaattgcaataatagctgacaaatctgcagacaaagaaattgttgcagctgatatagttggtcaggctgaacatggatataattcaccaggctgggtttttacaaccgataaatctttagcaaattatgtaataaaaagaataccagagctaattactgaattaccagagggacctcgagctagcgctgaacctgcttggagagattacggagaagtaatactttgcgatagcaatgaagacatggcaagtgtaagtgataaatatgctgccgaacatctagaagtacatgcagcaaatttagactggtggttaaaaagacttaaaaattatggatctttatttttaggggaagaaacaaccgtagcctatggagataaatgttctggacctaatcatattttacctacaaaaggagcaggaaaatatactggtggtttgtatgttggaaaatttataaaatgtttaacatttcaaagaatgaccaaagaagctaacaaaattgtaggagcaactgcagctaggctaggtagagctgagggaatggaggcccatgcaagaactggagatataagattaaaaaaatatggtcacagcaattaaa

SEQ ID NO: 205425 - DNA, 502 bp, Unknown
  Bacterial polypeptide expressing nucleotide sequence isolated from the Sargasso Sea
agtcaatgtatttcttgtaaccaaaaataaagaaataataaaaaaagtaaaaaaaaatataattttaaatataaaaaaattaccaagaaaaaaaattgccaaaaaaagtttaaaaaaacatggactaattatcctatgtcaaaatgataggcaaattattgatgtaattaatgaaattgctcccgagcatcttgagctaaatgtatcaaattacaaaaaatatctaaatcatattttcaatgtgggttcagtttgtatcggtaaatatacaccaatggccgttactgattataattcaggaagtcaacacactcttccaactttaggaagtgcaaagttttcttctggattaaacgtaaatgatttttttaaaaaaataagctatgtaaatctttcaaaaaaaggtgttgcaaaaattgggaaatttgcgatacagatgagtgattttgaggaactaaaagcccactctgaatcaattaaatcaagaataaggagaaattaa

SEQ ID NO: 205426 - DNA, 739 bp, Unknown
  Bacterial polypeptide expressing nucleotide sequence isolated from the Sargasso Sea
aagaacaacaccttcagtggtagcttatggggaagagattaaagtaggagattctgcaaaaaaccaagcagttacaaatcctgaaaatacactctacgctatcaagaggcttattggtcgaaaacatgatgatgacgttgtaaagaaagatgccaacatggtcgcatataaaatactggctgctgataacggcgatgcgtgggttgaagctgaaggaaaaaaacttgctccccagcaagtttctgcagagatactcaagaaaatgaaaaaaaccgcagaagattacctcggtcaggaagtaaaggaagctgtaattactgtacccgcttattttaacgattctcaaagacaagcaacaaaggatgctggcaagatcgccggtttagaagttaagagaattatcaatgagcctactgcagctgctttagcttatggtctagataaaggtaagggtgatcaaaagatagctgtctatgacttaggaggtggaacctttgatgtgtctattatagagatagctgaaatagatggagagcatcaatttgaagtactttcaacaaatggagacactttcctaggtggagaagactttgatataactttgatcgaatatttagctgaagaattcaaaaaagaatcaggtttagatttacataatgattcagctgcccttcaaagacttaaagaagcagctgaaaaagcaaaaattgaattatccagcaatcagcaatctgaaata

SEQ ID NO: 205427 - DNA, 478 bp, Unknown
  Bacterial polypeptide expressing nucleotide sequence isolated from the Sargasso Sea
aaagtaatgaaaagagttccagagttatttgcagaacttcctgaagttccaagaacaaatgcagatgctgcgtggagagattatggggaagtaatactttgtgatactgatgaagagatggttaaaatcagtgatgaatatgctcctgaacacttagaggttcaaacagaaaatttaaaatggttccatgaaagactaactaattatggatctttgtttgtaggtgaagaaacaacagtagcatatggagacaaatgctcaggaacaaatcatattttgccaactaaaggtgctggaagatatacaggtggtttatttgttggaaaatttatcaaaaccttaagtttccaaagaatgaccaaagagtctacagaacttgttggtgctgcggcagctagaatatctagatacgaggggatggaagctcatgcaagaactggtgatgtaaggttaaaaaaatacgggtactctaactaat

SEQ ID NO: 205428 - DNA, 904 bp, Unknown
  Bacterial polypeptide expressing nucleotide sequence isolated from the Sargasso Sea
aaaattgttgaggaaacattaagtaaaattgaatcagaaggtgataaatatgttagagaattatcacaaaaatttgataactattcaccagatagttttcgattaagtgaagatcaaataaatcaattaatgagtgaagtctctgacgaagacaaagaagatattaaatttgctcaaaaacaagtgcgatcatttgcagaagcacaacttaaaactttaagtgaattagaagtagaaacgcatccaggtgttattctaggtcataagaatatacctgtacaagcagtaggttgctatgtacctgccggaaaattcccaatggtagcttctgctcatatgtcagttattactgcttctgttgctggggtgccaagaattgtagccactacaccacctttcaaaggtaaaccaaatccagctgtagtcacggcaatgaagttaggtggtgcacatgaaatatatgttttaggtggaatgcaaggagttggagcaatggcaattggaactgagactattaaaccagttgatatgcttgttggtcccgggaatgcttttgttgctgaagctaaaaggcagttatatggaaaagtaggtatagatctatttgctggtccaacggaaacaatgattattgcagatgaaactgttgatggtgaaatatgtgcaacagatatattaggacaagcagaacatggttataattctcctgcagtgttgattacaaactccaaaaaacttgctgaagacacattaaatcaaattgataggttgttagaaatactaccaacaaaagaaactgcagccgtaagttggagagagtatggtgaaatcattctatgtgatacctatgatgaaatgcttgtcaaggctaatgaaatagcttctgagcatgtgcaagtgatga

SEQ ID NO: 205429 - DNA, 712 bp, Unknown
  Bacterial polypeptide expressing nucleotide sequence isolated from the Sargasso Sea
ggccattatgtcaattgcaacagcaaaagtagcaggggtcgaaaatgttattgcctgttcggcgcctagtggcaaggatgggccgcatccagcgatcctctatgcaatgaatatgtgcggagcagatacgattttatcacttggcggtgtgcagggtattgctgcaatggcttttggcctgtttaccgggaagccggcccggcttttagttggccctggcaaccggtttgtggccgaggcaaaacgtatgctgtttggccgcgttggcatcgatatgtttgctggcccaactgaaattgccgtgattgctgatgaaacagccgatgctgtggtggttgccgaagatcttgtcagtcaggccgaacacggcccggactcgccagcttggttgataactacatcgcgacaattggccgaggatgtgatggcgcagatggatcggcatatcaacgccctgccagagattgcaaagaatgcggcatcaatggcttggcgtgattatggtgaggttattttatgcaatagtgatgatgaggtagcctcaatttcagatgaatatgccgctgaacatttagaggtgcatacggccaaagatgcttggtataaaaatcggctgaaaaactatggatcactatttgttggtgaggaaacaacggtcacttatggtgataagtgctatggtacaaaccatatcctgcctaccaaaggggcg

SEQ ID NO: 205430 - DNA, 430 bp, Unknown
  Bacterial polypeptide expressing nucleotide sequence isolated from the Sargasso Sea
tccaagaaaaagtgcagaagctgcttggagagattatggtgaagtaattttatgtgatactgatgaagaaatggtgaaaattagcgatgaatatgcaccagagcacctagaagttcaaacagaaaatttaaaatggtttcatgaaagactaacaaattatggatcattatttgttggtgaggaaactactgttgcttacggagacaaatgctcaggtacaaatcatattttacctacaaaaggtgcgggcagatatactggtggtttatttgtaggaaaatttattaagactttaagttttcaaagaatgacaaaagaatctacagaattagtgggagctgctgctgcaagaatttctagatatgagggaatggaagctcatgctagaactggagatgtaaggcttaaaaaatacggatattctaattaa

SEQ ID NO: 205431 - DNA, 623 bp, Unknown
  Bacterial polypeptide expressing nucleotide sequence isolated from the Sargasso Sea
gatgataaaaataaataaatttataagcacaaaaggcttagaaaagttaaaacaaattttagataaaagaagattttctcaaaattctactatcccaatagtttcaaaaatactcaaagatgttaaaaaaaacaaatataaagctgtaaaaaaatatgaaaaaaaattaagcaaaaatactataattaaaccatctataagagaaattaatcaatcaataaaatcattgagcccagaaattaaaaaagcaattgattatgcgtatactagaatatttaaatatcattcactgcaaaaaataaaaaacattaattatagggataagtttaacaattttattcagtataaatcagtaccaataaataaagttggaatttatgtgccagctaatttaccctccacattgctaatgaatgctattccagcaaagattgcaggtgtgaaaaaaattattttagctaatccaagattaaataaacaattaaatccagctgtaatttatgcagcaaagaaattaggcattaatgatatttattctatgggtggagcccaagcaattggcagtttaacttatgtacaaaaagttgataaaatagttgggacctggaaatatttatgtagcg

SEQ ID NO: 205432 - DNA, 862 bp, Unknown
  Bacterial polypeptide expressing nucleotide sequence isolated from the Sargasso Sea
ttaaacgaattaatttattcgagagacaaattagaagattcgtataaccttcttcctagagaaataaaagatgacctgattttcttaaaatcacgcatccagagctttcatgaatcaatccttacaactgattggcaaaagactgataaagttttttcaaaatatggacaggtttctcggccaataaaaagagtaggtctctatgctcctggtgggagtgctatctatccctcgtcagtacttatgacctcggttcttgcaaaaattgccggggtaaaagaaattcttctatgttttcctccgtcaaacgaaaaaaatactagattgatgttagcctcagcatttcttggagaagttgatcaagttatttctattggcggggcgcaagcaataggagctatggcattcggaacagataattttgaaaaggtagataaaatttttggacctggaaatcaatatgttgcggaagcaaaaagacaagtatttggcatagttggaattgacgccatgacaggaccttcagaagtaatgataattgctgatgagactgctgatctggaaatgatagctttggatctaattgcacaagcagagcacgggcctaactcaacctgtattttggtattagttaataatttgattgccaaaaaagtggaagacaaaatttcagagtacttaaataatctaaactttaataaagattccaatgcttataaatctttgaaaaatttcggtctgatagttaacgtatcagattttgaagaagctaaagaagtttgcaaccagtttaatccagagcatcttcaattaattcttaaaaacgaagggcaagttaacttaaaagaaatatatgctggag

SEQ ID NO: 205433 - DNA, 256 bp, Unknown
  Bacterial polypeptide expressing nucleotide sequence isolated from the Sargasso Sea
caactccgcacaactgcagcgggatccaatgaaagaagtcgaagaggaaaccctccccggggtgatcctcggccaccgacacatcccaatgaatcggggggggtcctacgtgcccggcgggaaatacccgaaggtcgctaccgcccacatgtcggtggtcactgcaaaagtagcaggggtcaaggaaatcaacacctgtgccccgccctacctgggaaaacccgcggacgctatcgtcgcagctcaatccaggggg

SEQ ID NO: 205434 - DNA, 226 bp, Unknown
  Bacterial polypeptide expressing nucleotide sequence isolated from the Sargasso Sea
agctggttgtgagattatcttggccggaccaaatcatactttacctacttcaggaaattccagatttagcggttccttgggggttgaaacttttatgaaaaatacttcaataatagaatttaatgaagaaagtttaaaagtaaatagccttgatattattaatcttgctaaaagtgagggcttacatagccacgctaactctgtagaaataagatttgaagattaa

SEQ ID NO: 205435 - DNA, 607 bp, Unknown
  Bacterial polypeptide expressing nucleotide sequence isolated from the Sargasso Sea
aatgaaaatacttgatagcaacaacaacaattttgataactcattaaataagttacttttacttcgtaaaaagaaaattcaatcaagttctatttctgtaactagcattattaaagatataaaaaaaaatggtgataaagctctattgaaatatgagaaaagatttaataaaaacaaaataattgttccaagctctaaacaaattaataattctataaagtccttaaatcagaatgtaaaaaaagcaattgatgttgcatataatagaatttacaaatttcattcacttcaaaaattcaaaaatatttcttatatagataaatttaaaaataaacttgaatataaatatttgccactagactctgttgcaatatatgttccaggttcttcagcatcttatccatcaagtgttttgatgaatgctattccagcaattgttgccggtgttaaaagattaataatgatcaatccagggtttaaggggaagcaaaatccagcagttttatacgcagctagaaaatgtaaaataaaagaaatttactctataggtggtccttcggcagttgcagctgttgcttatggaaacaaaaaaaataaaaaaagttga

SEQ ID NO: 205436 - DNA, 814 bp, Unknown
  Bacterial polypeptide expressing nucleotide sequence isolated from the Sargasso Sea
aatgactataacttatttaaagaaatcaccaaaaacctcatcaactgatgataataaaacaacagaaatagtcaaaaatttactaaaagaaattgaaacttccaaggaagatgcatgcatcaatttaacaaaaaaatttgataaatataatggcgaaattattgtatctaaagaaagaatagaaaaaatcaaaaaagagttagatcaaaaaacaaaagatgatattcaattttctcatgaaagagttagaaagtttgcagaagctcaattaaaaaactatggacaagattttgaaattgaattatctcctggtttgtttgctggtcaaaagttaatacctgtcaatactgcaggatgttatattcctggtggaagatacgcccatattgcttcagcagttatgagcgtaacaacagctaaagttgcaggggtaaagaatattattgcatgtagtcctcctaaagaaaatgtaggagttcaccccgctattgtttatacagctgatctatgtggagctgatgttatactaaacctaggtggtgttcctggaatagctgcaatgactaatggtttatttaataatccgccagcggatatattggtcggtccaggaaatcaatttgttgcggaagcaaaaagaattttatttggaaaagttggaattgatttatttgctggtccaacagaaattgctgtgattgcagatgataaagctgatgctgaaatggtagcagtagacttagttggtcaagctgaacacggttataattctccggcttggttatatactaccagcaaaagactagcctcatga

SEQ ID NO: 205437 - DNA, 628 bp, Unknown
  Bacterial polypeptide expressing nucleotide sequence isolated from the Sargasso Sea
ggtaattgcagatgaaactgttgatggtgaaatatgtgcaacagacttattaggacaagctgaacatggatataattctcctgctgtgatgataacaaactcaagaaaacttgcagaagaaacatttaaagaaattgatagaattttagaaattttacccactaaagaaacagcaagtacaagctggaaagattacggggaaattattttgtgtgacacctatgaagagatgttatctaaagcaaatgaaatagcatcagagcacgtacaagtaatgacaaaaaaagatgattggtttttagaaaatatgcgatcttatggagctctatttttgggagctagaactaatgttgctaatggtgataaagtaataggcaccaatcatactcttcctactaaaaaagctggaagatacactggtggtttatgggttggtaagtttattaaaactcacacctatcaaaaaattttgacagatgaagcagctaaacttattggagaatatggatctagactatcttatcttgagggatttattggtcacgcagaacaatgcaatattagagtaagaagatatggtggcttaaatgtagagtatggaaaacctgcttcaaaaataaaaagttaa

SEQ ID NO: 205438 - DNA, 433 bp, Unknown
  Bacterial polypeptide expressing nucleotide sequence isolated from the Sargasso Sea
actccctaaacaaagtgctggagatgcttggagagattttggagaagtaattttatgcgacaccgatgaggaaatggcaaaaattagtgatgaatatgctccagagcatttagaagttcaaactaaaaacttaaaatggtttcatgatagactaaaaaattatggttctttattcattggagaagaaacaacagttgcttatggtgataaatgttcaggtacaaatcatatacttcctactaaaggtgctgggagatatacaggtggattgtttgttggaaaatttattaaaacattaagttttcaaaggatgacaaaagaatctacaaaagaagttggagcagctgcagctagaatttcaagatacgaaggtatggaagctcatgcaagaactggcgatgttaggcttagaaaatatggtttttcaaattaa

SEQ ID NO: 205439 - DNA, 877 bp, Unknown
  Bacterial polypeptide expressing nucleotide sequence isolated from the Sargasso Sea
aacaaaagaagagggatgtatcgagttatcaaagaaatttgataaatatgaaggcgaagtagtagtaacaagagaaaaaattgaacaaattaaaaaaaatttagaccctaaaacaaaagacgacattcaattctctcatgaaagagtaaggaagtttgctgaagcacaattaaaaaattatgggcaagattttgaggtagagctttcagatggattatttgctggacaaaaattaattcctgtgaatacagcaggttgttatgtgccagcaggaagatatgctcacatagcatccgcagtaatgagtgtaacaacagctaaagttgctggagttaaaaatattattgtttgcagctcaccaaaacctggggttggagttcatcctgctattgtttatacagctgacttatgtggagcagatgtaataatgaatttaggtggagttcaggctattgctgcaatgacttatggtctttttggtaatgcacctgcagacatgcttgtcggtcctggaaatcaatttgttgcagaatcaaaaagaattttatttggcaaagtaggtattgatttatttgctggccctacagaaattgcagttatagcagatgaaacagctgacccagaacttgttgctttcgatttagttggacaagcagagcatggatacaattctccagcatggttatttactactagtaaatcattagctgaatatgtaatgaaaagagtaccagaattaattgcagatttaccagacttaccaaaagaaaactctggtgcagcttggagagactatggtgaagttattttatgtgatacaaacgaagaaatggctaaaatcagtgatgaatatgctccaagaacatttagagataca

SEQ ID NO: 205440 - DNA, 262 bp, Unknown
  Bacterial polypeptide expressing nucleotide sequence isolated from the Sargasso Sea
aatggcgggtggtatttttttaggtgagtattccgttgaggcttttggtgattatattgtaggaactaatcatgtattacccacatcaggagctgcaaaattttcatcaggtttaggcgttttagattttatgaaaagaagctcttatgttgagatgaaccaaaaatcttttaatattctatcggaggacacgcaaaaaatgtcgggactcgaaggtttagatggacacaaattgtcagttaaaattagacaaaagaaataa

SEQ ID NO: 205441 - DNA, 514 bp, Unknown
  Bacterial polypeptide expressing nucleotide sequence isolated from the Sargasso Sea
gtcctggctttatacgacaagtaaagaacttgcagacaaagtcatgaaaagagtgccagaattaattgctgatttaccagaactacctagaactagtgctgaagctgcttggagagattatggagaggtcgtactttgtgatactgatgaagaaatggcaacaattagtgatgaatacgcgccggaacatttagaggttcatacaaaaaatttagaatggtttcataaaagattaaaaaactacggttctttgttcattggtgaagagacaacagttgcatatggagataaatgctcaggaactaatcatatattacctactaaaggggctggtcgatatacaggtggtttatttgtaggtaagttcattaaaactttaagcttccaaaggatgaccaaagagtccacagaattggtgggagctgcagcagctagaatttcaagatacgaaggtatggaagctcacgcaagaactggtgacgtgagactcaaaaaatacggttatatgaagtaa

SEQ ID NO: 205442 - DNA, 776 bp, Unknown
  Bacterial polypeptide expressing nucleotide sequence isolated from the Sargasso Sea
tatggcaattgaatatttaaaaataggtttagatgaaaaacaaagaattgaagataatgataaagtaaaaaaaattgttgaggaaacattaagtaaaattgaatcagaaggagatgaacatattagagagttgtctcaaaaatttgataactattctccagatagttttaggttaaatgaagatcaaataaatcaattaatcagtgaagtctctgatgatgacaaagaagatattaaatttgctcaaaaacaagtacgatcatttgcggaagcacaacttaaaacattaagtgaattagaagtagaaacgcatccgggtgtgatacttggtcataaaaatataccagtgcaagcagttggatgttatgtacctgctggaaaattcccaatggtagcttctgctcatatgtcagttgttactgcctctgttgctggggttccaagaattgttgctactaccccaccttttaaaggtaagccaaatccagctgttgttacagcaatgaaaatgggcggtgctcacgaaatttatgttttgggaggaatgcaaggagttggtgctatggctataggtacagaaacgattaaacctgttgatatgcttgttggacctggcaatgcatttgttgctgaagcaaaaagacaattgtatggcaaagttggtatcgatttatttgctggtccaactgaaacaatggttattgctgatgaaactgttgatggtgaaatatgtgcaacagacttattaggacaagcagaacatggatataattctc

SEQ ID NO: 205443 - DNA, 562 bp, Unknown
  Bacterial polypeptide expressing nucleotide sequence isolated from the Sargasso Sea
tttgcaaaaaaataaaaatattaaatatgtggataaacaaaataataaaattgaatataaatatattcctattcaatccgttggaatatatgtgccatctaaccttccctcaacattattgatgaatgctattctagcaaaaaaaattgctggtgttaaaagggttgtgctcgcaaatccaagattaaatggaaaattaaatcctgctgtaatgtatgctgcaaaaaaatgtggtatctcagaaattataagtgttggtggcagtcaagccatagctagtttagcatatatacaaaaagtaaataaaattgttggaccaggcaatgattatgttgcaagagctaaaaaagaagtttttggagatgtcggaattgaaggaatagctggtccaagtgaaattacagttgtagcagataaaaatactaatttaaaagaggttctaacatctttaataggtcaagcagaacatgataccaattcacaatgtatactaatagtaaataatcaagattttataaagtctttaaaaaaagttttaaaacaagaattaaataaaattcca

SEQ ID NO: 205444 - DNA, 387 bp, Unknown
  Bacterial polypeptide expressing nucleotide sequence isolated from the Sargasso Sea
aggttaattgtgatgaacaagcgattgaaataattaatctaatagcgccagaacacttgcagttatgtgttgaacggcctgaacagtacctccatcaaataatgaatgcaggcgcaattttttgtggcaattactccacagagtccttcggagattacctggcagggccatcacatgtgttgcccacatttggaagcgcgcgattttcttctccgctgggcgtttatgattttgtaaaaaaaagttcaataataggaatatcgcaagagggagcaacgttacttagcgagccagcgtcaataatcgccaatggcgaaggccttgaggctcatgccttagcctccagaattagaggtgtagattttgattccaatattcttaaataat

SEQ ID NO: 205445 - DNA, 502 bp, Unknown
  Bacterial polypeptide expressing nucleotide sequence isolated from the Sargasso Sea
acaactagtaaagaattagctgaaaaagtgatgaaaagagttccagaattaattgcagaactcccagaagttccaagaacaagtgctgaagcagcctggagagactatggtgaagtaattctttgtgacactgataaggaaatagtaaaaattagtgacgaatatgcacctgaacatttagaagtacagactgaaaacttaaaatggtttcatgaaagattaacaaattatggatcattgtttgtgggtgaagaaacaactgttgcatatggcgacaaatgttctggtacaaatcatattttaccaactaaaggagcaggaagatatactggtggattgtttgttggaaaatttattaaaacattaagctttcaaagaatgacaaaacaatctactaaattagttggtgctgctgcagctagaatttctagatatgagggaatggaagctcatgcaagaactggtgatgtaaggttaagaaaatacggtttttctaattaat

SEQ ID NO: 205446 - DNA, 353 bp, Unknown
  Bacterial polypeptide expressing nucleotide sequence isolated from the Sargasso Sea
aattagtgatgaatatgcacccgaacatttagagatacaaactaaaaacctccaatggtttcatgatagattaaaaaactacggatcattatttattggtgaagaaactacagttgcttatggagataaatgttctggaacaaaccatattttaccaacaaaaggtgcaggaaaatatacaggtggtttatttgtaggaaaatttattaaaactttaagctttcaaagaatgacaaaggaatcaaccaaagaagtgggtgcagcttgcgcaagaatttcgaggtacgaaggtatggaagctcatgctcgaactggagacgtaagacttagaaaatatggattttctaattagt

SEQ ID NO: 205447 - DNA, 400 bp, Unknown
  Bacterial polypeptide expressing nucleotide sequence isolated from the Sargasso Sea
ggaccaaggggaggcataattgttgttgataatttagatcaagccacagattttatcaatttatatgcccccgagcatttgcaaattcattctattgatcctgataagtatcttagtaaaattaaaaacgctggtgaaatcatgttgggagactatgctcctatgagcatagctaattttgcactaggaccaaataatgtaataccaacaaatgcttggtcaagaacaaaatcacctcttggtgtccatgattttttaaagtctacttcaatagggaaaattgataaaaatggttatgaaacactttcaccatatgcaaataaatttgcaaaatatgagggatttgatgctcatgcaaatgctgtttcaagtctgagaatagacgctatgaaaaaataaa

SEQ ID NO: 205448 - DNA, 213 bp, Unknown
  Bacterial polypeptide expressing nucleotide sequence isolated from the Sargasso Sea
gcagcggcaccaaccacgtgctgcccaccgccggtgccgcgcgtgcctacagcggcgtgagcgtggccagcttccagaacctgatcagcgtgcagtcggccacgcctgcgggcatcgccgcgatcggcgaatgcgcgcgcatccttgcccgcgccgaaggcctggacgcgcacgagaacgcggtgacgctgcgcatggaggcggccgcatgaa

SEQ ID NO: 205449 - DNA, 474 bp, Unknown
  Bacterial polypeptide expressing nucleotide sequence isolated from the Sargasso Sea
tttcttttttaaaagaaattaaaagtttaattaaaataaatttaaagaatttacctagaagaaaaattgcagagaaaagtttaaaagccaatggcttattaatacatgccaagaatgataagaacgtaatcgatttaataaatttaattgctcctgaacatttagagttaaatatatctaaacctaaaaaatatataaataaaattgtaaatgctggaagtatttgcataggcaagttttctgctatggcagttacagattataatgctggtacaaaccatgttttgcccacaatgggatcagctaaattttcctcaggattaaatgtcggtgatttttataaaaaaattagctatattaatttatcaaaaaagggtattgaagtaattggcaagcaagctataacacttgccgagtatgaaaatttagaaggtcatgctcaaagtattaaatcaagaattaggagttattaaa

SEQ ID NO: 205450 - DNA, 493 bp, Unknown
  Bacterial polypeptide expressing nucleotide sequence isolated from the Sargasso Sea
atgatcaaaaaaatatttgcgagcagcgatagtttcgagtccgatctaaaagaattgcgttctctcgatttgcttgaagaccaggaactagatagaacagttgacaaaattctaagggatattcgtttgaacggagactcagccgttttgtcttatgtaaaggagtttgagcgcgaagatgtaaaatccagatcagatttgaaaatcgatccagagttattggcatccagttggaagaaggtctcggaggaagagcggaatgctctatcgtttgcaatagagagaatagaaacttttcaccaacgccaaattgaatcgtcttggtcgtataaagatagacaaaataatttactagggcagcaaataactcccataaatcgagtgggggtatatattccgggtggtagggctagctatccttctacagctcttatgactgtaataccggcaaaggtcgctggagtgagggagattgtgtcgccactcccttgat

SEQ ID NO: 205451 - DNA, 616 bp, Unknown
  Bacterial polypeptide expressing nucleotide sequence isolated from the Sargasso Sea
tgatctttttgcgggtccaacagaaacgttagtcattgctgacgacagtgttgatggcgaattatgtgcggcggatttgctagggcaggctgagcatgggcttaattctccggccgtgttgcttaccaacagcgagcaactgggtaaagataccatggccgaagtagagcgccagttaactattttacctactgcagaagtggcctctgtcgcatggcgagattacggtgaagtcattgtatgcgacacttatgatgaaatgttagaggtcgctaacgacctagcatttgagcacgttcaaattatgacgaaagacgtgccgtactttcaaaagaacatgcgtaacttcggtgcactgtttttaggccctgaaaccaatgtgtcttacggtgacaaatgtattggtacaaaccacaccctacccacgaagggcgcaggtcgttatactggaggtctatgggttggtaaattcttaaaaacctgtacataccagcgtgttacggaagaagcctcagtgatggttggcgagtattgttcacgtttatgtgcaattgaaggttttgcaggtcacaaagaacaggctgacattcgattacgtcgttacggaaaaaaataa

SEQ ID NO: 205452 - DNA, 637 bp, Unknown
  Bacterial polypeptide expressing nucleotide sequence isolated from the Sargasso Sea
caattatttggtactgttggggttgattcaatagcaggaccttctgagatagtagtgttggctgatgagacttcttcacctgagctggttgcttgggatctcatggcccaagcagaacatgatgaagatgctagttcaattttaatttgcacttctagtgaagttataaatgaagtaaaacaaattatactgaatgaattacctaatcttgatagggaattaattattaaatcttccttaaaaactaatggtttagtaataaaaatagagaatcttgaacagtctataaagcttataaatagatttgcacctgagcatcttaatttagcttttgaaaataaagtaattgatgttaaagatttaactgcaggaataattctcgaaggatccgattcagccgtatctttatctgattatgttttaggacctagtcatatactacctacaaatactagttccaggttcagctctccattatcagtggaagattttatggttagctctaccaaggtaggtataaggtctcaagctaataaggccctttacaataaatttattgatacagcttctataattgctagagctgaaggcttaactgctcatgctatttctgcagaaaagagaaaaaaaaactagt

SEQ ID NO: 205453 - DNA, 513 bp, Unknown
  Bacterial polypeptide expressing nucleotide sequence isolated from the Sargasso Sea
aatgataaaagttttaaattgtagaagtaaaaattatataaaaaaacttaaattttttttacaaaaaagaagatctgaaaaatatttagtaaacaataaggtaaaatcaattttaaatgatattaaaaaaaatggtattaaggcagttttaaaatatgaaaggagattttcaaaaaataatgaaattaaacccagtataaagaaaatcagattttgtgtaaaatctttagatccaaagataaaaaatgcaattaattttgcatataatagaatttataaatttcacaaaaaacaaagaattaaaaatttatcttacaaagacaatcttggaaataaacttcaatacaaatatgttccaatggattctgttggcatatatgttcctgcaaaccttccttccacacttcttatgaatgctgtcccagctaaaattgctggagttaaaagaatagttctagtaaatcctaaatttaaaggaaaattaaacgcagccgtactgtatgcagcaaaaaa

SEQ ID NO: 205454 - DNA, 410 bp, Unknown
  Bacterial polypeptide expressing nucleotide sequence isolated from the Sargasso Sea
agttgttttaaaaagtttaaaaaataatggattaattgtattagcccaaagtgataagcaaataatagaagcaattaatgaagttgctccagagcacttagaaattaatgtgtctaattataaaaagtatttaaatcaaattcataatgcaggaagtattatgattggaaagtattctccaatggctgtctcagattataatgttggttcaaaccatgtattaccaactttaggatctgcaaaattttcatctgggctaaatcttagtgaattttataaaaaaattagccatataactcttacaaaaaaaggtattgagaaattaggagaatccgctacacatctcgctgagtatgaagaactagataatcatgctcaaagtattaaatctagaatgaggagaatataat

SEQ ID NO: 205455 - DNA, 916 bp, Unknown
  Bacterial polypeptide expressing nucleotide sequence isolated from the Sargasso Sea
aaaggaaattgaattaaagggagatagttatgtaagagaattatcagagaaatttgatgaatactcacctagttcatttagattatctgaagatgaaataagtaaattagtggatgaagtttctgataatgacaaagaggatattagatttgcacaaaaacaagttcgatcgtttgctgaggtacaattaaaaagtttaagtgaaattgaagtggaaactcaaccaggtgtaattcttggacataaaaatatacctgttcaatctgttggctgttatgttcctgctggaaaatttccaatggtggcatcagcacatatgtctgtagtcaccgcttcagttgctggagttcctagaataatagcaacaacaccaccctatcaaggaaaaccaaatgctgccgtagttacagctatgaaaatgggaggagctcatgaaatatacgttttaggtggaatgcaaggtgttggagctatggctattggaactgagaccattaaaccagtagatatgattgttggtcctggaaacgcatatgttgcagaagcaaaaaggcaattattcggtaaggttgggatcgatttatttgccggtcctaccgaaacaatgattatttgcgatgatactgtagacgcagaaatatgtgctactgatcttcttggtcaagcagagcacggttataattcccctgcaataatgattactaattcaagagatttagcaacagaaacaataaaagaaatagatagactgctcaaaattttaccaacaagagatactgctggtgttagctggaaagattatggtgaaataattttatgtgaaagttatgatgaaatgttaatgaaagctaatgagatagcttcagagcatgttcaagtaatgacagatagagatgaatggtttttaaaaatatga

SEQ ID NO: 205456 - DNA, 816 bp, Unknown
  Bacterial polypeptide expressing nucleotide sequence isolated from the Sargasso Sea
gatgaaattaattttgatttttcgaaaaaaaatggaaataagactcttttagattttcttaataaaagaagatccggattgagagttgatacatcaattgtggataaaataataaatgatgtaaaaaaaaataaaaataaagctgtaatcaaatatgaaaaaaaattttcaggaaataacaaaattaagccaagtaaaaaggaaatttataatgcaataaaatcattagataaaaatgtcattaaagcgattgacctagcttttaaaagaattcaaaaattccataaattacaaaaagtctcaaatattaagttaatagataattacaataataaaattgaatataggcatgttcctttaaagtcagttggtatatacgttccagctaatttgccctcctcattattaatgaatgcaataccagcaaaaatttcaaaagttaaaagaattgttttagccaatccaagaactggaggcaaattaaattctgctataatgtatgtagcaaaaaaatgtggaataaaagaaataataactgtaggaggtgctcaagcgattgcaagtttggcctatattcagaacgttgataaaatagttggccctggaaatgattttgttgcaaaagcaaaacaaaaagttttcggacaagttggaactgaaagtattattgcaggaccctcagaggtgactatcatagcagatagtaaatctgatataaaacaaatttctacatcaatggcagctcagtctgaacacggcataaattcccagagtattttaatttccaaaaataaagatgtactaattaaatgcgat

SEQ ID NO: 205457 - DNA, 853 bp, Unknown
  Bacterial polypeptide expressing nucleotide sequence isolated from the Sargasso Sea
aagaaatttgacaaatatgatggtgaaataattgtttctaaagaaagaattgaaaaaattaaaaaaagtttagatcaaaaaacaaaagatgatatccaattttcttttgatagagttagaaaatttgctgaagcacaattaaaaaattatggtcaagattttgaagttgaattatctgatggtttatatgctggtcaaaaattaatccctattaatacagctggctgttatatacctggtggaagatatgctcacattgcatctgcggtaatgagtgtaacgacagcaaaagtcgcaggtgtaaaaaatattattgcttgtagtcctccaaaagaaaatgtgggtgcccaccctacaattgtttatacagctgatctatgtggagctgatataattttgaatttaggtggtgttccagctattgcagcaatgacaaatggattatttaaaaatcctccagctgatataattgttggtcccggaaatcagtttgtagctgaggccaaaagaattttatttggaaaagttggtattgatttatttgcagggccaacagaaataggaattattgctgatgcaaaagctgactctgaaataatagcagttgatttagttggtcaagctgagcacggatataattcaccttgttggttatatacaacttgtaaagatcttgcagagaaagtaatgaaaagagttccagaattaattgctgaacttccagaagtaccaagaaccaatgctgaagcagcttggaaagattatggagaagtaatactttgtgatactgatgaagaaatggttaaaattagtgatcaatatgctcccgaaccatttagaagttcaaacggaa

SEQ ID NO: 205458 - DNA, 484 bp, Unknown
  Bacterial polypeptide expressing nucleotide sequence isolated from the Sargasso Sea
gcgaaatatgtgatgaaaagagttccagaaattaatgctgattacccagaattacctagagaaaactccgaagctgcttggagagattatggtgaagtaattttatgtgatacagatgaagaaattgcaaagattagcgataaatatgcaccagaacacttagaagtccagacaaaaaatcttaaatggtttcatgaaagattaaaaaattatggatcattatttataggagaagaaacaactgtcgcatatggtgataaatgttctggaacaaatcatattttaccaactaagggtgctggaagatataccggtggattatttgttggtaaatttattaaaactttaagttttcaaagaatgactaaagcctcaacaaaagaagttggcgctgcttgtgcaagaatttctagatatgaaggaatggaagctcacgcaagaacaggcgatgtaagacttagaaaatacggattttcaaattaat

SEQ ID NO: 205459 - DNA, 285 bp, Unknown
  Bacterial polypeptide expressing nucleotide sequence isolated from the Sargasso Sea
aattaataatggaattctcatgtatgtttcttcagacgctaaaataataagtgttataaataaaattgcaccagaacatttagagttaaatattagaaattataaatcattagttccaaaaataaaaaattcaggatcaatatgtttaggaaaatatgcagtgatggcaatgactgattataatgttggatcaaaccatgtgttaccaactaatggttctgcaaaatactcaagcggtataagtgtaaatgaattttataaaaggatttcatacttaaacttatc

SEQ ID NO: 205460 - DNA, 854 bp, Unknown
  Bacterial polypeptide expressing nucleotide sequence isolated from the Sargasso Sea
aggatgtatagagcttactaagaaattcgataaatatgatggtgagattgttgtatcaaaagaaagaattgaaaaaattaaaaaaactttagatcaaaaaactaaagatgatattcaattttcttatgatcgggtaagaaagtttgcagaagctcaactaaaaaactatggtcagaactttgaagtggaattatcagatggtttatatgctggtcaaaaattagtgccagtaaatactgctggatgttacatcccaggtggaagatatgctcatatagcttctgccgtaatgagtgtaactacagcaaaagtagcaggggtaaaaaacataattgcttgcagccctcctaaagaaggtgttggtgcacaccctactattatttatacggctgatctatgtggtgcagatgtaatcttaaatttaggtggagttcctgccatcgctgcaatgacaaatggattatttaaaaatccacctgcagacattattgttggtccaggaaatcaatttgtagctgaagcaaaaagaattttatttggtaaagttggtattgatttatttgcaggtccaactgaaattggaattattgctgatgcaaaagcagatccggagatagtagctgttgatttagttggtcaagctgaacatggttataactctccttgttggttgtacacaacaagtaaggaacttgctgaaaaagttatgaaaagagttccagagctaattacagaacttcctgaggttccaagaaaaaatgctgaagcagcgtggagagattatggagaagtaattctttgtgatactgatgaagaaatggttaaaatcagtgatgaatacgctcctgaacatt

SEQ ID NO: 205461 - DNA, 393 bp, Unknown
  Bacterial polypeptide expressing nucleotide sequence isolated from the Sargasso Sea
gcgaagttattctttgcaatactgatgaagaaatggcaaaaattagtgatcaatacgcaccagagcatttagaagttcaaacaaaaaatttgaaatggtttcatgagagattaaaaaattatggatctttatttataggtgaagaaacaacagttgcttacggtgataaatgttcaggaacaaaccatattcttccaactaaaggtgccggaaggtatacaggtggattgtttgtaggtaaatttattaaaacattaagttttcaaagaatgacaaaagaatctacaaaagaagttggtgctgcagctgcaagaatttcaagatacgaagggatggaagcgcacgcaagaactggcgatgtaaggcttagaaaatacggtttttcaaattaag

SEQ ID NO: 205462 - DNA, 412 bp, Unknown
  Bacterial polypeptide expressing nucleotide sequence isolated from the Sargasso Sea
atcaattgctaagcaaagtttaaaaaaaaatggaattttaatatatgtcaattctgacaaaaaaattgtagaagttttaaataaaattgccccagaacacttggaacttaatattaaaaattataaatcttttttacctaaaataaggaattcaggatcaatttgtttggggaaatatgctgttatggcaatgactgattataatgtaggttctaatcatgtgcttccaacaaatggttctgctaaatattctagtggaataagtgttaatgaattttataaaagaatttcatatataaacctatcaaaaaagggtattgaaagtcttggaccatcagttataactcttgcaaattatgaggggttagtaggacatgctcaatctattaaaaaaagaattaggagaaaataa

SEQ ID NO: 205463 - DNA, 577 bp, Unknown
  Bacterial polypeptide expressing nucleotide sequence isolated from the Sargasso Sea
aatgaaaatactaaaaagcactaataagaattttaataattctttaaataaattacttttacagcgaaaaaaaaaggttcaatctagttctatctcagtgaccagtattgttagagacgttaaaaaaaatggtgataaagctttattgaaatatgaaaaaaggtttaatcaaaacagaactattgttcctacatcaaatcaaattaataattcaataaaatctttaaatcaaaaagtaaaaaaagcaattgatattgcttataatagaatttacaaatttcattctcttcaaaaatttaaaaatatttcttacgttgataaatttaaaaataaactcgaatataaatacttgccactagactctgtcgctatatatgttcctggttcatcagcatcttatccatcaagtgttttgatgaatgctattccagcaattgttgccggtgttaaaagattaataatgattaacccaggttttaaaggagagcaaaattcagcagttttatacgcagctagaaaatgtaaaataagagaaatttattctataggtggtccttctgcagttgcagccgccgct

SEQ ID NO: 205464 - DNA, 427 bp, Unknown
  Bacterial polypeptide expressing nucleotide sequence isolated from the Sargasso Sea
agagtcagtgctgaagctgcttggagagattatggtgaggttattctttgtgacacagatgaggaaatggcaaccataagcgatgaatatgcacctgaacatttagaggttcaaactgaaaatcttgattggtttcacaaaagattaaaaaattatggttcactgttcattggagaagaaacaacagttgcttatggtgacaaatgttcaggaactaatcacattttaccaactaaaggtgcaggtcgatatactggaggcttatttgtgggaaaatttataaaaacattaagttttcaaagaatgtctaaagagtcaacaaaatcagttggggctgcttgtgcgagaatttcaaggtatgaaggaatggaagctcatgcaagaacaggtgatgcgagactaagaaaatatggtttttcaaattaat

SEQ ID NO: 205465 - DNA, 889 bp, Unknown
  Bacterial polypeptide expressing nucleotide sequence isolated from the Sargasso Sea
tctcctaaaacttcttccactgatgacaataagacaattggaatagttcaagatttactaaaaaatattgaaacaacaaaagagcaaggctgtatcgatttaacaagaaaattcgacaagtatgatggggaaataatagtgtcaaaagataaaattgaagaaattaaaaaaactttagatcaaaaaactaaagatgatattcaattttcatttgaaagagttagaaaatttgctgaagcacaacttaaaaattatggacaagatttcgaaatagaactttctgatggtttgtatgcgggtcaaaaattagtacctgtgaatacagcaggttgctacatcccaggtggaagatatgcgcacattgcatctgctgtaatgagtgtaactacagcaaaagttgctggagttaaaaatattattgcatgtagtcctcctaaaaaaggtgttggtgcccaccctactattgtatatacagctgatctttgtggggcagatgttatcttaaatttaggtggtgttcctgcaattgctgcaatgaccaatggattatttaaaaatccccctgcagatataattgtaggaccaggaaatcagtttgtagcagaggctaaaagaattttgtatggaaaagttggtatagatctatttgcaggaccaactgaaattggaattatagctgatgctaaagctgatccagaaattgttgctgtagatttagtaggacaagcagagcatggatataattcaccatgttggctttatacaactagtgaagaattagctaaaaaagtaatgaaaagagttccagaattaattgcagaacttccagaagttccaagaacaagtgctgaagcagctggagagactaggagaagtaattctttgtgac

SEQ ID NO: 205466 - DNA, 645 bp, Unknown
  Bacterial polypeptide expressing nucleotide sequence isolated from the Sargasso Sea
atttatttgctggacccactgaaacactaataattgcagacaaaacttctgatcctgaaatttgtgcaattgaccttttaggacaagcagaacacggtcctacaagtcctgctatattattaacggactcaaataagcttgctatcgacacaatcaaagaagttgaaagacagttgaatattttaccaactgctgaaattgcaaaggaatcatggaaagaatatggtcaagttattgtttgtgataatattgaagaaatggttacagttgctgatgatttagcttttgagcatgtccaagtaatgacagaagatcctgattattttcataaaaatatgactaattatggagccttatttttgggttctagaacaaatgtggcttttggtgataaagtaataggaacaaatcatactttaccaactaaaacagctgcaagatatactggtggtttatgggtaggtaagtttttaaaaacttgtacatatcaaaaagttttaactgatgaagcatctgctcttgtaggtgaatattgttctaggttgtgtgcgcttgaaggtttttctggtcacggtgagcaagctaatgttagagttagaagatatggtagaaaaaacattgagccatatgctgcagctgaatagg

SEQ ID NO: 205467 - DNA, 759 bp, Unknown
  Bacterial polypeptide expressing nucleotide sequence isolated from the Sargasso Sea
aatgagtgaagtctctgatgatgacaaggaagatattaaatttgctcaaaaacaagtgcgatcatttgcggaagcacaacttaaaacattaagtgaattagaagtagaaacgcatccaggtgtgatacttggtcataaaaatataccagtgcaagcagttggatgttatgtacctgccggaaaattcccaatggtagcttctgctcatatgtcagttgttactgcctctgttgctggggttccaagaattgttgctactacaccgccttttaaaggtaagccaaatccagctgttgttacagcaatgaaaatgggtggtgctcacgaaatttatgttttgggaggaatgcaaggagttggtgctatggctattggtacagaaactataaaacctatagatatgcttgttggacctggcaatgcatttgttgctgaagcgaaaagacaattgtatggcaaagttggtatcgatttatttgctggtccaactgaaacaatggttattgcagatgaaactgttgatggtgaaatatgtgcaacagacttattaggacaagcagaacatggatataattctcctgctgtgatgataacaaactcaagaaaacttgcagaagaaacatttaaagaaattgatagaattttagaaatcttacctactaaagaaacagcaagtactagttggagagattatggagaaatgattttatgtgatacctatgaggagatgttatctaaagcaaatgaaatagcttcaga

SEQ ID NO: 205468 - DNA, 685 bp, Unknown
  Bacterial polypeptide expressing nucleotide sequence isolated from the Sargasso Sea
gaattcaattttcctttagaaataacagtatcacatataggctataaagcacaaacaaaacgttttgataaaaacaatattaatggaatcaactttattttaaacagagattttatcagaatgaatgaattagttgtcacaggaactagaacacaaaaattacacgataatgtacctattgcaaccgaggttatttcacaagatgatatcaataattcgggtgcgcaaactattgcagatctattatctcaaagagcaggagttagtttgcaaacctctgttgaaggtggttctgtattaaatattcttggaatggattctagatatatacttattttaatggatggacagcctattacaggtcgatttaataatagagttgctcttgatcaaattttaatcaatagagtaaaaaaggttgagattgttaaaggcccaaactcctctctatatggaagtgaagctatggctggggtagtcaacatcattactaaggataaaaatagtttagaatctattgatgtatctgctcaatataataatacgcaaaataaatttgaaaatactggaataaaaaatggttctcaaattttaagtatcaatggttataaaccacttaataaattaaaaataaagttcaaaaatgacttaaatcagacgaataatgataaatcaattcaattaa

SEQ ID NO: 205469 - DNA, 472 bp, Unknown
  Bacterial polypeptide expressing nucleotide sequence isolated from the Sargasso Sea
aatgaaaagagttccagaattaatttcagagttacctgaaatgccaagagctagtgctgaggcagcatggagagattatggagaagttattttatgtgataccgacgaagagatggcttctattagcgatgaatatgctcctgaacatttagaagttcaaactaaaaatcttaaatggttccacgatagactcaaaaattatggatctctctttattggtgaagaaacaactgttgcatatggagacaagtgttcaggaacaaatcatattttaccaaccaaaggtgcaggtcgttacacaggtggattatttgttggaaagtttataaaaactttaagctttcaaagaatgacaaaggaatctactaaagaagttggcgcagcagcagccagaatttctagatatgaaggtatggaagcacacgcaagaactggtgacgtcagactaaggaaatacggttactcaaattag

SEQ ID NO: 205470 - DNA, 584 bp, Unknown
  Bacterial polypeptide expressing nucleotide sequence isolated from the Sargasso Sea
attgatcaagatattacaagttggtaatgttgacagttttgtagaatccagacgtcaaaaaacctcacaaaaagatagaaaaatcgtacaatcaatcttagatgatgtaagaaagaatggtgattctgctgtcaaaaaatatgaacaaaaattcaatggtaaaaaaacaactcaattgcatctaactaaacaggaagtgaaaaatgcaaagattactgatgcagaattttctgcattacagttatctgcaatacgactatctaaatcacaaagaattctaaacaaaagtttgattcaatctatcaagaaaattcctgatatctcatttattcctattccaagtgttggttgttacatacctggtggtcaagctagatatccaagttcagcaattatgtctgtaattaccgctgctgaagcaggagtaaagaaaattgtagttgtttctcctcctaactctgatggaaaaatagatcctatgacaatcactgttgctcaaaattgtggcgcagaaatttacaaagtaggtggtgcacaagcaattgctgcacttgcatatggaacaaaatctataccaaaagtcg

SEQ ID NO: 205471 - DNA, 358 bp, Unknown
  Bacterial polypeptide expressing nucleotide sequence isolated from the Sargasso Sea
gggtaaaatcagcgacgagtatgctccagaacacttagaagttcaaactgaaaatttgaaatggtttcatgaaagattaacaaattatggatctttatttgttggagaagaaacaacagtagcctacggagataaatgttcaggaactaatcatattttaccaactaaaggtgctggaaggtatacaggtggattattcgttggaaaatttattaaaactttgagtttccaaagaatgacgaaagagtctacagaacttgtcggtgctgctgcagctagaatatcaaggtatgaaggtatggaagctcacgcaagaactggtgatgtaagactaagaaaatacggatattctaattaa

SEQ ID NO: 205472 - DNA, 676 bp, Unknown
  Bacterial polypeptide expressing nucleotide sequence isolated from the Sargasso Sea
atgtcagtgacctacctcaaacgcggcatgcccgaggccgaccgggccgaggacgacgccaagacccgcggcatcgtggaatccaccctcaaggacatcgaggcccgcggtgatgtcgcggtgcgcgagttgtcggagaagttcgacagctatacgcccgagagcttccgcctcagccagcaggagatcgacgatctgatcggccagctctccgagcgcgaggtcgccgacatcaggttcgcgcaggagcaggtgcgaaacttcgcgcaggcgcagcgcgacaccatgctcgacctcgaggtcgagacgatgccgggcgtgatcctcgggcacaagaacatccccgtgcagtcggtgggctgctacgtgcccggtggcaagttcccgatggtcgcctcggcgcacatgtcggtggccaccgcctcggttgcgggggtgccgcgcatcatcgcctgcacgccgccgttccagggcaagcccaacccggcggtgatcgccgccatgcacttcggcggtgcccacgagatctacgtgctgggcggcatccaggccatcggcgccatggccatcggcaccgagaccatcgagccggtgcacatgctggtcggccccggcaacgccttcgtggcagaggccaagcgccagcttttcggccgcgtcggcatcgacctcttcg

SEQ ID NO: 205473 - DNA, 835 bp, Unknown
  Bacterial polypeptide expressing nucleotide sequence isolated from the Sargasso Sea
atggctataacatatctaaaaagatcacctaaaacttcatctacagatgacactaagacgcgagaaatagtagaaaatattttaaaagatattgaaaaaaccaaagaagagggatgtaaagaactttcaaaaaaatttgacaaatatgaaggtgacgtaattatttctaaagaaaaaattgaagaaattaaaaaaaatttagatcaaaaaactaaagatgatattcaattttcccatgaaagagtgagaaaatttgctgaagcacaattaaaaaattacggtcaagattttgaagttgaattatctgatggtctgtttgcaggtcaaaaattaattccagtaaatactgctggttgttatgtcccagctggtaggtatgctcatatagcatctgccgtaatgagcgtaacaacagccaaagtagcaggagttaaaaatataatagtctgtagctcacctaaacctggtgttggtgtgcatccatcaattgtttatacggcagatttatgtggtgctgatgtaattatgaatttgggtggtgttcaagctattgcagcaatgactaacggattatttggaaatgcaccagcagatattttagttggaccaggaaatcaatttgttgctgaagcaaaaagacttttatttggtaaagttggtatcgatttatttgcaggaccaacagaaattgcagtaattgcagatgagacagctgatcctgaaatggttgcctacgatcttgttggacaagctgagcatggttacaattctcctgcatggttatttacaaaaagtaaaaaaattgctgattatgtgttgcaaaggggttcctgaa

SEQ ID NO: 205474 - DNA, 410 bp, Unknown
  Bacterial polypeptide expressing nucleotide sequence isolated from the Sargasso Sea
aattgcaagaaaaagtattttgaataatggaattttaatgcacatcggttcagataaaaaaattgttgaagtaataaataaaattgcccctgaacacctagaattaaacatcaaaaattataaatcatttgttcctaagataaaaaattctggatcgatttgtttgggtaaatatgcggtaatggctatgacagattataatatcggaaccaaccacgttttgccaactaatggaacttcaaaatactcatctggcataagcgtcaatgaattctataaaagaatttctgttataaacttatcaaaaaagggtattgaaagtcttggaccatcagttataactcttgcaaattatgaagggttagcaggacatgctgtctcagtaagaaaaagaattaggagaaaataaa

SEQ ID NO: 205475 - DNA, 392 bp, Unknown
  Bacterial polypeptide expressing nucleotide sequence isolated from the Sargasso Sea
tgaagtagttctatgtgatactgatgaagaaatgtctaaaattagcgatgaatatgctccggaacatttagaagttcaaacagaaaatttagattggtttcataaacgacttaaaaactatggatcattgtttattggtgaagaaacgactgtagcatacggagataaatgttcaggtacaaatcatattttacctacaaaaggtgctggcagatacactggtggtttgtttgttggaaagtttataaaaactttaagctttcaaagaatgactaaagaatctacagaattagttggggcagctgctgccagactttcaaggtatgagggaatggaagctcatgccagaactggcgatataagattaaaaaaatacggatattctaaataaa

SEQ ID NO: 205476 - DNA, 574 bp, Unknown
  Bacterial polypeptide expressing nucleotide sequence isolated from the Sargasso Sea
aatgaaagtattatacagtaacagtaaaaattttgataaaaatttagatagtttacttttacaaagaaagaaaaaagtacaatcaaattcagtttcagtttcaagtattattaatgacgttagaaaaaatggagatcaagctttagtaaaatatgaaaagagatttaatcaaaataatgtaatcgttccttctcaaaagcaagtttctaattctattaaatcactggataaaaaagtgaagcatgcaattgatattgcttataatagaatttacaaatttcatttgcttcaaaaatttaagaatatctcatacattgataagtataaaaataaacttgagtataaatatgtacctttagactctgttgcaatttatgtgccaggttcaacagcctcatatccctcaagcgtattaatgaatgcaattccagcaattgttgcaggagttaaaagagttgtgatgattaatcctggatttaaaggaaaacaaaattcagcagtgttatatgcggcacgtaaatgtaaaattaaagaaatttactcaataggtggtccttctgcaattgcagccgta

SEQ ID NO: 205477 - DNA, 853 bp, Unknown
  Bacterial polypeptide expressing nucleotide sequence isolated from the Sargasso Sea
agaagaagcaattaagaaagttgatcaaaaaactaaagatgatgtgaaattcgctcatgatagaattaaaaagtttgctgaacaccaattgaaaagtatgaataatggatttgaggttgaattgtcaaaaggtttgtttgctggacaaagattaatcccagtagatacagctggatgttacattccaggaggaagatacgcgcatatttcttctgcagtaatggccattactcctgccaaagtagctggtgtaaagactattatctgtgccagtcctcccaaagataaagatggtgctaatcctggaataatttttgctgctaatcattgtggagctgatgtaatcatgaatctgggtggtgtagctgctatcggttcaatgacacatggatgttttaaaaaccccccagtagattttttagttggagcagggaatcaatatgtagctgaagctaaaagaattgtttatggaaaggttggaatagatcaatttgcaggaccaacagaaattgcaattattgctgataagtcagctgataaagaaatagttgctgtagatcttgttggccaattagaacacggttacaattctccaggctggttatttactactgataaagcgttagctgattttacaatgaaaagagttccagaattaattaacgaactacccgaattagcgaaagtaaatgcaacagctgcatggaaagactacggtgaagtaattttatgcgattctaatgaggaaatggcagaagttagcgataagtatgcctcagaacatttagaagttcatgctgaaaatttagactggtggctaaaaagattaagaattatggatctttatttttag

SEQ ID NO: 205478 - DNA, 412 bp, Unknown
  Bacterial polypeptide expressing nucleotide sequence isolated from the Sargasso Sea
gctgcatggagagattatggtgaagtaattctatgtgatacagatgaagaaatggtaaaagtaagtgatgaatacgcaccagaacatctagaaattcaaacagaaaatttaaaatggtttcatgaaaaactaacaaattatggatctctttttgttggagaagaaacaacagtagcttacggagataaatgttcaggtacaaaccatattctgcctactaaaggtgcgggaaaatatacaggaggactatttgttggtaaatttattaaaacacttagttttcagagaatgacaaaagaatctacaaaggaagtaggagcggcggcggcaagaatttcaagatacgagggcatggaagcgcatgctaggactggtgacgtaagattaagaaaatatggattttcaaattaat

SEQ ID NO: 205479 - DNA, 797 bp, Unknown
  Bacterial polypeptide expressing nucleotide sequence isolated from the Sargasso Sea
tatggcaattaattatattaaaaaagcagctaaaactcccgagactgatgatcataaaactcaagcagctgttcaagagattcttaatgatatagcaaaaagaaaagaagaagcccttaaagaacttaataaaaaatttgataaatacgatggagaagtagttgtttcaaaggaaaaaattgaagaagcaattaaaaaagttgatcaaaaaactaaagatgatgtaaaatttgcacacgatagaattagaaaatttgctgaacatcaactaaaaagcatgaacaatgattttgaagttgaattatcaaaaggattatttgcagggcaaagattgatacctattgatactgcaggatgttatattcctggaggaagatatgcgcatatttcatctgcagttatggcaataactcctgctaaagtagctggcgttaaaactattatttgtgcaagccccccaaaagataaagatggagctaatcctggaataatttttgccgctaatcattgtggtgcagatgtaataatgaatctgggaggtgttgctgctataggatcattgacacatggttgctttaataatcctcctgtagattttttagtaggtgcaggaaatcaatacgtagccgaagcaaaaagaatagtttacggaaaggttggcatagatcaatttgccggcccaactgaaattgcaatcatagccgataaatcagcagataaagaaattgttgctgtagatcttgttggtcaattagaacatggttataattccccaggttggttatttactactgaca

SEQ ID NO: 205480 - DNA, 446 bp, Unknown
  Bacterial polypeptide expressing nucleotide sequence isolated from the Sargasso Sea
tttaatgaaagaattaaataaaattccaagaaaaaatattgcaaaaaaaagtcttctaagaaatggattgattcttagagtttataataatacacaaataattgattcaattaatgaaatagcaccggaacatttagaattaaatttaaaaaattataaaaaattagttaataaaataaaaaatgtaggaagtatttgtataggaaaatactcagcgatggcagctactgattacaatgtaggaactaatcatattctaccaacacttggttcggcaaaattttcctctggactaaatgttggtgaattttataaaaaaataagctacataaaattatcaaaaaaaggcattgaagttattggcaagaaggctataactcttgccgagtatgaaggattaattggtcatgctcaaagtataaaatctagaataaggagaagttaga

SEQ ID NO: 205481 - DNA, 403 bp, Unknown
  Bacterial polypeptide expressing nucleotide sequence isolated from the Sargasso Sea
agagattatgttgaagtaattctttgtgacactgatgaagaaatagtcaaaattagtgacgaatatgcgcctgaacatttagaagtacagaccgaaaacttagaatggtttcatgaaagattaacaaattatggttcattgtttgtgggtgaagaaacaaccgtcgcatacggcgacaaatgttctggtacaaatcatattttaccaactaaaggagcaggaagatatactggtggattgtttgttggaaaatttattaaaactttaagctttcaaagaatgacaaaagaatctactaaattagttggtgctgctgcagctagaatttctagatatgagggaatggaagctcatgcaagaacaggagatgtaagacttagaaaatatggtttttctaattaat

SEQ ID NO: 205482 - DNA, 575 bp, Unknown
  Bacterial polypeptide expressing nucleotide sequence isolated from the Sargasso Sea
gttagcagatagaaaaactgatctaaatcaagttataacatcaataattggtcaagcagagcatgacgtaaattcacaatgtattttaattacaaaagacaaaaaattagtaaataaatttaatattgaaataataggaaggatacaaaaagttcagagaaagagtgtcgttttaaaaagtttgaaaaataatggattaattgtattagcccaaagtgataagcaaataatagaagcaattaatgaagttgctcccgaacatttagaaattaacgtatctaattataaaaagtatttaaatcaaattcataatgcaggaagtattatgattggaaaatattctccaatggctgtatcagattataatgttggtactaaccatgttttaccgaccttaggctccgcaaagttttcatctggattaaactcaagtgagttttataaaaaaattagccatataacgcttacaaaaaaaggtattgagaaattaggaaaatccgctacacatctcgctgagtatgaagatctagataatcatgctcaaagtattagatctagaatgaaaggtaaataat

SEQ ID NO: 205483 - DNA, 850 bp, Unknown
  Bacterial polypeptide expressing nucleotide sequence isolated from the Sargasso Sea
atggcaattaaatacttaaaaaaatcaccaaaaacttcatctactgatgatttaaaaacaagagaaatagttcaaaatcttcttaatgatttagaaaaatcaagagaagatggttgtaaagaacttacaaaaaaatttgataaatatgatggcgaaattatcgtatcaaaagaaaagattgaggaaataaaaaaaaaattaaatctaaaaacaaaagacgatattaaattttcttatgacagagtaagaaagtttgcagaagctcaattaaaaaattatggacaagattttgaagtagaactttctaaaggtttatatgcaggacaaaagctaattcctgttaatactgctggttgttatgttcctggtggaagatacgctcacatagcttctgctgtaatgagcgtaacaacagccaaagttgctggggttaaaaatattattgcatgcagtcctccaaaaaaagatgttggtgcacatcctgctattgtttatacagctgatttatgtggagctgacgttatattaaatttaggtggtgttcctgcaattgctgcaatgacttatggaatgtttggtaattctccagcggatattttagttggtccaggaaaccaatttgttgcagaagcaaaaagaattttgtttggtaaagttggaattgatttatttgctggccctactgaaattgctgtaatagctgatgaaacagcagatccagaaattgttgctgttgatttagttggtcaagcagaacatgggtataactcaccagcctggttgtttactacaagtaaaaaagttgctgatgaagtaataaaaagaatgccagaattaattgcaaatttac

SEQ ID NO: 205484 - DNA, 454 bp, Unknown
  Bacterial polypeptide expressing nucleotide sequence isolated from the Sargasso Sea
taaaattgagattactaaacaattaaaagaaattccaagagcttctgttgcaagaagaagtctaattaataatggaattcttatgtatatttcttcagacgctaaaataacaagtgttgtaaataaaattgcaccagaacatttggaattaaatattaaaaattataaatcgttagttccaaaaataaaaaattcaggatcaatatgtttaggaagatatgcagtgatggcaatgactgattataatgttggatcaaaccatgtgttgccaactaatggttctgcaaaatactcaagcggcataagtgtgaatgaattttataaaaggatttcatacataaacttatcaaaaaagggtattgaaagtcttggaccatcagttataacacttgcaaattacgaagggttggttggacacgcccaatctgtagtaaagagaataaggagaaaataa

SEQ ID NO: 205485 - DNA, 761 bp, Unknown
  Bacterial polypeptide expressing nucleotide sequence isolated from the Sargasso Sea
aactcaaccaggtgtagttcttggacataaaaatatacctgttcaatctgttggctgttatgttcctgctggaaaatttccaatggtggcatcagctcatatgtctgtagtcactgcttcagttgctggagttcctagaataatagcaacaacaccgccctaccaaggaaaaccaaatgctgctgtagttacagctatgaaaatgggaggagcacatgaaatatacgttttaggtggaatgcagggtgttggagctatggctattggaactgaaaccatagaaccagtagatatgattgttggtcctggaaacgcatacgttgcggaagcaaaaagacaattatttggtaaggttgggatcgatttatttgctggtcctactgaaacaatgattatctgcgatgatactgtagatgcagagatatgtgctactgatctccttggacaagcagaacacggttataattcacctgcaataatgattactaattcaagagatttagcaacagaaacaataaaagaaatagatagactgctcaaaattttaccaacaaaagatactgctggtgttagctggaaagattatggtgaaataattttatgtgaaagttatgatgagatgttaatgaaagctaatgaaatagcttcagagcatgttcaagttatgacagatagagatgaatggtttttaaaaaatatgacatcttatggagcactttttttgggtgcaagaacaaatgttgcgaatgagataaagtaat

SEQ ID NO: 205486 - DNA, 580 bp, Unknown
  Bacterial polypeptide expressing nucleotide sequence isolated from the Sargasso Sea
actgtcgtttgtgacaaattctcaaatccagagtgggttgcaagtgatttaattggacaagctgaacatgatattcttgcacaatgtattttgatttcaaaggataaaaatttgctagaaaaagtcaaaattgaaattaataaacaattaaaagaaattccaagagcttctgttgcaagaagaagtttaataaataatggaattcttatgtatatttcttcagacactaaaataataagtgttgtaaataaaattgcaccagaacatttagaattaaatatcaaaaattataaacagttagttccaaatataaaaaattcaggatcaatatgtttaggaaaatatgctgtaatggcaatgactgattataatgttggatcaaaccatgtgttaccaactaatggttctgcaaaatactcaagcggtattagtgtaaatgaattttataaaaggatttcatatgtaaacctatcaaaaaagggtattgaaagtcttggaccatcagttataacacttgcaaattacgaagggttagttggacacgctcaatctgtagtaaaacgaataaggagaaaataaa

SEQ ID NO: 205487 - DNA, 682 bp, Unknown
  Bacterial polypeptide expressing nucleotide sequence isolated from the Sargasso Sea
agacaattgtatggaaaagttggtattgatttatttgctggtccaactgaaacaatggttattgcagatgaaacagttgatggtgaaatatgtgcaactgacctattaggacaagcagagcatggatataattcgccagctgtcatgataacaaactcaagaaaacttgcagaagaaacgtttaaagaaattgatagaattttagaaattttaccaactaaagaaacagcaagtataagctggagagattatggggaaattattttatgtgacacctatgaagagatgttatctaaagcaaatgaagtagcttcagagcacgttcaagttatgacaaaaaaagatgattggtttttagaaaatatgacgtcttatggtgctttatttttgggtgctagaactaatgttgctaacggtgacaaagttataggcactaaccatacacttcctactaaaaaagctggaagatatactggcggtttatgggttggtaagtttattaaaacacacacttatcaaaagattacgaccgatgaagctgcaactctcatcggagaatatggatctaggctttcacatttagagggttttataggtcatgcagaacaatgtaatgtaagagtaagaagatatgggaaaaaaaatgttggatatggaaaaccagcaggagagaaaatttagt

SEQ ID NO: 205488 - DNA, 394 bp, Unknown
  Bacterial polypeptide expressing nucleotide sequence isolated from the Sargasso Sea
tcaattaaaaaaattaaaaaagatttatcaaaaaagaaaataattgaaaaaagtttaaataataatggaattatcgctttggtcgataatatagaacttgcttcagaaatcataaattttgttgcaccagaacatttacatattcacatttctaataataaaaaattattatcgaatataaataatgctggcggtatatttttaggtgaatactctgtcgaagcttttggtgattatattgtaggaactaaccatgtattgccgacatcaggagcggcaaaattttcatcaggtttaggtgttttagattttatgaaaagaacctctgttgttgatatgaataaaaaatcttttaatgctctttcggaagatactaaaaaaatgtcaggacttg

SEQ ID NO: 205489 - DNA, 463 bp, Unknown
  Bacterial polypeptide expressing nucleotide sequence isolated from the Sargasso Sea
gttccagaattaattgccgatttaccagaattaccaagggaaaattcagaagctgcttggagagattatggcgaagtaatcctttgtgacactgatgaagaaattgcaaaagttagtgatgaatatgccccagaacacttagaagtacaaaccaaaaatcttaaatggtttcatgatagattaaaaaattatggatcattatttgtaggtgaagaaacaactgtagcttatggagacaaatgttcaggtactaatcatatattgccaacaaaaggtgcagcaaaatataccggtggattatttgttggtaaatttattaaaacattaagttttcaaagaatgacaaaagcttcgacaaaagaagttggggctgcttgtgcaagaatttctagatatgaaggtatggaagctcacgcaagaactggcgacgtaagactcagaaaatatggtttttcaaattaaa

SEQ ID NO: 205490 - DNA, 946 bp, Unknown
  Bacterial polypeptide expressing nucleotide sequence isolated from the Sargasso Sea
gatattaattatgtagataagttaaaaaataaaatacattataaaaatgttgttatagatagtgtaggtttatatgtgccatcaaatttaccttcaacagcacttatggtaggagtgcctgcaaaaatagctggtgttaaaaaaattgttcttgcaaacccaagacataatggaaagctaaatccagcagttatgtatgtttgcaaaaagcttgggataaaaaatattttgagtattggtggtgcacaagcaatagcaagtatggcatatatttataaaacctcaaaaatatttggaccaggaaaccattttgtagcgaaagcaaaacaattagtatttggtaatgttggaattgagggtgctataatgggaccatcagaggtaacagtcgttgcagatagcaaaactgatattaatcaagctattactagcattgcagcgcagcaagaacatggattaaattctcaaagtattcttattagcaaagataaaaaatttattaaaatttttaaagaaagaatttttaaagaaataaaatcttttccgagaaaaaaaattattagacaaggtttgataaataatggacttataatttatgcaaaaaaagaaagtgatataatagaagcaataaatattatatctccagaacatctcgaatttttgaataaagactataataaatatatacacaaaatcaaaaatgcaggatgtattgctcttaataaatatagtccagttgccgcaagtgattatgttgttggagtcaatcacacgttaggagttatgggttcctcaaaatttgcttcaggtttaaatttgagtgactactataaaaaaattagtgtattttctttaacaaaaaaaggtattgaagttattggtaagaaagctataactcttgccgagtatgagggtttaaaatttcatgctcaaagtataaaatcta

SEQ ID NO: 205491 - DNA, 500 bp, Unknown
  Bacterial polypeptide expressing nucleotide sequence isolated from the Sargasso Sea
aactagtaaagaattagctgaaaaagtaatgaaaagagttccagaattgattgcagaacttccagaagttccaagaacaagtgctgaagcagcgtggagagattatggtgaagtaattctttgtgacactgatgaggaaatagtgaaaattagtgacgaatatgcacctgaacatttagaagtacagaccgaaaacttagaatggtttcatgaaagattaacaaattatggttcgttgtttgtgggtgaagaaacaactgttgcatacggcgacaaatgttctggtacaaatcatattttaccaactaaaggtgctggaagatacacgggcggattatttgttggaaaatttattaaaactttaagctttcaaagaatgacaaaagagtctactaaattagttggtgccgctgcagctagaatttctagatatgagggaatggaagctcatgcaagaacaggagatgtaagacttagaaaatatggtttttctaattaat

SEQ ID NO: 205492 - DNA, 844 bp, Unknown
  Bacterial polypeptide expressing nucleotide sequence isolated from the Sargasso Sea
atgtcaattaaatacttaaaaaaatcaccaaaaacttcatctaccgatgatttaaaaacaagagaaatagttcaaaatcttcttaatgatttagaaaaatcaagagaagatggttgtaaagaactgacaaaaaaatttgataaatatgatggtgaaattattgtttcaaaagaaaagattgaggaaataaaaaaatcactagatcaaaaaacaaaagacgatattaaattttcttatgacagagtaagaaagtttgcagaagctcaattaaaaaattatggacaggattttgaagtagaactttcaaaaggtttatatgcaggacaaaagttaattcctgttaatactgcgggctgttatgtgcctggtggaagatacgctcacatagcttctgctgtaatgagtgtaacaacagcaaaagttgctggtgttaaaaatattattgcatgtagtcctccaaaagaaagtgttggtgcacaccctgctattgtttatacagctgatttatgtggagctgatgttatattaaatttaggtggtgttcctgcaattgctgcaatgacttatggaatgttcggtaattcaccagctgatattttagttggtccaggaaaccaatttgttgcagaagcaaaaagaattttgtttggtaaagttggaattgatttatttgctggccctactgaaattgctgtaatagctgatgaaacagcagatccagagattgttgctgttgatttagttggtcaagcagaacatggatataattctccagcatggttgtttaccacaagtaaaaaagttgctgatgaagtaataaaaagaatgccagaattaattgcag

SEQ ID NO: 205493 - DNA, 904 bp, Unknown
  Bacterial polypeptide expressing nucleotide sequence isolated from the Sargasso Sea
atgacaattaaatatttaaaaaaggcttctaaaacagcttcaacggatgacactaaaactaaagagattgttcaaaatcttttaaaagaacttgaaaattcaaaagaggaaggttgtaaagaattaacgaaaaaatttgataaatatgatggtgaaataattgtctctaaagaaaaaattgaggatattaaaaagaaattagatcaaaagactaaggacgacattagattttcttacgatagagttaaaaaatttgctgaagcccaattaaaaaactatggacaagactttgaggtagaactttcaaatggattgtatgcaggacaaaaattggtccctgtaaatacagctgggtgttatataccagggggtagatatgcgcacatagcttcagctgttatgagtgtaaccactgcaaaagttgctggagttaaaaatataatcgcttgcagtcctccaaaagagaatataggtgcccacccttctataatttatacagcagacttatgtggcgcagatgtaattttaaatttaggtggtgtaccggcgatagctgcaatgacttatggtttatttggtaatgcgcctgcagatattttagttggacccggaaatcaattcgttgctgaagctaaaagaattttgtttggtaaagttggtatagatttatttgctggaccaacagagattggaattatagctgatgaaactgcagatccagaaattgttgcagttgacttagtaggacaagctgagcatggttataattcacctgcttggttatataccacaagtcaaaagttagctgatgcggtattgaaaagagttcctgaattaattgatgaattaccagaagtgccaagattaagtgctgaagcagcatggagagattatgtgaagtatt

SEQ ID NO: 205494 - DNA, 707 bp, Unknown
  Bacterial polypeptide expressing nucleotide sequence isolated from the Sargasso Sea
atttgctcaggaacaagttagatcatttgctgtagcacaattaaaaacattaaatgagatggaaatagaaactcaaccaggtgttattcttggtcacaaaaatattcctgttcaagctgtcggatgttacgtacccgctggaaaatttccaatggtagcatctgcgcatatgtcagttgttacagcatcagttgcagctgtaccaagaattatagccacaacgccaccttttgaaggaaaaccaaatcctgcggtagtaacagctatgaaaatgggaggtgcgcatgagatatatgttttaggtggcatgcaaggagttggtgctatggctatcggaacagaaacaattaaagctgtagatatgctcgttggaccaggaaatgcatatgttgctgaagctaagagacaattgtttggtaaagttggtattgatctatttgctggacctacagaaactatggttatttgtgatgatactgtagatgcagagatatgcgctacagatttactcggtcaagcagaacatggctacaattcccctgctataatgataacaaactcaaaaaaactggcacaagaaactcttaaagaaatagatagactcctagaaattctacctacaaaagatacagcaagtgtaagctggagagagtatggtgaggtaatttattgtgaaacttatgaagagatgttgttaaaagctaatg

SEQ ID NO: 205495 - DNA, 484 bp, Unknown
  Bacterial polypeptide expressing nucleotide sequence isolated from the Sargasso Sea
tatctcaaagaataaagaattaattgataaagttcaaaaagaaataaaaatacagttacaaagtttaccacgtagaaaaattgcatcaggtagcttaaaaaaaaatggtttattaatttttgcaaattcagataaaaaaatttccaatattataaacattatagcaccagagcatttagaacttagtgtagacaaatataaatctattttaaaaaatgtaaaaaacgcaggatcaatatgcacgggaaaatattcagcaatggccgtaaccgactattgtgcgggtagtaatcacactttgccaactcactcttctgcaaaatttttcagcggactgtctgtttttgatttttttaaaagaatttcttacataaatttatcaaaaaagggtattgaaactattggtgaaaaagttataaatcttgcaacttatgagggtttagatggacacgctaaatcggttaaattaagaataggagaataa

SEQ ID NO: 205496 - DNA, 517 bp, Unknown
  Bacterial polypeptide expressing nucleotide sequence isolated from the Sargasso Sea
acatgataacaatgctcagtctatattaataaccgatagtgaattatttcttaataaagttcagcacgaaataattagattgtcttccaagctttcaaaaaagaaaattattgaaactagtttaaaaaataatggtttgattatactagttgatgatttaaatgaatctcatgaaattataaattatattgctcctgaacatctgcatttgcacactaaagaacaaaataatttattatcaaatgttaaaaatgctggctgtatttttttaggtgaattagcttctgaagcttttggagattacatagtagggacaaatcatatactgcccacatcaggagctgcaaaattttcatcaggtcttagtgtaactgattatatgaaaagaagttcagtcgttcaaatgaatcaaaatagttacaataatcttcataaggatgcagaacaaatggctgaagttgaaggcttggatgctcataagctttcagttaaaattagacaaacatcagaaaattaa

SEQ ID NO: 205497 - DNA, 828 bp, Unknown
  Bacterial polypeptide expressing nucleotide sequence isolated from the Sargasso Sea
gatattaaaaaaaataaatttaaagctttaattaaatatgagaaaaagtttagcaataataaaaaaataaatccaacgcaaaaagaaataaatcaatcaattaaaactttagatcccaaggtaaaaaaagccattgattttgcttattctagaatatttaaatttcactctttgcaaaaaacaaaaaactttaaatttgtggactattataaaaataaaattgaatataagcatgtaccgattcaaaaaattggagtttatgttccttccaatctcccatcaactttattgatgaatgttgttcctgcaaaaattgcaggagtaaaaagaattgttttagcaaaccccacactaaatggaaaattgaattcagcagtaatgtatgcagcaaaaaaatgtggtgtacatgaaattattacttgtggtggtgctcaagcaattggaagtttagcatatattcaaaaagtaaataaaattattggtcctggtaatgattatgttgcaaaagcaaaacaattagtatttggaaatgttggaaccgaaagtatgatagctggtccgtctgaaatttgtgttgttgcagataaaaaaacgaatcttaatgatattaccacttctttattaggacaatcagaacatgatgaaaattcgcaaagtattttagttacaaaatataaagatttaatttataaagttcaaaatgatataaagattaatataaataaattgcctagaaaaaaaattgtttcaaaaagtcttaaaaaccatggtcttataatcttatgtcaaaatgataaacaaataattgatgtaattaatgaaattgca

SEQ ID NO: 205498 - DNA, 817 bp, Unknown
  Bacterial polypeptide expressing nucleotide sequence isolated from the Sargasso Sea
tcgttgtttccctcctgattccaatggaaaaattgatccaatgactataactgtagctcaaaattgtggagcagaaatttacaaaatgggcggtgcacaagcaattggggctcttgcatatggaaccaaatctttacctaaagttgataaaatagtaggccctggtggaaaatttgttagtattgccaaagctattgttagtgaagaaacctcgatagatatgattgcaggccctacagaacttggtattatagcagatacaagctcaaatcctgaattaatcgcatatgatctgatctcacaagcagaacacagtaatgatactacctgctttgtaattaccacgtctagaaatctggcaaaacaaattcagaaatcacttgaaaagataattcctgatgtagaaagaaattctattgtaaaacagagtattacaaaaaatggattcattgcaatatgtaaaaatcaaaatgaaataattgaattagcaaataaaattgccccagaacacatagaattgatggtaaaaaatggaagagcactatcaaaaaaaattactggacctggattagtcttaattggaagtaatactccttcatcagctagtgattatcttctaggaacaaatcacatacttccaactagtggatttggtagagtgagaggtggattatctgttttagactttctaaaattacaaagtatagttcaaacaaaaaaatctgatctatcaaatatcgctaaaaaattaaaaacactaacagatgctgaaggattaccgaatcactacaaagcagtagaaaggagattgaaatga

SEQ ID NO: 205499 - DNA, 508 bp, Unknown
  Bacterial polypeptide expressing nucleotide sequence isolated from the Sargasso Sea
gttgttcacaacaagtaaaaaagttgcagaagatgtaataaaaagaatgccagaattaattgcagagttaccagaagttccaaggatgagtgcagaggcagcttggaaagattatggagaagtaattctttgtgacactgacgaagagatggcttcaataagcgatgagtacgcaccagaacatctagaagtgcaaactaaaaatttaaaatggtttcatgatagattaaaaaattatggttcgttatttattggcgaagaaacaacagttgcttatggggataaatgttcaggtactaatcatattcttccaactaaaggtgctggtcgatatactggaggtttatttgttggaaagtttataaaaacattgagttttcaaagaatgacaaaagaatctaccaaagaggtgggtgcagctgcagcaagaatttcaagatatgaaggcatggaagctcatgcaagaactggggatgtcagattaagaaaatacggtttttcaaactaa

SEQ ID NO: 205500 - DNA, 883 bp, Unknown
  Bacterial polypeptide expressing nucleotide sequence isolated from the Sargasso Sea
acttttaaatgaacttgaaaagtctagagaagatggatgcaaagaattaacccaaaagtttgataactatgatggagaaataattgtttcaaaagaaaagattgaggaaattaataaatctctaaaagaaaaaactaaagatgatattaagttttcatatgatagagttaaaaaatttgctgaagcacagttaaaaaactatggtcaagattttgaggttgaactttcaaaaggtttatatgctggtcaaaaattaattcctattaacactgcaggttgttatatacctgggggaagatattcacatatagcttcagcagttatgagtgttaccactgcaaaagttgctggagttaagaatattattgcttgcagtcctccaaaagaaggggttggggcaagtccctcagttatttacacagccaatttatgtggagccgatacaatattaaatttagggggtgttcctgcaattgcagcaatgacatatggtatgtttggtaatgaacctgcggatatgttggttggtcctggaaatcaatttgttgcagaggctaaaagaattttgtttggtaaagttggtatagatttatttgcaggccctactgaaattgcgattattgcagacgaaactgctgatcctgaaatcgtagctgtcgatttagtaggacaagcagaacatggttataattcacctgcatggttatatacaacaagtaaaaaacttgcggatgaggtaatgaatagggttccgcaattaatttcagaactacctgaattacctaaaacaagtgctgaagctgcatggagagattatggagaggtaatactttgtgaaaacgatgaggagatggcaaagataagtgatgaatatgcgccagaa

SEQ ID NO: 205501 - DNA, 313 bp, Unknown
  Bacterial polypeptide expressing nucleotide sequence isolated from the Sargasso Sea
gaacatttacatttacaatgtaaatataataaacaaattataaaaaaagtttataattcaggtgctatctttgaaggaaaatattctgcagaagctttgggtgattatataattggcacaaatcatattcttccaactaatagaacatcaagattttcatctggattaaatgtattagattttatgactcgaaaatctataataaacgtgagcaaaaagggttttaatttactttctttgcatacaaaaaatatggctgaagtagaaggtttagatgcgcataagttatctattcaaattcgagaaaaataag

SEQ ID NO: 205502 - DNA, 884 bp, Unknown
  Bacterial polypeptide expressing nucleotide sequence isolated from the Sargasso Sea
aactttgtcaaaaaaatttgatcatttttctccacctaattttaaattatctgaagatgaaatatctcaattaatgagtgagatctcagatgaagatatggatgatattaaatttgctcaaaaacaagtaaggtcttttgctgaggcacagctaaaaacaataaatgaacttgaagtagaaatacaacctggtgtaatcttaggccataaaaatattcctgttcaagctgtcggttgttatgttccagctggaaagtttcctatggtagcatctgctcatatgtcagttgttactgcgtctgttgctggtgtcccaagaatagttgcaacaactcctccatttcaaggtaaaccaaatccagctgttgtcacagcgatgaaacttggtggggctcatgagatatatgttttaggaggtatgcaaggtgtaggcgctatggcaataggcactgaaactataaaaccggttgatatgctagttggtccaggaaatgcttttgtagccgaagcaaaaagacagctatttggaaaagtaggtatcgacttatttgctggccctactgaaactatgataattgctgatgattcagttgatggtgaaatttgtgcaactgatttattaggtcaagcagaacatggctataactcaccagcagtaatgattactaattcaagaaaacttgctgaagaaacaaaaaatgaaataaaaagaatattagaaattttaccaacaaaagacacggcaggtgtcagttggagagattatggtgaaataattttgtgtgatacctataaagaaatgttggataaagcaaatgaaactgcctctgaacatgttcaagtaatgactgatagagacgattggttcttaaataatatgacag

SEQ ID NO: 205503 - DNA, 889 bp, Unknown
  Bacterial polypeptide expressing nucleotide sequence isolated from the Sargasso Sea
gatatagaaaagaccaaagaagaaggttgtaaattactttcaaaaaaatttgataaatatgaaggtgatgtagttatttcaaaagaaaaaattgaagaaattaaaaaaaatttagaccaaaaaactaaagatgatattcaattttctcatgaaagagttagaaaatttgctgaagcgcagcttaaaaattatggacaagattttgaggttgaattatctgaaggcttgtatgctggtcaaaaattaatccctgttaatacagcaggatgttatgttcctgctggtagatatgctcatatagcatctgcagtaatgagtgtaacgacagcaaaagttgcaggagtaaaaaatataattgtatgtagttctcctaaacctggtgtaggtgtgcatccttctattgtttatacctcagatttatgtggagctgatgttattatgaatttaggaggagtccaagccattgctgcaatgaccaatggtttgtttggaaatgctccagcagatattttggttggcccaggaaaccaatttgttgcagaagcgaaaagattgctttttggaaaagttggtattgatttgtttgcgggaccaactgaaattgctgttatagctgatgaaactgcagatgcagaacttgtagcatttgatttagttggacaagctgaacacggatataattctcctgcttggttatttactactagtaaaaaattagcagactatgttatgaaaagagttccagaattaattgccgatttaccagaattaccaagggaaaattcagaagctgcttggagagattatggcgaagtaatcctttgtgacactgatgaagaaattgcaaaagttagtgatgaatatgccccaagaacacttagaagtacaa

SEQ ID NO: 205504 - DNA, 604 bp, Unknown
  Bacterial polypeptide expressing nucleotide sequence isolated from the Sargasso Sea
agatttaattgcaggaccttctgaaataattgttctagcaaataaagataataatcctagttgggttgcagctgatctaatggctcaagctgaacatgatattaatgctcaatcgatattaattacagataatttaaaattttcaaaaaaagttttagaagagattaataatttagtaaaaaaaacttcaaaaaaaaatataattaagcaaagtttaaaaaaaaatggcctcataatattggtaaatagaatttcagaaagtatagatattataaattatattgcaccagagcatttacatttgcaaattaaatcttataaaaaattattacctaaaattaataatgctggaggaatatttttaggagaatattctgcagaagcatttggagattatatagtaggcactaatcatattttgccaacatctggttctgcaaaattttcttctggtttgggagttctagatttcatgaaaagaaattcaattgttgaaatgaattctaagtcatacaatactttaaaaaaagatactgaaaatatggctaatattgagggccttgaagcacataaattgtcagttaaaattagacaaaataaataa

SEQ ID NO: 205505 - DNA, 481 bp, Unknown
  Bacterial polypeptide expressing nucleotide sequence isolated from the Sargasso Sea
atgataaaagaaattaactgtaataaaaaaaactatttaaatattttaacaaaatttttagaccatagaaggtctggaaaaaaatcagaaaataaaatcatatctaaaattcttaatgatattaagaaaaataaaattaaagcgcttattaaatatgaaaaaaaatttagcaaaaacactcaaattaagccaagcattaacgaaataaataatgcaattaaatttctcgatcctaatattaaaaaggctatagattttgcatataaaagaatccttaattttcacaatactcaaaaaactaagaatattttttataaagataatttaaataataaaatagaatacaagtatgtaccaatccaatcagttggagtatatgttcctgcaaacctaccatctacattattgatgaatgcaattcctgcgaaaattgcaggtgtcaaaaaaattgtactagcaaatccaaaaaataatggaaaat

SEQ ID NO: 205506 - DNA, 865 bp, Unknown
  Bacterial polypeptide expressing nucleotide sequence isolated from the Sargasso Sea
gtagtagcgtatggggaagaaatcaaagtaggtgactcagcaaagaaccaggctgtgactaatgcggccaatactttatatgccattaaaagacttataggaagaaaacatagcgatgacgttgtcaagaaagattctgacatggtcccttacaaaataatctcagctgaaaacggagatgcatgggtggaagccgaagggaagaaacttgcacctcaacaagtttctgcagaaattttaaagaaaatgaaaaaaacagctgaggattatttgggtcaagaagttaaggaggctgtaattacagtgcctgcatatttcaatgattctcaaagacaagccacgaaagatgctggaaaaatcgcgggccttgaagtgaagagaatcataaatgaaccgacggctgcagctcttgcatatggcctcgataaaggtaaaggagatcaaaaaatagcagtttacgacttagggggtggtacctttgacgtatccattatagaaatagctgaacttgatggtgagcatcaattcgaagttctatcaaccaatggagatacattcttaggtggagaagacttcgatatcgctctcatcgactatcttgcggatgaattcaaaaaggaatctggattggacttacacaatgactcggctgctttgcaaagactaaaagaagctgcagaaaaggctaaaatagaactatcaagcaatcagcaatcagagataaatcttccctatataactgcagattcatcgggtgctaaacattttgtccacaaactaacaagagcaaagcttgaatctctggtagaagggcttgtagataggactatcaagccgactgaaacggcacttaaagatgcaggcc

SEQ ID NO: 205507 - DNA, 532 bp, Unknown
  Bacterial polypeptide expressing nucleotide sequence isolated from the Sargasso Sea
acatggctataattcacctgcttggttgtttactaccagtaaaaaattagctgaagatgttataaaaagagtacctgaactaattgcagatttaccagaactacctaaacaaagtgcaggggatgcatggagagattttggtgaagttattctttgcgatactgatgaagaaatggcaaaaattagtgatgaatatgcaccagagcatttagaagttcagacaaaaaatttgaaatggtttcatgaaagattaaaaaactatggatctttatttataggtgaagaaacaacggtagcttacggtgataaatgttcaggaacaaaccatattcttccaactaaaggtgctggaagatatacaggtggattatttgtaggtaaatttattaaaacactaagttttcaaagaatgacaaaagagtctacaaaagaagttggtgctgcagctgcaagaatttctagatacgaaggaatggaagctcacgcgagaactggcgatgtaagacttagaaaatacggtttttcaaattag

SEQ ID NO: 205508 - DNA, 731 bp, Unknown
  Bacterial polypeptide expressing nucleotide sequence isolated from the Sargasso Sea
aatggcgaaagtaattggaattgatttaggcacaacaaattcatgtgtgtccgtgatggagggtgatcaagctaaagtgattgaaaactctgaaggcaagaggacaacgccttcggtagtagcctatggggaagaaattaaagtaggagattcagctaagaatcaagcggtaactaatgctgaaaatactctttatgctattaaaaggttgataggaagaaaacactctgacgatgtcgtaaagaaagattctggcatggtcgcttacaagatcatatcagcagaaaatggagatgcttgggtggaggcagaaggcaagaaattagctccacagcaagtttcagccgagattcttaagaaaatgaagaagactgctgaagattatctgggtcaagaagtaaaagaagcagtaataactgttcctgcctattttaatgactcgcaaagacaagcaacaaaagatgcaggaaagattgccgggttagaagtgaaaagaataattaatgaacccacagcagcagccttagcttatggcttagataaaggaaagggcgatcagaagattgctgtttatgaccttggtggaggtacatttgacgtatctattattgagatagctgaagtcgatggagaacatcaatttgaagttctatccaccaatggggacacttttctcggaggggaagacttcgacattgctctaatagaatatctggctgatgaattcaaaa

SEQ ID NO: 205509 - DNA, 235 bp, Unknown
  Bacterial polypeptide expressing nucleotide sequence isolated from the Sargasso Sea
gtcgaggaaatagcaaaagtaagtgatgattatgccccagagcatttagaggtgcagacaaaaaatttacaatggtatcatgatagactaaaaaattatggctctttgtttataggagaagaaacaacagttgcatatggtgacaaatgttcgggtacaaatcacattttcccaaccaagggtgctggaaaatatacaggtggtttatttgttggaaaattcatcaaaaccctga

SEQ ID NO: 205510 - DNA, 739 bp, Unknown
  Bacterial polypeptide expressing nucleotide sequence isolated from the Sargasso Sea
actgaattataaaaacagtttatctcttaaaaaattatcaacctttctcgagagaagaagatttgctgagaataaagatataggcatagttcagaatatattaaaagatataaaaaaaaataaagttaaggctttaaaaaaatacgagttaagatttggtaataatacacaaataaatatttcaaaagatcagattaaaaaatccataaaaaatttagatccaaaagtgaaaaaagcaatagattttgcatataaaagaatattcaattttcatctaaaacaaaaaaaaacaattggagatattttttatagggatagttatggaaataaattacaatataaaaatgttccaattagctccgttggattttatgttccaggtaatttaccatcaacactcttaatgaatactattccagctaaaatagcaaaagtaaaaagactagttttagctacacctaaaataaatggaatgttaaacccagcggtactttatgcagcaaaaaaagttggtattaacgaaatttactcaatgggtggtgcccaagctattgcaagcttagctttcatacagaaggttaataaaatagttggaccaggaaataagtttgttgctgaagcaaaaaaacaattatcaacaaatttagtaggcacagagtcaatgtactgcggggcctctgaaatttgtgttttagcggacaaatatactgatgtaaatcaaagttgctacctctctagt

SEQ ID NO: 205511 - DNA, 609 bp, Unknown
  Bacterial polypeptide expressing nucleotide sequence isolated from the Sargasso Sea
tatgaagatattaaatagtaaaagtaaaaattttgacaaattattagataatttgcttttacagagaaagaaaaaaatccaatcagactccgtttctgtaacaaatataattaaagatgttaaaaaacatggagataaagcattattaaaatacgaaaaaagattcaatcaaaacaacataattattccaagctcaaaacaaataaataaatctataaactcacttgataaaaaagtaaaaaaagcaatcgatatggcttataatagaatttataaatttcattcacttcaaaaatttaaaaatattacttatacagataaattaaaaaacaaacttgaatataaatatgtgcctttagagtctgttgcaatttatgttcctggttctactgcttcatacccatcaagtgtgttgatgaatgctgttccagcaattgtagcaggtgttaagagaatagttatgattaatccaggctataaaggaaaacaaaatccagccgtattatacgctgcaaaaaaatgcaaaataaaagagatttattccattgggggcccttctgctattgcagcagtatcttatgggactaaaaaaattaaaaaagttaataa

SEQ ID NO: 205512 - DNA, 874 bp, Unknown
  Bacterial polypeptide expressing nucleotide sequence isolated from the Sargasso Sea
atggcaattacatacttaaaaaaatcaccaaaaacatcatcaactgacgacacaaaaacaagagaaatagtggaaaatattctaaaagatattgagactagtaaagaagaaggctgtatggaactttcaaaaaaatttgataaatatgaaggtgatgtaattgtttcaaaagaaaaaattgaagaaataaaaaaaaatttagatcaaaaaactaaagatgatattcagttctctcatgaaagagttagaaaatttgctgaagcacaattaaaaaattatggtcaagactttgaagttgaattatctgacggtttatttgctggacaaaaacttattcctgtaaacacagcaggttgttatgtgcctgctggaagatatgctcatatagcttcagccgtaatgagtgtaacaacagcaaaagtagctggtgttaaaaatattctagtttgtagttcacctaaacctggagttggagtacatccatcaattgtttatacagctgacttatgtggagctgatgtgataatgaatttaggtggtgtacaagctattggagcaatgacaaatggattatttggtaatgcacccgcagatattttagttgggcctggaaaccaatttgttgcggaagcaaaaagaattttatttggaaaagttggtatagatttatttgcaggacctacagaaattgcagtaattgcagatgagacagctgacccagagatggtagcatatgacttagttgggcaagctgagcatgggtacaattcacctgcttggttatttaccaaaagtaaaaaggttgctgattatgttatgcaaagagttccagaattaattgctgatttgccagatctaccgagagaaaattcag

SEQ ID NO: 205513 - DNA, 796 bp, Unknown
  Bacterial polypeptide expressing nucleotide sequence isolated from the Sargasso Sea
acaagggatattgttcaaaatttacttaatgacctagagaaatctaaagaggaaggttgtaaagaattaacaaaaaaatttgacaagtatgagggtgaaataattgtatccaaagataaaattgaggaaataaaaaaaaatttagatcaaaaaacaaaggatgatattaaattttcttatgaaagagtaagaaaatttgctgaggctcaacttaaaaactatggaaatgatttcgaagttgagttatctgatggtttgtatgctggtcaaaaattaattcctgttaatactgcgggttgttatattccaggtggaagatatgctcatatagcttcggcagttatgagtgtaacgactgcaaaagttgctggagtaaaaaatgtaattgcatgtagtccaccaaaagctgaggtgggagcccaccccactattatatatactgctgatttgtgtggtgcagatgttattttaaatttaggcggagttcctgctatcgctgcaatgacatacggtttatttggtaatgctccagcagatattttagttggtccaggtaatcagtttgtagctgaagcaaaaagaattttatttggaagagttggaatagatttatttgctggtcccacagaaattggaattattgcagatgaaactgctgatcctgagatagttgcagtagacttagttgggcaagctgaacatggttacaactctccttgttggttatacactacaagtaaagagcttgctgaaaaagtgatgaaaagagttcctgaattaatttcagagttacctg

SEQ ID NO: 205514 - DNA, 832 bp, Unknown
  Bacterial polypeptide expressing nucleotide sequence isolated from the Sargasso Sea
aatggcaatcacttatataaaaaaatctccaaaaacttcatcgactgatgattcaaaaacaactagtattgttcaagatctattaaaagatattgaaaaaactaaagaacaagggtgcataaatttaacaaaaaaattcgataaatacgatggcgagataattttatctaaggaaagaattgacgaaattaaaaaaaatttaaatcagaaaactaaagatgatattcaattttcttatgatagagttagaaaatttgctgaagctcaattaaaaaactacggtcaagattttgaagtagaactttctaaaggtttgtttgctggtcaaaaattaataccagttaatactgctggatgttacattccaggtggaagatatgcacatatagcttctgcggtaatgagtgttactacagccaaggtagcaggtgtaaaaaatattattgcctgtagccctccaaaaaaaggtattggtgcccaccctacaattgtttacacagctgatctttgtggtgcagacgttattttaaatttaggtggtgttccagctattgctgcaatgactaatggactatttaaaaatccacctgcagatattattgtaggtccagggaatcagtttgtagcagaagcaaaaagaattttatatggcaaagttggtattgatttatttgctggtccaactgaaattggaattatagctgatgcgaaagctgatcctgaaattgttgctgttgatttagttggtcaagctgaacatggatacaattctccttgttggttatatactacaagtaaagatcttgcagaaaaagttttaaaaagagttcca

SEQ ID NO: 205515 - DNA, 625 bp, Unknown
  Bacterial polypeptide expressing nucleotide sequence isolated from the Sargasso Sea
atgaaaatacttaatagtactaataataattttaacagttcactaaataaattacttttgcaacgaaaaaagaaagttcaatctagctctatctctgtgactaatattgttaaagatgtaaaaaaaaatggtgataaagcattattgaaatatgaaaaaaaatttaatcaaaacaaaataattgttccaagccctaaacaaattagtgcttcgataaaatccttaaatcaaaaagtaaaaaaagcaattgatattgcatataatagaatttacaaatttcactctcttcaaaagtttaaaaatatttcttatatagataagtttaaaaacaaactagaatataaatatttacccttagactccgttgctatatatgttcctggttcttctgcatcttatccatctagtgttttaatgaatgctattccagcaattgtagctggtgttaaaagattaataatgattaacccaggtttcaaaggaaagcaaaatccagcagttttatacgcagccagaaaatgcaaaataaaagaaatttattctatcggcggcccttccgcagttgcagccgctgcttatggaactagaaaaatcaaaaaagtcgacaaaattataggtccaggaa

SEQ ID NO: 205516 - DNA, 468 bp, Unknown
  Bacterial polypeptide expressing nucleotide sequence isolated from the Sargasso Sea
aaagagttccagagcttattgcagatctgccagatttaccaagagaaaactccagtgctgcttggagagactatggtgaagttattctttgtgacacagacgaggaaatggctaaaataagtgatgaatatgcccctgagcatttagaaattcaaactaaaaatcttaaatggttccatgacagattaaaaaattatggatcattatttattggagaagagactacagttgcttatggtgataaatgttctggtacaaaccacattttacctactaagggtgcaggaaaatatactggtggtttgtttgttggaaaatttattaaaacattaagttttcaaagaatgactaaagagtctacaaaagaagtaggagcggcatgtgctagaatttcaagatatgaaggtatggaggctcatgcaagaactggggatgtaaggcttagaaaatatggattttctaattagt

SEQ ID NO: 205517 - DNA, 742 bp, Unknown
  Bacterial polypeptide expressing nucleotide sequence isolated from the Sargasso Sea
ggtacaaaaaaaataaaagctgttgatatgttagttgggccttgtaatgcttatgttgctgaggcaaaaagacaactttatggaagggtgggcatagatttatttgctggccctactgaaactttgattatagctgatgaaacagtagatggagaaatatgtgccacagatctattaggtcaagctgagcatggctataattctccctgtatacttgtaactaactcagaaaaacttgcaaatgaaacaattattcaagttgataaacttctcaaagtgcttcctactaaagaaacagcaggtcaaagttggaaaaactttggtgaagtaattttatgcgcagattttgatgaaatgttagaagtttctaatcaaatttcatcagagcatgtccaagtaatgaccaaaaatgatgatttctttctaaataaaatgagaaattatggggcactttttctaggtccaagaactaatgtttcaaatggagataaagttattggtactaaccatactttaccaacgaaaaaagcaggacggtatactggtggattatgggttggtaagttcataaaaactcatacttaccaaaaaatattaactgatgaagctgcagtaaaagttgcggagtattgctctaggttatgcatattagagggtttcattgggcacgcagagcaagcaaatatcagaataagaaggtatggagggaaagatattccatatggtgaggcttctgattgat

SEQ ID NO: 205518 - DNA, 373 bp, Unknown
  Bacterial polypeptide expressing nucleotide sequence isolated from the Sargasso Sea
aatgtatgtaaattcggataaaaaaataattaaaattgtaaataaaatcgcaccagagcacttagagttaaatatcaaaaattataaatcttatgttcctaaaattagaaatgctggatctatatgtttgggaaaatatgctgtgatggctatgactgattacaatgttggctccaatcatgtcttgccaacaaatggatctgcaaaatattcgagcggaattagtgttaatgaattttacaaaagaatttcttacataaacctatcaaaaaagggtattgaaagtcttggaccatcagttataacacttgcaaattacgaagggttagttggacacgctcaatcagtaatcaaaagaattaggagaaaataa

SEQ ID NO: 205519 - DNA, 858 bp, Unknown
  Bacterial polypeptide expressing nucleotide sequence isolated from the Sargasso Sea
tatgaatattaattatttaaaaaaagcaaaaaaaacatcttcaacagatgatactaaaactagagaaattgttcaaaatttactaagtgagcttgaaaaaactaaagaagagggttgtaaaaaattaacaaaaaaatttgataaatatgaaggggaaatagttatttcaaaagaaaaaatagaagaaataaaaaaagatattgatcaaaaaactaaagatgacattaaattttcttacgatagagtaagaaaatttgctgaggcacaattaaagaattatggaaaaaattttgaagttgaattatcagacggtttgttcgccggacaaacgctgattcctgttaatactgctggttgttatgttcccgctggaagatatgctcatatagcatccgcagttatgagtataacaactgcaaaagtagctggggttaaaaatattattgcttgtagctcacctaaaccaaacgtaggagcacatccaaaaattgtctatactgctgatctttgcggagcagatgtaattctgaacctaggtggagttcaagctatcgcagcaatggcttttggtttttttggaaatgaacgagctgatattttggtaggaccaggaaatcaatttgttgcagaagcaaaaagaatattatttggaaaagttgggattgatttatttgcagggcctacagaaatagcaatcatagctgataagactgctgacccagaaatagttgcgtatgatttagttggtcaagcagaacatggttataactctccggcatggttatatactacaagtaaagatttggctgataaggttatgaaaagagtaccagaacttattaaagatttaccagaact

SEQ ID NO: 205520 - DNA, 388 bp, Unknown
  Bacterial polypeptide expressing nucleotide sequence isolated from the Sargasso Sea
agttattctttgcgatactgatgaagaaatggcaaaaattagcgatgaatacgcgccagaacacttagaagttcaaacaaaaaatttgaaatggtttcatgatagattaaaaaattatggttctttatttataggcgaagaaacaacggttgcatacggtgataaatgctcaggaacaaatcatattcttccaactaaaggtgctggaaggtatacaggtggattgtttgtaggtaaatttattaaaacattaagttttcaaagaatgacaaaagaatctacgaaagaagttggagctgcacctgcaagaatttctagatatgaaggtatggaagctcatgcacgaaccggtgatgtaaggcttagaaaatacggttattcaaattaa

SEQ ID NO: 205521 - DNA, 533 bp, Unknown
  Bacterial polypeptide expressing nucleotide sequence isolated from the Sargasso Sea
tatgaatatattaaatagtaaaaataaaaattttgataaactattagaggatttgcttttacagagaaaaaaaaaaattcaatcaaactctgtttctgtaacaaatataattaaagatgttaaaaaaaatggagataaggcattattaaaatacgagaaaaaatttaatcaaaacaacgtaattattccaagctcaaaacaaataaaaaaatctataaattcacttgataaaaaagtaaagaaagcaattgatacagcttttagtagaatttataaatttcattcacttcaaaaatttaaaaatatttcttatattgataaattaaaaaataaactcgaatataaatacgtacctctagagtcagttgcaatttatgttcctggttctactgcctcatacccatcgagtgtcttgatgaacgctattccagcaattgttgcaggtgttaagagaattgttatgattaatccaggccacaaaggaaaaacaaaatccagctgtactatacgctgcaaaaaaatgcaaaataaaa

SEQ ID NO: 205522 - DNA, 763 bp, Unknown
  Bacterial polypeptide expressing nucleotide sequence isolated from the Sargasso Sea
atggctattacgtatttgaaaaaatctcctaaaacttcgtctactgacgataataagacaactggaatagttcaagatttactaaaaaaaattgaaacaacaaaagagcaaggttgtatcgatttaactagaaaattcgataagtatgacggggatataatagtgtcaaaagataaaattgaggaaattaaaaaaacgttagatcaaaaaaccaaagatgatattcaattttcatttgatagagttagaaaatttgctgaagcacaacttaaaaattatggacaagatttcgaggtagaactttctgatggtttgtatgcaggtcaaaaattagtacctgtaaatacagcaggttgctacatcccaggtggaagatatgcacacattgcttctgctgtaatgagtgtaactacagcgaaagttgctggagtaaaaaatattattgcatgtagtccccctaaagagggtgttggtgcgcaccctactattgtatatacagctgatctttgtggtgcagatgttatcttaaatttgggtggtgttcctgcaattgcagcaatgaccaatggattatttaaaaatcctcctgcagatataattgtaggaccaggaaatcagtttgtagcagaggctaaaagaattttgtatggaaaagttggtatagatttatttgcaggaccaactgaaattggaattatagctgatgctaaagctgatccagaaattgttgctgtagatttagtaggacaagcagaacatggat

SEQ ID NO: 205523 - DNA, 553 bp, Unknown
  Bacterial polypeptide expressing nucleotide sequence isolated from the Sargasso Sea
aatgattaaaatacttaattctaaatcaaaagactttaaaaaaaatttaaattattatttaagtttaagaagaagatattctgaaagcaaagtaaacatagtaagaaaaattgttaaagatgtaagaaaatacaaggataaatcaattattaaatatgaaaaaaaatttaataacataaaatttctatctaaaaaaaatttttatttttcaaatactgaaattaaaaaaaatataacaaagctggataataaagtaaaaaattcaattgatcttgcgtataaaagaatttctagttttcataagaaccaaaaatttaaaggttttaaaattaaggatagttataataatgttttctcatatagatcaaaaccaataagcaaggttggaatttatgttcccggaggaagagcaagttacccaagttctgtaatgatgaattctattccagcaataattgccggtgtaaaagaaatttatatgaccgtaccatcattgcatggtcagattaacccaggagttttatatgcagctaaaaaatgtaaaattaaaaaa

SEQ ID NO: 205524 - DNA, 834 bp, Unknown
  Bacterial polypeptide expressing nucleotide sequence isolated from the Sargasso Sea
tatggcagttaaatatataaaaaaagcatctaagacaccggagacggatgatcataaaacacaggccgctgtgcaagatatacttaatgatatagcaaagagaaaagaagaagcattacgggagctaaataaaaaatttgataagtatgagggtgaagtaattgtttctaaagaaaaaatcgaagaagcaattaaaaaagtcgatcaaaaaactaaagatgacgtgaaatttgctcacgatagaattaaaaagtttgcagaacatcaattaaaaagcatgaacaatggatttgaagttgaactatctaaaggattatttgctgggcagagattaatcccagttgataccgctggatgttatattcctggaggtagatatgcgcatatttcttcagccgtgatggctattactcctgcaaaagttgctggtgtaaaaaatataatttgtgctagcccccctaaagataaagatggagctaatcctgggataatttttgccgcaaatcattgtggagctgatgtgataatgaatttaggtggagttgctgcaataggatctttgactcacggttgttttaataacccaccagtagattttttagttggagctggtaatcagtatgttgctgaagctaaaagaattgtttacggaaaagttggtatagaccaatttgctggcccaacagaaattgcaattattgcagataaatccgcagataaagaaattgtagcagtggatttagttggtcagatggaacatggatacaattctcctgcatggctattcactacagataaagaattagcagattttacaatgaaaagagttccaga

SEQ ID NO: 205525 - DNA, 391 bp, Unknown
  Bacterial polypeptide expressing nucleotide sequence isolated from the Sargasso Sea
tgagataatattatgtgatactgatgaagaaatcgcaaaagtaagtgacgattatgcaccggagcatttagaagtacagacaaaaaatttacagtggtatcatgatagacttaaaaattatggttctttatttatcggagaagaaacaactgtagcttacggggataaatgttcaggtacaaatcatattttaccaactaaaggtgctggaaaatatacgggtggtttatttgtaggaaaatttatcaaaacacttagcttccaaagaatgagtaaagaagcaactaaagaagtgggagcagcttgtgctagaatttctagatacgagggcatggaagcgcacgctcgaacaggtgatgttagattaagaaagtacggtttttcaaactaa

SEQ ID NO: 205526 - DNA, 803 bp, Unknown
  Bacterial polypeptide expressing nucleotide sequence isolated from the Sargasso Sea
catggggcggatcgtcgggatcgatctggggaccacgaactcggttgttgccgttttggaggcaggccgccctcacgtgattgcaaacgccgagggtggcaggaccaccccatcggtggttggttacagcaaagaccaggaactgctggtgggacagctggcgagacgtcagctggtgctaagccctcgcaacaccttctccaacctcaagcgtttcgtgggacgcgactgggaggaactggaggacagcagccttgccgtgccttacacggtccgtgccaatgaccgaggtcaggtgcgcgtgccttgtcccgtgacggaacgggagtatgcgccagaggagctggtggccagcatcattcgcaagcttgtggacgatgccagcacctacctgggcgagaccgtcgaggcggcagtcgtcacggttccggcttatttcaacgacgcccagcgccaagccacccgcgacgccggtcgattggccggcatctccgttgagcgcatcctcaatgaacccactgctgccgcactggcctatggcttcgatcgcagcgccgttcgtcgcgttctggtgtttgacctgggtggtggcacgttcgatgtgtcgttgctccggatcgcgaacggagtgtttgacgtcaaggccaccaatggggatacacagcttggcggcaatgattttgatcagcggatcgtggactggatcgctgatgcctttcaggctgagcatggggtggatctgcggcgagaccgccaggcccttcaacgcttgaccgaagcggctgaaaaggccaagcaggaac

SEQ ID NO: 205527 - DNA, 772 bp, Unknown
  Bacterial polypeptide expressing nucleotide sequence isolated from the Sargasso Sea
tatggctataaaatatttaaaaaaatcaccaaaaacttcatctaccgatgactctaaaacaagagaaattgtagagaatattttaaaagatatagaaaaaaaaaaagaagaaggttgtaaagaacttggtaaaaagtttgacaaatatgatggcgaaataattatatctaatgaaaaaattgaggagataaaaaaaaatttagatcaaaaaacaaaagatgatattcaattttctcacgaaagagttagaaaatttgctgaagcacaattaaaaaattatggtcaagattttgaagttgagctttctgatggtttgtatgctggtcaaaaactaataccagttaatacagctggatgttatgtaccagctggaagatatgctcatatagcatcagcagtaatgagtgtaactaccgcaaaagttgctggggtaaaaaatataattgtttgtagttctccaaaaccaaacataggagtgcacccttcaattgtttatacagccgatttatgtggtgcagatgtaattatgaatttaggaggagttcaagctattgcagcaatgacaaatggattatttggtaatgctccagctgatattttagttggtccaggcaatcaattcgttgcggaagctaaaagaatattgtttggtaaagttggtatagacctttttgctggacctacagaaattgcaattatagctgatgaaaccgcagatccagaaattgttgcctatgatttagtcggacaggctgagcatggctataattct

SEQ ID NO: 205528 - DNA, 489 bp, Unknown
  Bacterial polypeptide expressing nucleotide sequence isolated from the Sargasso Sea
catgtttcgctggaatgaggaaaatcaacaagcacagcaggcggtacttacccgccctgctgttactgcaagtaaagaggttgaagctatttgcatcgatatcttaaatgcagttaaaactgagggtgacgcagcgttattaaaaatggcaaaagagtttgataagcgcgaaacacctcgcttattagtgccagttgaagaaataaaccaagctgagcagttattatcaaacgaattaaaagccgccatagaaacggcctatgccaatgtaaaacgttttcaccaagcacaattaccaaaagacattaagttaacaactcaacctggcgtattgtgtgaacttaaatatcaagccattgaagcggtaggcatttacgtgccaggtggcagtgctccactgccatcttcagtaaatatgcaaggggtgcttgcacagttaagtggtgcacaaaccgttgtgctaactacacctgtaaaaggccgacgaaa

SEQ ID NO: 205529 - DNA, 394 bp, Unknown
  Bacterial polypeptide expressing nucleotide sequence isolated from the Sargasso Sea
tggcgaagtaattctttgcgagactgatgaggaaatggcaactattagcgatgaatatgctcctgaacatttagaagttcaaactaaaaacttaaaatggtttcacagccgattaaaaaattatggatcattgtttataggtgaagaaacaacagtggcctatggtgataaatgctcaggcacaaaccatatacttccaaccaaaggtgcgggaaaatatacaggaggattatttgtaggaaaatttatcaagactttaagttttcaaagaatgaccaaagagtctacaaaagaagttggttcagctgcggctaggatttctagatatgaaggaatggaagcgcatgcaagaacaggggatgttaggcttagaaaatacggtttttcaaattaa

SEQ ID NO: 205530 - DNA, 949 bp, Unknown
  Bacterial polypeptide expressing nucleotide sequence isolated from the Sargasso Sea
aatgacaattaaatatttaaaaaaagcaactaaaacagcttcaacagatgacactaaaacaaaagagattgtacaaaatcttttaaaagaacttgaaaaatcaaaagaggagggttgcaaagaattaacaaaaaagtttgataaatatgacggtgaaataattgtttctaaagaaaaaattgaagatattaagaagaaattagatcaaaagactaaggacgacattagattttcttacgatagagttaaaaaatttgctgaagctcaattaaaaaattacggacaagactttgaagtagagctttcaaatggattgtatgctggacaaaaactagtacctgtaaatacggctgggtgttacatacctggcggtagatatgcgcacattgcttcagctgtcatgagtgtaactacagcaaaagttgctggagttaaaaatattatcgcatgcagtccaccaaaagaaaatataggtgcccacccttctataatttatacagctgacttatgtggtgcagatgtaattttaaatttaggtggtgtaccagcgatagctgcaatgacttacggtttatttggtaatgcacctgcagatattttagttgggcccggaaatcaatttgttgctgaagctaaaagaattttgtttggtaaagttggtatagatttatttgctggaccaactgagattggaattatagctgatgaaactgcagatcctgaaattgttgcagttgacttagtaggacaagctgaacatggttataactcacctgcttggttatatacaacaagtcaaaagttagctgatgcagttatgaaaagagttcctgaattaattgaagaattgccagaagttccaagattaagtgctgaagcagcatggagagattatggtgaagttattttgtgtgatactaatgaggaaatggtcaaagtaagtgacgac

SEQ ID NO: 205531 - DNA, 520 bp, Unknown
  Bacterial polypeptide expressing nucleotide sequence isolated from the Sargasso Sea
gcagaacatgataatttagctcaatgtatattgatttctaaagatgaaaatttaattaaaaaagtgaaaatagaaatttccaatcaactaaaggatatttctagatcttcaattgtcaaaaaaagtttatctaaaaatggtattttaatttatgttaattcagatagaaaaattattgaaatgattaataagattgcaccagagcaccttgagctcaacataaaaaattataaatcatatgtacctaagatcaggaatgcaggatctatttgtttaggtaaatatgcagttatggcaatgacagattataatattggatctaaccatgtgttgcctacaaatggaagcgcaaaatattcaagtggtatcggtgttaacgaattttataaaagaatttcgtatataaatatatctaaaaggggtattgaaaatcttggaccatcagctataactcttgcaaattatgaaggtttaactggacatgctctttcagttaaaaaaagaattaggagaaaataaa

SEQ ID NO: 205532 - DNA, 847 bp, Unknown
  Bacterial polypeptide expressing nucleotide sequence isolated from the Sargasso Sea
taaaactagagagattgtggaaggtattttaaaatatatagaaaaaacaaaagaaaatggatgcaaagaactttcaaaaaaatttgataaatatgaaggtgatgtaattatttcaaaagaaaaaatagaagaaataaaaaaaaacttagaccaaaaaactaaagatgatgttcaattttctcatgaaagagttagaaaattcgctgaagctcaattaaaaaattatggtcaagattttgaagtagagctttcagatggtttgtatgcaggtcaaaagttaattcctgttaatactgcaggatgttatgtgcccgcgggaagatatgctcatattgcttctgctgttatgagtgtcactaccgctaaggttgctggagttaaaaatattttagtttgtagctcaccaaaacctagtgttggcgttcacccaacaattgtttacacagctgatctttgtggtgcaaatgtaattatgaatctaggtggtgtacaagcaattgcagcaatgacctatggattgtttggtaatgctccggctgatatattgattggtcctggaaatcaatttgttgctgaagcaaaaagaattttatttggtaaagttggaatagatttatttgctggtccaacagaaattgcaattattgcagataaaaacgctgatgcagaaattgttgctgttgacctagttggtcaagctgagcacggttacaactcacctgcttggttatttactaaaagtaaagatttggctgaaaaagttattaaaagagtaccagaattaattgcagatttgcctgaattaccaagaaacaatgctgaagcggcatggagagatatggcgaag

SEQ ID NO: 205533 - DNA, 502 bp, Unknown
  Bacterial polypeptide expressing nucleotide sequence isolated from the Sargasso Sea
ttctcaatctattataatttcaaaggatattaaaatcctaaaaaaaataaaaaaatcaatttatattaacttaaaaaatatacctcgaaaaaaaattgctataactagtattaaaagaaatgggctattaataaatgcaacaaatgatcagaatattatagatttaataaatttgattgctccagaacatttagaattaaatattaataaaccacaaaaatttttaaaaaaaataaataatgctggaagtatctgtgtaggtaaatattctgccatggccgttacagattacaatgcaggaactaatcatgttttaccaacttttggatctgcaagattttcatctggtttgaatgtcggtgatttttataaaaaaattagctatataactttatcaaaaaagggtattgaagtaattggcaagaaagctataacacttgcggagtatgaaaatttagagggtcatgctcaaagtattaaatcaagaattaggagaaattaa

SEQ ID NO: 205534 - DNA, 856 bp, Unknown
  Bacterial polypeptide expressing nucleotide sequence isolated from the Sargasso Sea
cacaatcttaagggaattaatgtagatatacctaaaaagcaatttgtagttataacaggtgtttctggaagcggaaaatcttcactagcttttgatacaatttacgcagaaggtcaaagaaggtacgtagaaagtctttcaagttacgcacgacaatttttagaacgaattgaaaaaccaaaagttgataaaatttctggtctgagtcctgctatagcacttgagcaaaaaatttcatcttcaaatcctaggtcaaccgttggaaccaaaacagagatatatgactacataaaaattttattttccagatttggaaaaacatattcgcccatttcaggtaaagaagtcaaaaagaataaagtttctgaaataattgacgatataaaaaaacaatctgtaggagataaattaatcatattaacaaaattagatgatatcaattcaggtaacattgaacaaaaaattgaatcccttattaatcagaattataacagaattttttatgaaaatgaaataattaaactaaacgatattaagtttgatagaatatcaaaatacaacaatttatttcttgttattgatagaattgttcgaggagagtcagatgaatttttaagcagagttgctgactcgcttgaaacagctatttatgaagggaaaggaaaatgcttggttaataatctaaccaagtctaagataaaaaaatacaacacaatcttagaggctgatggaattaaattcactaaaccagatactaatttttttagttttaataatccatatggtgcgtgtacgaaatgtgaaggctatggagatatagttggtattgatgaaagactggtcatttccaaataca

SEQ ID NO: 205535 - DNA, 1000 bp, Unknown
  Bacterial polypeptide expressing nucleotide sequence isolated from the Sargasso Sea
tatggcaactaaatatataaaaaaagcttctaaaactccggagacggatgatcacaagacacaggcagctgtgcaagatattctaaatgatattgcaaaacgtaaagaagcagcaattaaagagctaaataaaaaatttgataaatacgatggagaagtaattgtctctaaagaaaaaattgaagaagcaatcaaaaaagttgatcaaaagacaaaagacgatgttaaatttgctcacgaacgaattagaaaatttgcggagcatcaattaaagagcatgaataatgattttgaagttgagttatctaaaggattgttcgctggacaaagattaattccagtcgatacggcaggttgttatattccaggcggaagatatgcacatatttcatcagcagtaatggctattactcctgctaaagtagctggtgttaaaactataatttgtgcgagtccgccaaaagataaagatggagctaacccaggaattatctttgctgctaatcattgtggcgcagatgtaattatgaatttaggaggagttgcagcaataggttcaatgacacatggatgtttcaaaaacccaccagttgattttcttgttggagctggaaatcagtatgtagctgaagcaaaaagaattgtttatggaaaagtaggaatagaccaatttgctggaccgacagaaattgcaataattgcagataagacagctgataaagaaattgtagccgttgatttagttggtcagatggaacatggatataattctccagcatggttattcactacagataaagaattagcagattttacgatgaaaagagtaccagagttgattaatgaattacccgaactcgcgaaagtaaatgctacagctgcatggaaagattatggagaagtaattctttgcgatactaatgaggaaatggcagaagtgagtgataaatatgcctctgaacacttagaagttcacgcagaaaatttagattggtggtaa

SEQ ID NO: 205536 - DNA, 826 bp, Unknown
  Bacterial polypeptide expressing nucleotide sequence isolated from the Sargasso Sea
aatggcaatacaatacctaaaaaaatcacctaaaacttcatcgacagatgacagtaaaactacaggaatagttcaagatttacttaaagatatagagtctaccaaagaacaagggtgtatcgatttaacaaaaaaatttgataaatatgaaggtgaaattattgtttcaaaagaaagaattgaagaaataaaaaaaaatttagatcaaaaaactaaagatgatgttcagttttctcatgaaagagtaagaaagtttgctgaagcacaattaaaaaattatggacaggattttgaggtagagctttcaaagggtttatatgctggacaaaaattagttccagttaatactgctggttgttatgtgcctggtggtagatacgctcacattgcttcagcagttatgagtgtaacaacagctaaagtggctggtgttaaaaatattattgcttgtagtcctcctaaaaaaggagtgggtgcacatccaacaattgtttacactgctgatttatgtggtgctgacgtgattttaaatttaggtggtgttcctgctatcgcggcaatgactaatgggttatttaaaaatcctccagcagacattattgtaggccctggaaatcaatttgtagctgaagcaaaaagaattttatttggaaaagttggaattgatttatttgcaggtccaacagaaattggaattattgcagatgaaaaagcagatccagaaatagttgctgttgatttagttggtcaagctgaacatggatataattctccttgttggttatatacaacaagtagagaacttgctgaaaaagtaatgaaaaga

SEQ ID NO: 205537 - DNA, 800 bp, Unknown
  Bacterial polypeptide expressing nucleotide sequence isolated from the Sargasso Sea
aatggcaatagaatatttaaagaaatctcccaaaacatcatcaacagatgacactaaaacaaagggaatagttcaagatttactaaaagacattgaaaaaactaaagagcaaggatgtattgatttaactaaaaaatttgacaaatatgatggtgagattgttgtaacaaaagaaaaaattgaagaaattaaaaaaactttagatcaaaaaaccaaggatgatattcaattttcctatgaaagagttagaaaatttgccgaagctcaacttaaaaattacggtcaagattttgaagtagaactatctaacggtttatatgctggtcaaaagttagtaccagttaatactgctggatgctacatacctggtggaagatatgctcatatagcctcagcagtgatgagtgttacaactgctaaggttgcaggtgtaaaaaatattatcgcgtgtagtcctcctaaggaaaatataggtgcccatccaacaattatttatactgctaatttatgtggtgctgacgtatttttaaatttaggtggagttcctgctattgcagcaatgactaacggtttgtttcaaaatccttcagcagacatcattgttggtccaggtaaccaatttgttgctgaggcaaaaagaattttatttggaaaagttggtattgatttgtttgcaggtccaacagaaattgggattatcgctgatgcaaaggcagatcctgaaatagtagctgttgatttagttggtcaagctgaacatggatataattctccatgctgggtatatacaactagtaaag

SEQ ID NO: 205538 - DNA, 784 bp, Unknown
  Bacterial polypeptide expressing nucleotide sequence isolated from the Sargasso Sea
atgacaattacatatttaaaaaaatcaccaaagacttcatcaacagatgatactaaaactacagggatcgttcaggatcttttaaaagatttagacaatactaaagaacaaggctgtattgatctaactaaaaaatttgacaaatacgatggtgaaatagttgtttcaaaagaaagaattgaagaaattaaaaagtccttagatcaaaaaacaaaagatgatattcaattttcatttgatcgagttcgaaagtttgctgaagctcaattaaaaaactatggccaagattttgaagttgaattatcagatggcttatatgctggacaaaaattgatacccgtaaatacagctggttgttatatccctggcggcagatatgctcacatagcttctgcagtgatgagtgttaccactgctaaagttgctggcgtaaaaaatattgttgcatgcagtcctcctaaagagggtgtgggtgctcatccaactatagtttataccgctgatttatgtggagcagatgtaattttaaatcttggtggtgttccagctattgcggcaatgacaaacggtttatttaataaccccccagcggatattattgttggaccaggtaatcagtttgtggctgaagcaaaaagaattttgtttggaaaagtgggtattgatttgtttgctggaccaactgaaattggaattattgctgatgctaaagcagatcctgaaattgtagcagttgatttggttggccaagctgaacacggctataattcaccttgttggttgt

SEQ ID NO: 205539 - DNA, 1309 bp, Unknown
  Bacterial polypeptide expressing nucleotide sequence isolated from the Sargasso Sea
atgtctgaagtttatcttaaaaaagcaaagaaaacacctgaaacaggcacatctgaaacaagaaaaattgttgaaagaatgttaagtgaaattgaaattggtaaagaaacaatagctaaaaaatatgcttcagatttagacggatttaatggagatattattgtgtctcaagagagtatagaaaatgccagcaaaatggtgcctgaaaaattaaaagatgatattaaatttgcacatgaaagaattaaaaaatttgctgaagctcaaaagcaatctattagtgaatttgaaactgaactctcgccaggtctttgggcaggacagaaattaattccaatacaaacagctggatgctatgtgccaggaggaagatatgcccatgtagcatctgctatcatgagcattacaactgcgcgtgtagcaggcgttgagaatataattgcttgttcagcccctaaaggtgaagatggtcctaatccggcaatactatatacaatgaattattgcggggctgataaaatactcgctttgggtggtgtacaagcaattgcctctatggcatttggtttgtttactgatttaccagctaaaatacttgtagggcctggtaatagatttgttgctgaagccaaaagaactttatttggaaaggttggaatagatctttttgcaggaccaacagagattgcaattattgctgatgaaagtgctgatgcagatatcgttgctgaagatttagtaagccaagcagaacatggcccagactcacctgcatggttgatttcaacaagtgaaaaattagcaaatgatgtaatatcaattatggataaaaaaattcaaaacttacctgaaacaagcaaaaaagcagcagaattagcttggaaagattacggcgagattattctttgtaattctgatgaggaggcagctagggtttctgacatttatgctgcagaacatttagaagttcatactagtaataatgattggttttccaaaagattaaaaaattacggctctctttttgttggagaagaaacaactgtaacttttggtgacaagtgctctggcactaatcatattttacctacaaaaggagccgcgcattacactggaggattatcagttcacaaatttatgaaaatagttacaactcaaagaatgacgcgtgaagctaataaatcagttgcacaagttgctgcaagaatttcaagattagaagggatggaagcccacgcacgatctggagatattagattaaaaaaatactttcctgatgaaaactttgatgtaagtcctgtagagtaat

SEQ ID NO: 205540 - DNA, 643 bp, Unknown
  Bacterial polypeptide expressing nucleotide sequence isolated from the Sargasso Sea
cccacgaaaaacaatgtttattgcagatgatactgtagatggagaattatgtgctactgatcttttagggcaagctgaacatggatataattcacccgcagttctaattacaaattcaaaaaatttagcagagtctactctattagagattgaaagaattcttcaaattttaccaactaaagaaacagcaagtataagttggagagattacggtgcagttatactttgtgattcgtacgaagaaatgcttgataaagcaaatgaaattgcctcggaacatgtgcaagtgatgacaaaaaaagatgattggtttttggaaaatatgaaatcttacggtgcattatttcttggcccaagaaccaatgttgcaaatggtgacaaagtgattggaacaaaccataccctacctactaaaaaagccggacgttatactggcggattatgggtgggtaaatttatcaaaacacacacatatcaaaaagttttaacagatgaagctgcgaccttaataggtgagtatggctctagactttcatatttagaaggttttcttggtcatgccgaacaatgcaacatacgtctaagacgttatggcggaagaaatatagaatatgcaaaagcagcaaaaaaaattaaaaactag

SEQ ID NO: 205541 - DNA, 1030 bp, Unknown
  Bacterial polypeptide expressing nucleotide sequence isolated from the Sargasso Sea
atgcgtctgccactgccctggctgctgtgcctcaccggcggcgcactggcgctgctgctggtcggatccttggccaccggccccatggccctctcctttggcgagagcctgcgcgccctgttcgccggccaagggagcgggattgaggcccacaagctgctgatcgtgcaggagatccgcctgccgcgtaccctgctctgcatcgcggtgggggggattctcggcctctgcggcgccgtgatgcaggggctgtttcgcaaccccctggccgaccccggcatcatcggggtctccggcggggcggcactcggcgcggcgctggccatcgtgctgctggcccccctcggccagcagtggcagagcctgctcggcatcggcctgctgcccctgctcgcctttctcggcggcgcgctgaccaccaccctggtctatctgctcggcacccgggaggggggcacctcggtcaccgtcatgctgctggccggggtggccgtcaccgcgctgtccggcgccgtgatcggcctgctcacctatctcgccgacgatcagatgctgcgcaacctgagcctgtggcagatggggtcgctggcggcgggcaagccggtggacgtggcgctggcgctgctgaccctggttgctctgctccttctgttcttgcgcgatgccaaccccctcaacgccctgctgctgggtgaaggggaggcccgccacctcggcatccaggtgcagtccctcaagcggcggctgatcctgctcaccgccgccggggtcggcgtagcggtagcagtggccggcatgataggtttcgtcggcctggtggtgccccacctggtgcggctgctggccggccccaaccacgtccggctgctgccgctctccgccctgctcggggccgccctgctgctgggcgccgacatgctggcccgcaccctgctggcgccggccgagatgccggtcggcatcatcaccgccctgctgggcgcccccttcttcatctggctgctggtcaagggccgccggacgctttaac

SEQ ID NO: 205542 - DNA, 598 bp, Unknown
  Bacterial polypeptide expressing nucleotide sequence isolated from the Sargasso Sea
tatgaaaatattagatagtaaattaagaaattttaataaaaagttagatgatttattattaagaagaaaaactaaagttcaaacaagctctgtctctgttattaaaataattaatgatgtaaaaaaaaatggtgacaaagcattgttaaagtatgagaagaaatttaaccagaatagagtaattaaacctagttttagtcaaattaaacaatctattaattctctagatcctaaagttaaaaatgctatcgatctagcttattcaagaatttacaagtttcactcattacaaaaatttaaaaatatttcttacatagataaattaaaaaataaattagaatacaaatatctaccaatcgaatctgttgcaatttacgtgccaggatcatcagcttcttatccttcaagcgttttaatgaatgctatccctgcgatagttgcaggagtaaaaagaataattatgattaatccaggatataaaggaaaacaaaatgctgcagtactatatgcagcaaaaaaatgtaaaattaaagaaatatattctattggtggtccatcagcaattgcagcagttgcttatggaacaaaaaaaaattga

SEQ ID NO: 205543 - DNA, 925 bp, Unknown
  Bacterial polypeptide expressing nucleotide sequence isolated from the Sargasso Sea
atggcaataaattatttaaaaaaatcacccaaaacatcttctactgatgatacaaaaacaagagagattgtagaaaatattctaaaagatatagagaaaacaaaagaagaaggatgtatcgagttatcaaaaaaatttgataaatatgaaggagaagtagtagttacaagagaaaaaattgaacaaattaaaaaaaatttagatcctaaaacaaaagacgacattcaattttcccatgaaagagtaagaaagtttgctgaagcacaattaaaaaattatggccaagattttgaggtagagctttcagatggattatttgctggacaaaaattaattcctgttaatacagcaggttgttatgtacctgcaggaagatatgctcatatagcatctgctgtaatgagtgttaccacagctaaagttgctggtgttaaaaatattattgtttgcagctcaccaaaacctggtgttggagttcatcctgctattgtttataccgctgacttatgtggagcagatgtaataatgaatttaggtggagttcaggctattgcagcaatgacttatggtctttttggtaatgcacctgctgatatgcttgttggtcctggaaatcaatttgttgcagaatcaaaaagaattttatttggcaaagtaggtatagatttatttgctggtcctacagaaattgcagttatagcagatgaaacagcagacccagaattagtggctttcgatttagttggacaagctgagcatggttacaattctcctgcatggttattcactactagtaaatcattagccgaatatgtaatgaaaagagtgccagaattgattgcagacttaccagacttaccaagagaaaactctggtgcagcttggagagactatggggaagttattttatgcgatacagacgaag

SEQ ID NO: 205544 - DNA, 781 bp, Unknown
  Bacterial polypeptide expressing nucleotide sequence isolated from the Sargasso Sea
atggcaattgaatatttaaaaaaaggattaaatgaaaaacaaagaattgaagataatgataaagtaaaaaaaattgttgaggaaacattaagtaaaattgagtcagaaggtgataaacacattagagagttatctcaaaaatttgataactattcaccagatagttttaggttaaatgaagatcaaattaatcaattaatcagtgaagtatctgatgatgataaagaagatattaaatttgctcagaaacaagtgcgtacatttgctgaagcacaactaaaaactttaaatgaattagaagtagaaacgcacccaggtgttattctaggtcataagaatatacctgtacaagcagttggttgctatgttccagccggtaaatttccaatggtggcttctgcacatatgtcagttgttactgcttctgttgctaaggtgccaagaattgtagccactactccaccttttaaaggtaaaccaaatccagctgttgtaacagcaatgaaaatgggtggtgctcacgaaatttatgttttaggaggaatgcaaggagtaggtgcaatggctatcggtacggaaacgattaaaccagttgatatgcttgttggacctggcaatgcatttgttgctgaagcgaaaagacaattgtatggcagagttggtatcgatttatttgctggtccaactgaaacaatggttattgctgatgaaactgttgatggtgaaatatgtgcaactgatctattaggacaagctgaacatggatataattctccagctg

SEQ ID NO: 205545 - DNA, 928 bp, Unknown
  Bacterial polypeptide expressing nucleotide sequence isolated from the Sargasso Sea
tatggcaatcaaatttttaaaaaaatcacctaaaacttcatcaactgatgatcttaaaacacgtgaaatagttcaaaatcttcttaatgatttagaaaaatctagagaagaaggttgcaaagaacttacaaaaaaatttgataaatacgatggcgaaatcatagtttctaaagaaagaattgaagaaataaaaaaaaagttagacgataaaacaaaagatgatattaaattttcttatgacagagtaagaaaatttgcagaagctcaattaaaaaattatggacaagattttgaggtagagctttctaatggtttatatgcaggtcaaaaactaataccagtaaatacagcaggctgttatgttcctggaggaagatatgctcatatagcctctgcagtaatgagtgttactacagcaaaggtagctggggttaaaaatattattgcttgtagcccacctaaagagggtataggagcacacccttctatcatttatacagcggacttgtgtggagcagatgtaatacttaaccttggaggtgttccagcaatagcagctatgacttatggtatgtttggaaatgccccagctgatattttggtgggtccaggaaatcaatttgtagcagaagctaaaagaatattatttggtaaagtaggaattgatttatttgcaggtccaactgaaattgcggtaattgcagatgaaactgctgacccagaaattgtagcagttgacctagttggtcaagccgaacatggttataattctccagcatggctgtatacaactagtaaaaaattagctgaagatgtaatgaaaagagttccagaattaattgctgaattacctgagctcccaagaacaagtgcagaagcagcatggagggattatggagaagttatactttgtgacacaaatgaagaa

SEQ ID NO: 205546 - DNA, 514 bp, Unknown
  Bacterial polypeptide expressing nucleotide sequence isolated from the Sargasso Sea
agaacacgatattaatgcccagtgcatccttatctcaaagaataaagaattaattgataaagttcaaaaagaattagaaatacagttacaaagtttaccacgtagaaaaattgcattaggtagcttaaaaaaaaatggtttattaatttttgcaaattcagataaaaaaatttctaatattataaacattatagcaccggagcatttagaacttagtgtagacaaatataaatctattttaaaaaatgtaaaaaacgcgggatcaatatgcacaggaaagtattcagcaatggctgtaactgattattgcgcgggtagtaatcacactttgccaactcactcttctgcaaaatttttcagcggactgtctgtttttgatttttttaaaagaatttcttacataaatttatcaaaaaagggtattgaaactattggtgaaaaagttataaatcttgcaacttatgaaggtttagatggacacgctaaatcagttaaattaagaataggagaataa

SEQ ID NO: 205547 - DNA, 619 bp, Unknown
  Bacterial polypeptide expressing nucleotide sequence isolated from the Sargasso Sea
atggttattgcagatgaaacagtagatggcgaattatgtgccactgacctacttgggcaagcagaacacggttatgattctccagcaatacttttaactacatctaaaaaactggctgacgaaactttaaaagaggtgaaaagactattaactatcctacctaccgccgaaactgctggagccagttggcgcgactacggagaagtcatattgtgtgattcttatgacgaaatgttaagcgttgccaatgatattgcctccgaacatgtacaagttatgactgatcgtgatgattggtttttagaaaacatgacaagctatggagctttatttttgggggctcgaacaaatgtatccaatggtgataaagtaatcggaactaatcatactctgccaactaaaaaagctggaagatatactggtggtttatgggtaggtaaattcttaaaaactcattcataccaaagaatattaactgacgaagcagcaacaatgattgcagaatacggatcaagactttgcattttagagggattcatagggcatgctgaacaatgtaatttaagagcccgtagatatggtggaaaaaatataagctatggaaaggcagctgagtaaa

SEQ ID NO: 205548 - DNA, 316 bp, Unknown
  Bacterial polypeptide expressing nucleotide sequence isolated from the Sargasso Sea
cacctcgagcttgctattgataatgcaagagattttcttaaatatattgttaatgcaggcgcagtattcctcggtaggaatacacctgaagcattaggtgactatgttgctggtccaagccatgtattacctacatcaaggagtgcaaaattttcatcaggactatcagtattcgactttctaaagaaaatatcgcttgttgagtttacaaaagaaggtattgaagaaattggaaatagtgctatgacaatcgctgataatgaaggtcttgacggacattcaaggtcaatagaatataggcttacaaaaaaataat

SEQ ID NO: 205549 - DNA, 1120 bp, Unknown
  Bacterial polypeptide expressing nucleotide sequence isolated from the Sargasso Sea
aaagaaaaaatagaagaagcaattaaaaaagttgatcaaaaaactaaagacgatgttcaatttgctcatgaaagaataaaaaaatttgctgaacatcagctaaaaagcatgaacaataattttgaggttgagttgtcaaaaggtttgtttgcaggacaaagattagttccagttgatacagcaggttgttatattcctggaggacgctacgcccatatttcttcagctacaatggcaattacaccagctaaggttgctggtgttaaaactattatttgtgcaagccctcccaaagataagaacggggcacatcctggaattatttatgctgccaatctttgtggtgcagatgttatattaaatttaggaggtatagctgcaatcggttcaatggcatatggatgctttggaaatcctccagttgattttttagttggagctggaaatcaatatgtatcagaagctaaaagaatagtttatggaaaagtgggaatagatcaatttgcaggtccaacggaaatagcaatcattgctgacaagtctgccgataaagaaattgtagccgtggaccttgttggtcaattagagcatggttataattctcctggatggttgtttacaacagataaatcattagcagactttacaatgaaaagagttcctgaattaattagtgaattaccagaattggctaaagttaatgctgaggctgcttggaaagattatggtgaagttatactttgtgattcaaatgaagacatggccaaagtaagtgacaaatacgcatctgaacacttagaagttcacgcagaaaatttagactggtggctaaaaagattaagaaattatggatctttatttttaggagaggaaacgacagtagcttacggagacaaatgttccggaacaaatcatattctgccaacaaaaggtggcggaagatacacaggcggtttgtttgttggtaaatttattaaaacattaacatttcaaagaatgacaaaagaatccacagaagtagttggtgctgccgcagctagacttgggagagcggaaggtatggaagcacatgcacgaactgcagatattagacttaaaaaatacggatatctaaaataaa

SEQ ID NO: 205550 - DNA, 751 bp, Unknown
  Bacterial polypeptide expressing nucleotide sequence isolated from the Sargasso Sea
atgaaaatcttaatgggtaaaaaagctactcaagattatctaaataaaattcgaacaaatagctattctagtattagttctgatggaaatggatatttctctaaaacttatgaattagaacaatacataggaaaaataattgaattgactaagaaaaaaggtgatgattttcttgttgaaataagttcaaagattgatggagtgccatttggtggtataaaagttcaaaaaaatattttagacgagtcagtgtcacaaatttccaataaagaaaaaaaggttattttaaatacaattgagagagtaaaattatttcaaagtaaaactctcagcaaaagttggtttgatgaagaaaaaggttatggtgaatatgtcagaccaattgaatcagttggttgttatataccaagtggatctgctccattgatttctacaataataatgactgttgtgcctgcaaaaattgctggagtaaaaagaatagctgttagttctcccacacctggtaatcaaaatcctaataagtacttattggctactgcaaaactttgtggagtagatgaattttatacttatggaggccctcaagctataacagcgatggcttatggaactgaaactgtaccaagggtagatttgatttgtggcccaggaaatatatttgttatgaatgcaaaaaaacaagtttatggtgttgttggagtagatggaatttttggtccaacagaaactctaataatatgtgataaat

SEQ ID NO: 205551 - DNA, 813 bp, Unknown
  Bacterial polypeptide expressing nucleotide sequence isolated from the Sargasso Sea
aatggctattacttatttaaaaaagtctccaaaaacttcgtccactgacgataataagacaactggaatagttcaagatttattaaaaaatatcgaaacaacaaaagaacaaggctgcatcgatttaactaaaaaattcgataagtatgatggggacatcatagtatcaaaagataaaattgaggaaattaaaaaaactttagatcaaaaaaccaaagatgatattcaattttcatttgaaagagttagaaaatttgctgaagcacaacttaaaaattatggacaagattttgaggtagaactttctgatggtttgtatgcaggtcaaaaattagtgcctgttaatacagcaggttgctacatcccgggtggaagatacgctcatattgcatctgctgtaatgagtgtaactacagcaaaagttgctggagtaaaaaatattattgcatgtagtcctcccaaagaaggtgttggtgcccaccctactattgtatacacagctgatctttgcggtgcagatgttattttaaatttaggaggagttcctgcaattgcagcaatgaccaatggattattcaaaaatccccctgcagatataattgtaggaccaggaaatcaatttgtagctgaggctaaaagaattttatatggaaaagttggtattgatttgtttgcaggaccaactgaaattggaattatagcagatgctaaagctgatccagaaattgttgcggtagatttagtaggacaagctgagcatggatataactcaccatgttggctttatacaactagtaaagaattagccgaaaa

SEQ ID NO: 205552 - DNA, 1288 bp, Unknown
  Bacterial polypeptide expressing nucleotide sequence isolated from the Sargasso Sea
tatggcaactaaatatattaaaaaagcttctaaaactccggaaacggatgatcacaaaacacaggcagctgtgcaagatattctaaatgatattgcaaaacgtaaagaagtggcaattaaagagcttaataaaaaatttgataaatacgatggagaagtaattgtctctaaagaaaaaattgaagaagcaatcaaaaaagttgatcaaaagacaaaagacgatgttaaatttgctcacgaacgaattagaaaattcgcggagcatcaattgaaaagcatgaataacgattttgaagttgagctgtccaaaggattattcgctggacaaagattaattccagttgatacagcaggctgttatattccaggcggaagatacgcgcatatttcatcggctgtgatggccattactcctgctaaagtagctggtgttaaaactataatttgtgcaagtccaccaaaagataaagatggagctaatccaggaattatttttgctgctaatcactgcggcgctgatgtaattatgaatttaggaggagttgcagcaataggttcaatgacacatggttgtttcaaaaaccctccagttgattttcttgttggagctggaaatcaatatgtagctgaagctaaaagaattgtttatggaaaagtaggaatcgatcaatttgctggacctactgaaattgcaataattgcagacaagacagctgataaagaaatcgtagctgttgatttagttggtcagatggaacatggatataattctccagcatggttattcactacagataaagagttagcagactttacgatgaaaagagtaccagagttgattaatgaattacctgaacttgcaaaagttaatgctactgctgcttggaaagattatggtgaagtaattctttgcgatactaatgaggaaatggcagaagtgagtgataaatatgcttctgaacacttagaagttcacgcggaaaaattagactggtggttaaagagattaagaaactatggttcgttatttttaggtgaagagactacagtagcttacggagacaaatgttcaggaacaaatcatatattaccgacaaaaggtggcggaagatatactggcggactattcgttggaaaatttattaaaacattaactttccaaagaatgacaaaagatgcaacaaaagttgttggagcaacagcagcaagacttggtagagctgaaggaatggaagctcacgcgcgaacagctgacattagattaaggaaatacggtttctctaattaa

SEQ ID NO: 205553 - DNA, 838 bp, Unknown
  Bacterial polypeptide expressing nucleotide sequence isolated from the Sargasso Sea
catggcaataaattatttaaaaaaatcaccaaaaacatcttctactgatgatacaaaaacaagagagattgtagaaaatattctaaaagatatagagaaaacaaaagaagagggatgtatcgagttatcaaaaaaatttgataaatatgaaggagaagtagtagttacaagagaaaaaattgaacaaattaaaaaaaatttagatcctaaaacaaaagacgacattcaattctctcatgaaagagtaagaaagtttgctgaagcacaattaaaaaattatggccaagattttgaggtagagctttctgatggattatttgctggacaaaaattaattcctgttaatacagcgggttgctatgtaccagcaggaagatatgctcatattgcttccgcagtaatgagtgttaccacagctaaagttgcaggagttaaaaatattattgtttgcagctcaccaaaaccaggggttggagttcatcctgctattgtttatacagctgacttatgtggagcagatgtaataatgaatttaggtggagttcaggctattgctgcaatgacttatggtctttttggtaatgcacctgcagatatgcttgttggccctggaaatcaatttgttgcagagtcaaaaagaattttatttggcaaagtgggaatagatttatttgctggtcctacagaaattgcagttatagcagatgaaacagctgacccagaattagttgctttcgatttagttggacaagctgagcatggttacaattctcctgcatggttatttactactagtaaatcattagctgaatatgtaatgaaagagtgccagaattga

SEQ ID NO: 205554 - DNA, 454 bp, Unknown
  Bacterial polypeptide expressing nucleotide sequence isolated from the Sargasso Sea
attgattgcagacttaccagacttaccgagagaaaactctggtgcagcttggagagactatggggaagttattttatgcgatacagacgaagaaatggcaaaaatcagtgatgaatatgctcctgaacatttagagatacagactaaaaaccttcaatggtttcatgatcgattaaaaaactacggatcattatttattggagaagaaactacagttgcttatggtgataaatgctctgggacaaaccatattttaccaacaaaaggtgcgggaaaatatacaggcggtttatttgtcggaaaattcattaaaacattgagtttccaaagaatgacaaaggaatcaactaaagaagtgggcgcagcttgtgcaagaatttcaagatatgaaggtatggaagctcatgctcgaactggagatgtaagacttagaaaatacggattttctaattag

SEQ ID NO: 205555 - DNA, 349 bp, Unknown
  Bacterial polypeptide expressing nucleotide sequence isolated from the Sargasso Sea
agtgatgaatatgcacctgaacatttagaaattcaaactaaaaaccttcaatggttccatgatcgattaaaaaattatggatcattatttattggagaagagaccacagttgcttatggtgacaaatgttctggtacaaaccacattttacctactaaaggtgcaggaaaatataccggtggtttatttgttggaaaatttattaaaacattaagttttcaaagaatgactaaagagtctactaaagaggtgggtgcagcatgtgcaagaatttcaaggtatgaaggtatggaggctcatgcaagaactggagatgtgagactaagaaagtacggatttcaaaattagt

SEQ ID NO: 205556 - DNA, 575 bp, Unknown
  Bacterial polypeptide expressing nucleotide sequence isolated from the Sargasso Sea
agtaattgcaaataataattctaatcctacttggatagcctacgatgttctcgcccaaggtgaacatgaccctaatgcaaaaacatatgttttatctaaatccaaaaatattttaattaaagttaaaaatgaacttaaaagaattatggaagagacaaaatttaaaaatgttgatcaatctataaaaaataattgcaatttaattttagctaagagtcaaaaagagatatatgatatttcaaattttattgctccagaacatcttcatattcatgaaaaatttaataaaaatatattaaaaaatattaaaaatgctggatctgtatttttaggtgaaaaatcccctgttgctttgggagattatacaattggaactaatcacgtattacccacagatcaaactgcaaaattttcatctggtttgggtgttgaagattacactaaaaaaacagttttcattgaccctagaaaaaaaactctcaagaaaatagcaaatcacacaattaatcttgcaagacaagagggtctggaggcacacgctttatcagttgaaattagaaagatcaaatcataaa

SEQ ID NO: 205557 - DNA, 502 bp, Unknown
  Bacterial polypeptide expressing nucleotide sequence isolated from the Sargasso Sea
atgcaaaataaaagaaatttattctatcgggggccctctgctattgcagcagtatcttatgggactaaaaaaattaagaaagttcataaaatagttggtccaggaaacacctatgttgcagcagcaaaaaaagaagtttttggtattgttggaatcgaaggtatgaccgcaggaccatcagaagtgactgtcgtttgtgacaaattctctaatcctgagtgggttgcaagtgatttaattggacaagctgaacatgatattcttgcacaatgtattttgatttcaaaagataaaaatttgctagataaagtaaaaattgaaattactaaacaattaaaagaaattccaagagcttctgttgcaaggaaaagtttaattaacaatggaattcttatgtatatttcctcagaggctaaaataataagtgttgtaaataaaattgcgccagaacatttagaattaaatattaaaaattataaatcattagtccaaaaaataaaaa

SEQ ID NO: 205558 - DNA, 614 bp, Unknown
  Bacterial polypeptide expressing nucleotide sequence isolated from the Sargasso Sea
tatgaagatattaaatagcaaaattaaaaattttgataaattattagataatttgcttttacagagaaaaaaaaaaattcaatcaaactctgtttctgtaacaaatatagttaaagatgttaaaaaaaatggagataaagcattattaaaatatgagaaaagatttaatcaaaacaacgtaatcattccaagctcaaaacaaataaaaaaatctataaattcacttgataaaaaagtaaagaaagcgattgatacggcttacaatagaatttataaatttcattcacttcaaaaatttaaaaatatttcttataaagataaattaaaaaataaacttgaatataaatacttacctttagagtcagttgcaatttatgttcctggttctactgcctcatacccatcgagtgtgttaatgaatgctattccagcaattgttgcaggagttaggagaatagttatgattaatccaggttttaaaggaaaacaaaatccagccgtcttatacgctgcaaaaaaatgcaaaataaaagaaatttattccatcgggggcccttctgctattgcagcagtatcttatgggactaaaaaaattaaaaaagttcataaaatag

SEQ ID NO: 205559 - DNA, 793 bp, Unknown
  Bacterial polypeptide expressing nucleotide sequence isolated from the Sargasso Sea
aatggcaattacatacttaaaaaaatcaccaaaaacatcatcaactgatgacacaaaaacaagagaaatagtggaaaatattctaaaagatattgagactagtaaagaagaaggttgtaaggagctttcaaaaaaattcgataaatatgaaggtgatgtaattgtttcaaaagaaaaaattgaagaaataaaaaaaaatttagatcaaaatactaaagatgatattcagttttctcatgaaagagtgagaaaatttgctgaagcacaattaaaaaattatggtcaggactttgaggttgaattatctgatggtttatttgctggacaaaaacttattccagtaaatacagcaggttgctacgtgccagcagggagatatgctcatatagcttcagctgtaatgagtgtaacaacagcaaaagttgctggggttaaaaatattttagtttgcagttcaccaaaacctggagttggagtacatccatcaattgtttatacagctgacttatgcggagctgatgtaataatgaatttgggtggtgtgcaagctatagcagcaatgactaatggtttgtttggaaatgcccctgcagatattttagttggtccaggtaaccaatttgttgctgaagcaaaaagaattttatttggaaaagttggtatagatttatttgcaggtccaacagaaattgcggttatcgcagatgaaactgcagatcctgaaatggttgcatatgatttagttggacaagcagaacacggttacaattctccagcttggttgtttactaaa

SEQ ID NO: 205560 - DNA, 919 bp, Unknown
  Bacterial polypeptide expressing nucleotide sequence isolated from the Sargasso Sea
catgatcaactatttgaaacagggcaagagcgacgccgatgtcgctgaggccgatgccaaggtccgcgccacggtcgagggcattctggaggccatcgcaaagcgcggtgacgatgccgtcaaggaactggcgctgaagttcgacgggtacgctcccgacgatttccgtctcagcgaggccgaaatcgcgggcgccctggccaaagtttccgccgacgatattgacgatatcaagttcgcccaggcacaagtccggaactttgcagaaaaacagaaagaatgcctcaaggatttagaggtcgagacattgcccggcgtcatcctggggcacaaaaacattccagtgaacgccgtcgggtgttatgtgcctggcggcaaataccccatggtggcgtcggcccacatgagcgtggtcacggctaaggtagccggcgtaaaacggattatggcgtcggcaccgccgcaggacggcgagccgcacccagccatcgtggctgccatgcacctggcaggtgccgacgaaattctcgtcctaggcggcattcaggccgttggtgccatggccttgggaaccgagacaattgcaggcgtcgacatgctggtgggccccggcaacatgttcgttgcggaagcaaaacgccaattgtttggccgagtcggaatcgatctcttcgccggaccaacggaaacgctcgtcatagcagatgagagcgttgacggcgaaatctgtgccgttgaccttttgggccaggctgaacacggcccgacttcgccggctgcgttactgaccacatctaggaaattagccgaggataccatggttgaagtcgaacgtcagttgggcatactgccgaccgccgatattgcccgtgaggcctggaatgaatatggctcagtgattgtctgtgacacggtggat

SEQ ID NO: 205561 - DNA, 1258 bp, Unknown
  Bacterial polypeptide expressing nucleotide sequence isolated from the Sargasso Sea
gatgattaaaatttttaattttaaaaaaaacaataatctaagaaagcttgagggatttctagataaaagaagatcgggaaaaaatgttgatacttcaatagtcaaaaaaatattagctgaagttaaaaaagataaattaattgctgttttaaaatatgaaaaaaaatttagtaataataataaaatttacccgtctaaactagaaattagaaaatcaattaaatctttagatgttaatttaaaaaaggcaatagacgttgcatttgatagaattttaagatttcacaagctacaaaaaaacaaaaatattaaatatatcgataaatataaaaataagattgagcatatttatgttcctttaaattcaataggtatttatgtgcccgctaatttaccatcaaccctaatgatgaatgcaatcccagctatgattgcgggtgttaaaaacatcgtattagctaatccgagattaagtggaagtataaaccctgcagttatgtatgttgcaaaaaaatgtaaaatcaaaaaaataataagtgtaggtggtgcccaagccatcggaagcttagcatacatacaaaaagttgataaaatatttggcccagggaatgactttgtcgctagagcaaagcgcgaagtatttggtgatgtgggtatagagggaatgatagcaggaccatcagagattactgttgtagccgacaaactattagacatgtccaaagttattacatctatgattgctcaatcggagcacggcatcaattcacaaagcatattagtaacgaagaatgaaaaattaattaaaaatataaataaaaaaattaatatatatttaaaaaaaattcctagaaaaaaaatagttatacaatcattaaaaaaaaatggattattaattttagcaaaaaataatcaacaaattgttaacatcattaataggataagtcctgaacacttagaactattatctaaagattataaaaaattattaagtaacatttataatgtaggaagtattggtttaggtatttatagtcctgttgccgctagtgattacaatgttggaactaatcatactctaggaacacttggatcagccagatttgcgtctggtttaaatttaaacgatttttataaaaaaattagcagatttacacttagtaaaaaaggtattgaagttattggtaagcaagctataactcttgccgaatatgagaacttatatgcccatgcgcttagtattaagtctagactttaa

SEQ ID NO: 205562 - DNA, 1924 bp, Unknown
  Bacterial polypeptide expressing nucleotide sequence isolated from the Sargasso Sea
aatggcgaaagtaattggaattgatttagggacaacaaactcatgtgtgtccgtgatggagggtgatcaagctaaagtgattgaaaactctgaaggcaagaggacaacgccttcagttgttgcctatggagaagaaattaaagtaggagattcagctaagaatcaagcggttactaatgctgaaaatactctttatgctattaaaaggctaataggaagaaaacactctgacgacgtggtaaagaaagattctggcatggtcgcttacaagattatatcagcagacaatggagatgcttgggtagaggcagaaggcaagaaattagctccacagcaagtttcagctgagattcttaagaaaatgaagaagactgctgaagattatttaggtcaagaagttaaagaagcagtaataactgtccctgcctattttaatgactcgcaaagacaagcaacaaaagatgcaggaaaaatagccgggttagaagtgaaaagaattattaatgaacctacggcagcagctttagcttatggcttagataaaggaaaaggtgatcagaagattgctgtctatgaccttggcggaggcacatttgacgtatctattattgagatagccgaagtcgatggagaacatcaatttgaggttctatctactaatggtgacacttttctcggaggagaagacttcgacattgctttaatagagtatctagctgatgaattcaaaaaagaatctggtttagatttgcataatgactctgcagctttacaacgtttaaaagaagctgcggaaaaggccaagatagagttgtcgagcaatcaacagtctgaaataaatctaccatatataactgcagatacttcaggagctaaacacttcgttcataaacttacgagggctaaattagagtctttagttgaagaattagttaataaaactatcgaaccaactaagattgctctaaaagatgctggattaaaaacatctgatgtagatgaagtaattttagtaggtggtcaaactagaatgcctttagttcaagaaaaggttaaagaattttttggaaaggaagctaggaaagatgttaacccagacgaagcagtatctgtaggtgcagctattcaaggtgcagtattggctggagatgttacggatgtgttacttctagacgtgacacctttaactctaggcatagagacaatgggtggagtaatgacaccattaattgataaaaatacaactattcccaccaataaatcacaagttttttctacagcagaagataatcaaactgcggtaacagtacatgttcttcaaggtgaaagaaaacaggccgcagagaataaaactctaggccaatttaatttaacagatattccggcttcacctagaggcatgcctcagatagaagtatctttcgatttggatgcaaatggaatccttaatgtttctgccaaagacaaagcaactggaaaagagcaatcaattgaaataaaagcttccagtggactgtctgacgatgaaatagaacaaatggtaaaagatgcagaagctcatgctgaagacgataaaaagtttgaggaattggttcaagccagaaatcttggtgaaaatcttgtacatagctgcaaaaagactttagaagaagcgaaagataaagtagaagatgccgaaaaagaaacaatagaaaaaggaatagaggaattagaagaagctttgaaatccgatgataaggttctaattgatgaaaaagtaaaatccctttcagaagcttcagctcctttagctcaaagactttatgaagaagaatctcaaaagcaggcagattcaagtgaagacgatgattcaaagaatgattctgaagtagtggatgctgatttcgaagaagtaaaggaagagaaggaacaacagaattcctaa

SEQ ID NO: 205563 - DNA, 648 bp, Unknown
  Bacterial polypeptide expressing nucleotide sequence isolated from the Sargasso Sea
aatgattaatatattagattgtaaaaatttaaattatttagataaattaaaagcaattcttaacaaaagaagatttgcaaggaaaattaataccaatatagcaagtcaaattgttaatgaaattaaaaaaaataaacaaaaagcactattaaagtatgaaaagaagcttagtaaaaatgataaaattaaaccaactgcaaaagaaataaaaaaatcaataaaaactttagatcctaaaataaaaaaagctatagattttgcttattcaagaatattaaaatttcattcacatcaaaaagttaaaaatattaagtttgtagataattataataataaaattgaatataaatattatccaattgagtcagttggaatatatgtgccagcaaatttaccatcaacattattaatgaatgctattccagctaaaaaaattgcaaaggttaaaagaattgttcttgcaagtcctagacaaaatggaaaattaaatcctgcaataatgtacgctgcgaagaaatgtggtatttctgaaattatatgtgctggaggatctcaagcgattgcaagtttagcttatattcaaaaagtaaataaaattgttgggccaggaaacgattatgtagcaagagctaaaagagaagttttgga

SEQ ID NO: 205564 - DNA, 870 bp, Unknown
  Bacterial polypeptide expressing nucleotide sequence isolated from the Sargasso Sea
caaaaattataaatgccggatcagttttttgtggtagtttttctcctgaatcatttggagattatgcttctggatcaaatcatacacttccaacatctggtaatgcaaaaacttattcagggctctctgtaaaagattttggtaaaaccataacatttcaatatgcatcaccggaaggttttttaaatctagctccaactgttgagaaaatggctgaagcagaaaaattagatgctcataaaaatgctgtttcaattcgtgagaatttggctttaaaagaagttgaatcattgaatcgaattgctttcattaatagaaatacaaatgaaacaaatgttttacttaatttaaaccttgatggaacaggtaattataatatcaacacaggattaaattactttgatcatatgctcgaacaattttcaaagcatggaaaatttgatatttcgttaaattgtgatggcgacacatacattgatgaacaccatacaattgaggatgttgcaataacattaggagaaggttttaaacaagctattggggataggcttaatttagaaagatacgcttctagtgaagatttagtaatggacgaaacaagggctcaagtaagtattgatttaacatccagatcatatcttaaaatgaaaactcctcaattaagagagtttgttggagactttccaacagagatgtttaaacatttttttataagtttcgtaaacactctaggtttcacttgtcacataaatgtaagtggtaaaaatagccatcatattgttgaagcaacctttaaaagttttactagggcattaaatacagcacttaaagttacaaacgagtcatcctctacaaaaggactcttatgat

SEQ ID NO: 205565 - DNA, 604 bp, Unknown
  Bacterial polypeptide expressing nucleotide sequence isolated from the Sargasso Sea
tggcattgctggaccaagtgaaattttagtgcttgctgacaaaaaaacaaatataaacgagattagcacatcacttgttggacaatctgagcatggcactgaaagtcaatgtattttagtaacaaagcacaaacaaataataaacaaggttcaaaaaagtgttttagataatttaaaaaatataccaagaaagaaaattgcttttaagagtttaaaaagacatggcttaattgtattgtgtaaaaatgataatcaaattattgaggttgttaatgaggtagctcctgaacacctcgagttaaatgtatcaaactataaaaaatatatcagtcgcatagtgaacgcaggttcaatatgtattggtaaatacacaccaatggctgttacagattataattctggtagtcagcatactcttccaactttaggaagttctaaattttcttcgggattaaacgttaatgatttttataaaaaaataagctatgtaaatctttcaaaaaaaggtgttgcaaaaattgggagatttgcgatacacatgagtgattttgaggaacttaaagcacactctaaatcaattagatcaagaataaggagcaaataa

SEQ ID NO: 205566 - DNA, 613 bp, Unknown
  Bacterial polypeptide expressing nucleotide sequence isolated from the Sargasso Sea
atgaagatattaaatagtaaaagtaaaaattttgataaattattagagaatttgcttttacagagaaaaaaaaaaattcaatcagactctgtttctgtaacaaatataattaaagatgttaaaaaaaatggagataaggcgttattaaaatatgagaaaagatttaatcaaaacaaaataatcattccaagctcaatacaaataaaaaaatcaataaattcacttgataaaaaagtaaagaaagcaatcgatacggcttataatagaatttataaatttcattcacttcaaaaatttaaaaatatttcttatacagataaattaaaaaataaactcgaatataaatacgtacccttagagtcagttgcaatttatgttcctggttctacggcctcatacccatcgagtgtgttgatgaatgctattccagcaattgttgcaggagttaagagaatagttatgattaatccaggctataaaggaaaacaaaatccagccgtattatacgccgcaaaaaaatgcaaaataaaagaaatttattctatcgggggccctctgctattgcagcagtatcttatgggactaaaaaaattaagaaagttcataaaatagt

SEQ ID NO: 205567 - DNA, 2800 bp, Unknown
  Bacterial polypeptide expressing nucleotide sequence isolated from the Sargasso Sea
atgacgtttgtttcacagaaatcagttcttatttacataataattttatcattctgtaatgctcaatcttatcaaaatgaatctgctcatggactaggtgattataatgtcccttttttcaaatcaggaacatatcgtcctaatgtgcagccgccagatgaatttttaggatttacttttggttcacgccctgtacatcattacgaagttattgattactttaattatttagataatctattagacaatattaatctgacggagtatgggtacacgtatgaagggaaacccctagtataccttatgatttccagtaaaaaaaatatggctaatattgataatattaaaaaatctatatcattattagctgatccaagaaaaataaaggacgctaaatcagctcaaaatattattaaaaatacacctgccattgcatggatggcgtattccattcatggagatgaactatctagtactgatgctgcagtacagctggcgtatcaattagcagcggggactgatcaagcaactaaaaaacttcttaaagagctcgtaatcagtattgatccaacggaaaatcctgatggccgcgaacgatatcttcagcaattactacaatggcgaggtgaagttgtaaactcagatgcaaatagcttagatcattctggcttttggccctatgggagaggtaatcattatttatttgaccttaatcgcgattggtttgcaactgtacacccagaaacaaaaggaagagtatctgcaattttagattggaatcctcagtttcttgttgattcacatgaaatgggatctatggatacatatttgtttaatccgcctagagctccatataatccatacatgccaaaaacaatattcaaatggtgggataaaattgctaaagaccaagctgcagcatttgatgcatacggatggagttattataccggggactggaatgaagaagtatatccaggctatggtagctcatggggaatttatattggtttggtaggcattctatatgagcaatctggcgcagatggatctatagtaaaaaaagaagatggtacaataacaacatatagagaaacagtgcatcatcaatttattagctctatggcaaatcttcaaactattgccaatcaaaaagaagaattacttagcgattattataaaaatagaaaaaaggcggtctcaacaaaaaacgcaggaaaggcatttatttattcttctgagttaaataagactcgattaaatgaacttgctgaaactataaaacgtcaaaaaattgaagtctattcaaataaaaacgatatcaaattgcctaaagtaattaacagtagtggaaaaaccataacaaggaaaaatatacctgctggatcattaattattcctttagatcaacctttgaatattctaatacaaaatattttatcatttgatatccgtttagatacaaaaagtatggaaaaagaaagaaagaaacttttgaaaggtcaaggttcaaccttatatgatgtgacagcgtggtctctttctcatgcttatggaactgaaagttattatactgaagtcatgccaaaaatatccttagagccttttcaagctgtttataaaaaaggacagcttaaggggaaaaatccaaaatatggatgggcaataaaaagcgatgatgatcaattttaccatttgcttggaagactattagaaaatagtgttaaagtttggtgcgcaaaggaagcttttaatattgaaggagaatttttcccaagtggaagtatagttattagaaataactcaaataaaactatgaaaataagttttattaaggaactagcttcagaatatggaataaatatttttgcaataaatacagcgcttgctacagacggaccagatttaggaagtagtaattttactatgttaattgaacctaggattgcaataatatctggaccaccaactagtacttatagttttggagctacatggcacttaatagattataaaatgaagagcagagcctcattaattaatgcaatgaattttgcttggcaagatcttagtaaatataatgtacttattcttcctaatggcggtaggatgaaaaagacacttggagataatggtattaataaattgaaagattggatcgatgatggtggaacattaatcagctatagtaatagtgcagcatttttatctgattcatcagtaagcattagttctgttagacttaggcgacagtctttaaataaattggacacctatgcctatgatttatctgttttgaaagaggcagaaaacttatctattgatagtattgcgctttgggaagggggaaatatttatgattcacaagaaataatagaaaatgataaaaatattgaaaaaattaaagaaatggatttattaggaagaaaatttcgtcctcaaggtgctattttaaaagtaaacatggataaagagcactggctttcagttggttgtagggattttataccagttttatataatactggaaatgtttttatggcaaaaaaacctgttaatgttgcagcaagattagcagataaaaaagatattagattaggtggattattatggccagaagcaaaatcacgcatcgctgaatctgcgtgggctacacaagaacgtcgtggaaaagggcaaataattttatttgctactgaaccccatttccgcggatattttaaagcaagtgaacgggtgcttttgaatgcaatttatcttggccctggtatgggaacgagtcattcagtaagctggtaaa

SEQ ID NO: 205568 - DNA, 1059 bp, Unknown
  Bacterial polypeptide expressing nucleotide sequence isolated from the Sargasso Sea
ttgctcacgaacgaattagaaaattcgcggagcatcaattgaaaagcatgaataacgattttgaagttgagctgtccaaaggattattcgctggacaaagattaattccagttgatacagctggatgttatataccaggaggtcgatacgcgcatatatcttcagcggtaatggcgattactccagctaaagtagctggtgttaaaactataatttgtgcaagtccgccaaaagataaagagggtgcaaacccaggaataatttttgctgccaatcattgtggcgctgatgtaattatgaatttaggtggcgtagctgcaataggatctttaacacatggttgttttgataacccgcctgttgattttcttgttggagctggaaaccaatatgtagctgaagcaaaaagaatagtttatggaaaagtaggtatagatcaatttgctggacctactgaaattgcaataattgcagacaagactgctgacaaagaaatcgttgcagttgatttagttggtcagatggaacacggatataattctccagcatggttattcactacagataaagagttaacagactttacgatgaaaagagtaccagagctgattaatgaattacctgaacttgcaaaagtaaatgctactgctgcttggaaagattatggtgaggtaatattatgtgacaccaatgaagaaatggcagaagtgagtgacaaatatgcttctgagcacttagaagttcacgctgaaaacttaaactggtggttaaagagattaagaaattacggttcattatttttaggcgaagagactacagtagcttacggagacaaatgttcaggaacgaaccatatattaccaacaaaaggtggtggaagatatactggcggactattcgttggaaaatttattaaaacattaactttccaaagaatgacaaaagatgcaacaaaagttgttggggcaactgcagcaagacttggtagagctgaaggtatggaggctcatgcacgaacagcagatattagattaaggaagtacggtttctctaattaat

SEQ ID NO: 205569 - DNA, 1027 bp, Unknown
  Bacterial polypeptide expressing nucleotide sequence isolated from the Sargasso Sea
atcaaaaaaatttgataaatatgaaggagaagtagtagttacaagagaaaaaattgaacaaattaaaaaaaatttagatcctaaaaccaaagacgacattcaattctctcatgaaagagtaagaaagtttgctgaagcacaattaaaaaattatggccaagattttgaggtagagctttcagatggattatttgctggacaaaaattaattcctgttaatacagcgggttgctatgtaccagcaggaagatatgctcatattgcttctgcagtaatgagtgttaccacagctaaagttgcaggagttaaaaatattattgtttgcagctcaccaaaaccaggggttggagttcatcctgctattgtttatacagctgacttatgtggagcagatgtaataatgaatttaggtggagttcaggctattgctgcaatgacttatggtctttttggtaatgcacctgcagatatgcttgttggccctggaaatcaatttgttgcagagtcaaaaagaattttatttggcaaagtgggaatagatttatttgctggtcctacagaaattgcagttatagcagatgaaacagctgacccagaattagttgctttcgatttagttggacaagctgagcatggttacaattctcctgcatggttatttactactagtaaatcattagctgaatatgtaatgaaaagagtgccagaattgattgcagacttaccagacttaccgagagaaaactctggtgcagcttggagagactatggggaagttattttatgcgatacagacgaagaaatggcaaaaatcagtgatgaatatgctcctgaacatttagagatacagactaaaaaccttcaatggtttcatgatcgattaaaaaactacggatcattatttattggagaagaaactacagttgcttatggtgataaatgctctgggacaaaccatattttaccaacaaaaggtgcgggaaaatatacaggcggtttatttgtcggaaaattcattaaaacattg

SEQ ID NO: 205570 - DNA, 1090 bp, Unknown
  Bacterial polypeptide expressing nucleotide sequence isolated from the Sargasso Sea
gatgaagggataaaagatatatcgcgtaaatttgataattatgaaggcgatgttattgtttccaaagaaaaaattgaagaggttattaagtctcttgatcaaaaagttaaagatgatgtgcaattctcatatgatagagtacgcagttttgcagaacatcagttaaaacaccttaataatgattttgaagttgaattatcacctggtttgtttgcaggtcaaaaattaattcctgttaatagtgttggttgttatgttcctggtggtcgttacaataatattgcatcagctgtcatgagtattacaacagcaaaagttgctggggtaaaaaatgtgattgctgctagtcctccaaaagatgaaaatggtgccaatcctattattatttatacagcaaatttatgtggtgctgatgtcattatgaatattggtggtattggagctattggtgcttttgcttatggctgttttggtaatcctgaagttgatatgattgttggcccaggtaatcagtatgttgctgaagcaaaaagaattttatacggcaaagttggtattgatttatttgcaggaccaactgaaattggaattattgctgatcacacagctgataaagaaatgattgctgttgatttggtgggacaggcggaacatgggccaaactcccctgcctggttatactccactgatcaaaaattatgtgactatgttattcaaagggtacctgaattaattgctgcacttcctgaaacatccaaaaataatgctgatgcagcatggcgagattatggagaagttattctatgtgatacgaatgaagagttatgtgagattagtgatcaatatgcaccggaacatttagaagtacaagcagaaaatttagattggtggcttgaaaaattaaaaaattatggatcattatttttaggggaagaaacaactgttgcttaccgggataaatgctctggcactaatcatatccttccaacaaaaggggcagcaaaatatacgggtggattatttgttggtaaatttattaaaacagttactttccagcgtatgtcaaaagaatcaaataaagaagttggtg

SEQ ID NO: 205571 - DNA, 523 bp, Unknown
  Bacterial polypeptide expressing nucleotide sequence isolated from the Sargasso Sea
ggctcaagcagagcatgatagtaatgctcaatctatattaattactgataataaggaatttgcaaaaaaagttataaatagcattaaagaattatctaaaaagactctaaagaaaaaaattattgaacaaagtttaaaaaataatggtctaataatattggtaaataaaattgaaaattgtgaagatttaataaactttatagctcctgagcatcttcatatacaaattaaatcttataaaaaattattttcaaaagttaataatgctggtgcaatatttttaggagaatattcgtgtgaagcatttggagattatatcgtaggaactaatcacattttacctacatctggagcagcaaaattttcttcaggtttaggcgttttagatttcatgaaaagaaactctgtagttaaaattaattcaaaatcttataattttttaaaagaagatactgaaaatatggcaaacatcgaaggtttagatgctcataaattatcagtaaaaattagacaaaagaaataa

SEQ ID NO: 205572 - DNA, 775 bp, Unknown
  Bacterial polypeptide expressing nucleotide sequence isolated from the Sargasso Sea
ggcgttcagggagttgcttcaatgacatacggtttatttgggttgccacaggcaaatattttagttggacctggtaatcagtttgtagctgaggcaaaacgtattctgttcggccgagttggaatagatatgatagcaggtccgactgatagtttgattttggcagatgaaactgctgatccatttattgtagctacagatttagtatcgcaggcagaacatggctataactcacctgtatggttggtaacggataacgaaactttagcgaataatgtgatgaatttggttccaaagctgattgatgacttgcctgagactaaccgagaaaatgcaactgcggcctggcgagattatgcggaggtaattgtttgtgagaacagggaagaaatggccgcttgctctgatgaatatgcgcctgaacaccttacagttcaggcggatgatcttgattggtggcttgaacgtctgacctgttacggctcattatttttgggtgaggaaacaactgtttcttatggtgacaaagccgcgggaaccaaccatgttttgcccacttcaagagctgctaattatactggtggtttgagtgtccacaaatatatgaagatagtgacatatcaaagagcaacaagagaggggtcaaaatcgattgctgaagccacggctcggatctctcgattggagggaatggaaggtcatgcaagggctgcagacgtccgcttggctaaattttttcctaatgaggagtttgatttaacagctaatggataaa

SEQ ID NO: 205573 - DNA, 1066 bp, Unknown
  Bacterial polypeptide expressing nucleotide sequence isolated from the Sargasso Sea
ccttaaagatattgaaaaaaccaaagaagaaggatgtaaacaacttggaattaaatttgataaatatgacggtgaaataatagtttctaaagaaaaaattgaagatattaagaaaaatttggatcaaaaaaccaaagatgatattcaattttctcatgaaagagttaggaaatttgctgaagctcaattaaaaaattatggacaagattttgaggtagagctatcagaaggtttatatgcaggtcaaaaattaattcctgtaaatacagcaggctgttatgttcctgcaggaagatatgcgcatattgcttctgccgtaatgagtgtaacaaccgcaaaagtagctggtgttaaaaatattattgtttgtagttctcctaaaccaaatgtaggggtacacccttctatagtttatactgcagatttatgtggagctgatgtaattatgaatttaggtggtgtgcaagctatcgcagcaatgacaaatggtttgtttggaaatgctcctgctgacattcttgttggaccgggtaatcaatttgttgcagaagctaaaagaattttatttggaaaagttggaatcgacctttttgctggaccgactgaaatagctataattgctgatgaaactgctgatccagaaatagttgctgttgatttagttggtcaagctgaacacggttacaattcgcctgcttggttatttacaaagagtaaaaaattagctgaagaagtaatgaaaagagtacctgaacttattgaagatctgccagatctgccaaaacaaagtgctggagcggcatggaaagattatggagaagttattctttgtgacactgatgaagaaatggcaaaaatcagtgatgaatacgcacctgaacacttagaagtgcagacaaaaaatttaaaatggtttcatgatagattgaaaaattatggttcactatttatcggagaagaaactacagtagcttacggtgataagtgttctggtacaaatcatattttacctacaaaaggtgcaggaagatatactggtggattatttgttggaaaatttataaaa

SEQ ID NO: 205574 - DNA, 892 bp, Unknown
  Bacterial polypeptide expressing nucleotide sequence isolated from the Sargasso Sea
tgtatgagtgttacaaccgcaaaagttgcaggtgttaaaaatattattgcatgtagcccaccaaaagagggagtcggtgcaaatccatcagtaatctacacagctaatttatgtggagcagacaaaattttaaacttgggtggtgttccagcaatcgctgcaatgacatatggcatgtttggaaatgaaccggctaatatgttggtcggtcccggaaatcagtttgtagcagaagcaaaaagaattttatttggaaaagttggcatagatttatttgctgggcctactgaaattgcaataatagctgatgaaacagcagatccagaaatcgttgctgttgatttagttggacaagctgaacatgggtataattctccagcttggctttataccacaagtaaaaaacttgcagatgaggtaatgaaaagagtaccagaattaatttcggaattacctgaattaccaagaactagtgctgaagctgcatggagagattacggagaagtaatactatgtgaaaacgatgaagacatggccaaaataagtgatgaatacgccccagaacatttagaagtacaaactaaaaatgacaaatggtttcacgaaagattaaaaaattatggatctttgtttattggagaagaaacaactgtagcttatggagataaatgctcgggaacaaatcatattttgcctactaaaggtgcgggaaaatatacaggaggtttgtttgttggaaaatttattaaaactttaagttttcaaagaatgacaaaagaatctactaaagaggtcggttctgctgcagcaagaatttcaagatatgaaggtatggaagcccatgcccgaacaggtgatgtaaggctaagaaaatacggtttttcaaattaaa

SEQ ID NO: 205575 - DNA, 463 bp, Unknown
  Bacterial polypeptide expressing nucleotide sequence isolated from the Sargasso Sea
atggctgaagctgaaacaaaaattataaatatcaaagatagaaactttaaaaataaactaaacgggctcatgagagctgatcagaaaaatcagtcaaatctctataatattgtttttaatataatacagaaaattcaaaaattaggtgacagtgcattaattgagtttgttaataaatttgatagtaagaagataaataaaatcgaagagttattcataccaaaagatgtattaaaaaatgcttataacagtttaaagaaagaagaaaagcaagcactaaacattgccgctaaaagaattaagaaatttcatacacaccaaataccaatagatcttaaatacaaggataatatggaagttaagttgggacttaaacattctccaatagtttcagctggcttttatgttccaggtgggaaagccatttatccatcttcagtattgatgaatgcaattccagcac

SEQ ID NO: 205576 - DNA, 1010 bp, Unknown
  Bacterial polypeptide expressing nucleotide sequence isolated from the Sargasso Sea
aaatttaaattaactgaaagcgaaattgatgcagccatgcagaaggtttctgcacgcgatatggatgacatcaaatttgcacagcagcagattaaaaactttgctgaggcgcagcgtgcctccatgactgaccttgaaattgaaactatgcctggtgttatcctaggtcatcggaatatacctgtacaatccgtcgggtgctatgtgcccgggggaaaatttccgatggttgcttcagcccacatgtcggttttaacagcgtctgtcgcgggtgttcctcgcattattgcatcagctccccctgttaatggagagccccatcccgctatagttgcggcaatgcatatgggtggtgcacatgaaatttatgccataggcggaatccaagctgttggagctatggcaattggaacagaaactattgacccggttcatatgttggtaggccctggaaacgcgtttgttgctgaggcaaaacgtcagctttatggacgggttggtatcgatctttttgctggaccaacggagacgatggtaattgcagatgaaacagttgatgctgaattatgcgcaacagatttgttgggtcaagcagagcacggctataattcacctgcagccatgataacgtgtagtgaaaaattagctcgtgaaacattaattgaaatagagcgaatattaaaaattctccccacctctgaaacagcatctgcaagttgggagaattacggggatatggtactttgcgatacacacgaagagatgctttctgttgcaaatgatatggcatacgagcatgtacaaattatgactgatcgtgatgattggtaccttgaaaatatgcattcgtacggcgccttatttttagggccgcgtaccaatgttgcaaatggtgataaagtaattggtacaaatcatacgcttccaacaaaaaaagctggtcggtacacaggtggactgtgggtaggaaagtttcttaaaacacatagttatcaaaggatcgaaactga

SEQ ID NO: 205577 - DNA, 602 bp, Unknown
  Bacterial polypeptide expressing nucleotide sequence isolated from the Sargasso Sea
agctattatagctgataaaaacgcagacccagaaattgttgccgttgatttagttggtcaggcagaacatggatataattcgccggcatggttatttacaacaagtaaagaattagctgacaaagtaattaaaagagttcctgagttaattgcagaacttccagagcttcctagaacaagttcagaggctgcttggagagattatggtgaagtagtactctgtgatacagatgaggaaatggctacgattagtgaccaatatgctcctgaacatttggaagttcaaactaataatttagattggtttcataaaagattaaaaaattatggttctttgtttattggtgaagaaacaactgtagcttatggagacaaatgctcaggcacaaatcatattttaccaactaagggtgcgggaagatatactggaggattatttgtaggaaaatttattaaaacattaagttttcaaagaatgactaaagaatctacagaactagttggtgcagcagctgcaagactttcaagatacgaaggaatggaagctcatgcaagaactggagatgcaagacttagaaaatacggatattcaaacaaataag

SEQ ID NO: 205578 - DNA, 303 bp, Unknown
  Bacterial polypeptide expressing nucleotide sequence isolated from the Sargasso Sea
ccgaacccgaaaatttagcaaaaaatatatccaatgctggcgctatttttcttggtcattggactcctgaagccgtcggtgattacatcgcgggacccaaccatgttttgccgactgcaagatcagctagatttagtagcggtctatcggttatggacttcttgaaaaggacgaccctaacaaaagtatctcgagatgctcttttgaaaattggaccttctgcagtaacacttgcaaattcagaaggtttggaatgccatgggctgtcaataagtgagagaatgaaatcgaactctgaataaa

SEQ ID NO: 205579 - DNA, 865 bp, Unknown
  Bacterial polypeptide expressing nucleotide sequence isolated from the Sargasso Sea
atgaagatactaaatagtaaaagtaaaaaatttgataatttattagaaaatttgcttttacaaagaaaaaaaaaaattcaatcagactctgtttctgtaacaaatataattaaagatgttaaaaaaaatggagataaagcattactaaaatacgagaaaagatttaatcaaaacaacataattattccaagctcaaaacagataaaaaaatctataaattcacttgataaaaaagtaaagaaagcaatcgatacggcttataatagaatttataaatttcattcacttcaaaaatttaaaaatatttcttatacagataaattaaaaaacaaacttgaatataaatatgtgcctttagagtctgttgcaatttatgttcctggttctgctgcttcatacccatcaagtgtgttgatgaatgctgttccagcaattgttgcaggcgttaagagaatagttatgattaatcctagctataaagggaaacaaaatccagccgtattatacgctgcaaaaaaatgcaaaataaaagaaatttattctattgggggcccttctgctattgcagcagtatcctatggtactaaaaaaattaaaaaagttcataaaatagttggtccaggaaatgcctatgttgcggcagcaaaaaaagaagtttttggtgttgttggaattgaaggtatgaccgcaggtccttcagaagtgactgtagtttgtgacaaattctcaaatcctgagtgggttgcaagtgatttaattggacaagctgaacatgatattcttgcacaatgtattttgatttcaaaagataaaaatttgatagataaagtaaaaattgaaattacaaaacaattaaaagaaattc

SEQ ID NO: 205580 - DNA, 622 bp, Unknown
  Bacterial polypeptide expressing nucleotide sequence isolated from the Sargasso Sea
atgaaaatattagatagtaaaattaaaaattttgataaatctttagattttttgttactaaaaaggaagcaaaagattcaatttaattcaatttcagtcttaaatataattaatgatgttaaaaaaaatggagataaagctttaattaagtatgaaaaaaagtttaataaaaataaaataatatcaccaacgaataaagaaatttcaaaatccataaaatctttagatgaaaatgtaaaacgggcaattgatattgcttataatagaatttataaatttcactctctgcaaaaatttaaaaatatttcttatactgatagattaaaaaataaacttgaatataaatatataccaatcgactcagttgcaatttatgttcctgggtctaaagtttcatatccttcaactgtattaatgaatgcgataccagcaattattgcaggtgttaaaagaatagcaatgattaatccaggatataaaggaaaacaaaatcctgctgtcttgtatgctgctcgtaaatgtaaaattaaggaaatttattcaattggaggaccatctgctattgcagcaatggcttatggaacaaaaaaaattaaaaatgtaaataaaattgtaggaccag

SEQ ID NO: 205581 - DNA, 811 bp, Unknown
  Bacterial polypeptide expressing nucleotide sequence isolated from the Sargasso Sea
ccataaaggaaaacaaaatccagccgtattatacgccgcaaaaaaatgcaaaataaaagaaatttattctattggaggcccttctgctattgcagcagtatcttatgggactaaaaaaattaaaaaagttcataaaatagttggtccaggaaacgcatatgttgcggcagcaaaaaaagaagtttttggtgttgttggaattgaaggtatgactgcaggtccttcagaagtgactgtcgtttgtgacaaattctcaaatcctgagtgggttgcaagtgatttaattggacaagctgaacatgatattcttgcacaatgtattttgatttcaaaagataaagatttgctagataaagtaaaaattgaaattactaaacaattaaaagaaattccaagagcttctgttgcaagaagaagtttaattaataatggaattcttatgtatgtttcttcagacgctaaaataataagtgttataaataaaattgcaccagaacatttagaattaaatattaaaaattataaatcgttagttccaaaaataaaaaattcaggatcaatatgtttaggaaaatatgcagtgatggcaatgactgattataatgttggatcaaaccatgtgttgccaactaatggttctgcaaaatactcaagcggtataagtgtaaatgaattttataaaaggatttcatacataaacttatcaaaaaagggtattgaaagtcttggaccatcagttataacacttgcaaattacgaagggttggttggacacgctcaatctgtagtaaaacgaataaggagaaaataa

SEQ ID NO: 205582 - DNA, 842 bp, Unknown
  Bacterial polypeptide expressing nucleotide sequence isolated from the Sargasso Sea
tacctgtgccccgccatacaagggcaaacccgcggacgctatcgtcgcagctcaatccatggggggtgcggatgcaatttatgtgattggaggtgtgcaggcggtggcagcgatggctttgggcaccgagagcattcccgccgtggatatgctggtcggacccggaaacgcctatgttgccgaagcaaagcggcaactctacggcagggtcgggatcgatctttttgcaggaccgaccgaaaccctggtgattgctgatgaaaccgtcgatggagaaatgtgtgccaccgatctgctgggtcaggcggaacatgggccaacctcccccgccatcctgctcacgaattctgaaaatctggcaaaacaaaccatagaagaagtcgaccggcaattaaacaccctttcaaccagcgacacggcagcccctgcctggagggactacggacaggtgatcgttgcggattcctatgaagaaatggtggagattgccaatgaccttgctttcgaacatgttcaggtgatgactgaccgtgatgattggttcctcgagaacatgagcaattacggctcgctatttctcggtccaaggaccaatgtttcctatggagacaaagtgatcggcaccaatcacacccttcccaccctcaaggcggcgcgttataccggaggtctctgggtcgggaagtacatcaaaacctgcacctatcagaaagtgctgaccgacgaagcaaccgtcaaaatcggagaatactgctccaggctctgtgagcttgagggttttgctgggcatcaggaacaggccgatctgcgtgttcgaagataccgtaaagaggctgcatgag

SEQ ID NO: 205583 - DNA, 847 bp, Unknown
  Bacterial polypeptide expressing nucleotide sequence isolated from the Sargasso Sea
tatcgcatgcagtccaccgaaagaaaatataggtgcccacccttctataatttatacagctgacttatgtggtgcagatgtaattttaaatttaggtggagtaccagctatagctgcaatgacttatggtttatttggtaacgcccctgctgatattttagttggacctggaaatcaatttgttgctgaagctaaaagaattttgtttggtaaagttggtatagatttattcgcgggaccaacagagattggaattattgctgatgaaactgcagatcctgaaattgttgcagttgacttagtaggacaagcggaacatggttataattcacccgcatggttatatacaacaagtcaaaagttagctgatgcagttctaaaaagagttcctgaactaattgaagaattaccagaagtgcccagattaagtgctgaagcagcatggagagattatggtgaggttattttgtgtgacactaacgaggaaatggtgaaagtaagtgacgattatgctcctgaacatttagaattacaaacaaaaaatttaaaatggttccatgaaagattaaaaaattacggatcattatttataggtgaagaaactactgttgcctatggtgacaaatgttctggtacaaatcatatattacctacaaagggagctggaaagtatactggtggtttatttgtaggtaaatttattaaaacattaagttttcaaagaatgactaaagagtctacaaaagaagttggtgctgcagctgctagaatttcaagatatgaaggaatggaagcacatgcgagaactggtgatgtaagacttaggaaatacggctactcaaattaa

SEQ ID NO: 205584 - DNA, 936 bp, Unknown
  Bacterial polypeptide expressing nucleotide sequence isolated from the Sargasso Sea
ggatgttatgttcctgctggcagatatgcgcatatagcttcagcggttatgagtgtaactaccgctaaagttgcaggggtaaaaaatattatagtttgtagttcaccgaaaccaaatatcggtgttcacccttcaatcgtttatactgcagatctatgtggagcaaatgtgataatgaacttaggtggagttcaagcaattgctgcaatgacaaatggtctgtttggaaatgctccagctgatatattggttggcccgggcaatcaatttgttgcagaagctaaaagaattttatttggtaaagtaggaattgatttatttgctggacctacagaaatagcaattatagctgatgagactgcggatcctgaaatagttgcatatgatttagttggacaagctgaacatggttataattcaccggcatggttatttacaaaaagtaaaaagttagctgatgaagttataaaaagagttccagaattaattgctgatttaccagagctcccaaaacaaagtgcaggagacgcgtggagagattttggtgaagttatactttgtgatacagatgaagaaatggcaaaaatcagtgacgaatatgctccagaacatttagaagttcaaactaaaaatttaaaatggtttcatgatagattaaaaaattatggttctttatttattggagaagaaacaactgttgcatatggtgataagtgttcaggtacaaatcatatacttcctactaagggtgctggaagatatacaggtggattatttgtaggaaaattcattaaaactttaagttttcaaagaatgactaaagaatcaactaaagaagtaggtgcagcagctgccagaatttcaagatacgaaggcatggaagctcatgcaagaactggtgatgttaggctaagaaaagtacggctactcaaataa

SEQ ID NO: 205585 - DNA, 715 bp, Unknown
  Bacterial polypeptide expressing nucleotide sequence isolated from the Sargasso Sea
atttaataatccacctgccgatattatagttggaccaggaaatcaatttgttgcagaggctaaaagaattttatttggaaaagtaggtattgatctatttgctggaccaacagaaataggaattatagcggatgcaaatgctgacccagagattgttgccgttgatttagtaggccaagctgaacatgggtataattcaccttgttggttgtacaccacaagtaaaaagctagcagaaaatgtaatgaaaagggttccagaattaattgcagaacttcctgaagttccaagacaaagcgcagatgcggcgtggagagattatggtgaagtaattctatgtgatacggatgaagaaatggtaaaagttagtgacgaatacgctcctgaacatttagaaattcaaacagaaaatttaaagtggttccatgaaagactgacaaactatggatcattatttgttggcgaagagaccaccgttgcttacggagataaatgctcaggcacaaatcacatacttccaaccaaaggtgctgggaaatatacaggtggtttatttgttggaaaatttattaaaactcttagctttcaaagaatgacaaaagattccacaaaattagttggtgcagcagctgctagaatttctagatatgagggtatggaggcacatgcacgtactggggacgtaagactaagaaaatatggattttctaactaa

SEQ ID NO: 205586 - DNA, 642 bp, Unknown
  Bacterial polypeptide expressing nucleotide sequence isolated from the Sargasso Sea
gatgaataattttttaagtacaaatagtaaaaattttgataatcaactaaattatttcttgagtttaagaaaaaaaaactcagatgtaaaactaattgtagtaaggaagatcttaagagaaataaaaaaaaaaaaagatagttctctcattaaatatgaaaaaaagtttaataaattgaaaaaacttaaaagtaatcaattgtatttttcacaaaatgagattaacaagagtttaaaaaacttaagtaaaaaaacaaaaaaagatatagatttagcctacagtagaattttaagttttcataaaaatcaaaaaattaataatttttcattaatagacaaatttaaaaatcaactttcttatcgaactaaaccaatacaaagtattggtgtttacgtaccaggcggaaaagctagttatcctagctcagttttaatgaattgcatacctgcaatcgtagctggtgtacccaaagtttttatgacagttccttctttaaacagaaaaataaatccggcgattttgtatgccgcaaagaagtgtaaagttaaaaaaatatttaaaatcggaggtgcacaggcagttgcagctttcacatacggcactaaaactgtaaataaagttgataaaattattggtcctgg

SEQ ID NO: 205587 - DNA, 470 bp, Unknown
  Bacterial polypeptide expressing nucleotide sequence isolated from the Sargasso Sea
aatgattaaaatattagaaataaaatctaaaaaatatcaaaaaaagctagaatattatttaaatttaagacgaaaaaagtcaaaatttaaaactatagctgtgagaaaaattatagaagatataagaaataataatgataattctttaattaaatacgagaaaaagtttaacaaaattaaaaatataaataaaaaaaatcttttattttcaaatgttgagataaaaaaaaatatcaaattattacagccaaacgtaaaaaaatctattgatttggcatttaagaggattcttaatttccataaaaatcaaaaatttaaaagttttaagattagggataaatacaaaaatactttctcataccgttctaaaccgattgaaaaaataggagtatatgttccaggaggtactgcaagctatccctcctctgtattgatgaattgtattccagccttagtagctggtgttaaag

SEQ ID NO: 205588 - DNA, 566 bp, Unknown
  Bacterial polypeptide expressing nucleotide sequence isolated from the Sargasso Sea
aatagtagcttatgatttagttggtcaggctgagcatggttataactctcctgcttggttatttactaaaagtaaaaaattagcagaagaagtaatgaaaagagttcctgaattaataaatgatttgccagagcttcctaggcaaagtgctggtgatgcatggagagattttggtgaagtaattttatgtgataatgatgatgaaatcgtaaaagttagtgatgaatatgctcctgaacatttagaagttcaaactaaaaatttaaaatggtttcatgaaaaactaaaaaattacggatcattatttatcggagaagagacaacagtagcctatggtgataaatgctcaggaactaatcatattttaccaacaaaaggtgctggcagatatacaggcggattatttgtaggaaaatttattaaaactttaagttttcaaagaatgacaaaagaatctaccaaagaagttggtgctgcagcagcaagaatatccagatatgaaggaatggaagctcatgccagaactggggatgttagactaagaaaatacggcttttcaaattaaa

SEQ ID NO: 205589 - DNA, 401 bp, Unknown
  Bacterial polypeptide expressing nucleotide sequence isolated from the Sargasso Sea
tagttcttcatggtatgattttggggctataattttagttgaaaacttaaatcaagctattgaattaataaatataaaagcacctgaacacttacaattaattcttaaaaatgcacaaaaggttataaaagaaataaaaaatgcaggagctatttttgttggtccttatactcctgaagcagtgggtgattatattgctggaccaaatcacgttcttccaacaaacggaacagcaaaattttcgagtggattaggagttatagatttttataaaagaaccactatagttaactttaataaaaacagccttaatgaacttggaaaacatgtaataacattagctgaagcagaaggtttagaggcacatgcaaggtctatttcaatcagaatagataaataat

SEQ ID NO: 205590 - DNA, 210 bp, Unknown
  Bacterial polypeptide expressing nucleotide sequence isolated from the Sargasso Sea
caggcccaaatcatgtattaccaacctctggatcagcaaaattttcttcaggcttatcagtaaatgattttttaaaacgacattctttaatagaaataacaaaatcaggtattgaaagattaggaccatcagttataagtttagcacagcatgaaaatttagatgggcacgcaaactcggtaaaaataagaataaaaaaggataaataat

SEQ ID NO: 205591 - DNA, 226 bp, Unknown
  Bacterial polypeptide expressing nucleotide sequence isolated from the Sargasso Sea
tatgggcgattatattgctggccccaatcatgttctaccaacttcgggatctgcaaagttttcctctggtttatcagtaaatgattttttaaaaagacattctcttataaaaataacaaaatcaggtattgaaagattaggtccattagttataaatttagcaaaacatgaaaatttagagggtcacgctaactcgattaaaataagattaaaaaaaggattttag

SEQ ID NO: 205592 - DNA, 496 bp, Unknown
  Bacterial polypeptide expressing nucleotide sequence isolated from the Sargasso Sea
gatgaagacgtgtccgattagccgattggatatatccgagcctgactttgaggccgcctttggccgtttgcttatcagcccggcagaggccgacgcggaccttgcgcagaccgtgacacagattgtggcagcgatagtgcaagagggtgatgccgcgctggtcaggtataccaacgaactggatcgacgagctgtagaagaagctcaggcgctgcgtgtcagctcggatgccatcgaacaggctttatccgatttgaaccccgaggtgtcttcggcgcttacgcgggcggcggcgcgtattcgggggttccacgaacgtcagcgtaccgagagttggcaatacgaggacgaagaaggcaacctgctgggtcagcgagtctcaccgctcgactgtgtgggggtttatgtgcccggcggtcgggcgagctatccgtcttcggtgctgatgaacgcgattcctgcgaaagttgcctgtgtcgagcgcgttgtcatggtc

SEQ ID NO: 205593 - DNA, 943 bp, Unknown
  Bacterial polypeptide expressing nucleotide sequence isolated from the Sargasso Sea
gaggcacaattaaaaaattatggaaaagattttgaagttgagctatcaaaaggattgtacgctggtcaaaagttaataccagttaatacagctggttgctatatacctggaggaagatatgcgcatattgcttcagctgttatgagcgtgactacagcaaaagttgcaggagtaaaaaatattattgcttgcagccctccaaaagaaagtgtaggcgcacatccagcaattatatataccgcaaatttatgtggtgctgatgtaattttaaatttaggaggtgtgccggcaatagctgctatgacttatggtatgtttaataacgctcctgctgacatattggttggtcctggaaaccagtttgtagccgaagctaaaagaattttatttggaaaagttggtattgacttatttgctggtcctactgagattgctatcattgcagatgaaactgcagatccagagattgttgcatttgatctagttggtcaggcagaacacggttataattctcctgcatggctttacacaactagtaaaaaacttgcagatgcagttataaaaagagttccagaattaatttcagaactgccagaattaccaaaatcaagtgctgaagctgcttggaaagattatggtgaagttattctttgtgacactgatgaagaaatggcaaagataagtgatgaatatgctccagaacatttagaagtacaaactaaaaatttaaagtggtttcatgatagattaaaaaattatggatcattgtttattggagaagaaacaactgtagcgtatggagacaaatgttctgggacaaatcatatcctgcctacaaaaggtgctggtaaatatacagggggtttatttgtaggtaaatttatcaaaactttaagttttcaaagaatgaccaaagaatcgactaaggaagtcggatcagcag

SEQ ID NO: 205594 - DNA, 845 bp, Unknown
  Bacterial polypeptide expressing nucleotide sequence isolated from the Sargasso Sea
aaatactaaagatgatattcaattttctcatgaaagagttagaaaatttgctgaagcgcagcttaaaaattatggacaagattttgaggttgaattatctaaaggcttgtatgctggtcaaaaattaatccctgttaatacagcaggatgttatgttcctgctggtagatatgctcatatagcatctgcggtaatgagtgtaacgacagcaaaagttgcaggagtaaaaaatataattgtatgtagttctcctaaacctggtgtaggtgtgcatccctctattgtttatacttcagatttatgtggagctgatgttattatgaatttaggaggagtccaagccattgccgcaatgaccaatggtttgtttggaaatgctccagcagatattttggttggcccaggaaaccaatttgttgcagaagcgaaaagattgctttttggaaaagttggtattgatttgtttgcgggaccaactgaaattgctgttatagctgatgacactgcagatgcagaacttgtagcatttgatttggttgggcaagctgagcacggatataattctcctgcttggttatttactaatagcaaaaaattagcagactatgtcatgaaaagagttccagaattaattgccgatttaccagaattgccaagggaaaattcagaagctgcttggagagattatggtgaagtaatcctttgcgatactgatgaggaaattgcgaaagttagtgatgaatatgccccagaacacttagaagtacaaaccaaaaatctaaaatggtttcatgatagattaaaaaattatggatcattatttataggtgaagaaacaactgtag

SEQ ID NO: 205595 - DNA, 644 bp, Unknown
  Bacterial polypeptide expressing nucleotide sequence isolated from the Sargasso Sea
atacgggaaagtaggaattgatttatttgcaggaccaactgagataggaattatagctgatcacacagcagataaagaaatgattgctgttgatttagtaggacaagcagagcatggaccgaactcccctgcttggctatattccactgatcaaaaattatgtgactatgttattcaaagagtacctgaattaattgctgcacttcctgaaacgtcaagaaataatgctggagcagcatggcgagattacggagaagttattctatgtgatacgaatgaagagttatgtgagattagtgatcaatatgcacctgaacatttagaagtacaagcagaaaatttgaattggtggcttgaaaaattaaaaaactatggatctttatttttaggcgaagagacaactgttgcttacggagataaatgctcaggtactaatcatattcttccaacaaaaggggcagcaaaatatacgggcggtttatttgttggtaagtttattaaaacagttactttccagcgtatgtcaaaagaatcaaataaagaagttggtgcagcagctgctagaatttctcggttagaaggaatggaagcacacgctagaacaggagatgctcgtttacgaaaatacggatttcaaaactaaa

SEQ ID NO: 205596 - DNA, 610 bp, Unknown
  Bacterial polypeptide expressing nucleotide sequence isolated from the Sargasso Sea
tttaggtggagttcaagcaatcgccgcaatgacaaatggattatttggaaatgcaccagctgatattttggttgggccaggaaatcaatttgttgctgaagcaaaaagaatattatttggtaaagtaggaatagatttattcgctggtcctacagaaattgctgtaattgctgatgaaacggctgatgctgagatagtagcatttgatttagtgggtcaagctgaacatggctataattcacctgcttggttgtttactaccagtaaaaaattagcagaagaagttatgaaaagggtacctgagttaattgcagatttaccagaactacctaaacaaagtgcaggggatgcatggagagattttggtgaagttattctttgcgaaactgatgaagaaatggcgaaaattagtgatgaatatgctccagagcatttagaagttcagacaaaaaatttgaaatggtttcatgaaagattaaaaaactatggatcattatttataggcgaagaaacaactgttgcctacggtgacaaatgttcaggaacaaatcatattcttccaacaaaaggcgctggtagatatactggtggattatttgtaggtaaattt

SEQ ID NO: 205597 - DNA, 667 bp, Unknown
  Bacterial polypeptide expressing nucleotide sequence isolated from the Sargasso Sea
aatgaaaaaaattcttaattttgatagtaagggtttttcagagaaactaaatgattatatttcaaataatagaagtacaaacctagatgtttcggaaaaagtaaaaattatattagaaagtattatatgtgaaggagataaggctcttagtgagttaacatttaaatatgataattatgatattatgaaagaaggtatatgtgtagataaaaaagatatagatgttgcttacagagaatgcgacaaagaattagttgatgctatagaaaaagcagctgatagaattagctcttttcacgaaagacaattgccaaataatataagttataaggatgatagtaatgttcagttatcatctagatggactcctctagattctgttgggctatatgttcctggtggcaaggcttcttatcctagttctgttattatgacagctattccagcgaagactgcaaaagttcccgaagtttctatgtgtgttccttgtcctaagggatatttaaatccatctatattggttgctgctaaagtatgtggcgtagaaaaaatatataaaattggaggagctcaagctattgcagctatggcttatggaacaaatactgtaaaaaaagtaaataaaatattcggacctggaaatgcatgggttgcagaagctaaaagg

SEQ ID NO: 205598 - DNA, 457 bp, Unknown
  Bacterial polypeptide expressing nucleotide sequence isolated from the Sargasso Sea
atgaataaaataattaatacaagcaattcaggctttcaacaggaatttgaaaatttagtaaatactaataggtcagatgacaaagatgtaaaagatgttgtagttaaaataattaatgatgtaagaaccaaaggtgatgatgctttaatagaatataccaatcaacttgatcgcaatgaactttcaaaatcaaacttcattttagatgaaactacaatcaacactcagacagatggattatctgaaaagatatgcaaggctattcaaacagcagcagatcgagttaggatataccatgaaaaacaattaccgcaggatttaagttttaatgatgatctaaaatctactcttggatacatgtggaagcctttggaaacagcagggatttatgtaccaggtggaacagcaagctaccctagtacagttcttatgaatgcaataccggctatggtcgcag

SEQ ID NO: 205599 - DNA, 740 bp, Unknown
  Bacterial polypeptide expressing nucleotide sequence isolated from the Sargasso Sea
aatgaaaatactaaatagcactaataagaaatttaataattctttaaataaattacttttactacgaaaaaaaaaagttcaatccagttctatctcagtgaccagtattgttagagacgtgaaaaaaaatggtgataaagctttattgaaatatgaaaaaagatttaatcaaaacagaactattgttcctacgtcaaatcaaattaataattcaataaaatctttagatcaaaaagtaaaaaaagcaattgatactgcttatgatagaatttacaaatttcattcttttcaaaaattcaaaaatatttcttttatagataagtttaaaaataaacttgaatataaatatttaccaatagattcagttgcaatatatgtacctggttcttcagcatcttatccatcaagtgttttaatgaatgctgtacctgcaattgttgctggtgttaaaagattaataatgattaaccctggttttaaaggaaagcaaaatccagcagttttgtatgcagcaagaaaatgtaaaataaaggaaatttattctattggtggtccttctgcagttgctgctgctgcctacggaacaaaaaaaattaaaaaggttgataaaattgttggtcccggaaacgcttacgtggctgcagcaaaaaaagaggtttttggagatgttggcattgaaggtatgacagctggtccttcggaggtaactattgtttgtgataaattttcaaatcctgaat

SEQ ID NO: 205600 - DNA, 502 bp, Unknown
  Bacterial polypeptide expressing nucleotide sequence isolated from the Sargasso Sea
taattttcaaagtattttaataacaaataataaaaattttataaaaaaaattaatggcaaccttaatagtgaacttaacaaaattcctagaaaattaattgcaaagaaaagtctttttaaaaatggattgatattaattacctcaaataataagcaaatagtagattcaattaatgaaatagcaccagaacatttagaattaaatttaaataattataaaaagttaattaataaaattaaaaatgctggaagtatttgtattggtagatattcagcaatggctgtcacagactataatgttggtacaaatcacgttttgccaacttttgggtcagcgaaattttcttcaggacttaatgtgagtgaattttataaaaaaacaagctacataaagctttcaaaaaaaggcattgaagttattggcaagaaagctataacacttgccgagtatgagggattatttggtcatgctcaaagtataaagtctaggataaggagataa

SEQ ID NO: 205601 - DNA, 862 bp, Unknown
  Bacterial polypeptide expressing nucleotide sequence isolated from the Sargasso Sea
caaaagttagttcctgttaatactgctggttgttacgtgcctggtggaagatatgctcatattgcttctgctgtaatgagtgtaacaacagctaaagttgctggtgttaaaaatatcatagcatgtagtcctccaaaagaaggtgttggggcacatcctgctattgtttatacagccaatttatgtggagctgacgttatattaaatttaggtggtgttccagctattgctgcaatgacttatggcatgtttggtaattcgccagctgatattttagttggtcctggaaaccagtttgttgcagaagcaaaaagaattttatttggtaaagttggaattgatttatttgctggtcctactgagattgctgtaatagcagatgaaactgcagatccagaaattgttgccgttgatttagttggtcaagcggagcatggatataattcaccagcttggttgttcacaacaagtaaaaaagtagctgacgaagtcataaaaagaatgccagaattaattgcagatttaccagaagttccaagaataagtgcagaagcagcttggaaagattatggagaagtaattctttgtgatactaatgaagaaatggctacgataagtgatgaatatgcacctgaacatttagaagtacaaacaaaaaatctaaaatggtttcatgacagattaaaaaattatggctcattatttattggagaagaaacgacagttgcttatggtgataaatgttcaggaacaaatcacattcttccaacaaaaggtgctggtaaatacacgggaggattgtttgtcggtaaatttataaaaacattaagttttcaaagaatgacaaaagagtctacaaaag

SEQ ID NO: 205602 - DNA, 584 bp, Unknown
  Bacterial polypeptide expressing nucleotide sequence isolated from the Sargasso Sea
aatttattctattggtggtccctctgcaatcgcagcggctgcatatggaactaaatcaataaaacctgtaaacaaaattgtaggaccaggtaattcgtatgttgcttcagcgaaaaaagaagtttttggagatataggcattgagtcaatgacggctggaccctcagaggttttagttgtttgtgacaataaatccaatccagaatggctagcaagcgatcttattgcccaagctgaacatgactctcttgcccagtgtattctgatttcaaaagataaaaatattttaaaaaaaactaagaatcaaatattaaaacaacttaaagatatttcgagaagttcagttgcaaaaaaaagtttaatgatgaacggtatactaatctacgaaaattcagaaaataaaattgtagaaataataaataagatcggaccagaacacttagagctaaatataaaaaactataaatctttagtaccaaagatcaaaaatgcaggttctatttgcttaggaaaatatgctgtgatggctatgacagattatggagtaccaggcaccaatcatgttctgccaactaatatgacca

SEQ ID NO: 205603 - DNA, 758 bp, Unknown
  Bacterial polypeptide expressing nucleotide sequence isolated from the Sargasso Sea
atatccaagttcagctatcatgtctgttatcacagctgctgaggcaggagttgagagaattgttgttgtttcacctcctgactctaatggaaaaattgatccaatgactatcactgtagctcaaaattgtggcgccgaaatttacaaaatggggggtgcacaagcgattgcagctcttgcatatggaacaaaatctgtacctaaggttgataaaatagttggtcctggtggaaaatttgttagtattgcaaaagccattgttagtgaagaaacctcgatagatatgattgctggtccaacagaacttggtattatagcagatataagctcaaatcctgagttaattgcatatgatcttatctcccaagcagaacacagtaatgatactatgtgttttgtaattactacttcgaaaaacctagcaaaacaaattcagaattcacttgaaaagataattccagacataaacagaaattctattgtaaaacagagtattactaaaaatggatttattgcaatatgcaagaatcaaaatgcaataattgaattagcaaataaaattgctcccgaacatatggaattgatggtaaaaaatggaaaagcactttccaaaaaaattactggacctggattagtgttagttggaagcaatactccttcatcagctagtgattatcttctaggaacaaatcacatacttcctactagtggatttggtagagtgagaggcggattatctgttttagactttctaaaat

SEQ ID NO: 205604 - DNA, 667 bp, Unknown
  Bacterial polypeptide expressing nucleotide sequence isolated from the Sargasso Sea
atgaaaattattacttcaagccaaaatattgaatggagaaaatcagtctcaataaaagatgagttaaacactgctattgaatttgataatctcttgaaaaaacaatcctttaagggtttgcaaaaaattaataagcagcttaatcaaaaaaatataaaaaaattaaaagttactaaaaaagaaatagttaatgctggaaagctagttacagatgatgagaaatttgctttatatgaagcaatcaagaacatatcatatgtttcaaaatctcaacttaaggatattagtaattcgattgaacctattaatggtttaactatatgggataaatttattccaattaaaagcgttggcttatatgttcctggtggaacagctccacttgtttcatcattcttgatgcaagtaatacctgcgattacagctggttgcaaagatattattgtttgcactcctcctgataaaaatggaaaggtttatcctgcaatattatggctagctgaacaattaaacgtttcaaatatttataaaattggtggagctcaagctatattgtcaatggctaatggctaccttggaataccaaaagtaaacaaaatatttggtcctggtaattcttatgttgcagaagcaaaaaagtatgtaagtaataaagtagcaattgatt

SEQ ID NO: 205605 - DNA, 685 bp, Unknown
  Bacterial polypeptide expressing nucleotide sequence isolated from the Sargasso Sea
gttgataaaattattcggcccaggaaatttatatgtcgcaaaagcaaaaaaagaagtattcggagatgtaggaattgaaggaatggttgcgggtccatcagaaataactgtagtagccgataaagattctgaaattaatagtgttataacatctttaattggccaggcagaacatgatattaattctcaaagtatattaatatctaaaaacctcaaactattaaaagaagtaaataaattaattaaggaaaatttaaaaaaaatacacagagagaaaattgcaaagaaaagtttaaaaaaaaatggtttattaattcatgcaacaaatgatcaaaatataattgaaattataaatttgatagctccagaacacttggaattgaatattttaaagccaaaaaaatacttaaataaaattgttaatgcaggaagtatttgtgtaggtaaattttcagcaatggctgtcacagattataatgcaggaacaaaccatgttttgcctacgatgggttcagcaagattttcatcagggttaaatgttacagatttttacaaaaaaattagctatataaatttatcaaaaaagggtattgaagtaattggcaagaaagctataacacttgcggagtatgaaaatttagaaggacatgctcagagtattaaatcaagaattaggagtagttaa

SEQ ID NO: 205606 - DNA, 763 bp, Unknown
  Bacterial polypeptide expressing nucleotide sequence isolated from the Sargasso Sea
aatgaatttaggtggagttcaggctattgctgcaatgacttatggtctttttggtaatgcacctgctgatatgcttgttggtcctggaaatcaatttgttgcagaatcaaaaagaattttatttggcaaagtaggtatagatttatttgctggtcctacagaaattgcagttatagcagatgaaacagcagacccagaattagttgctttcgatttagttggacaagctgagcatggttacaattctcctgcatggttatttactactagtaaatcattagctgaatatgtaatgaaaagagtgccagaattgattgcagacttaccagacttaccaagagaaaactctggtgcagcttggagagactatggggaagttattttatgcgatacagatgaagaaatggctaaaatcagtgatgaatatgctcctgaacatttagagatacagactaaaaaccttcaatggtttcatgatagattaaaaaactacggatcattatttattggagaagaaactacagttgcttatggagataaatgctctggaacaaaccacattttaccaacaaaaggtgcgggtaaatatacaggcggtttatttgttggaaaattcattaaaacattgagtttccaaagaatgacaaaggagtcaactaaggaagtgggtgcagcctgtgcacgaatttcaagatatgaaggtatggaagctcatgctcgaacaggagatgtaagacttagaaaatatggattttctaattag

SEQ ID NO: 205607 - DNA, 418 bp, Unknown
  Bacterial polypeptide expressing nucleotide sequence isolated from the Sargasso Sea
attgcaaagttttttaggaagaagaaaactaagacaatcaagccaatcaacattggtaaaaaaaatcatttcagatgtcagaaaaaatggtgataaagctttaattaaatatgaaaaaaaattttcaagcaaaaaatccaactcgaataagattaaattttctaaaaatgaaataaacaaaatttcaaaaacaattaataaaaaattaaaattttcgattgatttagcttttaaaagaattaaactttttcactctaaacaaaaattttcctcttttaagtataaagatcaatttgataatttgctttcctataattactcgccaattgagagcgtaggagtttatgtacctggaggaactgctagttatcctagtacagttttaatgaattgcatacctgcgctagtagctggggta

SEQ ID NO: 205608 - DNA, 675 bp, Unknown
  Bacterial polypeptide expressing nucleotide sequence isolated from the Sargasso Sea
aatcaatttgttgcagagtcaaaaagaattttattggcaaagtgggaatagatttattgctgggtcctacagaaattgcagttatagcagatgaaacagctgacccagaattagttgctttcgatttagttggacaagctgagcatggttacaattctcctgcatggttatttactactagtaaatcattagctgaatatgtaatgaaaagagtgccagaattgattgcagacttaccagacttaccgagagaaaactctggtgcagcttggagagactatggggaagttattttatgcgatacagacgaagaaatggcaaaaatcagtgatgaatatgctcctgaacatttagagatacagactaaaaaccttcaatggtttcatgatcgattaaaaaactacggatcattatttattggagaagaaactacagttgcttatggtgataaatgctctgggacaaaccatattttaccaacaaaaggtgcgggaaaatatacaggcggtttatttgtcggaaaattcattaaaacattgagtttccaaagaatgacaaaggaatcaactaaagaagtgggcgcagcttgtgcaagaatttcaagatatgaaggtatggaagctcatgctcgaactggagatgtaagacttagaaaatacggattttctaattagc

SEQ ID NO: 205609 - DNA, 667 bp, Unknown
  Bacterial polypeptide expressing nucleotide sequence isolated from the Sargasso Sea
gttgcagagtcaaaaagaattttatttggcaaagtgggaatagatttatttgctggtcctacagaaattgcagttatagcagatgaaacagctgacccagaattagttgctttcgatttagttggacaagctgagcatggttacaattctcctgcatggttatttactactagtaaatcattagctgaatatgtaatgaaaagagtgccagaattgattgcagacttaccagacttaccgagagaaaactctggtgcagcttggagagactatggggaagttattttatgcgatacagacgaagaaatggcaaaaatcagtgatgaatatgctcctgaacatttagagatacagactaaaaaccttcaatggtttcatgatcgattaaaaaactacggatcattatttattggagaagaaactacagttgcttatggtgataaatgctctgggacaaaccatattttaccaacaaaaggtgcgggaaaatatacaggcggtttatttgtcggaaaattcattaaaacattgagtttccaaagaatgacaaaggaatcaaccaaagaagtaggtgcagcgtgtgctagaatttcaagatacgagggtatggaagcgcatgcaagaactggagatgttagacttagaaaatatgggtttcaaaattagt

SEQ ID NO: 205610 - DNA, 626 bp, Unknown
  Bacterial polypeptide expressing nucleotide sequence isolated from the Sargasso Sea
tggggatgttggcatagatatggtagctggaccatccgaagtaagcatagttgctgataaatattctaacccagagtggattgcatcagatttgatagcacaagccgagcacgatactttctcccaatcaatacttattactaatagtaaagacttaataaaatcagttaatttttgtttaaagtcacaattaataaatttaccaaaaaaacatattgcaactaaaagtctaaaaaaatttggtctagcgatttatgctaataaacttagttcaattgtagaatcagtaaatattatatctcctgaacacctcgaaataaactataggcattatcgtgatataataaaaaacttaaaaaacgctggttctatttttataggaaaattttcgccagaagcaatgggtgattatatagctggacctaatcatgttttaccaacttctggatcagcaaaattttcatctggcctatcggtaagtgattttcttaaacgacattctctaataaaaattacaaaaacaggtattgaaagattaggaccatcagttataaatttagcagagcatgaaaatttgagaggccatgctaattctataaaaatgagattaaaaaaggataattaat

SEQ ID NO: 205611 - DNA, 667 bp, Unknown
  Bacterial polypeptide expressing nucleotide sequence isolated from the Sargasso Sea
tttgctgaagcaaaaagaattttattttggaaaagttggtatagatttatttgcaggacctacagaaattgccgtaattgcagatgagacagcggatcctgaaatggttgcatatgatttagttggacaagctgagcacggttataactcaccagcctggctatttactaaaagtaaaaaagttgcagattatgtgatgcaaagggttccagaattgattgaagatttaccagatctaccaagagaaaattcaggtgcagcatggagagattatggagaagtaattctctgtgataccgacgaagagattgctaaagtgagcgatgaatacgctcctgaacatttagaagttcaaactaaaaatttacaatggtatcacgacagattaaaaaattatggatctctatttattggtgaagagacaactgttgcttatggagataaatgttcaggtacaaaccatatactaccaactaaaggtgctggtagatacactggtggtttatttgttggtaaatttattaaaactttgagttttcaaagaatgactaaagaatcgacaaaagaagttggtgcagcttgtgcaagaatttctagatacgaaggaatggaagctcatgcaagaacaggtgatgtaagattaagaaaatacggtttttcaaattaa

SEQ ID NO: 205612 - DNA, 677 bp, Unknown
  Bacterial polypeptide expressing nucleotide sequence isolated from the Sargasso Sea
tatgaagatcattaataataataaaaaagaagctattgaagaattaaaaaggatttctactcgaactaattcagaaaacaataataatataaatacaattgttgaagaaattcttaatgatgtaaagatttctggagataaagcagtagaaaaatatacaaaaaaatttgatggtttcgaccctaaccctatgcaagtgagtgcggatcaaataaagaatgcatgggatgaaattgataacaatttgaagcgctcacttgaggtagctcacaaaagaattcaaaaattccatgaaaaagaaattcctcaatcattcacaataaaaggagaatatggtgatgtagtccaaagaaaatggagaccagttaagaatgcaggtatttatattcctggaggaagagctgcttatccaagtactgttttaatgaatgcaatacctgcaaaagtggcaggagtagaagaaattataatggtatctcctgggaataaagaaggggaaataaacaaagctgttttagctgcagctcacttatcagggatcaataaagtatttagaattgggggagctcaggcaattggcgctttagcatttggcacaacccaaatcactaaagttgatgttatttcaggaccagggaatatctttgttacaactgcaaaaaaactcatttatggct

SEQ ID NO: 205613 - DNA, 866 bp, Unknown
  Bacterial polypeptide expressing nucleotide sequence isolated from the Sargasso Sea
agtcgcaggagttaagaaaataattacctgcgctcccccttatgaaggacgcccagctgatgccatcgttacagctcagcatcttggaggagctaacgatattttcgtgatcggaggagtacaggctgttgcggcaatggcattaggaactgaatccatacctgctgtagacatgctggttggtccaggcaatgcctatgttgcagaagccaagagacagctttatggaagagtaggtattgacctttttgctggtccaaccgaaactctggtaattgctgatgaaacagtagacggagaaatgtgtgccgtcgaccttctggggcaggcagaacatggcccaacttctcctgctgtcctcttgacaaattctatgaaactggccaaaaatactcttgaggaagtagagaggcagctgaaaaccctttcaacacgtgacaccgcaggacctgcatggcaaaactacggtcagattatcgtggcagattcttatgacgaaatgcttgaaataggaaatcagctcgccttcgaacatgtccaggtaatgaccaaaaaagatgactggtttctggaaaacatggttaactacggggcacttttccttggcccacgcacaaatgtttcttttggcgacaaggtaataggcaccaatcatactctgcctacacttcgagcagccagatatacaggaggcctttgggttggtaaatttctcaagacctgtacataccagaaagtcctaagcaacgaagcgagcgtaactgtgggagaatactgttcaagattatgcaagcttgagggatttgccggacaccaggaacaggcagatctcagggttcgcagatacaaagtaaaagctgcatgac

SEQ ID NO: 205614 - DNA, 454 bp, Unknown
  Bacterial polypeptide expressing nucleotide sequence isolated from the Sargasso Sea
atgctcaaatttttaaattctaatcaaaaaaattttcaaaaaaagctagaattcattttagattctagaaaaattaagcaaagagatcagtcaaataaaataaaaaaaatattattaaatgttaaaaataaaggggataaagctgtaatcagctatgaaaaaaaattttcaaaaattagattaaaatcaaaaaaaattaaattttcaaaaaatgagataagtaaaatttcaagagctgttgacaaaaaattaaaaaattctatcgatttagcttttaaaagaataaaattttttcactcaaaacaaaaattttcttcttttaaatataaagacaggtttcgaaatgaagtctcgtataaatattcagccatagacaagatcggagtttatgtaccgggtggaactgcaagctatcctagtacagttttaatgaattgtattcctgctatggtcg

SEQ ID NO: 205615 - DNA, 886 bp, Unknown
  Bacterial polypeptide expressing nucleotide sequence isolated from the Sargasso Sea
gaagttgttcaaaagattctttaacgatattgaaaaaagaagagaagaaagtattaaagaaattactaaaaaatttgataaatatgaaggtgagatagttgtatcaaaagaaaagattgaagaagctatcaaaaaagttgatcaaaaaacaaaagatgatgttcagtttgcttatgaaagaataaaaaaatttgctgaacaccaacttaaaagcatgaataatgaatttgaggtagagctttcaaaaggattatttgcaggtcaaagacttataccaattagtacagctgggtgttatataccaggtggacgctatgcacatatttcatcagccaccatggctataacaccagcaaaggttgctggtgttaaaactataatttgtgcaagtcctccaaaagatgagaatggagcacatcctggaattatttatgcagctaatctttgtggagctgacattatattaaatttgggtggaatagcagctataggatcaatgacatacggatgttttggaaatcctgctgttgattttttagttggagctggcaatcaatatgtttcagaagctaaaagaatagtttatggacaagtaggaatcgaccaatttgctggtccaacagaaatagcagttattgcagataaatcagcagataaagaaattgttgcagtagacatagttgggcaagccgaacatggttacaattcacctggatggctttttacaactgataaatctttagctgagtatgtgatgaagagaatacctgaattgattaaagagttaccagaacttccaagaactagcgcagaagctgcctggagagattacggagaggtaatactttgtgatacaaacgaagaaatggccaaagtaagcgataag

SEQ ID NO: 205616 - DNA, 801 bp, Unknown
  Bacterial polypeptide expressing nucleotide sequence isolated from the Sargasso Sea
agaaagtttgaaaataaaaaggctactttaaataatttagaaataagccaaaaaactctaaaggaagcttataactctatttcaaatgatagtaaaaaagcactcaaattagcttataaaagaattcattattatcactcaaaacaaaaaaaattatcatattcttttagagatcaaatcgactcaaaattttatattcaatggaatcctattgaaaatgttggcttatacattcctggtgggttagcatcttatccctcaactgttttaatgacagttatacctgcaaaaatagccaaggttccaaatataatgatctgcgttccctctcaaaatggtgaaacatcaaaactaactttagcagctgcttatatgtgcggtgtaaataaagtctacaatgtaggtggagctcaggcgattgcagctttcgcttttggcactaagttaataaaaaaagcagataaagtatttggtccaggaaaccaatatgtagccgaagcaaaaaaacaattatttggatttattggaatagatttaccagcaggaccatcagaagttttagtaatagcaaataataaatcaaatcccttatggatagcttatgatgtcctcgctcaaggcgagcatgatcctaattcaaaaacctatgttatagctaaaaataaaaatattttacttaaagtaaaaaatgaacttcagagaataatgaaagtgacaaaattaaaaaatgttgatcgatctattagaaataattgcttcttaataacagttaagagtcaaaaagaaatattgaaattacaa

SEQ ID NO: 205617 - DNA, 943 bp, Unknown
  Bacterial polypeptide expressing nucleotide sequence isolated from the Sargasso Sea
aagcttgtcccggtcaacacagcaggatgttatgtacctggtggaagatatgctcatatagcttcagctgtaatgagtgttaccacagcaaaagttgcaggagtaaaaaatgtaattgcttgtagtccgccaaaagctggagttggagctcatccaactatagtttatacagcagatctttgtggagcagatgttataatgaatttaggtggggttcctgcaattgcagctatgacaaatggtttatttaagaatgaacctgctgatattattgtgggcccaggcaatcagtttgttgcagaagcaaaaagaattttatttggtaagataggaatagatttatttgctggtcctaccgaaattgcaataattgctgatgaaacagctgacccagaaatagttgcagtagatttagttggtcaagctgaacatggttacaattctccagcatggctttataccactagtcaagatttagccgataaagtaatgaaaagagttcctgaattaattgcagatttaccggaacttcctagaactagcgctgaagctgcttggagagattatggagaagtcgtcctttgtgatactgatgaggaaatggcttcagtaagtgatgaatacgctccagaacatttagaagttcaaactaaaaatttaaaatggtttcatgacagactaaaaaactatggttcattatttattggagaagaaacaacagttgcttatggtgataaatgttcaggaacaaatcatatacttcccacaaaaggagcaggaagatatactggtggattattcgtaggtaaatttattaaaacactaagttttcaaagaatgacaaaagagtctacagaacttgtaggtgcagctgcagcaagactttcaagatacgaaagaatggaagcacacgctagaacaggagatgtgagacttaaaaaat

SEQ ID NO: 205618 - DNA, 677 bp, Unknown
  Bacterial polypeptide expressing nucleotide sequence isolated from the Sargasso Sea
aaaccagtttgttgctgaagcaaaaagaattttatatggcaaagtgggtattgatttgtttgcaggtccaactgaaattggaattattgctgatgcaaaagctgatccagaaatagttgctgttgatttggtaggtcaagctgaacatggttataattctccatgttggctgtatacaactagtaaagaattagctgaaaaagttatgaaaagagttccagagttaattgcagagttaccagagattccaagaactagtgcagaggcggcttggagagattacggtgaggttattctttgtgacacagatgaagagatcgtaaaaattagtgatgaatacgctccagagcatttagaagttcaaacagaaaatttaaaatggttccacgaacgattaacaaattatggatcactatttgtcggtgaggaaactactgttgcttacggagataaatgttcaggcacaaaccacattttaccaactaaaggagctggtagatataccggaggtttatttgttggtaagtttattaaaactttaagttttcaaagaatgaccaaagagtctacagaactagttggtgctgctgctgcaagaatatctagatatgaaggaatggaagcccatgctagaactggagatgtaagactaaaaaaatatggatattctaattaat

SEQ ID NO: 205619 - DNA, 312 bp, Unknown
  Bacterial polypeptide expressing nucleotide sequence isolated from the Sargasso Sea
atttagaactaaatattaaaaattataatataattaaaaataaaattaataacgtaggttctatttttcttggaaaatattcgccagaagccgtgggggattatttggctggcccaaatcatgttcttccaacaacaggtacagctaaattttcctcaggattaagtgtatatgattttttaaaaaggatttcttatataaatttgtcgaaaaagggtattgaaaatcttggaccttcagttataactttatcggaatttgaaggtttaaaaggacactcaaattctgttaaattaagaataaaaaaataag

SEQ ID NO: 205620 - DNA, 394 bp, Unknown
  Bacterial polypeptide expressing nucleotide sequence isolated from the Sargasso Sea
aatcgcggaatttttatccatgtcgacagtattgagcaagctgcggaagtaagcaacgatatagcacctgagcacctcgaaatttccatagatacgccagaatctatcgtgccgatgattacaaacgctggtgctatttttcttgggaggtatagtgcagaggccttaggagattattgtgccggtcctagtcatgttctcccgacatcgggtacctctagatttttttcggcactaggagtttgcgattttcaaaagagaagttcaattattagttgttctcaaaaaggggcttctaaattggctgaaactgcttccatacttgcgcgcaacgaaaaccttcaagcgcacgcggtttctgctgagtttagattacatgaaaagcttaactagt

SEQ ID NO: 205621 - DNA, 650 bp, Unknown
  Bacterial polypeptide expressing nucleotide sequence isolated from the Sargasso Sea
gttgctaggcgtaaaaaatattgttgcatgcagtcctcctaaagagggtgtgggtgctcatccaactatagtttataccgctgatttatgtggagcagatgtaattttaaatcttggtggtgttccagctattgcggcaatgacaaatggattatttaataacccccctgcggatattattgttggaccaggtaatcagtttgtggctgaagcaaaaagaattttgtttggaaaagtgggtattgatttgtttgctggaccaactgaaattggaattattgctgatgctaaagcagatcctgaaattgtagcagttgatttggttggccaagctgaacacggctataattcaccttgttggttgtatacaactagtaaagaacttgcagaaaaggttatgaaaagagttccagaattaattgccgaacttcctgaagttccaaggcaaagtgcagatgctgcttggagagattacggtgaagtaattttatgtgataccgacgaggaaatggtaaaaattagtgatgagtacgcaccagaacatttagaagttcaaacagaaaatttaaaatggtttcatgaaagactaaccaactatggatcattgtttgttggagaagaaactaccgttgcttatggagacaaatgtt

SEQ ID NO: 205622 - DNA, 682 bp, Unknown
  Bacterial polypeptide expressing nucleotide sequence isolated from the Sargasso Sea
gttccaggaatagctgctatgacaaatggtttatttaaaaatcctcctgcagatattttggttggaccaggaaatcaatttgtagctgaagctaaaagaatattatttggaaaagttggtattgatctatttgcaggtccaactgaaattgctgtaattgcagacgataaagctgatgctgaaatggttgctgttgacttagttggtcaagcagaacatggttataactctcctgcttggttatacacaacaagtaaaagacttgctgaagaagtaatgaaaagagttccagaattaatagctgaattacctgaggttcctagaacaagtgctgaagctgcctggagagattatggtgaagttattctttgtgatacagatgaagaaatggcaactgttagtgatgaatatgctccagaacatttagaagttcaaacacaaaatcttgaatggtttcataaaagattaaaaaactatggatcgttatttattggtgaagaaactactgttgcttacggagataaatgttccggcacaaatcacattttacctacaaaaggtgcgggaagatatacaggtggtttatttgttggaaaatttataaaaactttaagttttcaaagaatgacaaaagaatctactaaatcagttggagctgcttgtgcaagaatatcaagatatg

SEQ ID NO: 205623 - DNA, 703 bp, Unknown
  Bacterial polypeptide expressing nucleotide sequence isolated from the Sargasso Sea
aatttttgataaattattagacaatttacttttacagagaaaaaaaaaaattcaattaaactctgtttctgtatcaaaaataattgaagatgttaaaaaaaatggagataaagcattattaaaatacgagaaaagatttaatcaaaacaacataattattccaaccccaaaacaaataaaaaaatctataaattcacttgataaaaaagtaaagaaagctattgatacggcttataatagaatttataaatttcattcacttcaaaaatttaaaaatatttcttatacagataaattaaaaaataaactcgaatataaatatttgcctttagagtcggttgcaatttatgttcctggttctactgcctcatacccatcgagcgtgttgatgaacgctattccagctattgtagcaggagttaagagaatagctatgattaatccaggtcataaaggaaaacaaaatccagcagtattatacgctgcaaaaaaatgtaaaataaaagaaatttattctatcggaggcccttctgctattgcagctgtatcgtatgggaccaagaaaattaaaaaagttcataaaatagttggtccaggtaatgcatatgttgcggcagcaaaaaaagaggtttttggtgttgttggaatagagggcatgactgcaggtccatcagaagttactatagtttgtgataaattctca

SEQ ID NO: 205624 - DNA, 534 bp, Unknown
  Bacterial polypeptide expressing nucleotide sequence isolated from the Sargasso Sea
cagatttaatggcacaagcagaacatgatgaaaatgcacagtcaatattaattactgacaataaaaattttgctactaaagttataaattcaattacaaaaattaaaaaagatctatcaaaaaagaaaattattgagaaaagtttaaaaaataatggcatcattgtcgtggtagacaacttagatattgctgcagatattataaattttgttgcaccggaacatttacatattcatattcttgataataaaaaattattatcatacataaataatgctggtggtatatttttaggtgagtattctgttgaagcttttggtgattatattgtaggaacgaatcatgttttgccgacatcaggagctgcaaaattttcatctggattaggagttttagattttatgaagagaagctctgtagttgagatgaataaaaaatctttttatgctctttcagaagatactcaaaaaatgtcgggacttgaaggtctagatggacataaattgtcagttaaaattagacaaaagaaataat

SEQ ID NO: 205625 - DNA, 724 bp, Unknown
  Bacterial polypeptide expressing nucleotide sequence isolated from the Sargasso Sea
aatggaattatttgggaatgcgccagctgatattttggttgggccaggaaatcaatttgttgctgaagcaaaaagaatattgtttggaaaagttggaattgatttatttgctggtcctacagaaattgctgtaattgctgatgaaacggctgatgctgagatagtagcatttgatttagttggtcaagctgaacatggctataattcacctgcttggttgtttactactagtaaaaaattagcagaagaagttatgaaaagagtacctgagttaattgcagatttaccagaactacctaaacaaagtgcaggggatgcatggagagattttggtgaagttattctttgcgacactgatgaagaaatggcaaaaattagtgatgaatatgcaccagagcatttagaagttcagacaaaaaatttgaaatggtttcatgaaagattaaaaaactatggatcattatttataggtgaagaaacaacggtagcttacggtgacaaatgttcaggaacaaaccatattcttccaactaaaggtgctggaaggtatacgggtggattatttgttggtaaatttattaaaacactaagttttcaaagaatgacgaaagagtctacaaaagaagtgggtgctgcggctgcaagaatttcaagatacgaaggaatggaagcccacgcacgaactggcgatgtaagacttagaaaatacggtttttcaaattag

SEQ ID NO: 205626 - DNA, 787 bp, Unknown
  Bacterial polypeptide expressing nucleotide sequence isolated from the Sargasso Sea
tatgaaaatattaaatagtaaaactaaaaatttcgataaaaatttggattatttactttttaagaggagaaaaagcattaaatctgagaaagtctctgtaactaatattatcaatgacgtaaaaaaaaatggtgataaagcattgattaaatatgaaaagaaatttaatcaaaattctacaatcattcctagtgctttaaaaatttctaagttaataaagtctttaaatcctaaggtcaaaaaagcgatcgacacagcctataatcgaatttacaaatttcactctttacaaaaatttaagaatatttcgtatacagatcaattcaaaaataaacttgaatataaatatttacctttagagtctgttgcaatttatgttccaggttcacttgtatcttatccatccagtgtgcttatgaatgcaataccagcaattgttgcgggagttaaaagaattgtaatgataaacccaggtttcaagggaaaccaaaatccggctgttttatacgcagcaagaaaatgtaaaattaaagaaatttactctattggtggtccatccgccatagcagcagtttcttatggaactaaaaaaattaaaagagttgataaaattgttggacctggaaattcatatgtagctgctgcaaaaaaagaagtttttggggatgttggcatcgaaggtatgatagcagggccctctgaaataactattgtttgtgataaattctcaaatcctgagtggaccgcgagtgatttaatcggtcaagcagaacatatcctcaagcac

SEQ ID NO: 205627 - DNA, 858 bp, Unknown
  Bacterial polypeptide expressing nucleotide sequence isolated from the Sargasso Sea
gataaaatagaagagataaaaaaaaatttagatcaaaaaactaaagacgatatacaattttctcatgaaagagttagaaaattcgcagaagcacaattaaaaaattatggtcaagactttgaagttgaattatctgatggtctgtatgcaggacaaaaattaatacctgtcaatactgctggatgctatgttccagctggaagatatgctcatattgcatccgctgtaatgagcgtaactacagctaaagttgctggagtaaaaaatataattgtatgtagctcacccaaaccagaaataggagtacacccttctattatttatactgctgatttatgtggagcaaatgtaattatgaatctaggtggagtacaagctattgctgcaatgacgaacggattattcggaaacgcccctgctgatattttagttggacctggaaatcaatttgttgctgaagcaaaaagaatcttatttggtaaagtaggtatagacctttttgctggaccaactgaaattgcaataatagctgatgaaacagcagatccagaaattgttgcttatgatttagttggacaagctgagcacggttataattctcctgcttggttatttacaaaaagtaaaaagttagcagatgaagtaatgaaaagagttccagaattaattgcagatttgcccgagcttccaaaacaaagtgctggtgatgcttggagagattttggagaagtaatcctgtgtgatactgatgaggaaatggcaaaaattagtgatgagtatgctcccgaacatttggaagtacaaactaaaaatttaaaatggtttcatgaaagattaaaaaattatggttctttattt

SEQ ID NO: 205628 - DNA, 961 bp, Unknown
  Bacterial polypeptide expressing nucleotide sequence isolated from the Sargasso Sea
aaaaactaaagatgatattaaattttcttacgatagagtaagaaaatttgctgaggcacaattaaaaaattatggacaagattttgaagtagagctttcaaagggcttatacgctggacaaaaattaattccagttaacacggcaggttgttatgttcctggtggaagatatgctcatatagcttctgctgtaatgagtgtaactacggctaaagttgcaggagtaaaaaatataattgcttgtagcccaccaaaagaaggtgttggtgcacatccagctataatttatacagccaatttgtgtggagcagatgcgattttaaatcttggaggagttccagcaattgctgcaatgacatatggaatgtttggaaattcaccagctgacatattggtaggtccaggtaaccaatttgtagctgaagcaaaaagaatactttatggaaaagttggaatagatttatttgccggtccaacagaaatagctgtaatcgctgatgaaactgcggactcagaaattgttgcttttgatttagtaggacaagctgaacatggttataattctcctgcctggctatttacaacaagtaaaaaacttgctgaagaagttatgaaaagagttccagagttaattgctgatttaccagaattaccaagaataagttcggaagcagcatggagagattatggagaagttatcctttgtgaaaatgaagaagaaatggctaaagtaagtgatgagtatgcacctgaacatttagagattcaaactaaaaatgataaatggtttcatgacagattaaaaaactatggatcgttatttattggtgaagaaacaactgttgcatatggagataaatgctccggaacaaaccatatattaccaacaaaaggtgctggaaaatatactggaggattatttgtaggaaaatttattaagacattaagtttcaaagaagac

SEQ ID NO: 205629 - DNA, 742 bp, Unknown
  Bacterial polypeptide expressing nucleotide sequence isolated from the Sargasso Sea
atgaagacattaaatagtaaaagtaaaaattttgataaattattagagaatttgcttttacagagaaaaaaaaaaattcaatcagactccgtttctgtaacaaatataattaaagatgttaaaaaaaatggagataaagcactattaaaatacgagaaaagattcaatcaaaacaacataattattccaagctcaaaacaaataaaaaaatctataaattcacttgataaaaaagtaaagaaggcaattgatacggcttataatagaatttataaatttcattcacttcaaaaatttaaaaatattacttatacagacaaattaaaaaataaactcgaatataaatatgtgcctttagagtctgttgcaatttatgttcctggttctactgcttcatacccttcaagtgtcttgatgaatgctattccagcaattgtagcaggtgttaagagaatagttatgattaatccaggccataaaggaaaacaaaatccagctgtattatacgccgcaaaaaaatgcaaaataaaagaaatttattctatcggaggcccttctgctattgcagcagtatcttatgggactaaaaaaattaaaaaagttcataaaatagttggtccaggaaacgcatatgttgcggcagcaaaaaaagaagtttttggtgttgttggaattgaaggtatgactgcaggtccttcagaagtgactgtcgtttgtgacaaattctcaaatcctgagtggg

SEQ ID NO: 205630 - DNA, 698 bp, Unknown
  Bacterial polypeptide expressing nucleotide sequence isolated from the Sargasso Sea
cagatattattgtggaccaggaaatcaatttgtagcagaggctaaaagaattttgtatggaaaagttggtatagatttatttgcagggccaactgagattggaattatagcagacgataaggctgatccagaaatagttgctgtagatttagttggacaagcagagcatggatataactctccttgctggctttatacaactagtaaagaattagctgaaaaagtaatgaaaagagttccagaattaattgcagaacttccagatgttcctagaacaagtgctggagcagcttggagagattatggagaagtgattctttgtgacactgatgaagagttagttaaaattagtgatgaatatgctccagagcatttagaagtacagactgaaaatttaaaatggtttcatgaaagattaacaaattatggatcattatttgtaggagaagaaacaactgttgcctatggtgataaatgttctggcacaaatcatattttaccaaccaaaggagcaggaagatatacgggtggattatttgttggaaaatttattaaaactttaagttttcaaagaatgacgaaagattctactaaattagttggtgctgctgcagctagaatttctagatatgaaggcatggaagctcatgcacgaacaggagatgtaagacttagaaaatacggtttttctaattaat

SEQ ID NO: 205631 - DNA, 618 bp, Unknown
  Bacterial polypeptide expressing nucleotide sequence isolated from the Sargasso Sea
aatgtctaaatttaaaactagatatattaattatacagataaaaaatttaaaaaaaaattcgagaatttgataaatgatgaaagaaaatcaaacaataaaattaatcttacagtcacaaaaattttaaaagaaatatttgaaaagggtgatgattgtctaaatcactatgtaggtaaatttgataaaataaaagttaaaaaaattaaagacttatacattccaaaagatattttacaaaaatcttatgatgaacttaaaacagaacagaaaaaagcattaaatattgcagctgataggattaaaaaatttcataaacatcaaattcctaaaaactttagttacaaagatgacctaaaagttaatctaggcttgacccactctccaataggctctgcaggtttttatgtgcctggaggaaaggctatttatccatcttcagtattgatgaacgcaatacctgctttagttgctggtgttgagaggagagtacttgtaagcccaatatcagatataaatcagtcatctattgttcttgcagcagctcatgttgcaaaagtgacagaatttattcgtatgggtggagcccatgctgtagctgcacttgcttatggcacaaa

SEQ ID NO: 205632 - DNA, 904 bp, Unknown
  Bacterial polypeptide expressing nucleotide sequence isolated from the Sargasso Sea
gttctgcctctgttgctggggttccagaattgttgctactaccccaccttttaaaggtaagccaaatccagctgtcgttagtgcaatgaaaatgggcggtgctcacgaaatttatgttttaggaggaatgcaaggagttggtgcgatggctattggtacagaaactattaaacctgttgatatgcttgttggacctggcaatgcatttgttgctgaagcaaaaagacaattgtatggcaaagttggtattgatttatttgctggtccaactgaaacaatggttattgcagatgaaactgttgatggtgaaatatgtgcaacagacttattaggacaagcagaacatggatataattctcctgctgtcatgataacaaactcgagaaaacttgcagaagaaacatttaaagaaattgatagaattttagaaatcttacctactaaagaaacagcaagtactagctggagagattatggagaaatgattttatgtgacaactatgaggagatgttatctaaagcaaatgaaatagcttcagagcacgttcaagttatgacaaaaaaagatgattggtttttagaaaaaatgacatcttatggtgctttatttttgggtgctagaactaatgttgctaacggtgacaaagtgataggcactaaccatacacttcctacaaaaaaagctggaagatatactggcggtttatgggttggtaagtttattaaaacacacacttatcaaaagattacaacagatgaagctgcaactctcatcggagaatatggatctaggctttcacatttagaaggttttataggtcatgcagaacaatgtaatgtaagagtaagacgatatgggaaaaaaaatgttggatatggaaaaccagcaggagaaaaaatttag

SEQ ID NO: 205633 - DNA, 595 bp, Unknown
  Bacterial polypeptide expressing nucleotide sequence isolated from the Sargasso Sea
aatgaagatcataaaaaataaaaaagaagcttttgaagaattaaaaaggatttcttctagaacaaattcagataacaattataagataactgcaattgttgaagaaattcttcaagaagtaaaaatttctggagacatagcagtagaaaaatatacaaaaaactttgatggtttcgaccctaaccctatgcaagtgagtgcggatcaaataaaaaatgcatgggatgaaattgataataatttgaagcaatcacttgtggcagctagtaaaagaattcaaaaattccatgaaaaagaaattcctcaatctttcactataaaaggtgaatatggtgatatcgtccaaagaagatggagaccagttaaaaatgcaggtatttatattcctggaggtagagctgcttatccaagtacagtattaatgaatgctatacctgcaaaagtagcaggagtagaagaaattataatggtttctcctgggaataaaaaaggggaaataaacaaaactgttttagctgcagctcacttatcagggatcaataaagtattcagaattggaggagctcaagcaattggtgctttagcattggcacaa

SEQ ID NO: 205634 - DNA, 208 bp, Unknown
  Bacterial polypeptide expressing nucleotide sequence isolated from the Sargasso Sea
gcgcgggcccgaaccacgtggctgcccaccagtggtactgccaggttcagttcaccgctgggcgtctatgacttccagaagcgttcgtctctgattggcttcaccccagagggtgcagatcgcatgggccgtgtggcttctgtgttggctcgcggtgagggcctgacagcccatgcccgttcggctgagtaccgtatcaaagactgat

SEQ ID NO: 205635 - DNA, 763 bp, Unknown
  Bacterial polypeptide expressing nucleotide sequence isolated from the Sargasso Sea
gctcaattaaaaaactacggtcaagactttgaagtagaattgtctaatgggttatatgctggtcaaaaattagttccagttaatactgctggatgttacatccctggaggaagatatgctcacatcgcatctgcggttatgagtgtaactacagcaaaagttgctggtgtcaaaaatataattgcttgtagtcctccaaaagagggtgtgggtgctcatcctaccatagcttatacagctgatctttgtggtgctgatgtaattttaaatttaggtggtgttcctgcgattgctgcaatgaccaatggattatttaagaatcctccagcagatataattgttggtccaggaaaccaatttgtagctgaagcaaaaagaattctatttggaaaagtcggtattgatttatttgcaggtccaactgaaattggaattattgctgatgcaaaagcagacccagagatagtagctgttgatttagttggtcaagctgaacatggttataattctccttgctggttgtatacaactagcaaagaacttgctgaaaaagttatgaaaagagttccagaattaatagcagaacttcctgaagtaccaaaaactaatgctgatgctgcatggagagattatggtgaagtaattctatgtgatactaatgaagagttagttaaaatcagcgatgaatatgctccagaacacttagaggttcaaacagaaaatttgaaatggttccatgaaagattaactaattatggatctc

SEQ ID NO: 205636 - DNA, 709 bp, Unknown
  Bacterial polypeptide expressing nucleotide sequence isolated from the Sargasso Sea
atacctgctgtggacatgcttgttggtccaggcaatgcctatgttgcagaagccaagagacaactttatggaagagtaggtattgacctttttgctggaccaaccgaaactctggtaatcgctgatgaaacagtagacggagaaatgtgcgccgttgacctgctggggcaggcagagcatggtccaacttctcctgctgtcctcttgactaattccatgaaactggccaaaaatactcttgaggaagtagagaggcagctgaaaactctttcaacacgcgacactgcaggacctgcatggcaaaactacggacagattatcgtggcagattcttatgacgaaatgcttgagattggaaatgagctcgccttcgaacacgtccaagtaatgaccaaaaaagacgactggtttctggaaaacatggttaactacggggcacttttccttggcccacgtaccaatgtttcttatggagacaaggtaataggtaccaatcatactctgcctacacttcgagcagccagatatacaggaggcctttgggttgggaaattcctcaaaacctgcacataccagaaagttctcagcgacgaagcaagcgtaacagtgggagaatactgttcgagattatgcaagcttgagggatttgctggacaccaggaacaagcggatcttaggattcgcagatacaatgtaaaagctgcatgac

SEQ ID NO: 205637 - DNA, 808 bp, Unknown
  Bacterial polypeptide expressing nucleotide sequence isolated from the Sargasso Sea
aaatgaaaataaaaagtctcttaaattagcttacaaaagaattttttattatcactcaaaacaaaaaaaaacatcatattcttttaaagatcaactcgactcaaaattttatgttgaatggaaaccaatagaaaatgttggtttatatatccctggtgggttagcttcttatccatcaactgttttaatgacagctatacctgcaaaaatagccgaggtcccaaatattatgatttgcgttccttctcaaaatggccaaacatcaaaactaactcttgcagctgcatatttatgtggtgtaaatgttgtttataacgttggtggtgctcaagcaatagcagctctcgcttttggcacaaaaattataaaaaaggcggataaagtatttggcccaggaaaccaatacgtagctgaagcaaaaaaacaattatttggagtaataggaatagatttaccagctggtccatctgaggtcttagtaatagctaataataattctaatcctaattggatagcctacgatgttctcgcccaaggtgaacatgaccctaatgcaaaaacgtatgttttatctaaatccaaaaatattttaattaaagttaaaaatgaacttaaaagaattatggaagagacaaaatttaaaaatgttgatcaatctataaaaaataattgcaatttaattttagctaagagtcaaaaagagatatatgaaatttcaaatttcattgctccagaacatcttcatattcatgaaaaatttaataaaaatatattaaaaaatattaaaaatgctggatctgtattttta

SEQ ID NO: 205638 - DNA, 832 bp, Unknown
  Bacterial polypeptide expressing nucleotide sequence isolated from the Sargasso Sea
cctaaacctggtattggagttcatccatctatcgtttatacagctgacttatgtggagctgatgtgataatgaatttaggtggtgtacaagccattgcagcaatgacaaatggtttatttggaaatgctcctgcagatattttagttggacctggaaaccaatttgttgctgaagcaaaaagaattttatttggaaaagttggtatagatttatttgcaggacctacagaaattgcagtaattgctgatgagacagcagatcctgaaatggttgcatatgatttagttggacaagcagaacatggttacaattcacctgcatggttatttactaaaagtaaaaaagttgcagagtatgtgatgcaaagagttccagaattaattgcagatttaccagatcttccaagagaaaattcaggtgctgcatggagagattatggtgaagtaattctttgtgatacggatgaagagatcgctaaagtaagtgatgaatacgctccagaacatttggaggttcaaactaaaaatttacaatggttccatgacagattaaaaaattatggatctttattcataggggaagaaacaactgttgcttatggagataaatgctcaggaacaaatcacattttgccaacaaaaggtgctggtagatacacaggtggtttatttgttggaaaatttatcaaaacattgagtttccaaagaatgagtaaagctgctacgaaagaagttggtgctgcttgtgcaagaatttctagatacgaaggtatggaggcacatgccagaactggtgatgtaagattaagaaaatatggattttctaattagt

SEQ ID NO: 205639 - DNA, 648 bp, Unknown
  Bacterial polypeptide expressing nucleotide sequence isolated from the Sargasso Sea
ttttatttggaaaagttggtatagatttatttgcaggacctacagaaattgcagttattgcagatgatacagctgatcctgaaatggtcgcatatgatttagttggacaagcagaacacggttataattctccagcttggttatttactaaaagcaaaaaagttgctgactatgttatacaaagagttccagaattaattgcagatttacctgatctaccaagggaaaattcaggtgctgcatggagagattatggtgaagtaattctttgtgatacagatgaagaaattgcaaaagtaagcgatgagtacgctccagaacacttagaagtccaaacaaaaaatttacagtggtatcatgatcgattaaagaactatgggtctttatttattggtgaagagactactgttgcttatggtgacaaatgttcaggcacaaatcatatactcccaacaaaaggggctggaagatatacaggtggattatttgttggaaaattcattaaaacattgagttttcaaagaatgagtaaagcagctacaaaagaagttggagcagcttgtgccagaatttctagatacgaaggaatggaagcacatgctagaacaggtgatgtcagactaagaaaatacggcttctctaactaat

SEQ ID NO: 205640 - DNA, 707 bp, Unknown
  Bacterial polypeptide expressing nucleotide sequence isolated from the Sargasso Sea
tagtttagcatatattcaaaaagtaaataaaattataggaccgggaaatgattacgtcgcaagagctaaaaaagaaatttttggagatgttggaatggaaggaatgatagcaggaccgagtgaaattaccattgttgctgataaagataccagtttaaaggaagtcattacatctatgataagccaagctgaacatgatgttaactcacaatctatattaataacaaataatttagatttaattcaagctcttaaaaaacttttaaaaaaagagttaaataaaatacctagaaaagaaatagcgaaacgaagtttattaaaaaatggattaataattagaatttataatgataaacaaataattgagtcaattaatgaaattgctcctgaacatttagagcttaatataaaaaattataaaaaattaattagtaaaataaaaaatgcaggtagtataatgcttggaaaatattcaccaatgtccgctagcgactatgccattggaccatcgcattgtcttccaactttaggatcggcaaaattttcttcaggactaaatgttgatgaattttataaaaaaacaagctatataaaattatcaaaaaaaggcattgaagttattggtaagaaagctataactcttgccgagtatgaaggtttaattggtcatgctcaaagtataaaatctagaataaggagaagttaga

SEQ ID NO: 205641 - DNA, 574 bp, Unknown
  Bacterial polypeptide expressing nucleotide sequence isolated from the Sargasso Sea
ttgggcagataaaaatacagatttaaatcaaattataacttctcttgtttcgcaagcagaacacgatccaaatagtcaatgtatacttattacaaaagataaaaaaattattaaaaatgttatcaatggagtaaaaaaattagtaaataacttaccaagaaaaaaaattgcatcaatcgcattaaataaaaacggtctaattatacttgctaaaaatgataaacaaataattagtataattaatgaagtagcgcctgagcatcttgagattaatgtaaataattataaaaagtattataaaaaaatattgaacgcaggaagcatttgtaacggtaaatatacaccaatgagtgcatcggattataccgtaggtacaaatcacgttttgcctacctcaggatcttcaaaatttagttctggattaaatactaacgaatttattaaaaaaatatctgttgttacacttagtaaattaggggtagaaaaaattggaaatccagctataactctttcgaagtttgaacaattatatggtcatgctcaaagtattaaatctagaataaggagaaaatag

SEQ ID NO: 205642 - DNA, 860 bp, Unknown
  Bacterial polypeptide expressing nucleotide sequence isolated from the Sargasso Sea
gttatcaaaaaaatttgataaatatgaaggtgaagtaattgttactagagaaaaaattgaacaaattaaaaagaatttagatcctaaaacaaaagacgacattcaattctctcatgaaagagttagaaagtttgctgaagcacaattaaaaaattatggccaagattttgaggtagagctatctgatggtttgttcgctggtcaaaaattaattcctgtcaatacagctgggtgttacgtgccggcaggaagatatgctcatattgcatctgcagtgatgagtgttactacagctaaagttgctggtgttaaaaatattattgtttgcagctcaccaaaacctggagtaggagttcatcctgctattgtttataccgctgacttatgtggagcagatgtaataatgaatttaggtggagttcaggctattgctgcaatgacttatggtctttttggtaatgcacctgctgatatgcttgttggtcctggaaatcaatttgttgcagaatcaaaaagaattttatttggcaaagtaggtatagatttatttgctggtcctacagaaattgcagttatagcagatgaaacagcagacccagaattagttgctttcgatttagttggacaagctgagcatggttacaattctcctgcatggttatttactactagtaaatcattagctgaatatgtaatgaaaagagtgccagaattaattgcagacttgccagacttaccaagagaaaactctggtgcagcttggagagactatggggaaattattttatgcgatacagacgaagaaatggctaaaatcagtgatgaatatgctcctgaacatttagagatacagactaaaa

SEQ ID NO: 205643 - DNA, 859 bp, Unknown
  Bacterial polypeptide expressing nucleotide sequence isolated from the Sargasso Sea
aagtaccctatggtcgcttcggctcatatgagtatagtgaccgcaggcgtggcaggcgttaaccgaataatcgctgcctctccaccattcaatggcgcccctaacccagctgtcgtaaccgcaatgcatctggctggagcagatgaaatttattgtttaggaggtattcaagcagttggagcgatggctctaggaaccgaaactattcccccaattgatatgttggtaggacctggaaatgcatttgtcgctgaagctaagagacaactctttggacgggttggaatagatttatttgccggccctacagaaacgctggtcatcgccgacgatacagttgatgctgaaatatgcgccacagacctgttgggacaggcagaacatggtccaacatcaccagcaattttagttacaaactctgaagcactggcacaagagacaataaatgaggttaatcgtcagttaaaagtattacctaccgcggcgattgcagaagaagcttggagagattatgggcaagtcattttgtgtgagaccgaagcagagatggtagaggtaagtaatgaaatcgcgtgtgaacacgtacaagtaatgacaaaaaatcctgattattttctggaaaacatgactaattttggcgctttatttcttggtcctgaaactaacgtttcttatggtgataaagtaataggtacaaatcatacacttccaacccaaaaagcagcgcgttacacgggtggattgtgggtaggaaaatttttaaagacgtgtacttaccaacgaataacctccaaggaggctagtgccttaattggggaatattgttcaaggctctgtgaaatgaagggtttccgggcat

SEQ ID NO: 205644 - DNA, 954 bp, Unknown
  Bacterial polypeptide expressing nucleotide sequence isolated from the Sargasso Sea
gctggacaaaaattaattcctgttaatacagcgggttgctatgtaccagcaggaagatatgctcacatagcatcagctgttatgagtgtaacaacagctaaagtagctggtgtaaaaaatattattgtttgcagctcaccaaaaccaggggttggagttcatcctgcaattgtctatacagcagatctatgtggcgcagatgtaataatgaatttaggtggagttcaagcaatcgccgcaatgacttatggtctttttggtaatgcacctgcagatatgcttgttggccctggaaatcaatttgttgcagagtcaaaaagaattttatttggaaaagttggtatcgatttatttgctggtcctacagaaattgcagttatagcagatgaaacagctgacccagaattagttgctttcgatttagttggacaagctgagcatggttacaattctcctgcatggttatttactactagtaaatcattagctgaatatgtaatgaaaagagtgccagaattgattgcagacttaccagacttaccgagagaaaactctggtgcagcttggagagactatggggaagttattttatgcgatacagatgaagaaatggctaaaatcagtgatgaatatgctcctgaacatttagaaatacagactaaaaaccttcaatggtttcatgatcgattaaaaaactacggatcattatttattggagaagaaactacagttgcttatggtgataaatgctctggaacaaaccatattttaccaacaaaaggtgcgggaaaatatacaggcggtttatttgtcggaaaattcattaaaacattgagtttccaaagaatgacaaaggaatcaactaaagaagtgggtgcagcctgtgcaagaatttcgaggtatgaaggtatggaagctcatgctcgaactggagacgtaagacttagaaaatac

SEQ ID NO: 205645 - DNA, 859 bp, Unknown
  Bacterial polypeptide expressing nucleotide sequence isolated from the Sargasso Sea
tctaaagaaagaattgaagaaattaaaaaaactctagatcaaaaaactaaagatgatgttcaattttcatacgatagagttagaaaatttgcagaagcacaattaaaaaactatggtcaagattttgaagttgaactttctgatggattatttgcaggtcaaaagttagtccctgttaatacagctggttgttacgttccaggtggaagatatgctcacattgcatctgcagtgatgagtgttactacagcaaaagttgcaggtgttaaaaatgtaattgcttgtagtcctccaaaagaaggtgttggtgcacatccaacaattatttatacagcagatctttgtggagctgatgttattttaaatttaggtggagttccggcaattgctgcgatgacaaacggtttatttaataatccaccagcagatattattgttggtccaggcaatcaatttgttgccgaagcaaaaagaattttgtttggaaaagttggtatagatttatttgctggtccaacagaaattggaataattgcagatgctaaagcagatcctgaaatagtagcggttgatttagttggtcaagcagagcatggttataactcaccttgttggctttacacaaccagtaaagagcttgcagaaaaagttatgaaaagagttccagaattaattgctgaattaccagaagttccaagacaaaatgctgatgcagcatggagagattatggagaagtaattctttgcgacactgatgaagagatggttaaagttagtgatgactacgccccagagcatttagaagtacaaactgaaaatttacaatggtttcatgaaagacttacaaattatggatctt

SEQ ID NO: 205646 - DNA, 623 bp, Unknown
  Bacterial polypeptide expressing nucleotide sequence isolated from the Sargasso Sea
tttatttgcaggtccaacagaaattgcagtgattgcagatgataaagcagatgaggaattagttgcagtagatctagttggtcaagcagagcatggttataactctccagcttggctgtatacaacaagtaaaagaattgctgaatatgttattaaaagagttccagagttaatcgccgaacttccagatttacctagagaaaatgcaggtgctgcttggagagattatggtgaagttattctttgcgatactgacgaagaaatggcaactattagtgatgaatacgctcctgaacatctagaagtacaaacacaaaatttagaatggtttcataaaagattaaaaaattatggctcattgtttattggagaagaaacaacagttgcttatggtgataaatgttcgggtacaaaccatattttaccaacaaaaggtgccgctagatatacaggcggtttatttgttggaaaatttattaaaactttaagttttcaaagaatgactaaaaaatccaccaaagaagttggagctgcttgtgcaagaatatcaagatacgaaggaatggaagctcatgccagaactggtgatgcaagattaagaaaatacggattttctaactaat

SEQ ID NO: 205647 - DNA, 955 bp, Unknown
  Bacterial polypeptide expressing nucleotide sequence isolated from the Sargasso Sea
aaattttgataaagttttggacgctttgcttatgcaaagaaaaaataaagtccattccaattcagtttcagttataggtattataaaagatgttaaaaaaaatggcgataaagctcttttaaaatatgaaaaaagatttaatagaaataatgtaattgtaccaagcgctaatcaaatttctaaatcaataaagtctcttgataaaaaagttaaaaatgcaattgacctagcatacactagaattcataaatttcactctcttcaaaaatttaagaatatttcatatacagataaactaaaaaataaattggaatacaaatatcttccgatagaatcggttgcaatttatgtgcctggatcaacagcttcatatccttcaagtgttttaatgaacgctattccagcaattgttgctggtgttaaaagagtaataatgatcaatcctggatataaagggaatcaaaatccagcagtattatacgcagcgcgtaaatgtaaaattaaagagatttattcaataggaggaccatcagcaattgctgctgcagcttatggaactaaaagaataaaaaaagttaataaaattgtaggtcctggtaatgcatttgttgcagccgcaaagaaagaagtttttggtgatgttggaattgagggaatgactgcaggaccatctgaggttaccataatttgtgataaattttcaaatccagaatgggttgcaagtgatctaataggtcaagcagagcatgataatcttgctcaatgtattttaatttctaaagataaaaatattgtagaaaaagttaaaattgaaatatttaaacaattaaaagaaattccaagacaatctgttgctaaaaaaagtttaattagtaatggaattttaatgcacattacttctaataaaaaaattactgatgtagtaaataaattgcacccgaacacttggagctga

SEQ ID NO: 205648 - DNA, 682 bp, Unknown
  Bacterial polypeptide expressing nucleotide sequence isolated from the Sargasso Sea
ctatgtggtgcagatgtgattttaaatttaggcggtgtaccagctattgcagcaatgacaaatggtttatttaataatccgcctgcagatataattgtaggacctggtaatcaatttgtggcagaagcaaaaagaattttatttggaaaagttggaatagatttatttgcaggaccaactgagatagcagtaattgctgacaaaaatgctgatcctgaaattgttgctgtagatttagttggacaagctgaacatggttacaattcacctgcatggctatttacaactagtaaagatttagctgaaaaagttatgaaaagagttcctgaactaatagcagaattacctgaattaccgagaacaagcgctgaagcagcttggagagattacggcgaagtagttctttgtgatacaaatgaagaaatggttaaagttagtgacgagtatgcgcctgaacatttagaggttcagactgaaaatttaaaatggtttcatgaaaaattaacaaattacggatctctttttgtaggagaagaaactacagttgcatacggtgataaatgctcaggtacaaaccatattttacctactaagggtgctggtagatatacaggcggtctatttgttggtaaatttattaagacacttagttttcaaagaatgacaaaagagtctactaaag

SEQ ID NO: 205649 - DNA, 910 bp, Unknown
  Bacterial polypeptide expressing nucleotide sequence isolated from the Sargasso Sea
gatgggtgcaaagaactttcaaaaaaaatttgataaatatgaaggagatgtaatagtttctaaagaaaaaattgaggaaattaaaaaaaatctggaccaaaaaactaaagacgatatccagttttcacatgaaagagtaagaaaatttgcggaggcacagttaaaaaattatggtcaagactttgaggtcgaattatctgacggcttgtttgcaggacaaaaattaataccagtaaatacagctggatgttatgttccagctggcagatatgcgcacattgcttcagcggttatgagtgttacgactgcaaaagtcgcgggagttaaaaatatattggtatgtagttcaccaaagcctaatgttggagttcatccatcaatagtttatacagctgatctttgtggtgcagatgtaataatgaatctgggaggtgttcaagctattgcggcaatgactaatggattatttggaaatgctcctgctgatattttggttggcccaggaaatcaatttgttgctgaagctaaaagaatattatttggaaaagttggaatagatttatttgctggacctacagagatagcagttatcgcagatgaaactgccgatccagaaatggtagcttatgacttagttggacaagcagaacatggttacaattcccctgcatggctttttacaacaagtaaaaaagttgcagattatgttatgcaaagagttcctgaattaatcgctgatttaccagatttaccaaaacaaaattcagaagcagcatggagagattatggtgaagtaatactttgtgataatgatgaagaaatggcaaaaattagtgatgaatatgcgccagaacacttagaggttcaaacaaaaaatttaaaatggtttcaccaaaagattaaaaaatta

SEQ ID NO: 205650 - DNA, 649 bp, Unknown
  Bacterial polypeptide expressing nucleotide sequence isolated from the Sargasso Sea
attttatatggaaaagttggtatcgatttatttgcaggaccaactgaaattggaattattgctgatgccaaagcagattcagaaattgttgctgttgatttagttggtcaagctgagcatggctacaactctccttgttggttgtacacaacaagtaaagagcttgctgaaaaggtaatgaaaagagttccagaattaattgcagaacttcctgaagtaccaagaacaagcgcggaagctgcatggagagattatggtgaagtaattctttgtgatactgatgaagaaattgttaaaataagtgatgaatatgctccagaacacttagaagttcaaacagaaaacttaaaatggttccatgaaagattaactaattatggatctttatttgtaggagaagaaactactgttgcttatggagataagtgttcaggtacaaatcatattttaccaactaaaggtgctgggagatatacgggtggtttatttgtaggaaaatttattaaaactttaagtttccaaagaatgactaaggagtctaccgaacttgttggtgctgctgcagctagaatatctagatacgaaggcatggaggcccacgcaagaactggtgatgttaggctgcgtaagtacggttattctaactaat

SEQ ID NO: 205651 - DNA, 637 bp, Unknown
  Bacterial polypeptide expressing nucleotide sequence isolated from the Sargasso Sea
ttgatcaagatattacaagttggtaatgttgacagttttgtagaagccagacgtcaaaaaacctcacaaaaagatagaaaaatcgtacaatcaatcttagatgatgtaagaaagaatggtgattctgctgtcaaaaaatacgaacaaaaattcaatggtaaaaaaacaactcaattgcgtctaaataaacaggaagtgaaaaatgcaaagattactgatgcagaattttctgcattacaattatcggcaatacgactatctaaatcacaaagaattctaaacaaaagtttgattcaatctatcaagaaaattcctgatatctcatttgttcctattccaagtgttggttgttacatacctggaggtcaagctagatatccgagttcagcaattatgtctgtaattaccgctgctgaagctggagtaaagaaaattgtagttgtttctcctccaaactctgatggaaaaatagatcctatgacaattactgttgctcaaaattgtggtgcagaaatttacaaagtaggtggcgcacaagcaattgctgcacttgcatatggaacaaaatcaataccaaaagtcgataaaattgttggacctggaggaaaattcgttagtattgctaaggcaatgtaag

SEQ ID NO: 205652 - DNA, 765 bp, Unknown
  Bacterial polypeptide expressing nucleotide sequence isolated from the Sargasso Sea
aatctgttattaaatatgaaaaaaaattttctggttttaaaaaactaaataaaaaaaatatctatttttcaaaatctgagatagcgaaaaatataaaaagtttagatgcaaaaacaaaagagtcgattgatatttcatataatagaattttaagttttcataagaatcaaaaatttaaaaatttcaaaattttagataaatataaaaatagtctttcatatcgttcattacccctagatagaattggaatttatgtgcctggcggtatagcaagttatccaagctcggtattaatgaactgtatcccagcaattgttgcaggagttaaagaaattattatgaccgtaccttctattaatggaagagttaatccaggtgtaatttacgcagctaaaaaatgtaaggtaaaaaaaatatataaaattggtggagcacaagctataggtgctcttgcctatggtacagaaactattgatagcgtcgataaaattgtgggccctggaagtgaatatgttgcattagcaaagaaagaagtttttggagaagttggaattgatatttttgcaggaccatcagaggttacagttattgctgataggcattcaaatcctgactgggttgctgcagatttaattgcccaagctgaacacgataaaatgtcacaatcaatattaataacagagagtaaaaatttaatagttaaagtaaaagaatctataaacaagcagctaaagtttttgcccaaaaaaaaaatattgttctaag

SEQ ID NO: 205653 - DNA, 934 bp, Unknown
  Bacterial polypeptide expressing nucleotide sequence isolated from the Sargasso Sea
aaaaaatttgacaagtacgaaggtgaaataattgtatcaaaagaaaaaattgaagaaattaaaaataatttagatcaaaaaacaaaagatgatattaaattttcatacgatagagtacgaaaatttgctgaagcacaactaaaaaattatggaaataattttgaagttgaattatctaaaggtttatacgctggtcaaacattgatacctgtaaatacagctggttgctatgttccagctggaagatatgcccatatagcatctgcagtaatgagtgtaacaactgcaaaagtagctggtgttaaaaatatcattgtgtgtagttctccaaaaccggatattggtgctcatcctaaaattatatatactgctgatctttgtggtgcagatgtaattttaaatttaggtggtgtacaggctattgcagcaatgacatatggtttttttggaaatgaacctgctgatatattagtaggtccaggtaatcaatatgttgctgaagcaaaaagaattttatttggaaaagttggtatagatttatttgcaggtccgactgaaatagcagttatagctgataaaaatgctgaccctgaaattgttgcttatgatttagttggtcaagctgaacatggttataattcaccagcatggttatttacaacagacaaaactttagctgaaaaagttatgaatagagtcccagaattaataaaagatttgcctgaattaccaagaactaatgctggagacgcatggagagattatggtgaagttatattatgtgacactaacgaagaaatggctaagattagtgatgagtatgcacctgaacatttagaagtgcaaactgataatttagaatggtggttaaaaaaattaaaaaattatggttctttatttttaggtgaagaaacaacagtagcttacggcgata

SEQ ID NO: 205654 - DNA, 694 bp, Unknown
  Bacterial polypeptide expressing nucleotide sequence isolated from the Sargasso Sea
tggtttatttggaaatgcacctgctgatattttggtaggtccaggtaatcaatttgttgctgaagcaaaaagaattttatttggtaaagttggaatagatttattcgcaggtccaactgaaattgcaataatcgctgacgaaactgctgatccagaaattgtagcagtagatttagttggtcaagctgagcatggctataattcacctgcttggttgtacactacaagtaaagaactagcagaaaaggtaatgaaaagagttccagaattaattgctgaattaccagaattaccaagaacaaatgctgaggcagcttggagagattatggtgaagtagtgttatgcgatactgatgaagagatggctaaaattagtgatgaatatgcacctgagcacttagaggtacaaactaagaatttagattggttccacaacagattaaaaaattatggttctttatttgttggtgaagaaacaactgttgcttatggagataaatgttcaggaacaaatcatattttacctacaaaaggagctggaagatatacaggtggtttatttgtaggaaaatttatcaaaacactaagtttccaaagaatgacaaaagaatctacagaattagttggagctgcggctgcaagactttcaagatacgagggtatggaagcacatgcaagaactggtgacgtatag

SEQ ID NO: 205655 - DNA, 873 bp, Unknown
  Bacterial polypeptide expressing nucleotide sequence isolated from the Sargasso Sea
tgctgaagcacaattaaaaaattatggacaagattttgaagttgagctttcacctggactctttgcaggacaaaaattaattcctgttaatactgctggttgctatattccaggaggaagatatgctcatatagcttctgctgtcatgagtgtgactacagcaaaagttgcgggagttaaaaatataatcgcatgtagtcccccaaaaaaaggagttggtgctcatcctgcaattatttatacagcaaatttatgtggtgcagatgttattttaaatttaggtggtgtccctggaatagctgcaatgacaaatggtttatttaaaaatcctccagctgatattttagttggccctggtaatcaatttgttgcagaagcaaaaagaatcttgttcggaaaagtcggaattgatttatttgctggaccaacagaaatagctgtaattgcagacgataaagctgataccgagatagtagctgtcgatttagttggtcaagctgaacatggatataattctccagcttggttatatactacaagtaaaagagttgctgatgaggtaatgaagagagttccggaattgattgctgaacttcccgaaataccaagaaaaagtgcagaggctgcatggagggattacggtgaagtaattttgtgtgacaccgatgaagaaatggcaaagataagtgatgaatacgctcctgagcatttagaagttcagacagaaaatttagaatggtttcataaaagattaaaaaattatggttctttgtttatcggtgaagaaacaacagttgcttatggagataaatgttctggaacaatcatattttgcctactaaaggagctggtagatatactggtggactattt

SEQ ID NO: 205656 - DNA, 840 bp, Unknown
  Bacterial polypeptide expressing nucleotide sequence isolated from the Sargasso Sea
tctgttgctggggttccaagaattgttgctactacaccagccttttaaaggtaagccaaatccagctgtcgttacagcaatgaaaatgggtggtgctcacgaaatttatgttttgggtggaatgcaaggagttggtgctatggctattggtacagaaacgattaaacctgttgatatgcttgttgggcctggcaatgcatttgttgctgaagcaaaaagacaattgtatggcaaagttggtatagatttatttgctggaccaactgaaacaatggttattgcagatgaaaccgttgatggtgaaatatgtgcaacagacttattaggacaagcagaacatggatataattctcctgctgtaatgataacaaactcaagaaaacttgcagaagaaacatttaaagaaattgatagaattttagaaattttacctactaaagaaacagcaagtacaagctggagagattatggagaaataattttatgtgatacctatgaggagatgttatctaaagcaaatgaaatagcctcagagcacgttcaagttatgacaaaaaaagatgattggtttttagaaaatatgacatcttatggagctctatttttaggtgctagaactaatgttgctaatggtgataaagtcataggtactaaccatactcttcctactaaaaaagctggaagatatactggtggtttgtgggttggtaagttcattaaaacccatacttatcaaaagattacgacagatgaagcagctacacttattggggaatatggatcaagactttcacatcttgaaagatttattggtcacgctgaacaatgtaatgttagagt

SEQ ID NO: 205657 - DNA, 553 bp, Unknown
  Bacterial polypeptide expressing nucleotide sequence isolated from the Sargasso Sea
atgaagataataaataataaaaaggacgctatccatgaattaaaaaggatttcttctcgaactaattcagaaaacaataaaaatataaatgccattgtcgaagaaattctccaagaagtaaaaatttatggggatattgctgtagaaaaatatacaagaaaatttgatggtttcaaccctaaacctatgaaagttagtgacgatgatttaaaaggtgcttgggatgaaattgatagtaatttaaagcactcacttgaaatagcccataaaagaattaaaaaattccacgaaaaagaaatgccatcatcttttactttaaagggcgaacatggtgatgtagtccaaaggagatggagaccagtaaaaaaagcaggaatttacatccctggaggtagagctgcttatccaagtactgtattaatgaatgcgatacctgcaaaagtagcaggtgtagaggaaatattgatggtatccccaggaaataaagaagggacaataaacaaaacagtcttagcggcagcccacttatcgggaattaataaagtttttagaa

SEQ ID NO: 205658 - DNA, 796 bp, Unknown
  Bacterial polypeptide expressing nucleotide sequence isolated from the Sargasso Sea
aaatttcattctttacaaaaaaatagagatataaaatataaagataaatataataatcgaattgaatataaaaatattcctcttcgatcagttggaatatatgttcctactaatttaccatcaactttattaatgtgtgcaattcctgcaaaaattgcaaaagttaaaaaaattgtagttgcgaattcaaggcaagacggaaagttaaatccagctattatgtatgcatcaaaaaaatgtggtgtttctgaaataataacttgtggaggagcgcaggccataggatatttggcttatattagtaaagtagataaaatagttggccctggttcagattatgttgctaaagcaaaacaattagtatctggtatggtgggaacagaaagtatgaatgcaggaccaagcgaaatacttattctagctgacaaaaatacagatattaatcaaattggcacatctatggttggacaatcagaacatggatttgaaagtcaaagtatattaattacaaaagataaacaaataataaacaaagtacaaaaaaatattgtttttaatttacaaaatatcccaagaaaaaaaattgcatcaaaaagtttaaaaaagcatggactgatagttctttgtcaaaatgacaatcaaattgttgatgtaataaatgaaattgctccagaacatttagaactaaatattactaattataaaaaatacctcaaaaaaatttataatgctggatcaatttgtattggtccttatacaccaatggcagtaacagattatacatctggtagcaatc

SEQ ID NO: 205659 - DNA, 595 bp, Unknown
  Bacterial polypeptide expressing nucleotide sequence isolated from the Sargasso Sea
atgttaaaaattataaattttaataaattacactctacaaaaaaattggaaactatactcagttcaaggaaaacaagacaaaaaactgagtctaaacaagttaaaaaaatcttactaaatgtaaaaaaacacggagataaagcagttataaattatgaaaaaaaattttctaattttaatattagatcaaaaattattaaattttcaaatgtagagattaataaaatttcaaatggaattaataaaaaattaaaaaaatctattgatttagcctatcgaaggattaaacaatttcattcaaagcaaaaatttttttcttttaaattcaaggatagatataaaaatgaacttgcatacaaatatacacctattgagaaagtaggagtttatgtgcctggaggaacagcaagttaccctagcactgttcttatgaattgtattccagctattgtagcgggtgtaaaaaatatttatctcaccacacctgttttatgtaacccgataaatcctggagtaatatatgctgcaaaaaaatgtggagtgaaagaaatttataaaacgggtggagcacactcgattgcagctctaacctagg

SEQ ID NO: 205660 - DNA, 562 bp, Unknown
  Bacterial polypeptide expressing nucleotide sequence isolated from the Sargasso Sea
agtacaaattttatggaagttattacatctatgattggtcaggcagaacatgatatgaattcacagtgcatactgattacaaaaaaccagaatttaattaaatctgtaaaaaaatttttagctaaagattttagtagtatacctagaaaaaaaattgcaaaaaaaagtcttacaaaaaatggattaatcgttaaggtttataatgacaaacaaataattgattcaattaatgaaatagcaccagaacatttagagttaaatttagcaaactataaaaaattaattaagaaaatttataacgttggaagtgtttgtattggaaaatattctgcaatggctgtttcagattataatgttggaacaaaccatgttttacctacactcggctcagcaaaattttcttctggattgaatgttggtgagttttataaaaaaataagctacataaaattatcaaaaaaaggcattgaagttattggtaagaaagctataactcttgccgagtatgaaggtttaattggtcatgctcaaagtataaaatctagaataaggagaagttaga

SEQ ID NO: 205661 - DNA, 803 bp, Unknown
  Bacterial polypeptide expressing nucleotide sequence isolated from the Sargasso Sea
gcaaaatgctgcagttttgtacgctgcgagaaaatgtagaattaaagaaatttattcaattggtggcccttcagcaattgcggcagttgcatatggaactaaatcaatcaaacctgtaaataaaattgtaggaccagggaattcgtatgttgcttcagcaaaaaaagaagtctttggggatataggcattgagtcaatgacagctggaccttcagaggtcttagttgtttgtgacaacaaatctaatccagaatggttggcaagcgatttaattgctcaagctgaacacgattcccttgcgcagtgtatcttaatttcaaaagataaaaatattctagaaaaaactaagtatgaaatattcaaacaacttaaagatatttcgagaagctcaattgcaaaaaaaagtttaatgacgaatggcattctaatctacgaaaattcagaaaacaaaattgtagaaataattaataaggtgggtccagagcatttagagcttaatataaaaaattacaaatcttttgtaccaaaaataaagaatgcaggttctatttgcttaggaaaatacgcagtaatggcaatgacagattatggagtgccgggtactaatcatgttcttccaaccaatatgaccagtaaatactcaagtggattaagtgtttcagagtttattaaaaaaatttcatacataaatttatcaaaaaagagtattgaaaaacttggtccatcagttataactcttgcagctaatgaaggtttagatggacatgctaaatcaattaaaaaaagattaggagaattataaa

SEQ ID NO: 205662 - DNA, 563 bp, Unknown
  Bacterial polypeptide expressing nucleotide sequence isolated from the Sargasso Sea
caaaactaatttgaatgaagttacaacatcaatgattggccaggcagagcacgatataaattcacaatgcattttaattacaaaagattctaatttaattaaaaaattcaaaaaagatttgatttctaaaattaagaaaataccacgacaaaatattgctaaaaaaagtataaaaaataacggacttattttaaaagtttataatgataatcagatcataaatgcaattaatgaaatagctcctgaacatttggagataaatgtaagtaactacaaaaaatataaagataaaatttttaatgcaggaagtatttgcataggtaaatactctcctatggctctaagcgattatgcagttgggacaaatcacgtattacccacaaattcttcagctaaattttcttcaggattaagtgttagtgaattttataaaaaaattagccttataacgctctcaaaaaaaggtgttgagaaaataggaaaatacgctacacatctcgcagagtatgaaaaattaaaaggtcatgctttgagtataaaatctagaatagataaggagtaaa

SEQ ID NO: 205663 - DNA, 912 bp, Unknown
  Bacterial polypeptide expressing nucleotide sequence isolated from the Sargasso Sea
gagataaaaaaaaacttagatcaaaaaacaaaagatgatattaaattttcttatgacagggtaagaaaattcgctgaagctcagttaaaaaattatggacaagattttgaggtagaactttcaaaaggtttatatgcgggacaaaaattaatcccagtaaatactgccggatgttacgttcctggtggaagatacgctcatatagcatctgcagttatgagtgtaacaactgctaaggttgctggagttaaaaatattatcgcatgcagtccacctaaagaaggtgttggtgcacatcctgctattatttatacagctgatctttgtggagctgatgtaatattaaatttaggaggtgttccagctattgctgcaatgacttatggaatgtttggtaattcgccagctgatattttagttggcccaggtaatcaatttgttgcagaagcaaaaagaattttgttcggtaaagttgggattgatttatttgcaggtcctactgaaattgccgtaatagcagatgaaacagcagatccagagatagttgctgttgatttagttggccaagcagaacatggatataattctccagcttggttattcacaacaagtaataaagttgctgaagatgtaataaaaagaatgccagaattaattgcagagttaccagaagttccaaggatgagtgcggaagcagcttggaaagattatggagaagtaattctttgtgataccgatgaagagatggctacaataagtgatgaatacgcaccagaacatctagaagtacaaactaaaaatttgaaatggtttcacgatagattaaaaaattatggatcattatttattggtgaagaaacaacagttgcatatggtgacaaatgttcaggtactaatcacattctcccaact

SEQ ID NO: 205664 - DNA, 886 bp, Unknown
  Bacterial polypeptide expressing nucleotide sequence isolated from the Sargasso Sea
tatgaagatattaaatagtaaaagtaaaaattttgacaaattgttagagaatttgcttttacagagaaaaaaaaaaattcaatcagactctgtttctgtaacaaatataattgaagatgttaaaaaaaatggagataaagcattattaaaatatgagaaaagattcaatcaaaacaacacaatcattcctagctcaaaacaaataaaaaaatctataaattctcttgataaaaaagtaaagaaagcaatcgatacagcttataatagaatttataaatttcattcacttcaaaaatttaaaaatatttcttatacagataaatttaacaataaacttgaatataaatatgtacctttagagtcagttgcaatttatgttcctggttctactgcttcatacccatcgagtgtgttgatgaatgctatcccagcaattgttgcaggcgttaagagaatagttatgattaatccaggctacaaaggagaacaaaatccagccgtattatatgctgctaaaaaatgcaaaataaaagaaatttattctattgggggcccttctgctattgcagcagtatcttatgggactaaaaaaataaaaaaagttcacaaaatagttggtccaggaaactcatatgttgcagctgcaaaaaaagaagtttttggtgttgttggaatcgagggtatgaccgcaggaccttcggaagtgactgtcgtttgtgataaattctcaaatcctgagtgggttgcaagtgatttaataggacaagccgaacatgatattcttgcacaatgtattttgatttcaaaagataaaaatttgctagataaagtaaaaattgaaattactaaacaattaaaaggaattccaagagcttctgtgcaagaa

SEQ ID NO: 205665 - DNA, 703 bp, Unknown
  Bacterial polypeptide expressing nucleotide sequence isolated from the Sargasso Sea
atgataaaaataattgattgttcgaaaaaaaattattttcaaaaactaataagttttttagataaaaggagaattggtgaagataataatctgaaaattgtatcaagaattttaaaggatttaaaaaaatataaaataaaaggtcttattaaatatgagagaaagtttagcaacaatagcaacattaaaccatctttaaaaaaaattaatagctcaattaaaactctagatccaaaagtaaaagcagcaatagatatagcatattcaagaatatttaaatttcactcattgcaaaaaatgaaaaatatttcatacacggacaaatttcagaatagattacagtacaagtataaaccaatagactcagtcggtatttatgttccagccaatttaccttcaacattattaatgaatgggatcccagcaaaaattgcaggtgtaaaaagaattattctagcaaatccaaaagttaatggaaaattaaactctgccgtactttatgcagctaaaaaaattggaataaaagaaatttattctatgggaggagcacaagccattggaagtatggcgtatatacaaaaggtaaataaaattgttggcccaggaaatatttttgtaacgcaggccaaaaaacaagtttttggtgacgtaggaatagaaggaatgatagctggtccttcagaaataacaattttagctgata

SEQ ID NO: 205666 - DNA, 824 bp, Unknown
  Bacterial polypeptide expressing nucleotide sequence isolated from the Sargasso Sea
ggaaattaaaaatagtttagatcagaaaactaaagatgatattcaattttctcatgaaagagttagaaaatttgctgaagcccagcttaaaaattatgggcaagattttgaagttgaattgtcagaaggtttatatgctggtcaaaaattaataccggttaatacagcaggatgctatgttccagcaggtagatatgctcatatagcgtcggctgttatgagtgtgactactgcaaaagttgcgggagtaaaaaatataattgtatgcagttctcctaaacctcagttgggtgtgcatccttcaattgtttataccgcagatttatgcggagctgatgttattatgaatttaggaggagtccaagccattgccgcaatgaccaatggcttgtttggaaatgctccagcagatattttggttggtccaggaaaccaatttgttgcagaagcgaaaagattgctttttggaaaagttggcattgatttgtttgcaggaccaactgaaattgctgttatagctgatgatactgcagatgcagaacttgtagcatttgatttagttggacaagctgaacatggatataattctcctgcttggttatttactacgagcaaaaaattagcagactatgtcatacaaagagttccagaattaattgccgatttaccagaattaccaagagaaaattcaaaagctgcttggagagactatggtgaagtaattctttgcgatactgatgaagaaattgcaaaagttagtgatgaatatgctccagaacacttggaagtacaaaccaaaaatctgaaatggtttcatgatagat

SEQ ID NO: 205667 - DNA, 277 bp, Unknown
  Bacterial polypeptide expressing nucleotide sequence isolated from the Sargasso Sea
ggagcaatatttttaggaaaatggaccccagaagctgttggagattatcttgctggaccaaatcatactttacctacgtctggaaattctagatttagcggttctttaggggttgaaacttttatgaaaaatacttcaataatagaatttaatgaagaaagtttaaaagttaatagtcttgatattataaatcttgctaaaagtgaaggtttacatagccatgctaactctgtacgaataagatttggagatcagcttgctcttgagggtgagtaga

SEQ ID NO: 205668 - DNA, 628 bp, Unknown
  Bacterial polypeptide expressing nucleotide sequence isolated from the Sargasso Sea
atagatttatttgctggtcccactgaaattgcaattatagcagatgaaactgcagacccagagattgttgcatttgatttagtgggtcaagctgaacatggttataattcaccagtttggttatttacaacaaatgaaaagttagcaaataaagtaataaaattaatgccgaaattaatatctgatttaccggaattgccaagaataagtgctgaagcttcttggcgtgattatggagaagtaattttgtgtgataataatgatgaattggtgtcaataagtgatgaatatgcccccgaacatttagaaatacaaacaataaataatgaatggtttcataaaaagttaaaaaattatggttcattatttattggagaggaaactacggtagcatatggagataaatgctcaggaacaaatcatattttaccaacaaaaggtgctggaaagtatactgggggattattcgttggtaaatttataaaaactctaagttttcaaagaatgactaaagagtctacaaaagaagttggggcagcagcagctagaatatcaagatatgaaggaatggaagctcatgcacgaactggtgatgtaaggttaagaaaatatggttactctaattaat

SEQ ID NO: 205669 - DNA, 629 bp, Unknown
  Bacterial polypeptide expressing nucleotide sequence isolated from the Sargasso Sea
tatgaagatattaaatagcaatagcaaaaattttgataaatcatttgataatttgctttcaaaaagaaaaaagaaactcaaagcaagttctgtatcagtaacaaaaataatcaatgatgttaaaaaaaatggcgacaaagcattattaaagtatgaaagaaaatttaataaaaataatattattgtgccatctgtaaagcagataaataaatcaattaaatctctagataaaaaagtaaaaaaggcaatcgatgatgcctataatagaatttataaatttcactctctacaaaaatttaaaaatatttcttataaggataaatataaaaacaaaattgattataaatatttaccattagagtctgttgcaatttatgtaccaggatctactgcatcctatccttcaacagtcttgatgaatgctattccagctattgtggcaaaagtaaaaagaatagtaatgattaatcctggatataaagggaatcaaaatccagctgtcttatatgctgcaaaaatttgcggtattaaggaaatctactccattggtggaccaagtgcgatttcagcagttacttatggaactaaaaaaattaaaccagtaaataaaatagttggtccaggaaatg

SEQ ID NO: 205670 - DNA, 819 bp, Unknown
  Bacterial polypeptide expressing nucleotide sequence isolated from the Sargasso Sea
tttgcttttacaaagaaaaaaaaaaattcaatcagattctgtttctgtaacaaagataattaatgatgttaaaaaaaatggagataaagcattattaaaatacgagaaaagatttaatcaaaacaacataattattccaagcccaaaacaaataaaaaaatctattagttcgcttgataaaaaagtaaagaaagcaatagataaggcttataatagaatttataaatttcattcacttcaaaaatttaaaaatatttcttatacagataaattaaaaaataaacttgaatataaatatgtacctttagattctgttgcaatttatgtgcctggttctactgcatcatatccatcaagtgtattgatgaatgctattccagcaattgttgcaggagttaagagaatagttatgattaatccaggctataaaggaaaacaaaatccagcagtattatacgctgcaaagaaatgcaaaataaaagaaatatattccattgggggtccttccgcaatcgcagcagcatcatatggaactaaaaaaattaaaaaagttcacaaaatagtaggtccaggaaacgcatatgttgcggcagcaaaaaaagaagtttttggtgttgttggaatagagggcatgatcgcaggaccgtcagaggttactatagtatgtgataaattctcgaatcctgagtgggttgcaagtgatttaattggacaagctgaacatgatattcttgcacaatgtattttgatttcaaaagacaaaaatttgatagataaagtaaaaactgaaattaataaacaattaaaagaaattccaag

SEQ ID NO: 205671 - DNA, 712 bp, Unknown
  Bacterial polypeptide expressing nucleotide sequence isolated from the Sargasso Sea
atgaaaacctataaataccctaataaagaaagctggaaagagctttgttcaagagccgaattaaaccagaaagacctgaacagcactgttcggtctattttagacaatgtaaaagccaatggcgatcaagcattgatagattacactatgcaattcgatcagcttaagctagatacattgcaagtatccgaagaagcaataaagcaggcagctgaaaccattgctccagtattaaaaaaagccatacgagctgcatacgaaaacatctattgttttcataaagcacagcaaataaaagaacagatcatacaaaccagcccaggtgtaaagtgttggagaaaagcagtagccatagaacgagttgggctgtacattcctggaggagaagccccattgttctctacaatactcatgctagggattcctgccctacttgcaggctgtaatgagatcattttatgcagtcctgccaaaaacaaacaagcattggatcctgctattttatacactgctaagctaataggaattgaaaagatctacacggtaggtggagcgcaagccatagcagctatggcctatggcacagctagcattccaaaagtttacaagatttttggtcctggcaatcagtttgtcaccaaagccaaagagctattgcaacaagaaggcgttgccatagacctgcctgcaggacccagcgagcttttgtaat

SEQ ID NO: 205672 - DNA, 766 bp, Unknown
  Bacterial polypeptide expressing nucleotide sequence isolated from the Sargasso Sea
atgaaatttctaaatactaataataaattattctacaaagaacttgattttatattaaaaaaaagatcatataatagtactacaaaagtagataaggaagtatatcaaataataaaacaagtaaaattccatggagataaagcattatttaaatatgcgaaaaaatttgacaaatcatctattaataaaaagaatatattattatctaaagaatttttaaaatcttataaaaacaaaatagatgacgaaatattaaaagcttttagaattgcaattcacaatataactaattttcataagaaacaaatgcctaaaagtttccaaatcaaaaaacatggagttaaaacaagtgctaaatggactccaatacaatcagtaggtctttatattccaggcggactagcgtcttatccttcttcattaattatgaatgttattcccgctaaagtttctggagtcaaaagaattgtacttatgactccttcaaaatcaaacaagatcaatccatatatcctagctttaatagatgaattaaaaataagtgaagtttatcaaattggtggagctcattctattgctgctttagcatttggtacagaaagcataaaaccagttaataagatatttggacctggtaatgcttacgtggctagcgccaaaaaacaagtttttggagatgttggcattgatttaattgcaggtccttctgaaatagtcgtagtagctgattctaaaaatgatccaaaatgggttgcttcagatttaa

SEQ ID NO: 205673 - DNA, 777 bp, Unknown
  Bacterial polypeptide expressing nucleotide sequence isolated from the Sargasso Sea
atgttatattcctggaggacgttacgcgcatatagcttctgctgttatgagtgtaacaacagctaaggttgcaggtgtaaaaaatataattgcttgtagtcctcctaaagaggctataggcgcccaccctgcaattgtttatacagctaatttgtgtggagctgatgtaatattaaacctaggtggagtacctggcattgcagcaatgacaaatggactatttaataatcctccagcagatattttggtaggtcctggaaatcaatatgttgcagaagcgaaaagaattttatttggaaaagttggaattgatttattcgccggtccaacagaaattgccattattgccgacgataaagctgatgccgagattgtggccgttgacttagtcggtcaagcggagcacggctataattctcccgcgtggttatacacaaccagcaaaagactcgctgatgaggtgttaaaaagagtacctgaattaattgcagaattgccagaaattccaagaacaagtgctgaagcagcatggagagattatggtgaggttattctttgtaacacagatgaggaaatggcaaccataagcgatgaatatgcacctgaacatttagaggttcatactgaaaatcttgattggtttcacaaaagattaaaaaattatggttcactgttcattggagaagaaacaacagttgcttatggtgacaaatgttcaggaactaatcacatattaccaactaaaggtgcaggtcgatatactggaggcttatttgt

SEQ ID NO: 205674 - DNA, 606 bp, Unknown
  Bacterial polypeptide expressing nucleotide sequence isolated from the Sargasso Sea
aatgagtgttacaactgctaaagttgctggtgttaaaaatattattgcatgctctccacctaaaaaaaaaacgggtgctcatcctgcaataatttatacagctaatttatgtggtgcagataaaattttaaatttaggtggtgttgcggctattgctgcaatgacttatggtatgtttggaaacgcaccagctgatatattggtaggaccgggaaatcaatttgttgcggaggcaaaaagaattttatttggaaaagttgggatcgatttatttgctggaccaactgagattgccgttattggagacgaaactgctgatccagaaattgttgctgttgatttagtcggacaagctgagcatggatataattctcctgcatggctttttacaacaagtaaaaagcttgccgatgatgtgatcaaaagggttccagaattaatttcagaattacctgagatgccaagaaatagtgctgaggcagcatggagagattatggtgaggttattttatgtgatactgatgaggagatggcatctataagtgatgagtatgctcctgagcatctagaggttcaaactaaaaatcttaaatggttccacaatag

SEQ ID NO: 205675 - DNA, 906 bp, Unknown
  Bacterial polypeptide expressing nucleotide sequence isolated from the Sargasso Sea
gaccaaataaataaatcactagatcaaaaaactaaagacgatattcagttttcatatgaaagagtaagaaaattcgcagaagcacaactaaaaaattatggccaagattttgaggttgagttatcaaaaggattatatgctgggcaaaaattagtccctgttaatactgcaggatgttatatacctggaggaagatatgcccatatagcatctgctgttatgagtgtaacgactgcaaaagttgctagtgtaaaaaatattatagcttgtagtcctcctaaagaaaaaataggagcacatcctgctattatttatacagcaaatctttgcggggcagacgtaattttaaatcttggtggtgttcctgcaattgctgcaatgacttatggtttattcggaaatgaaccagcagatatattggtaggaccaggaaatcaatttgttgcagaagcaaaaaggattttatttggaaaagttggcatagatttatttgctgggccaaccgaaatcgcaataatagcagatgaaactgcagacccagaaattgttgctgtggatttagttggacaggctgagcatggatataattctccagcttggctttatacaactagtaaaaaacttgctgaaatagttatgaagagagttccagaattaatttctaaacttccagaattaccaagaacaagtgcagaggcagcatggaaagattatggtgaagttattttgtgtgacagtgatgaagagatggcaaaaataagcgatgaatatgctccagaacatttagaggtacaaactaaaaatctaaaatggtttcatgatcgtctcaaaaatatggctctttatttattggtgaaggaactacagttgcctatggagataaatgctcaggaactaatcatattt

SEQ ID NO: 205676 - DNA, 512 bp, Unknown
  Bacterial polypeptide expressing nucleotide sequence isolated from the Sargasso Sea
aatgattaaaacattaaaatcaagagaaaaaaattttgaaaaaatattgaatagcttcctgaagttaagaagagggtattcaagtaaaaaaatcactgtagtaaaaaaaattataaatgatgttgaaatgcatggagacaaatcagttattaaatatgagaaaaaatttaataatttaaaaactttgaaaagtaataacctcactttcacaaaacctgaaataaaaaaaagtataaaattcttagatcggaaagtaaaaaattctattgatcttgcttattcgagaattttcaattttcataaaaatcaaaagtttcataaatttaaaaagaaggataaaatcaacaatagtttttactatagatcaaaacctgttgagaaagtgggtgtttatgtacctggaggtaaagcgagttacccaagttctgtattaatgaattgcattccagcctctattgcaggagtaaatgaaatttttatgacagttccttcttttgatggaggaataaatc

SEQ ID NO: 205677 - DNA, 829 bp, Unknown
  Bacterial polypeptide expressing nucleotide sequence isolated from the Sargasso Sea
tgcagcagcaccacctcagaagggagcgcctagtgccgccattgttacggccatggctctcggtggagctgatgaaatttattgtcttggaggagttcaggcggttgccgctatggcacttggcactgaaactattgattcagttgacatgattgttggaccaggtaatgcatatgtagccgaagcgaaaagacagctttttggaagagtcggaattgatctcttagctggaccaacggaaacgctagttattgctgatgatagcgttgacggggaactgtgcgctgccgatctactaggacaggccgagcatggcccaacatctgctgccattctcctgacagactctgaacaacttgctaaagatactttaatggaaatcgatagacagctcggtattcttccaacagcagatattgctggggtagcctggcgtgactatggtcaagcgatagtttgtgataacactgaagaaatggtgaaaattgctgatgaaattgcctccgaacatgtacaagtaatgacaaagaaccctgatttctttttaaataatatgactaactatggtgctctcttcctaggcccagaaactaacgtttcttatggagataaggtaataggcacaaaccatacgcttccaacaaaaaaagcagctcgttataccggtggtttatgggttggtaaatttattaagacatgcacatatcaaaaaattaccgaggaagcttcgctacatattggtcaatattgttcacgattatgcgatctagagggatttatgggccacaaggaacaagcggacattagagtccggcgttatggaaactga

SEQ ID NO: 205678 - DNA, 770 bp, Unknown
  Bacterial polypeptide expressing nucleotide sequence isolated from the Sargasso Sea
aataaaaaaaactataaattcacttgataaaaaagtaaagaaagcaatcgatacggcttataatagaatttataaatttcattcacttcaaaaatttaaaaatattacttatacagataaattaaaaaataaactcgaatataaatatgtgcctttagagtctgttgcaatttatgttcctggttctacagcttcatacccatcaagtgtgttgatgaatgctattccagcaattgtagcaggtgttaagagaatagttatgattaatccaggccataaaggaaaacaaaatccagccgtattatacgccgcaaaaaaatgcaaaataaaagaaatttattctatcggaggcccttctgctattgcagcagtatcttatgggactaaaaaaattaaaaaagttcataaaatagttggtccaggaaacgcatatgttgcggcagcaaaaaaagaagtttttggtgttgttggaattgaaggtatgactgcaggtccttcagaagtgactgtcgtttgtgataaattctcaaatcctgagtgggttgcaagtgatttaattggacaagctgaacatgatattcttgcacaatgtattttgatttcaaaagataaagatttgttagataaagtaaaaattgaaattactaaacaattaaaagaaattccaagagcttctgttgcaagaagaagtttaattaataatggaattcttatgtatatttcttcagacgctaaaataataagtgttgtaaataaaattgcaccatgaa

SEQ ID NO: 205679 - DNA, 862 bp, Unknown
  Bacterial polypeptide expressing nucleotide sequence isolated from the Sargasso Sea
attaatatcttctttattaatgcagttaattcctgcaaagattgctgaatgtaaaaacattgttatatgcaccccacccaataaagaaggaaaagtagctgaagaaattctttggattgccaaaagatacaatatttcaaaagtatataaagttggtggatcacaagcaatttttgcaatggcttatggcaatacacttataccaaaagttgaaaaaatattcggtccgggcaatcaatatgtaaatttagctaaacaaattgtaactgatgaagttgatattgacttaccagctgggcctagtgaagtgatggtagtttctaactcagaagaagattatgacatcattgcagcagatttattatcacaattggagcatggaacagactctaaagcatttttattgtcaaataatataaaactaattaataaagtacaaaaagctgtccaggatcaggctagaaaattaacaagaaaaaaaattctccagaaaagtcttgataatctattattaatcaaaacaaaatctaagaaagatactattaagttaatcaatgaatgtgcgcctgagcatttaattttatttgatgataattattcctccctactcccatttattgaaaatgctgggtctattttttgtggtaaatatagtccagagtcatttggtgattatgcgtcaggcactaatcatgttttaccaaccaatggaaaagcaacaactaaatcaggcttaggaataaaagattttggcaagcaaatatctgttcagacatctacaagtgaaggttttcaaaatttatcagaaactgttttgaatttatctaaagcagagaaacttgatgcacatactaatgctgtt

SEQ ID NO: 205680 - DNA, 225 bp, Unknown
  Bacterial polypeptide expressing nucleotide sequence isolated from the Sargasso Sea
cattaggagactatattgctggcccaaaccacgtattaccaacatctggaacagcaaaattctcgtctggcctatcagtttatgattttttgaaaaggcaatctgtaattaaaatatcaaaaaggggtattgaaagattgggtccatcagttataactttgtcaaaatatgaaaatcttcatgggcacgctaattctgtaaaagtgagattaaaacaaaggtaat

SEQ ID NO: 205681 - DNA, 982 bp, Unknown
  Bacterial polypeptide expressing nucleotide sequence isolated from the Sargasso Sea
aaatcaccaaaaactccctccactgacgatagtaagacaaacgaaattgttaaagggttgttaaaagaaatagaaatttcaaaagaagaagcttgtattaatctaacaaaaaaatttgataagtatgatggtgaaataatcgtttcaaaagaaagaattgagcagatagataaagaattagatcaaaaaacgaaggacgatattcaattttctcatgaaagagtaaaaaaatttgctgaggcacaattaaaaaattacggccaagattttgaggttgaactatcgccaggtctttatgcaggtcaaaaattaattcctgtaaatacagccggttgttatataccaggtggaagatatgcccatatagcctcagctgtaatgagtgttacaactgcaaaagttgcaggagtaaaaaatataattgcttgcagtccacccaaggaaggtgtgggtgcacatccagcaattatttatacagctaatttgtgtggtgcagatgtaattttaaatttagggggtgttccagggattgctgcaatgacaaatggtttatttaaaaatccgccagcagatattttagtaggtccaggaaatcagtttgtagcagaagccaaaagaattttatttggtaaagttggtattgatttattcgcgggaccaactgaaattgctgtaatagctgatgatgaggctgatgcggagatggtagcagtagatctagtaggacaagctgaacatggatataattctcccgcttggttatacacgacaagtcaaagagttgctgatgaagtcatgaaaagagttccagaattaattgctgaattaccagagttacctagaaaaagtgctgaagctgcctggagagattatggtgaagtaatattatgtgacacagacgaggagatggcaaccattagtgatgaatacgctcctgaacatttagaagttcaaacaaaaaatcttgattggttccataaaa

SEQ ID NO: 205682 - DNA, 342 bp, Unknown
  Bacterial polypeptide expressing nucleotide sequence isolated from the Sargasso Sea
atgtaattaatgagatagctcctgaacacttagaaataaatgttggcaattataaaaagtataaagataaaattgttaatgcgggaagtatttgtataggaaaatattctcctatggcattaagcgactatgctgttgggacaaatcatgtattaccaactaatgcatcagctaaattttcgtcaggcttaagtttaagtgaattttataaaaaaattagccttataactctttcaaaaaaaggtgttgagaaaataggagaatacgctacacatctcgctgagtatgaagaattaaaaggtcatgctttgagtataaaatctagaataaataaggagtaac

SEQ ID NO: 205683 - DNA, 418 bp, Unknown
  Bacterial polypeptide expressing nucleotide sequence isolated from the Sargasso Sea
ttgttttcgtcaaaagataaaaaatttcaagagaacttctcaaagtttctttcaatgagaagggacaaaaaccacgcagtttcgtctgtagtatcaaatattataggacaaatccgaaaggaaggagattccgctttaattaaatacacgagagaatttgatggcttcgatttagtaaaaaatggattttattttgaaaaaaatgaaatagataaaagtgaaaaattagtttcaaaaaatgataaagaagctctcaaaatagcaattgatagaattaatctttttcatcagcatcagtaccctaaagacgtatcttggacagacagtattggtgtgaatcttggctgggtttggaaacctatcaacaaggtaggagtttatgtgcctggtggcacggcttcttatccttccttcggta

SEQ ID NO: 205684 - DNA, 836 bp, Unknown
  Bacterial polypeptide expressing nucleotide sequence isolated from the Sargasso Sea
catgacaataaaatatttaaaaaaggctattaaaaacccatcaacggacgatacaaaaactcgtaccgtggttcaaaatattttaaatgatatagagaaaaaaagagaagaggctatcaaagaattaacaaaaaaattcgataagtttgatggagagattgtattatcaaaagaaaaaattgaagaagcaataaaaaaagttgatcaaaaaacaaaagacgatgttcagtttgctcatgaaagaattaaaaaatttgctgaacaccaattaaaaagtatgaataatgagtttgaagtagaactatcaaaaggattatttgctggtcaaagacttattccggttaacactgctggctgttatattcctggaggtcgttatgctcatatttcatctgcaacaatggctataactccagctaaagttgctggagtaaatactataatttgtgcaagccctccaaaagataagaatggagcacatcctggaattatttatgcagcaaatctttgtggtgcagatgtaattttaaatttaggtggaattgctgctattgcatctatggcttacggttgttttaataaccctgaagttgattttttagttggtgccggaaatcaatacgtagctgaagcaaaacgtattttgttcggaaaggtgggtatagatctttttgcaggaccaactgagattgcaataattgctgataagcatgcagataaagaaattgttgctgcagatatcgtgggacaggcagagcatggttataattcacccggatgggtttttacgactgataaaattttggcagattacattataaaaaagaattccagaa

SEQ ID NO: 205685 - DNA, 397 bp, Unknown
  Bacterial polypeptide expressing nucleotide sequence isolated from the Sargasso Sea
gctgctaaaaagaagagagaaatctaatggcaaaacaaaggtaataaaaaaaataattaatgatattaggaaaaatggtgataaagcattattaaaatatgaaaaaaaatttagcaataattttaacatagtttcaagaaaaaatgattttagttctgaaattaaatttttaagttccaaagtaaaaaaagcaattgatttttcatttaacagaatatccaattttcattcgaggcagaaagtaaaaaatatattttataaagatagatttaataataggttaaattataaatttgttcctattagctccgtgggtatttacgtaccaggaggaacagcgagttttccctcaacagttttgatgagtgcaataccagcgagaattgctggagttaaa

SEQ ID NO: 205686 - DNA, 616 bp, Unknown
  Bacterial polypeptide expressing nucleotide sequence isolated from the Sargasso Sea
ttggatgatttaactaaatttctagatcgtagaagatcatcaaagaaaccagaaaataaacttatatccaagattcttaatgatattaagaaaaataatattaaggcacttttaaaatatgaaaaaaaatttagcaaaaatagtcaaattaagccaagtattaaagaaataaataaagcaattaaatttctagatccaaagattaaaagggctatagattttgcatacaaaagaatccacaattttcatattatgcagaaaactagaaatattttttttaaagacaatttaaataataaaatagaatataaatatgtaccaatccaatcagtaggaatatatgttcctgcaaatttaccctctacgttgttgatgaatgcaattcctgcaaaaattgcaggtgttaaaaaaatcatactagcgaatccaaaaaataatgggaaactaaatcctgcagttttatatgccgcaaagaaattaggcattaatgaaatttattctataggtggagcacaagcaattggtagcttagcatatattcaaaaagtaaataaaattgttggccctggaaatatttttgtagctggtgctaaaagacaagttttggagatgtagg

SEQ ID NO: 205687 - DNA, 922 bp, Unknown
  Bacterial polypeptide expressing nucleotide sequence isolated from the Sargasso Sea
cccggcgggaaattcccgatggtcgcttccgcccacatgtcggtggtgactgcaaaagttgcaggagtcaaggaaatcattacctgcgccccgccctaccagggcaaacccgcggacgctatcgtcgcagctcaatccatggggggtgcagatgcgatttatgtgatcggaggtgtgcaggcggtggcggcgatggctttgggtaccgagagcatttccgccgtggatatgcttgtcgggcccggaaacgcctatgttgccgaagcaaagcgacaactttacggcagggtcgggatcgatctttttgcaggaccaaccgaaaccctggtgattgcggatgaaaccgtcgatggagaaatgtgtgccaccgatctgctgggccaggcggaacatgggccaacctcccctgccatcctgctcacgaattctgaaaatctggcaaaacaaaccatggaagaagtcgaccgtcaattaaacaccctttcgaccagtgacacggctgcccctgcctggagggattatggacaggtgatcgttgcggattcctatgacgaaatggtggagattgccaatgaccttgctttcgaacatgttcaggtgatgactgaccgtgatgactggttcctcgagaacatgagcaattacggctcgttatttctgggcccaaggaccaatgtttcctatggagacaaagtgatcggcaccaatcacacccttcccaccctcaaggcagcgcgttataccggaggtctctgggtcgggaaatacatcaaaacttgcacctatcagaaagtgctgaccgacgaggcaacggtcaaaatcggagaatactgctccaggctctgtgagctcgagggttttgctgggcatcaggaacaggccgatctgcgtgtgcgaagataccgtaaagaggccgcgtgag

SEQ ID NO: 205688 - DNA, 736 bp, Unknown
  Bacterial polypeptide expressing nucleotide sequence isolated from the Sargasso Sea
gaaacaattacacccgcacatatgcttgttgggcctggcaatgcatatgttgcagaagctaaaagacaactttttggaacggtaggaatagatttatttgcaggcccaacagagactatggttatagcagacgatacagttgatgcagaattatgtgctacagacttattgggacaagctgaacatggttacaactcacctgcagttttagtaactaattcaaaaaaattagcaaaaaatacactaacagaaattgatagaattttaaaaatattaccaacagcagaaactgctagaaaaagttgggaagattacggcgaggttattctttgtgagaattatgaggaaatgcttaaaatttctgatgaaatagcttctgaacatgttcaggtaatgaccgatagagatgactggtttcttgaaaagatgaaatcatatggagcactatttcttgggccaagaacaaatgtagctaatggtgataaagttattggaactaatcatacactaccaactaaaaaagctggtagatatactggtggattatgggttggtaagtttttaaaaactcacagttatcaaaaaattcttactgatgaagctgcttctatgattggagagaaatgttctagactttgtatgctagagggatttgttggtcatgctgaacaagctaatgtccgagttcgaaggtatggtaaaaaaaatgttggctatgggatggcagctgaataat

SEQ ID NO: 205689 - DNA, 904 bp, Unknown
  Bacterial polypeptide expressing nucleotide sequence isolated from the Sargasso Sea
ggatgtaaagaactaacaaagaaatttgataaatatgaaggagatataattgtctcgaaagaaagaattgaggaaataaataaatctatagatcaaaaaactaaagacgatgtaaaatttgctcatgatagagttcgaaaatttgcagaagctcaattaaaaaattacggtaatgattttgaaatagaattatctaaaggtttatatgcgggacaaaaacttgtgccagtcaatactgcagggtgttatattccaggaggaagatttgctcatattgcttcagctgtaatgagtgttactacagctaaagtagctggtgttaagaacattattgcatgcagccctccaaaaccaaatgttggagctcatccaaccataatctatacagcaaatttatgtggagcagatgtgataatgaatttaggtggtatcccagctattgcagcaatgacttatggattatttaaaaatgctccagctgacatgctagtcggtcctggcaatcaatttgttgcggaggctaagagaattttatttggtagagtagggattgatctatttgctggaccaacagagatagcaataatagctgatgaaaatgctgatccagaaattgttgcagttgatttagttgggcaagcagagcatggttacaattcaccagcttggctttatactacaagcaaagatttagcagacaaagttttaaaaagagtaccagaattaattaaagaacttcctgaattaccaagaaaaagtgctgaagctgcatggaaagattacggagaagttattctatgtgacactgatgaagaaatggttcagataagtgatgaatacgctccagaacacttagaagttcaaacaaaaaatttagattggtttcataaaagactaaaaaatt

SEQ ID NO: 205690 - DNA, 710 bp, Unknown
  Bacterial polypeptide expressing nucleotide sequence isolated from the Sargasso Sea
aaatgctccagccgacatgttagtcggtcccggtaatcaatttgttgcagaagctaaaagaattttatttggaagggtagggattgatttgtttgctggaccaacagagatagcaataatagctgataaaaatgctgatcctgaaattgttgcagttgacttagttgggcaagcagaacatggttataattcaccagcttggctttacacaacaagtaaagatttagctgacaaagttttaaaaagggttcctgaattaattaaagaacttcctgaattaccaagaaaaagtgctgaagctgcatggaaagattatggagaaattattctatgtgacactgatgaagaaatggttcagataagtgatgaatacgctccagaacatttagaagttcaaacaaaaaatttagactggtttcataaaagacttaaaaattatggatcattatttattggagaagaaactactgttgcttatggtgacaaatgttcaggtacaaatcatatattaccaacaaaaggtgctggaaaatatacaggtggtttatttgttggaaaatttataaagacactaagttttcaaagaatgacaaaagagtcgaccagggaagtaggagctgctgctgctagactttcaagatacgagggaatggaagctcacgctagaacgggagatgtgagattaagaaaatacggtttttctaattaat

SEQ ID NO: 205691 - DNA, 646 bp, Unknown
  Bacterial polypeptide expressing nucleotide sequence isolated from the Sargasso Sea
caaagcaaaaaaagaagtttttggaaatgttggaatagaaggaatgattgctggtccttctgaaataactatagtagcggataaaaaatctgaaacaaaaagcgtaatcacatctttaattgggcaagcagagcatgatgttaactctcagtgtataataatatctaaagactttactgtgctaaaaaaaataaaaaatttaattaaaaaaagtttaaaaaatttacctagaaaaaaaattgtaacaaaaagtttaaaaactaatggattattgatacatgcaaaaaatgacaaaaatataattgatttaatcaatttaattgctcctgaacatttagaattaaacattgctaaacctaaaaaatatctaaataaaattgtaaatgctggaagcatttgtttaggtaaattttctgctatggctgtaacagattataatgccggcaccaaccatgttttaccaacaatgggatcagctagattttcatcaggactaaatgtaagcgacttttgcaaaaaaattagctatataaatttatcaaaaaagggtattgaagtaattggcaagcaggctataactcttgccgagtatgaaaatttagaaggtcatgctcaaagtattaaatcaagaattaggagaaaataa

SEQ ID NO: 205692 - DNA, 289 bp, Unknown
  Bacterial polypeptide expressing nucleotide sequence isolated from the Sargasso Sea
tcaaaaaaaattcttgcaggtatagagaatgcaggcgcgatatttttaggaaaatggaccccagaagctgttggagattatcttgctggaccaaatcatactttacctacctcaggaaattctagatttagcggatctctaggggtggaaacttttatgaaaaatacttcaataatagaatttaatgaagaaagtttaaaagttaacagccttgatattattaatcttgctaaaagtgagggcttgcatagccacgctaattctgtagaaataagatttgaagattagc

SEQ ID NO: 205693 - DNA, 622 bp, Unknown
  Bacterial polypeptide expressing nucleotide sequence isolated from the Sargasso Sea
tctgctaaatatagagtcaccaagatcttttaaagttagcaaaattgaaattaaaaaagctggaaaaaatctatctgatgaaataaaagcatcaattttagaggcagcaggtaacattgaaaaaatttgtcagattgaaaaaagtaaacttatatatgatgtcattgaaacaacaaagggcataaaaatatggaaagagtttagaccgataggcactgttggtttatatgtaccaggtggtgaaacaccattaatatcttctttattaatgcagttaattcctgcaaagattgctgaatgtaaaaacattgttatatgcaccccacccaataaagaaggaaaaatagctgaagaaattctttggattgctaaaaagtacaatatttcaaaagtatataaagttggtggatcacaagcaatttttgcaatggcttatggcaatacacttataccaaaagttgaaaaaatattcggtccgggcaatcaatatgtaaatttagccaaacaaattgtaactgatgaagttgatattgacttaccagctgggcctagtgaagtgatggtagtttctaactcagaaaaagataaggacatcattgcagcagatttattatcacaattg

SEQ ID NO: 205694 - DNA, 727 bp, Unknown
  Bacterial polypeptide expressing nucleotide sequence isolated from the Sargasso Sea
cctcaggcaaatattttagttggacctggcgatcagtttgtagctgaggcaaaacgtattctgttcggtcgagttggaatagatatgatagctggtcccactgatagtttgattttggcagatgaaactgctgatccatttattgtagctacagatttagtgtcgcaagcagaacatggctataattcacctgtctggttggttacagataacgaaacgttagcgaataatgtgatgaatttggttccaaagttgattgatgacctgcctgagactaaccgagaaaatgcaactgcggcctggcgggattatgcggaggtaattgtttgtgggaacagggaagaaatggcttcttgttctgatgaatatgcacctgaacatcttacggttcaggctgatgaccttgattggtggcttgaacgcctgacatgttatggttcattatttttaggagaggaaacaactgtttcttatggtgacaaggctgcgggaactaaccatgttttgcctacttcgcgcgctgctaattacactgggggtttgagcgtccacaaatatatgaagatagtgacatatcaaagagcaaccagagagggatcaaaatcgattgctgaggctacggccagaatttctcgattagaggggatggagggtcatgcgcgggctgcagatgttaggttagctaaattttttcctaatgaggagtttgatttaactgctaatggat

SEQ ID NO: 205695 - DNA, 915 bp, Unknown
  Bacterial polypeptide expressing nucleotide sequence isolated from the Sargasso Sea
atacagcgggatgctacgtacctggccggaagatatgctcatatagcttcagctgtaatgagtgttacaacagctaaagtagctggagttaaaaatattttagtttgtagttcaccgaaaccagatattggagtgcacccatcaattatatatacagctgatttgtgtggagcagatgtaattatgaatttaggtggagttcaagcaatcgctgcaatgacaaatggattatttgggaatgcaccagctgatattttggttgggccaggaaatcaatttgttgctgaagcaaaaagaatattgtttggaaaagttggaattgatttatttgctggtcctacagaaattgctgtaattgctgatgaaacggctgatgctgagatagtagcatttgatttagttggtcaagctgaacatggctataattcacctgcttggttgtttactactagtaaaaaattagcagaagaagttatgaaaagagtacctgagttaattgcagatttaccagaactacctaaacaaagtgcaggggatgcatggagagattttggtgaagttattctttgcgacactgatgaagaaattgcaaaaattagtgatgaatatgcaccagagcatttagaagttcagacaaaaaatttgaaatggtttcatgaaagattaaaaaactatggatcattatttataggtgaagaaacaacggtagcttacggtgacaaatgttcaggaacaaaccatattcttccaactaaaggtgctggaagatatactggtggattatttgttggtaaatttattaaaacactaagttttcaaagaatgacgaaagagtctacaaaagaagtgggtgctgcggctgcaagaatttcaagatacgaaggaatggaagcccacgcacgaactggcgatgta

SEQ ID NO: 205696 - DNA, 493 bp, Unknown
  Bacterial polypeptide expressing nucleotide sequence isolated from the Sargasso Sea
atattagttactaaagataaaaatttgacaaaaaaagttcttacagaagttaaaaaaattttatccaatctgccaagaaaaataatagcctcaaagtcattaaaaaaaaatggtttatttgttctagtgcagaacgataaacagataattgaaacaataaatgaaatagccccagaacatcttgagctcaatgtaaaaaattttaaaaagtacgaaaataagattaaaaatgctggaagtatttgcaatggaccaaatactccgatgagcgcatcagattatacagttggaactaatcatgttttgccaactgcggggtcttcaaaatttagctcaggtttaaatttaaatgaatttactaaaaaaatatcaattgtaactttgagtaaattaggggtagaaaaaattgcaaatccagctataactctttccgagtttgaacaattacatggtcatactcaaagtataaaatctagaataaggagaaactaag

SEQ ID NO: 205697 - DNA, 639 bp, Unknown
  Bacterial polypeptide expressing nucleotide sequence isolated from the Sargasso Sea
tatgaagatactaaatagtaaaagtaaaaattttgataaattattagaaaatttgcttttacagagaaaaaaaaaaattcaatctgactctgtttctgtaacaaatataattaaagatgtaaaaaaaaatggagataaagcattactgaaatacgagaaaagatttaatcaaaacaacataatcattccaagcacaaaacaaataaaaaaatctataaattcacttgataaaaaagtaaagaaagcaatagataaggcttataatagaatttataaatttcattcacttcaaaaatttaaaaatatttcttatacagataaattaaagaataaactcgaatataaatatgtgcctttagagtctgttgcaatttatgttcctggttctactgcctcttacccatcgagtgtattgatgaatgctattccagccattgttgcaggtgttaagagaatagttatgattaatccgggccacaaaggaaaacaaaatccagctgtattatacgctgcaaaaaaatgcaaaataaaagaaatttattctatcggaggcccttctgctattgcagcagtatcttatgggactaaaaaaattaaaaaagttcataaaatagttggaccaggaaacacatatgttgc

SEQ ID NO: 205698 - DNA, 441 bp, Unknown
  Bacterial polypeptide expressing nucleotide sequence isolated from the Sargasso Sea
aaaaaagcgattgattttgcttataatagaatactcaaatatcattcactacaaaaaattaaaaatattttgtataaagataaacttaaaaataatcttcaatataaatctgttccaataaataaagttggtatttatgtacctgccaatttaccatctactttattgatgaatgctattcctgcaagaatagcaggcgtaaaaaaaattattttagcaaatccgagactaaacaaaaaattaaatcctgctgtaatttatgcagctaaaaaacttgggattaaagaaatttattctataggtggtgcacaagcaattgcaagtttagcttatattcaaaaagttgacaaaatagttggaccaggaaatatatatgttgctaaagcaaaaaaagaagtgtttggagatgttggtatagaaggtatggtagctggaccatca

SEQ ID NO: 205699 - DNA, 559 bp, Unknown
  Bacterial polypeptide expressing nucleotide sequence isolated from the Sargasso Sea
tagtgatccaaaaattatctctgctgatctcatagcccaatctgagcatgataaaagcgctcaaagcattttgattaccactgatcaagcattagctgaagcagttgaaaaagaagtacttagtcagttaaagtcacttccgcgaaaagaaattgcgtcagtgagctgggataaaaacggcaaaatcattgttgtacgtgatctcaaagaggcttttgatatctcaaatcaattagcccctgaacacctcgagcttgccattgataatgcgagagattttcttaaatatattgtcaatgcaggtgcagtatttatcggtaggaatacacccgaagcattaggtgactatgttgctggtccaagccatgtattgcctacatcaagaagtgcaaaattttcatcaggactatcagtatttgacttcctaaagaaaatatcgcttgttgagtttacaaaagaaggtattgaagaaattggaaatagtgctatgacaatcgctgataatgaaggtcttgacggacattcaaggtcaatagaatataggcttacaaaaaaataa

SEQ ID NO: 205700 - DNA, 515 bp, Unknown
  Bacterial polypeptide expressing nucleotide sequence isolated from the Sargasso Sea
aatgttaaaattattaaattatagtaaaaagaattcgtctaataaccttgaaaaaattcttaataaaagaaaatcttttcaaaaaacaaatatttcaaaagtaaaaaatataatttcaaaagttaaaaaaaaaggggatagcgcagtaatcaaatacgaaaagaaattttcgaaagttaagttcaaaggaaaagttggtgaaattattttctcgaaaaaagaaataaatacaatagccaaaaaaacagatataagaattaagcggtcaatagaccttgctttcaatagaataaaaaaatttcacagtaaacagacaatattaccatttatttataaagataaatataagaatgttatgtcttacaaatactctgccatagataaggttggtgtttacgtgcccggcggcactgcaagttatcccagtacagttcttatgaactgtattccagcgattgttgcaggagttaaaaatatttacttatctactccagcccttaacaataagattaacc

SEQ ID NO: 205701 - DNA, 517 bp, Unknown
  Bacterial polypeptide expressing nucleotide sequence isolated from the Sargasso Sea
atgcttaaaacttttaattataacaaaaatggagcttctaaaatgctagaggtttttttgaataaacgtaaatctacacaaaaaaacatagcttcttcggtttataaaataattcaagaggtaaaaaaaaatggagataaagctgttttaaattacgaaaggaaatattcgaaaataaaaacaaaatctaataaaatttttttttctaataaagaaattaatcaaattgctaaaaaaacagatattaaaataaaaaaagctatagatttagcttttagtagaattaaaaagtttcatttaaaacaaaaagtttcaaattttaagtttaaagataaatataataatgaactttcttataaatattcatcaatagaaaaagttggtgtatatgtaccaggaggtaccgcaaattatccaagcactgttttaatgaattgtattccagctattgtagcgggtgtaaaaaatatttacttaactactccttgttggacacgaagattaatcctgcggtagt

SEQ ID NO: 205702 - DNA, 784 bp, Unknown
  Bacterial polypeptide expressing nucleotide sequence isolated from the Sargasso Sea
gctggtagatatgcacatatagcatctgcagtaatgagtgtaacgacagcaaaagttgcaggagtaaaaaatataattgtatgcagttctcctaaacctggcataggtgtacatccagcaattgtttataccgctgatttatgtggagctgatgttgttatgaatttaggaggagtccaagccatagctgcaatgaccaatggcttgtttggaaatgctccagcagatattttggttggcccaggaaaccaatttgttgcagaagcaaaaagattgctttttggaaaagttggcattgatttgtttgcaggaccaactgaaattgctgtcatagctgatgacactgcagatgcagaacttgtagcatttgatttggttggacaagctgaacacggatataattctcctgcttggttatttactaatagcaaaaaattagcagactatgtcatgaaaagggttccagaattaattgccgatttaccagaattgccaagggaaaattcagaagctgcttggagagattatggtgaagtaatcctttgcgatactgatgaggaaattgcaaaagttagtgatgaatatgccccagaacacttagaggtacaaaccaaaaatctaaaatggtttcatgacagattaaaaaattatggatcattgtttataggtgaagaaacaactgtagcttatggagataaatgttcaggtactaatcatatattgccaacaaaaggtgcagcaaaatatactggcggattatttgttggtaaatttattaaaacat

SEQ ID NO: 205703 - DNA, 829 bp, Unknown
  Bacterial polypeptide expressing nucleotide sequence isolated from the Sargasso Sea
agatcaaaagactaaggatgatattcaattttcatacgatagagtaagaacatttgcagaagcacaattaaaaaattatggtcaagattttgaggttgagctttcacctggactttttgctggccaaaaactaatcccagtaaatacggcaggttgttatatacctggcggtagatacgcacatattgcttcagctgtaatgagtgtaacaactgcaaaagttgctggtgttaaaaacgtaatagcttgtagtcctcctaaggaaggagttggtgcacatccagcgattatctacactgctgatttatgtggtgcagatgttattttaaatttaggtggtgttcctggtattgcagcaatgactaatggattgtttaataatcctcctgcagatattttggttggtccaggaaatcaatttgttgctgaagctaaaagaattttatttggaaaagttggaattgatttatttgcaggtcctacagaaatcgctgtaatagcagatgataaagcagatgctgaaatggttgctgtagatctcgttggtcaagcagagcatggttataattcacctgcttggttatacactactagtaaaagagttgctgatgaagtaatgaaaagagttcctgaactaatagcagatttgcctgagcttccaagaacaagtgcggaagctgcttggagagattatggtgaggtcattctttgtgatactgatgaagaaatggctgcaattagtgataaatacgcacctgagcatttagaggttcaaactgaaaacttaaggtggtttcataaaagattaaaaaactatggatcattattt

SEQ ID NO: 205704 - DNA, 283 bp, Unknown
  Bacterial polypeptide expressing nucleotide sequence isolated from the Sargasso Sea
tttgaatggcgtgaaaaatgcaggatctatttttgttggaaaattttcaccagaggctattggtgattatattgctggtccaaatcatgttttacctacttctggttcagcaagattttcatctggattgtccgttaacgattttttaaagaggcaatcattaataaaaataactaaaacaggtattgaaagattaggatcatcggttataaatctagcgaaacatgagaatttagaaggtcatgctaattctgtaaaactaagattaaaaaaggaaaattaa

SEQ ID NO: 205705 - DNA, 724 bp, Unknown
  Bacterial polypeptide expressing nucleotide sequence isolated from the Sargasso Sea
aatgattaactttagggaacttaattcagaaaatacagaattctccgcgagttttacttctttcttgtccaaaagaactttagttaccaaagaagtaagaaatactgttggagatattatttctcaaataagaaataatggggatgaagctttaaagtcctttacaaaagaatatgataattttgaagcagaagaatttatcgtttctgaaaaagagataaatacaattttgaagtactttgacaaaagcctaattaaatcctttgagttctcttttgataggttgatcaactatcaatctacatgctttgattcactaaaccttgatggccctaaaggagaaattacgagaaagtttagaacaatagactcagtgggaatgtacatccccggaggaaaagcttcttatccttctactgttcttatgggttctgccccagctttagcatgtggcgtaaaacaaatctctatcgcttctcctgctctcaatggatttctgaatcctatggttatagcagcggcaaaagttgtgggagtagataaaatttataagattggaggtgcacaagctattgctgctttagctttgggaactgaacaaatttccaaagttgaaaaaataatagggccgggaaatgtctatgttgccgaggctaagaaacaactatttggagaagttggtatagactcgattgctggtccatcagaaatagttgtccttgca

SEQ ID NO: 205706 - DNA, 835 bp, Unknown
  Bacterial polypeptide expressing nucleotide sequence isolated from the Sargasso Sea
ccgcctaagcctaatgtcggagctcatccaactatagtttataccgcgaatttatgtggagctgatgtaataatgaatttaggtggtattccagctattgcagcaatgacttatggattatttaaaaatgctccagctgacatgttagtcggtcctggtaatcaatttgttgcggaggctaagagaattttatttggaagagtagggattgatttatttgctggaccaacagagatagcaataatagctgatgaaaatgctgatcctgaaattgttgcagttgacttagttggacaagcagagcatggttataactcaccagcttggctttacactacaagcaaagatttagcagacaaagttttaaaaagagtaccagaattgatcaaagaacttcctgaattaccaagaaaaagtgctgaagccgcatggaaagattacggagaagttattctatgtgacactgatgaagaaatggttcagataagtgacgaatacgctccagaacacttagaagttcaaacaaaaaatttagattggtttcataaaagacttaaaaattatggatcattatttattggagaagaaactactgttgcttacggtgataaatgttcagggactaatcatatattaccaacaaaaggggctggaagatatacaggtggtttatttgtaggaaaatttataaagacattaagctttcaaagaatgacaaaagagtcgacgaaggaagtaggagcagctgctgctagactttcaagatacgagggaatggaagctcacgctagaactggagatgtgagattaagaaaatacggtttttctaattaat

SEQ ID NO: 205707 - DNA, 415 bp, Unknown
  Bacterial polypeptide expressing nucleotide sequence isolated from the Sargasso Sea
gatgttaaaattttttaatactaatcagcaatcctttttgaaaaaattagatacaattttgagcaaaagaaaattagagcaaaaaaaacgatcagttaatataaaaaaaattttattagatgtaaaaaatcaaggtgataaagctattattaaatatgagttaaaattttctaaaattaaatcaaaatctaaaagattaagatttactaaggatgaaattaataaaatttcaaaatctattaacaaaaatcttaaaaaatcaatcgacttagcttatgttagaatcaaaagatttcattcaaaacaaaaatttacatcttttagatttatcgataattataaaaataatctttcatataaacattcacctattgataaggttggagtctacgtgcctggaggaacagctagctat

SEQ ID NO: 205708 - DNA, 912 bp, Unknown
  Bacterial polypeptide expressing nucleotide sequence isolated from the Sargasso Sea
aatggttgcatctgcacatatgtctgtcttgacggcatcggttgctggcgtgcccagaataattgcgtcggctccacctgttaacggagaacctcatccagctattgttgcagctatgaaattaggaggcgctcatgaaatatatgtattgggtggtattcaggctgttgcagctatggcaataggctcggaaagcataaagcccgttgatatgttggttggacccggaaatgcttttgttgctgaagcgaaaagacaactatttggaagagtcggaatagacttatttgctggtccaacagaaacaatggtaattgctgataatagtgttgacgctgaaatttgtgcaacggatttacttggtcaagcagaacacggatataattcccccgcgtgtcttataacaaactccaaaaaactagcagaggatactattagcgaaattgaaagacttttgaaaatattgccaacttccgaaaccgcacgcgctagttgggataattatggagatataatcttgtgctcaacacatgaagaaatgttgaaggttgctaatgatatggcctatgagcacgtgcaaataatgactgatcgagatgattggtatctgaaaaacatgcattcatatggcgctctctttttaggaccacgaacgaatgtagcaaatggagataaagtaattggcactaatcatactttgcctacaaaaaaagcagggaagtatacaggtggactttgggtaggaaaattcatcaaaacgcatagctatcaaagaatcatcacagatgaagctgcatcttttataggagagtatggctccaggctttgtatgttggaaggcttcgttggtcatgcagaacaatgtaatgtgagagtaaggcggtatggtggaaaaaatgtgccatatggaga

SEQ ID NO: 205709 - DNA, 751 bp, Unknown
  Bacterial polypeptide expressing nucleotide sequence isolated from the Sargasso Sea
aatgaaaatactaaatagcactaataagaattttagtaattctttaaataaattactttcactgcgaaaaaaaaaagttcaatctagttctatctcagtgacaagtattgttagagatgtgaaaaaaaatggtgataaagctttattgaaatatgaaaaaagatttaatcaaaatagaactattgttcctacgtcaaatcaaattaataattcaataaaatctttagatcaaaaagtaaaaaaagcaattgatattgcttatgatagaatttacaaatttcattctcttcaaaaattcaaaaatatttctttcatagataagtttaaaaataaacttgaatataaatatttaccaatagactcagttgcaatatatgtccctggttcttctgcatcttatccatcaagtgttttaatgaatgctgtaccggcaattgttgctggtgttaaaagattaataatgattaaccctggttttaaaggaaagcaaaatccagcagttttgtatgcagcaagaaaatgtaaaataaaagaaatttattctattggtggtccatctgcagttgctgctgctgcctacggaacaaaaaaaattaaaaaggttgataaaattgttggtcctggaaacgcttacgtggctgcagcaaaaaaagaggtttttggagatgtgggcattgaaggtatgacagctggtccctcggaggtaactattgtttgtgataaatattcaaattctgaatgggttgcaagt

SEQ ID NO: 205710 - DNA, 718 bp, Unknown
  Bacterial polypeptide expressing nucleotide sequence isolated from the Sargasso Sea
agcagtatcttatgggactaaaaaaattaaaaaagttcataaaatagttggtccaggaaatacatatgttgcggcagcaaaaaaagaagtttttggtgttgttggtattgaaggtatgactgcaggtccttcagaagttacggtcgtttgtgacaaattctcaaatcctgagtgggttgcaagtgatttaattggacaggcagaacatgatattcttgcacaatgtattttgatttcaaaagataaaaatttgctagataaagtaaaaattgaaattactaaacaattaaaagaaattccaagagcttctgtagcaagaagaagtttaattaattatggaattcttatgtatatttcttcagacgataaaataataagtgttgtaaataaaattgcaccagaacatttagaattaaatattaaaaattataaatcgttagttccaaaaataaaaaattcaggatcaatatgtttaggaaaatatgcagttatggcaatgactgattataatgttggatcaaaccatgtgttgccaacaaatggttctgcaaaatactcaagcggtataagtgtaaatgaattttataaaaggatttcatgcataaacttatcaaaaaagggtattgaaagtcttggaccatcagttataacacttgcaaattacgaagggttagttggacacgctcaatctgtagtaaaacgaataaggagaaaataa

SEQ ID NO: 205711 - DNA, 343 bp, Unknown
  Bacterial polypeptide expressing nucleotide sequence isolated from the Sargasso Sea
tgtgcagatataataaataaaatagctcctgaacatctccaaatcgcgatagatagacccaagtctttttctcaaaaaatcacaaacgcaggtgcgatatttattggtcgctatacccctgaagcaataggagactatatagcgggtccaaatcatgtgcttccaacctcaaggagtgctaggtattcatctgggttgtcgacacaagattatatgcgcaggacttcgttaatagaagttaagaggaattcattctcagatataggacaggcagctattaaaatagctaaatctgaagggctagatgctcatgctttgtcattagaattaagaaataagtagt

SEQ ID NO: 205712 - DNA, 583 bp, Unknown
  Bacterial polypeptide expressing nucleotide sequence isolated from the Sargasso Sea
tgaaactgcggactcagaaatggttgcatttgatttagttggtcaagctgagcacggatataattcgccagcttggctttttacaacaagtaaaaaacttgctgaagaagttattaaaagagttccagaattaattgcggatcttccagatctaccgaaagaaaatgctggagctgcttggagagattatggcgaagttatattgtgcgactccgatgaggaaatggcaacaattagtgatcaatatgcccctgaacatttagaagtacaaactaaaaatttaaaatggtttcatgatcgacttaaaaattatggatcattattcattggtgaagaaacaactgttgcttacggcgataaatgctcaggtacaaatcatattttaccaacaaaaggtgcagcgagatatacaggcggtttatttgttggaaaatttataaaaacattaagctttcaaagaatgactaaagcttcaacgaaagaagtgggagcagcggcggcaagaatttccagatacgaaggaatggaagctcatgctcgtactggagatgttagacttagaaaatacgggttttcaaattaa

SEQ ID NO: 205713 - DNA, 730 bp, Unknown
  Bacterial polypeptide expressing nucleotide sequence isolated from the Sargasso Sea
tatttatgcagccaacctctgtggagccgacataatattaaatttagggggaatagcagccataggttcaatgacctacggatgttttggaaatcctccagttgatttcttagttggagcaggaaaccaatatgtttctgaagctaaaagaatagtttatggacaggtaggaattgatcagtttgccggtccaaccgagatagcaataatcgcagacaaatcagcagataaggaaattgttgcagtagatatagttggacaagctgagcatggttacaattcgccaggatggctttttacaactgataaatctttagctgattatgttatgaaaagaataccggaattaattaaggaattaccagaacttccaagaacaagcgctgaggccgcatggagagattatggagaggtaatactttgcgattcaaaagaagaaatggccacaataagtgacaaatatgcagctgaacatttagaggtgcatgctgagaatttagattggtggctgaaaagattaaaaaattatggctctttatttttaggtgaagaaacaacagtagcttacggggataaatgttctggcacaaaccatattcttcctacaaaaggtggaggaagatatactggaggactatttgttggcaaatttataaagacattaacttttcaaagaatgacaaaagaggctaataaagtagtcggcgcagcagcagctagattgggtaga

SEQ ID NO: 205714 - DNA, 658 bp, Unknown
  Bacterial polypeptide expressing nucleotide sequence isolated from the Sargasso Sea
atggcaacttggattaaggaagcaattactgaagaacagcgggacgaagcccagaaacaagttcgcgacactgtagaaaaactgctagagaatattgacaagcgaggagacacggcagtcagggaactttcaaagcgatttgataactggtctcctgatgaattccggctttctgaaaaagaaatccaatcctgtattgatagacttgacggtcagacaattgaggatattcgctttgcacaggagcagatcaggaacttcgcccagattcagcgggattctatgaaagacgtcgaagaggaaacgcttccaggagtgattcttggacaccggaatattcccaccaaccgtgtagggagctatgtccccggcggcaagttcccaatggtagcctctgctcacatgtcagttgtaaccgcaaaagtcgcaggcgtgaaggaaataattacctgcgctcccccatatgaagggcgcccggctgatgctatcgttgcagcccagcatcttggaggagcagatgatattttcgtgatcggaggagtacaggctgttgctgctatggcattaggaactgaatccatacctgctgtggacatgctggttggaccaggcaatgcctatgttgcagaagccaagagacagctatatgaagagtagg

SEQ ID NO: 205715 - DNA, 934 bp, Unknown
  Bacterial polypeptide expressing nucleotide sequence isolated from the Sargasso Sea
agatttagatcctaaaactaaagatgatattcaattttctcatgaaagagttagaaagtttgctgaagctcaattaaaaaattatggtcaagattttgaagttgagttgtctgatggattgtttgctggtcaaaaattaattcctgttaatacagctggatgttacgtgccggcaggaagatatgctcacattgcatctgcagtgatgagtgttaccacagctaaagttgcaggtgttaaaaatattattgtttgtagctctccaaaaccaggggttggagttcatcctgctattgtttatacagctgacttatgtggagcagatgtaataatgaatttaggtggagtgcaagctattgctgcaatgacctatggtctttttggtaatgctccagcagatatgcttgttggtcctggaaatcaatttgttgcagaatcaaaaaggattttatttggcaaagtaggtatagatttatttgctggtcctacagaaattgcagtcatagcagatgaaacagcagacccagaattagttgctttcgatttagttggacaagcagagcatggttacaactctccggcatggttatttactacaagtaaatcattagctgaatatgtaatgaaaagagtaccagaattaattaaagatttgccagacttaccaagagaaaactctggtgcagcatggagagactacggtgaagttattttatgcgatacagacgaagaaatggctaaaatcagtgatgaatatgctcctgaacatttagagatacaaactaaaaaccttcaatggtttcatgatcgattaaaaaactacggatcattatttattggagaagaaactacagttgcttatggagataaatgttctggaacaaaccatattttaccaacaaaaggtgctggaaaatacacgggcggtttattt

SEQ ID NO: 205716 - DNA, 310 bp, Unknown
  Bacterial polypeptide expressing nucleotide sequence isolated from the Sargasso Sea
ctagaaatccttactatggatccaaaaaaaattcttgaaggaatagagaatgcaggagcaatatttttagggaaatggaccccagaagctgttggagattatcttgctggacctaatcacactttacccacatcaggcaattctagatttagcggttctttaggggttgaaacttttatgaaaaatacttcaataatagaatttaatgaggaaagtttaaaagttaaccgtctcgatattattaatcttgctaaaagtgagggcttacatagccatgccaagtctgtagaaataagatttgaagattaac

SEQ ID NO: 205717 - DNA, 655 bp, Unknown
  Bacterial polypeptide expressing nucleotide sequence isolated from the Sargasso Sea
aaaagaattttatttggaaaagtgggtatagatctttttgcaggacctacagaaatagcaattatagctgacgaaactgcagacccagaaatcgttgcttatgatttagttggacaagctgaacatggttataattcaccagcttggttattcacaaaaagtaaaaaattagcagacgaagtaatcaaaagagtaccagaattaattgcagatttacctgaacttcctaaacaaagtgcgggtgatgcttggagagatttcggtgaagtagttctatgtgatactgatgaagaaatggcaaaaatcagcgacgattatgctccagaacatttagaagtgcaaactaaaaatttaaaatggtttcatgagagactaaaaaactatggttcattatttattggagaagaaactacagttgcttacggcgataaatgttcaggcactaatcatattttaccaactaaaggtgctggaagatatactggcggtttgtttgttggaaaatttattaaaactttaagcttccaaagaatgactaaagaatctacaaaagaagttggtgcagcagcagcaagaatctcaagatacgaaggtatggaagcgcatgctagaactggcgatgtaagattaagaaaatacggcttttctaactaac

SEQ ID NO: 205718 - DNA, 547 bp, Unknown
  Bacterial polypeptide expressing nucleotide sequence isolated from the Sargasso Sea
gcagccgaattattagcacaatgtgagcatgatcctcacgcttctgtcattgcaatatctcccaacaaaaacgtattacaaaccattcaaaaagcatgtcatgatcaattcagcaccttaaagcgtaaagagattattactcaagcaataaacaatagtttacttcttcacgtggactcccccgaacaaggattagatgcaatgaacgatatcgcatctgaacacctagtattattaattgataacccagatacattacgacgacaaattaaacatgcagggtcgattttttgtggtccttatacgccagttgctcttggagattatgcagcgggtccaaaccatgttttacctacaggtagagctgcacgttttgcatcaccattaagtgttatggattttatgaaattttcgtcccatttaacatattcaaaagatgccttaacgacaattcaacaggatataaaaaccatgaccgacattgaacaccttgatgcacattaccattctgtatctatcagactaaaaaataatacatcaacctaac

SEQ ID NO: 205719 - DNA, 757 bp, Unknown
  Bacterial polypeptide expressing nucleotide sequence isolated from the Sargasso Sea
gcaaatgaaagtaaaaaagtctcttaaattagcttataaaagaattttttattatcactctaaacaaaaaaaaatatcatattctttcaaagatcaactcgactcgaagttttatattgagtggaaaccaattgaaaatgttggtttatacatccctggtgggttagcttcttatccatcaactgttttaatgacagctatacctgcaaaaatagccgatgtcccaaatattatgatttgtgttccttctcaaaatggtcagacatcacaactaacgcttgcagctgcatatttatgtggtgtaaatgttgtttacaacgttggtggtgctcaagcaatcgcagctctcgcttttggtacaaaaattataaaaaaggcggataaagtatttggcccaggaaaccaatacgtagctgaagcaaaaaaacaattatttggagttataggaatagatctaccagccggcccatctgaggttttagtaattgcaaataataattctaatcctacttggatagcctacgatgttcttgcccaaggcgaacatgaccctaatgcaaaaacgtatgttttatctaaatccaaaaatattttgattaaagttaaaaatgaactgaaaagaattatgctagagacaaaatttaaaaatgttgataaatctataaaaaataattgcaatttaattttagcaaagagtcaaaaagagatatatgaaatttcaaattttattgctccaagaacatcttcatattcacga

SEQ ID NO: 205720 - DNA, 772 bp, Unknown
  Bacterial polypeptide expressing nucleotide sequence isolated from the Sargasso Sea
atgaaggttttagatagtagtaagaaaaattttgacaaattattagataatttgttaatgcaaagaaagagaaaagttcaatcaagttctgtttcagtcactaacattattaaagatgttaaaaaaaatggcgataaagctttattaaaatatgagaaaaaatttaacaaaaattcagtaatcaagcctagctcaaatcaaattcaaaaatcaattcaatcattaaattctattgtaaaaaaatctatcgatactgcttacaataggatttataaatttcattcattacaaaagtttaaaaatatttcttacactgataaatttaaaaataaacttgagtataaatatttaccattagagtcggttgcaatttatgtacctggttcaactgcatcctatccatctagtgtgttgatgaatgcaattccagctattgttgctggtgtaaaaagaatagttatgatcaacccaggctataaaggaaaacaaaatcctgcagtattatatgctgctaaaaaatgtaaaattaaggaaatttattcaattggtggaccatctgcaattgctggagtttcttatggaactaaaaaaattaaaaaagttgataaaattgtagggcctgggaatgcttacgttgcagctgcaaaaaaagaagtttttggagatgttggaattgagggtatgaccgctggtccttcagaagttacaatagtatgtgacaagtattcaaatccagaatgggttgcaagtgatttaatagggcaagcagaac

SEQ ID NO: 205721 - DNA, 889 bp, Unknown
  Bacterial polypeptide expressing nucleotide sequence isolated from the Sargasso Sea
tatgagtgtaacacagcaaaagttgctggtgttaaaaatattcttgtgtgtagttcaccaaaaccaggtgttggagttcatcctactattgtttatactgctgacctttgtggtgctgatgtaataatgaatttaggtggagtacaagcaattgcagcaatgactaatggtttatttggaaatgcacccgctgatattttagtaggtccaggtaatcaatttgtagctgaagcaaaaagaattttgtttggtaaagttggaatagatttatttgcaggcccaactgaaattgcaataatcgctgatgaaactgctgatccagaaattgtagcagtagatttagttggtcaagctgaacatggttataattcacctgcttggttatatacaacaagtaaagacctagcagaaaaagtaatgaaaagagttccagaattaattgctgaattaccagagttaccaagaactaatgctgaggcagcttggagagattatggtgaagtagttctttgtgatactgatgaagagatggctacaattagtgatgagtatgcacctgagcacttggaagttcaaacaaagaatttagattggttccacaagagattaaaaaattatggttctttatttgttggtgaagaaacaactgttgcttatggagataaatgttcaggaacaaatcatattttgcctacaaaaggagctggaagatatactggtggtttatttgtaggaaaatttattaaaacactaagtttccaaagaatgactaaagaatctactgaacttgttggagctgcagctgctagactttcaagatatgaaggtatggaagctcacgcaagaactggagatgtaagattaaaaaaatacggttattcaaattaat

SEQ ID NO: 205722 - DNA, 565 bp, Unknown
  Bacterial polypeptide expressing nucleotide sequence isolated from the Sargasso Sea
atgaataaaatagatttaaaaaacaaagttgctattgttactgggggagtacagggcttcggattagctgtagttgaaagatttcttaattctggtgctaatgtagctatatttgagaacgataaaaagttattagatgaatttcaaacaataaatgatgtttataaaattcaaactgatgttagtagtgcagatagtgtagaaatcgcagtaaacgaaacaattaaagaatttggaaggatagatatcttagttaataatgctggaatagcgggaccaaatcataaaacgtgggaatatccaaataatgattggcaaaaagttattgatattgatttaaccggtgttttttattgctgtaagtatgttgtgcctcaaatgataaaaaataactatggtagaatagtaaatgttgcatcaatagctggtaaagaaggtaatccaaatgcaatgccatatagtgccgctaaagcaggtgtaattgctataacaaaatctttaggaaaagaattagctgataaaaatattgcagtaaattgtataactccagccgcagctaaaacaa

SEQ ID NO: 205723 - DNA, 479 bp, Unknown
  Bacterial polypeptide expressing nucleotide sequence isolated from the Sargasso Sea
aatgaagatcataaataaaaaaaaagaagcaattgaagaattaaaaaggatttctactcgaactaattcagaaaataataataagataaacagaattgttgaagaaattatccaagaggtaaaaatctctggagatatagcggtagaaaaatatacaaaaaaatttgatggtttcgaccctaaccctatgcaagttagcgcaaatgatttaaaagatgcatgggatgaaatcgataacaatttgaagcgctcacttgtggtagctcatgaaagaattcaaaaattccatgaaaaagaaattcctcaatctttcaccataaaaggtgaatatggtgatatcgtccaaagaagatggagaccagttaaaaatgcaggtatttatatccctggaggtagagctgcttatccaagtacagtattgatgaatgccatacctgcaaaagtagcaggagtagaggaaattatatggtatctcctgg

SEQ ID NO: 205724 - DNA, 865 bp, Unknown
  Bacterial polypeptide expressing nucleotide sequence isolated from the Sargasso Sea
gttgctggagttaaatattatcgcatgcagtccaccaaaagaaaatataggtgcccacctttctataatttatacagctgacttatgtggtgcagatgtaattttaaatttaggtggtgtaccagcgatagctgcaatgacttacggtttattcggtaatgcacccgcagatattttagttggacctgggaatcaatttgttgctgaagctaaaagaattttgtttggtaaagttggtatagatttatttgctggaccaactgagattggaattatagctgatgaaactgcagatcctgaaattgttgcagtcgacttagtaggacaagcggaacacggttataactcacctgcttggttatatacaacaagtcaaaagttagccgatgcagttatgaaaagagtccctgaattaattgaagagttgccagaggttccaagattaagcgctgaagcagcatggagagattatggtgaagttattttgtgtgatactaatgaggaaatggtcaaagtaagtgacgactatgctcctgaacatttagagttacaaacaaaaaatttaaagtggtttcatgaaaaattgaaaaattatggatcattgtttataggtgaagaaaccactgttgcttacggtgataaatgttctggtacaaaccatatattaccaactaaaggagctggaaaatatactggtggtttatttgttggtaagtttattaaaacattaagttttcaaagaatgactaaagagtctacaaaagaagttggcgctgcagccgctagaatttcaagatacgaaggaatggaagctcatgcaagaaccggtgatgtaagacttcgaaaatatggttattcgaattag

SEQ ID NO: 205725 - DNA, 798 bp, Unknown
  Bacterial polypeptide expressing nucleotide sequence isolated from the Sargasso Sea
tttggataactctccaaggaattctgatatttctaatcaagcagttctagatggaatatttcaaatatttggtaagaagatgagtgtaagtgaagtatgcttagaaatattaaatgatatagataaaaatggagattttgcactaaaaaaattgtgtgaaaagcttgatggaagcaagttagaaaactttcaagtttcagaaacccttataaatagatcattggatcaaatttctcctgagattataaattctatgaaagttgcatcagaaaggataaaagattttcaaatgaatattatgccatcttcttggtttaataaagaaaaaggtttaggggaaattgttcgaccaattgaaaaagttttatgttatgttcctggtggattaactcctctaatttcaactgtattaatgacagctattcctgcgaaaattgcaggtgttaaagaattaattgttacttcacctattaaaaacaatatgaatgaaaatccttatattttagctgcatgtaaaatttctggagttgataaagtttttaacattggtggagcacaagcaattgcagcatttgctttaggcacagaaagtattcctaaggtagatttgatttgtgggccaggtaatatatttgttactgaaatgaagaagaaaatttttggaaaagtaggtatagatggattatttggtcctactgaaacaatgataattgctgatgaaaatgctaatccggagctatgtgctgcagatttaattgctcaagcagaacatgatcaacttgcatttcctgttttggt

SEQ ID NO: 205726 - DNA, 640 bp, Unknown
  Bacterial polypeptide expressing nucleotide sequence isolated from the Sargasso Sea
aaaaaagaagtctttggagatgttggaattgaagctatggtggctggacctagtgaaattacagtcgtggcagataaaaacacaaatgtaaaagaagtattaacatctttagtaggtcaagcagagcatgatactaattcacagtgtatactgctagtaaatagtaaaaattttattaaatctttaaaaaaagatttaaataatgaattaaataaaattccaagaaaagatattgctaaaaaaagtcttttgaaaaatggattaattattagagtatataatagcaaacaaattattgattcaattaacgaaattgcaccagaacatttagaattaaatttgaaaaattataaaaaattaattaataaaataaaaaatgtaggaagtatttgtattggaaaatactccgcaatggcagttacagattataatgctggaactaatcatattttaccaacattaggatctgcaaaattttcttcaggactaaatgttggtgaattttataaaaaaacaagctacataaaattatcaaaaaaaggcattgaagttattggtaagaaagctataactcttgccgagtatgaaggattaattggtcatgctcaaagtataaaatctagaataaggagaagttaga

SEQ ID NO: 205727 - DNA, 653 bp, Unknown
  Bacterial polypeptide expressing nucleotide sequence isolated from the Sargasso Sea
tgttgctggtgctaaaagacaagtttttggggatgtaggtattgaaggaatgattgccggtccatctgaaataacaatattagcagatagcaaaactaatttaaatgaagttactacatctatgattgggcaagccgaacatgactcaaattcacagtgtatattaattaccaaggatttaaatttgattaaaaaatttaaaaaagatttagaattaaaattaaaacagataccaaggcaaagtattgccactaaaagtataaaaagtaatggactaattttaaaagtatataatgatagacaaattattgatgcaattaatgagatagctcctgaacacttagaaataaatgttggcaattataaaaagtataaagataaaattgttaatgcgggaagtatttgtataggaaaatattctcctatggcattgagcgactatgctgttgggacaaatcatgtgttaccaactaatgcatcagctaaattttcatcagggttaagtttaagtgaattttataaaaaaattagccttataactctttcaaaaaaaggtgttgagaaaataggagaatacgctacacatctcgctgagtatgaagaattaaaaggtcatgctttgagtataaaatctagaataaataaggagtaac

SEQ ID NO: 205728 - DNA, 963 bp, Unknown
  Bacterial polypeptide expressing nucleotide sequence isolated from the Sargasso Sea
aaaaattaataccagttaataccgctggatgtacgtcccctgcaggaagatatgctcacattgcttcagctgtaatgagtgtaactactgctaaagttgctggtgtaaaaaatatacttgtctgcagctcccctaaaccaaaagtaggtgtgcacccctctattatttataccgctgatttatgtggagccgatgtaattatgaatttgggtggagtacaggccattgccgcaatgactaatggtttatttggaaatgcaccagctgatattttggtaggaccaggaaatcagtttgttgcagaagcaaaaagaattttatttggaaaagtgggtatagatctttttgcaggacctacagaaatagcaattatagctgacgaaactgcagatccagaaatcgttgcttatgatttagttggacaagctgaacatggttataattcaccagcttggttattcacaaaaagtaaaaaattagcagacgaagtaattaaaagagtgccagaattaattgcagatttacctgaacttcctaaacaaagtgcgggtgatgcttggagagatttcggtgaagtagttctatgtgatactgatgaagaaatggcgaaaatcagtgatgattatgctccagaacatttagaagtgcaaactaaaaatttaaaatggtttcatgagagactaaaaaactatggttcattatttattggagaagaaactacagttgcatatggtgacaaatgttcgggtactaatcatattttaccaactaaacgtgctggaagatatactggtggtttgtttgttggaaaatttattaaaactttaagtttccaaagaatgactaaagaatctacgaaagaagttggtgctgcagctgcaagaatatcaagatacgagggaatggaagctcacgcaagaactggtgatgtaagactaagaaaatacggattttctaattaaa

SEQ ID NO: 205729 - DNA, 847 bp, Unknown
  Bacterial polypeptide expressing nucleotide sequence isolated from the Sargasso Sea
tcttgtatgtagctctccaaaaacaggtgttggggttcatcctactattgtttacacagctgacctttgtggtgctgatgtaataatgaacttaggaggagtacaagcaattgcagcaatgactaatggtttatttggaaatgcgcctgctgatattttagtaggtccaggtaatcaatttgttgctgaagccaaaagaattttatttggtaaagttggaatagatttatttgcaggtccaactgaaattgcaataattgctgatgaaactgctgattcagaaatcgtagcagtagatttagtcggacaagctgaacatggttataattcgcctgcttggttatatacaacaagtaaagagctagcagaaaaagtaatgaaaagagttccagaattaattgctgaattaccagagctgccaagaacaaatgctgaggcagcttggagagattatggtgaagtagttctttgtgataccgacgaagaaatggctaaaattagtgatgagtatgcgcctgaacacttagaagtacaaacaaagaatttagattggttccacaacagattaaaaaattatggttctttatttgttggtgaagaaacaactgttgcttatggagataaatgttcaggaacaaatcatattttacctacaaaaggagctggaagatacacaggtggtttatttgtaggaaaatttattaagacactaagtttccaaagaatgactaaagagtccactgaattagttggtgctgcggctgcaagactttcaagatatgagggtatggaagcacatgcaagaactggagatgtaagactaagaaaatatggttatcaaaactaa

SEQ ID NO: 205730 - DNA, 739 bp, Unknown
  Bacterial polypeptide expressing nucleotide sequence isolated from the Sargasso Sea
agttctatagattttgcatataatcgaataatgaagtttcatatgctacagaaaaaaaatttaaaaaatatttattacttagataaatataaaaataaactccaatataatttagttccaatacaaactgttggaatttatgtacctgctaatctaccatcttctctattaatgaatgcaatacctgcaaaggtgtcaaatgtaaaaaaaattattcttgcaactccaaagcttgacccggcagtaatgtatgctgcaaaaaaagttggtatcaaagaaatatactttatggggggagcccaagctatagctagcctagcttatattcaaaatgttgataaaatagttggtcctggaaataaatttgttgctgaagccaaaagacaaatatcaggtaaaattgttggaacagagtctatgtttgcaggaccgtctgagatatgtgtagttgctgacaaatatactaatataaatcaaattgctacttctttagtttcacaagcggagcacgatccaaatagccaatgtattttattaacaaaagataagaaaatattaccacaagtaaatcttgctataaaaaaaataataaagtcattacctagaaaaagaatagccagtcgatcccttaacaatcatggaataaatataattattaaaaatgatagagaaattataaatacaattaacttaattgctccaaaacacttagaaattaatgtaaagaattacaaaaaat

SEQ ID NO: 205731 - DNA, 480 bp, Unknown
  Bacterial polypeptide expressing nucleotide sequence isolated from the Sargasso Sea
cccgtgatcaggctgaaaatgtaaagaaccggcttcaggaattggttcccactttaccaagaagggaaatcatgaaagaatccttttcctcacgttccgcactgattgtctgtgattcaaaggaggagtgttttgacgcggtgaatgaaatggctccggagcatttagaacttctgaccgaagatccatttcaggacctgcatcgaattcgtaacgcgggtgcgatctttgtcggtcctaatacccctgaagccgtgggggattattttgcagggccgaatcatactctgccaacatctggatgtgccaagtttgcttctcctctgggagtacaggactttaccaaatcaagttctgtgcttgcttattctgagcagcgtctccaacgtgaaggatcagcgatcattcgattagcagaggaggaaaaactgtatgcccatgcggaatcgattcgtgtgaggatgaaaacaacggaatagg

SEQ ID NO: 205732 - DNA, 812 bp, Unknown
  Bacterial polypeptide expressing nucleotide sequence isolated from the Sargasso Sea
cttgataggacagcaccaaaatgacttactttttgccgctctatataagttgggattagaggaaatttatgggtttggtggcgctcaatcaattggagccctgtcctttggaaccgaaagcataagtagggtcgataaaatcgtcgggccgggtggtttatatgttaccgcggcgaaaaggaagatgtttggattcgtcggtattgattctattgccgggcctaccgagttagttatctttgctgattctggggctccgatagattggttggttttggatttcttgtctcaagctgagcatgatccctcggcgcaaagtattttagtttcacaagatcgggaatatatcgagaaattcgtttcgagggtttatgaggtatttccgcggttaagtagacaggaaataataggccaatccttggaggcccggtgcgcagctattcaggttaattgtgatgaacaagcgattgaaatagttaatctaatagcaccagaacacctgcagttatgtgttgaacggcctgaacagtacctcgatcaaataatgaatgcaggcgcaattttttgtggcaactactccacagagtccttcggagattacctggcaggtccatcacatgtgttgcccacatttggaagcgcacgattttcttcgccgttgggcgtttatgattttgtgaaaaaaagttcagtaataggcatatcgcaagagggagcaacgttacttagcgagccagcgtcaataatcgccgatagcgaagggcttgaggctcatgcgttagcctctagaattagaggtctagattttgatt

SEQ ID NO: 205733 - DNA, 237 bp, Unknown
  Bacterial polypeptide expressing nucleotide sequence isolated from the Sargasso Sea
gcccctggtcaccagaagcagtcggcgattacctggctggcccaaaccacacgttgcccacatgcgccgcggcccggttcagcagtgccctcagcgtggagacgttcatgcgccacacctcgatgatccagttcaaccgtgcagctttggatgccaccgcctcagcggtgtgtgaactggcggaaagcgaaggactgcacagccatgcggagtccgtccgcaagcggctcagctgag

SEQ ID NO: 205734 - DNA, 847 bp, Unknown
  Bacterial polypeptide expressing nucleotide sequence isolated from the Sargasso Sea
gtgtgtagttcacctaaacctgatgttggagtacatctttctattgtttatactgcagacctttgtggtgcaaatgtaattatgaatttaggtggagttcaagcgattgccgcaatgactaatggattgtttggcaatgctcctgctgatattttggtcggacccggaaatcaatttgtagcggaagctaaaagaattttatttggtaaagttggtattgatctatttgcaggacctacagaaattgcaataatagcagacgaaacagcggacccagagatagtggcttatgatttagttggacaagctgaacatggttacaattccccagcatggctatttaccaaaagtaaaaaattagctgaagaagtaattaaaagagttccagaattaatcgcagatttaccagaacttccaagacaaagtgctggagacgcatggagagattttggagaagttattctatgcgatactgatgaagaaatggcaaaaattagtgacgaatatgctccagaacatttagaagttcaaaccaaaaatttaaaatggtttcatgaaagattaaaaaattatggatctttatttattggagaagaaacaacagtagcttatggcgataaatgttcaggaacaaaccacatacttcctacaaaaggtgccggaagatacacaggaggattatttgttggtaaatttattaaaacattaagttttcaaagaatgacaaaagaatctacaaaagaagtaggtgcagcagctgcgagaatttctagatacgaaggtatggaagctcatgctagaactggcgacgtcagacttcgaaaatatggtttttcaaataaataat

SEQ ID NO: 205735 - DNA, 766 bp, Unknown
  Bacterial polypeptide expressing nucleotide sequence isolated from the Sargasso Sea
gatgttaaatttactaagatataaagacgaaaattttcatatccgtgttgctgagattataaactctaggaaaaactttgatgaagatataactaatcaagtaaacgatataattttcgatataaaaaataatggcgatataagtctttttaaatatatgtctaagtatgacaatgtagaatgttctgcggagaatatttgttataatcaggaagatattttatcagcaaaaaaaaattgtacacaagagagtattgaggcagtcaaacttgctaaaaatcgtattgaggcatttcataaatatcaattacctgaagattcaatatatgaggatcaagaagaagtaagtataaagactaaatggattccactagatagtgcaggaatttatatccccggtggtactgcttcatatccaagttcagtattaatgggagtaattccggcgcaagttgctggaattaaaaaaatatctgcgacagttccttgtccaaataatcaaatagatcctcttgttttggctactttggatttatgtggaattgaaaaaatatacaaaattggaggtgctcaggcaatagctgcacttacatggggaactgaatctgttgaaagtgtagatataattattggacctggaaataaatgggttgccgaagcaaaaaaacaggctctttcaaatataaatattgatatgttagcgggacctagcgaaatattaattttagcagatgaaaataatagagcagattggattgcagctgat

SEQ ID NO: 205736 - DNA, 710 bp, Unknown
  Bacterial polypeptide expressing nucleotide sequence isolated from the Sargasso Sea
aaatgctcctgcagatatgcttgttggtcctggaaatcaatttgttgctgagtcaaaaagaattttatttggaaaagttggtatcgatttatttgcaggtccaacagaaatcgcagttatagctgatgaaacagctgacccagaattagtagcatttgatttagttggacaagcggagcatggttacaactctcctgcatggttatttactactagtaaatcattagctgaatatgtaatgaaaagagtacctgagttaattgcagatttaccagacttaccaagagaaaactctggcgcagcttggagagactatggagaagttattttatgcgatacagatgaagaaatggctaaaatcagtgatgaatatgctcctgaacatttagaaatacagactaaaaaccttcaatggtttcatgaccgattaaaaaactacggatcattatttattggagaagaaactacagttgcttatggagataaatgttctggaacaaaccatattttaccaacaaaaggtgctggaaaatacacgggcggtttatttgttggcaaatttatcaaaactttaagtttccaaagaatgacaaaagaatctactaaagaagtgggtgcagcttgcgcaagaatttcgaggtacgaaggtatggaagctcatgctcgaactggagacgtaagacttagaaaatatggattttctaattagt

SEQ ID NO: 205737 - DNA, 878 bp, Unknown
  Bacterial polypeptide expressing nucleotide sequence isolated from the Sargasso Sea
ggcaataacaccagcaaaagttgctggagttaaaacaattatttgtgccagtcctcccaaagacaaagatggagctcatccaggaatcatttatgctgcaaattattgtggtgctgatgttataatgaatttaggtggtgtagcagctattggatctctaacatatggatgttttggaaatccaccagtagattttttagttggagctggtaatcaatatgttgcagaagctaaaagaatagtctacggaaaagtcggtatagatcaatttgctggtccaactgaaattgcaattattgccgacaagtctgctgataaagagattgttgcagcagacatagttggtcaagctgaacatggctataattctcctggctggctatttactactgacaaatcacttgctgactatgttatgaaaagaattcctgaattaattaaagatcttccagaacttcctcgaaaaagtgctgaggctgcatggaaagactatggtgaagttattctttgcgactcaaatgaagaaatggcaaaaataagtgacaaatacgcctcagaacatttagaagttcatgcagaaaatttggattggtggttaaaaagattgagaaattatggttctttatttttaggagaagaaacgacagttgcatatggtgacaagtgttctggaacaaatcatattttgccaacaaagggaggaggaagatacacaggaggtttatttgtaggcaaatttattaaaactttaacttttcaaagaatgactaaagaagctactaagttagtaggctctgcggctgctcgattagggagagctgaaggaatggaagctcatgcaagaacagccgatataagacttaaaaaatacggttatc

SEQ ID NO: 205738 - DNA, 566 bp, Unknown
  Bacterial polypeptide expressing nucleotide sequence isolated from the Sargasso Sea
aatgaaacagattaaagttaataaaaatatttataaagaactcggcgctgttcttaatagaaataataatttaaatacagaagatttatacaagaaagtaaaaaatattatttcaaatgttaaaaataatggagataatgcattagtaaagtattcaaaaaaatttgatagggtcttgttagataaaaaaaaattaaaattagatataaaatcattcaagactatttcaaaaattgataaaaatattttaaaaagtttcaaaaaagcaataaaaaatattgaaagatttcatagaaaacaattacctaaagatatcatacaaaataaaaatgatattatgctaaagtctcaatggaagcctatagactcagttggcctttatgttcccggtggaaaggctttttatccatcatcgcttttaatgaatgtaataccagcaaaaattgcaggtgttaaaagaattgtatgtgttactcccccagccaaagaacctaacccttatttattgacattattaaaagaattaaaaataaatgaaacttattttgtgggtggggctcatggta

SEQ ID NO: 205739 - DNA, 565 bp, Unknown
  Bacterial polypeptide expressing nucleotide sequence isolated from the Sargasso Sea
taacaataaaaataatccacattgggtagcttctgatttaatagctcaagcagagcatgatgaaaatgcacagtcaattttaattacagacgataaaatttttgcaacaaaagttttaaattcaattaaaaaaattaagaaagatttaccaaaaaagaaaattattgagaaaagttttaaaaataatggcatcatagttttggttgacaatatagaacttgcatcaaaaattataaattttattgcaccagaacatttacatatacatatttctgattatgcaaaattattatcaaagataaataatgccggtggaatttttttaggtgagtattctgttgaagcttttggtgattatattgtaggaactaatcatgtattgccgacatcaggagcggcaaaattttcatcagggttaggtgttttagattttatgaagagaagctctgtagttgagatgaataaaaaatcttttcatactctttcagatgatactcaaaaaatgtctggacttgaaggtttagatggacataaattatcagttaaaattagacaaaagaaataa

SEQ ID NO: 205740 - DNA, 511 bp, Unknown
  Bacterial polypeptide expressing nucleotide sequence isolated from the Sargasso Sea
atgataaaagaaattaattgtaataaaaaaaactatttagatattttaacaaaatttttagaccacagaaggtctggaaaaaaaccagaaaataaaatcatatctaaaattcttaatgatattaagaaaaataaaattaaagcacttattaaatatgaaaaaaaatttagcaaaaatacacaaattaagccaagtattaacgaaataaataatgcaattaaatttctcgatcctaatattaaaaaggctatagattttgcatacaaaagaatccttaattttcacaatgctcaaaaaaccaagaatattttttataaagataatttaaataataaaatagaatataagtatgtaccaatccaatcagttggagtatatgttcctgcaaacttaccatccacattattgatgaatgcaattcctgcgaaaattgcaggtgttaaaaaaattgtactagcaaatccaaaaaataatggaaaattaaacccagcaagttttatatgcagctaag

SEQ ID NO: 205741 - DNA, 638 bp, Unknown
  Bacterial polypeptide expressing nucleotide sequence isolated from the Sargasso Sea
tgtaggcgctatggcattaggaactgatacaatatctcctgtagatatgctagtgggacctggtaatgcattcgtggctgaagctaaaagacaattatttggggaagttggaattgatttgtttgcaggtccgacagaaactatggttatagcagataaaactgttgacgctgaactctgtgctacagatttacttggacaagcagaacacggctataattctcctgctatattaataactaacgatgaaaaccttgcaaaaaatacgatagaagagatagaaagaattttaaccattttaccaactgctgaaacagcatccattagttggaaagattatggcgaagtcattttatgtgatacatacgaagaaatgttagaagttgctaataatatttcatcagaacatgttcaagtcatgacctccaaagatgattggtttttagataatatgcattcttatggggcattatttttaggcccaagaactaatgtatctaatggagataaagtaatcggtactaatcatacattacctacaaaaagagcaggacgttacactggtggcctttgggttggtaaatttcttaaaacgcatagctatcaaaaaattacttctgatgaagcaggccgttaaa

SEQ ID NO: 205742 - DNA, 684 bp, Unknown
  Bacterial polypeptide expressing nucleotide sequence isolated from the Sargasso Sea
gagattataaactctagaaaaaactttgatgaagatataactaatcaagttaacgatataattctggatataaaaaataatggcgatataggcctttttaaatatatgtctaagtatgacaatgtagaatgtactgcggagaatatttgctataatgaagaagatattttttcagcaaaaaaaaattgcacacaggaaagcattgaagcaatcaaacttgctaaaaatcgtattgaggcatttcataaacatcaattacctgaagattcagtttataaggatcaagaagaagtaagtataaagactagatggattccactagatagtgctggaatttatatccctggcggcactgcttcatatccaagttcagtattaatgggggtaattccggcgcaagttgctggaattaaaaaaatatctgcgacagttccttgtccaaataatcaaatagatcctcttgttttggccaccttggatttatgtggaattgaaaaaatatacaaaattggaggtgctcaagctatagctgcacttacatggggaactgaatctgttgacagtgtagatataattatcggacctggaaataaatgggttgccgaggcaaaaaaacaggctctttcaaatataaatattgatatgttagcgggaccaagcgaaatattaatcttggcagatgaa

SEQ ID NO: 205743 - DNA, 610 bp, Unknown
  Bacterial polypeptide expressing nucleotide sequence isolated from the Sargasso Sea
atgcaagttaaaatctacaaaggatataagtctttttcaaaatccattaatgttgtagaaaatactgaggtctccagcactgtacatgaaattttaactaatgttcgtaaatgcggtgatgctgctttacgagaatatactaagcaatttgacaaggtaatccctgattcatggctggttcctgagtccgcactggaggaagcactagacaacctggaagacgatcttttcctcgttctgcagcaagcagcagataatattatgttatttcacgagcggcagaaaacagacagccatcttgatttcagttcggatggctcagtattgggctggaaagtttcgcctgttgacagtgcaggcatttatatcccaggaggtcgtgctgcttatccatcaaccttgttgatgaatgcaattcctgcccaaattgcggaagtccagagaattgctgttgtatctccaccgggaccttctggattgccgcaccctttagttatggccaccgccgcttttatgggtttagaagagctttatgcagttggaggagcacagtcaattgccgcacttgcctatggaacagaatccattgaaaaagttattaaaattaccg

SEQ ID NO: 205744 - DNA, 667 bp, Unknown
  Bacterial polypeptide expressing nucleotide sequence isolated from the Sargasso Sea
atgaaaatattaaaaagtaaatctagaaattttaataaacagttagatgatttattattaagaagaaaaacaaaactaaaaactagttctgtttctgttataaaaataattaatgatgtaaaaaaaaatggtgataaagcattgttaaagtatgagaaaaaatttaatcagaacagagtaatcaaacctagttttagtcaaattaaaaaatctattaattccctagacctcaaagtaaaaaatgctatcgatcttgcttattcaagaatttacaagtttcactcattacaaaaatttgaaaatatttcttacacagataaattaaaaaataaactagagtacaaatatctaccaatcgagtctgttgcaatttatgtgccaggatcatcagcgtcttatccttcaagtgttttaatgaatgctatcccagcaatagttgctggagtaaaaagaataattatgattaatccaggatataaaggaaaacaaaatcctgcagtactatatgcggctcaaaaatgtaaaattaaagaaatatattctattggtggtccatcagcgattgcagcagttgcttatggaacaaaaaaaattaatagagtgaacaagattgtgggtcccggcaataagtatgtggctgccgctaaaaaggaggttttggagatgt

SEQ ID NO: 205745 - DNA, 910 bp, Unknown
  Bacterial polypeptide expressing nucleotide sequence isolated from the Sargasso Sea
aaagaaaaaattgaagaagcaattaaaaaagttgatcaaaaaacaaaagatgatgtccagtttgcttacgaaagaataagaaaatttgctgaacaccaacttaaaagcatgaacaatgaatttgaggttgaactttcaaaaggattattcgctggtcaaagacttataccaattagtacagctggttgttatatacctggcggtcgatatgcacatatttcttcagcaacaatggctattacgccagctaaagttgctggtgttaatacgataatttgcgcaagccctcctaaagatgtgaatggagctcatcctggaattatttatgctgctaatctctgtggcgctgacataatattaaatttaggtggggtagcagctataggttcaatgacatacggatgttttggtaatcctcccgttgattttttagttggagcaggtaatcagtatgtgtcggaagctaaaagaattgtttatgggcaagtaggaattgatcaattcgcaggtccaacagaaatagcaattattgcagataaatctgcggacaaggaaattgttgcagtagacatagtgggtcaagctgagcatggttataattctcctggttggttatttacaaatgataagtccttagctgattacgtaataaaaagaataccagaattgattaacgagcttcctgaactcccaaaaacaagtgcggaggcagcatggagagattacggggaggtaatactttgtgattcgaacgaagaaatggcagcgatcagcgataaatatgcagctgaacatttagaagttcatgctgagaatttagagtggtggttaaagagattaaaaaattatggatcattatttttaggagaagaaacaacggtagcttatggagacaaatgttcaggtacaa

SEQ ID NO: 205746 - DNA, 661 bp, Unknown
  Bacterial polypeptide expressing nucleotide sequence isolated from the Sargasso Sea
ccaccttttaaaggtaagccgaattcagctgtcgttagtgcaatgaaaatgggcggtgctcacgaaatttatgttttaggaggaatgcaaggagttggtgcgatggctattggtacagaaacgattaaaccagttgatatgcttgttggacctggtaatgcatttgttgctgaagcgaaaagacaattgtatggtaaagttggtatcgatttatttgctggcccaactgaaacgatggttattgcagatgaaactgttgatggtgaaatatgtgcaacagacttattaggacaagcagaacatggatataattctcctgctgtgatgataacaaactcaagaaaacttgcagaagaaacatttaaagaaattgacagaattttagaaatcttacctactaaagaaacagcaagtattagctggagagattatggagaaatgattttatgtgatacctatgaggagatgttatctaaagcaaatgaaatagcatcagagcacgttcaggttatgacaaataaagatgattggtttttagaaaatatgacttcttatggagctctatttttaggtgctagaactaatgttgctaatggcgataaagtcataggcactaaccatactcttcctactaaaaaagctggaagatatactggcggtt

SEQ ID NO: 205747 - DNA, 934 bp, Unknown
  Bacterial polypeptide expressing nucleotide sequence isolated from the Sargasso Sea
tgctatgtgccagcaggaagatatgcacatatagcttctgctgtaatgagtgttactactgcaaaagttgcaggagtaaaaaatataattgtatgtagctctccaaaaccaattattggtgtccatccaacaataatttatactgcagatctttgtggtgcgaatgtaattttaaatttaggtggtgttcaagcaatagctgcaatgacaaatggtctcttcggaaatacacctgcagatattttagttggtcctggaaatcaatttgtcgctgaagcaaaaagaattttatttggtaaggttggaatagatttatttgctggtcctactgaaatagcaatcattgctgatgaaaaagctgatccagaaatagtagcagttgatttagttggacaagcagaacatggatataattctcctgcttggttgtttacaacaagtgagaatcttgccgaagaagtaattaaaagagttcctaaattaatttctgaactaccagaattaccaaaaacgaatgctgaagctgcttggaaagattatggtgaagtcgttctttgtgataccgatgaagaaatggctactataagcgatgaatacgctcctgaacatttggaagtacaaacaaaaaatttagattggtttcataagagactaaaaaattatggttctttatttgttggagaagaaacaacagtagcatacggtgacaaatgctctggtacaaatcatatcttacctactaaaggagcaggaaaatacactggtggactttttgttggcaaatttattaaaacattaagtttccaaagaatgaccaaagaatctactgaacttgttggtgctgcagctgcaagactttcaagatatgagggaatggaagcgcatgctagaactggcgacataagacttaaaaaatacggttactctaaataat

SEQ ID NO: 205748 - DNA, 836 bp, Unknown
  Bacterial polypeptide expressing nucleotide sequence isolated from the Sargasso Sea
aatgattaaaactttagatataaaaacaaaaaattttgaaaaaaccctaatcagttttttaaatttaagaagaggctactcaagtgaaaaagttgcagtagttaaaaaaatcataaataacgtagaaaaatacggggataggtctcttattaaatatgaaaaaaaatttaataatattaaaattttaaaaagaaataacctttttttttccaatcaagaaattgaaagaaatattaaatttttaaatcaagaagttaaagattctattgatctcgccttttctagaatttttagttttcataaaaatcaaaaatttcatagttttaaaaaaagagataaaattaacaacactttttactacagatcaaagcctgtcgagaaggttggtatttatgtgcctggaggtaaagcaagttacccaagttcagtcttaatgaactgtattcctgcacttatcgctggagttagtgaaatatttatgacagtaccttcttttaatggaagaataaacccaggggtattgtatgcagcaaaaaaatgtaaagtaaaaaaaatcttcaagcttagtggagcacaagctgttgcagcatttgcttttggaactaaaacagtacccaaagttaataaaatagttggcccaggaaatgaatacgttgcattagcaaaaaaagaagtttcgggtattacaggaattgacatgtttgctggtccatcagaagttacagttgttgctgataaatattctaaacctgaatgggtctcagctgatttaattgctcaatcggagcacgatgagatgtcacaatctattctagtgactaacagtagaaaactaa

SEQ ID NO: 205749 - DNA, 1288 bp, Unknown
  Bacterial polypeptide expressing nucleotide sequence isolated from the Sargasso Sea
tatgtcaattaaatatttaaaaaaatctcctaaaacatcatcaacagatgatttaaaaacaagggagatagttcaaaatcttcttaatgatcttgaagaatctagagaggaagggtgtaaagagctaacaaaaaaatttgataactatgtaggagatatattagtttcaaaatcaaaaattgaggaaatttcaaaaaaattaagtcaaaaaaataaggatgatattaaattttcttatgacagggtcagaaaatttgcagaagcccaattaaaaaattatggacaagattttgaggtagagctctctaaaggtttatatgcaggccaaaaacttgtgcctgttaatactgctggttgctatatacctggtggaagatatgctcatatagcctctgctgttatgagcgtaacgactgctaaagtagcaggtgtaaaaaatattatagcttgtagccctcctaaagaaaatataggtgctcatccagctattgtttacacagctaatctttgtggtgcagatgtaattttaaacttaggtggtgtcccagctattgcggcaatgacatatggtatgtttggcaattccgaagcagatattcttgtaggaccaggtaaccaatttgttgcagaggcaaaacgaatattatttggaaaagttggaattgacttatttgctggtccaacagaaattggtattatagcagatgaaagtgccgatccagaaattgtggcctatgacttagttggtcaagctgaacacggatataattcacctgcatggttgtttactacaagtgaaaaattagcaaatgatgttatgaaaatagttcctcaattaattgaagatttaccagaactaccaagaactagtgcggaggcagcgtggaaagattatggcgaagtagtattgtgcaatacagatgaagaaatggctaaaattagtgatgaatatgctcctgagcatttagaactacaaaccaaaaacgacaaatggtttcataataaattaaaaaattacgggtcattatttataggagaagaaacaactgtagcgtatggagataagtgctcaggtacaaatcatatattaccaactaagggtgcgggcaaatataccggtggattatttgtaggcaagtttattaaaactttaagttttcaaagaatgacaaaagaatctactaaagaagttggtgctgctgcagcaagaatttctagatatgaaggtatggaagcgcatgcaagaaccggggatatcaggttaagaaaatatggatattcaaattaa

SEQ ID NO: 205750 - DNA, 859 bp, Unknown
  Bacterial polypeptide expressing nucleotide sequence isolated from the Sargasso Sea
gtaaaaaatataattgtatgtagctcacctaaacctaatatcggagtacatccttcaattatttatacagctgatctgtgtggtgcagatgtaataatgaatctaggtggagtacaagcaattgccgctatgacaaatggattatttggaaatgcccctgcagatattttagtaggacctggcaatcaatttgttgctgaagcaaaaagaattttatttggaaaagttggtatagatttatttgcaggtccaactgaaatagctgttatcgcagatgaaactgctgactcagaaatggttgcttttgatttagtaggtcaagctgagcatggatataattcaccagcatggttatttacaacaagtaaaaaattagcagaagaagttataaaaagagttccagagttaattgcagatttaccagatcttccaagagaaaatgctggagctgcatggaaagattacggtgaagtaattctttgcgaaactgatgaagaaatggcaactataagtgatgaatatgctcctgaacatttagaagttcaaacgaaaaacttacaatggtttcatgacagactgaaaaattacggctctttgtttattggagaagaaacaacagtagcttatggtgataaatgctcaggcacaaaccatatacttccaacaaaaggtgctggaagatatactggtggactatttgtggggaaatttattaaaacattaagtttccaaagaatgactaaagagtctacaaaagaagttggtgcagcagcagctagaatttctagatatgaaggaatggaagctcacgccagaactggagatgtaagacttagaaaatacggtttttcaaattaga

SEQ ID NO: 205751 - DNA, 1315 bp, Unknown
  Bacterial polypeptide expressing nucleotide sequence isolated from the Sargasso Sea
atggctatcgaatatctaaaaaaagcaaccaagaaacctaccacaggggaagatcaaaccagggataccgtttcaggaattttgaaggacattgaagaggttggggaaaagaaggcaattgaatacggcatcaaactggatggatgggatggagacatcatcgtttcaaaagacgcgattgaagaatccgcaacgaaagtcactcaacagctcaaggacgacctgcaatttgctttcgaccgcgtttacggctttgcccgcaaacaaatggaaagcattcaggaattcgaggttgaactcagcccgggattatgggctggtcaaaaattgatcccgatgaataccgcgggatgttatgtccctggaggccgctatgcccatgttgcatccgctatcatgtcaattgcaactgccaaggctgcaggagttgaaaacatcgttgcctgttccactcccaaaaaagaacatggaggaattcatccggcgattctatacacaatgaatttatgcggtgctgaccacatccttgccatgggtggggttcagggaattgccgcaatggcattcggtctcttcacagaaagcagggcagatatcctggttggccccggaaataagtatgtggctgaagcaaagcgaatgctttttggaagagtaggaatcgatctttttgccggaccgacggaaattctcatcattgcagacgagactgctgatccggagattgtggcagtggacttggtcggacaggcagagcatggcatcgattctccagcctggctgattaccaccaacagggattttgcgaacaaggtgatggaccgaatgcagcccctgatagaagctttaccggacgttcagcgtgaagcagcaaataatgcatggagagacttcggtgaagtggtcctctgtgacaccgatgaggaggctgcaaaggtgagcgaccagtatgcaccggaacaccttgaagttcagacaaagaatctggactggtatacgaatcaactgaaaaactatggttctttgtttatcggagaagaaaccaccgtagccttcggggacaaatgctctggaaccaatcacatcctcccgacgaaggaggcagggcgttataccggcggactttctgtgcacaagttcatcaagattgtcaccacccagagagcgaccgaggaagcaaatcgtgatgttgcagccatcacggcacggatctcaagactcgaaggcatggaagcccatgcccggaccggagacattcgattggcaaaatattttcctgatgaaaccttcaaccttcaggcaaatgaaagctgat

SEQ ID NO: 205752 - DNA, 1288 bp, Unknown
  Bacterial polypeptide expressing nucleotide sequence isolated from the Sargasso Sea
atggcaataaattatttaaaaaaatcacccaaaacatcttcaactgatgatacaaaaacaagagagattgtagaaaatattctaaaagatatagagaaaacaaaagaagaaggatgtatcgagttatcaaaaaaatttgataaatatgaaggagaagtagtagttacaagagaaaaaattgaacaaattaaaaaaaatttagatcctaaaacaaaagacgacattcaattctctcatgaaagagtaagaaagtttgctgaagcacaactaaaaaattatggccaagattttgaggtggaactctcggatggattatttgctggacaaaaattaattcctgttaatacagcaggttgttatgtaccagcaggaagatatgctcatattgcttccgcagtaatgagtgttacaacagctaaagttgctggtgttaaaaatattattgtttgcagctcaccaaaacctggtgttggagttcatcctgctattgtttataccgctgacttatgtggagcagatgtaataatgaatttaggtggagttcaggctattgctgcaatgacttatggtctttttggtaatgcacctgctgatatgcttgttggtcctggaaatcaatttgttgcagaatcaaaaagaattttatttggcaaagtaggtatagatttatttgctggtccaacagagattgcagttatagcagatgaaacagcagacccagaattagttgcattcgatttagttggacaagcagagcatggttataattctcctgcctggttatttactaaaagtaaaaaattagcagagtatgtaatgcaaagagttcctgaattaattgcagatttaccagatttaccaagagaaaactcaggagctgcatggagagactatggtgaagttattttatgtgacacagacgaagaattggcaaaaattagtgatgaatacgcacctgaacatttggaaattcaaactaaaaaccttcaatggtttcatgaccgattaaagaattatggatcattatttattggagaggagactacagttgcatatggagataaatgctcaggaaccaatcatattttaccaacaaaaggtgcgggaaaatatacaggtggtttatttgtaggaaaattcattaaaacattgagttttcaaagaatgactaaagagtctactaaagaagtgggtgcagcttgtgctagaatttcaagatatgaaggaatggaggctcatgcgagaacaggggatgttagacttagaaaatatggatttcaaaattaat

SEQ ID NO: 205753 - DNA, 966 bp, Unknown
  Bacterial polypeptide expressing nucleotide sequence isolated from the Sargasso Sea
aatgaaatatttaaaaaaatctccaaagcaaccctcgactgatgattttaaaacgagagaaattgttcagaaacttttaaatgaattagaaaaatcaagagaggacggttgtaaagaattaactaaaaaatttgataaatatgacggagaaattattgtatcaaaagaaaaaatagaagaaataaagaaatcattaaaccaaaaaacaaaagatgatattcaattttcttacgagagagtaagaaaatttgccgaagcacaattaaaaaattatgggcaagattttgaggtagagctttccaaaggtttgtatgctggtcaaaaattagtcccaattaatacggcaggatgttacatacctggaggtagatacgcgcatatagcctcagcagttatgagtgttacgacagcaaaagttgctggtgtaaaaaatataattgcatgcagtcctccaaaagaaggcgtgggtgctaatccatcggttatttacacagctgatctttgtggtgctgataaaatattaaatttaggtggcgttccagcaattgcagcaatgacttatggaatgtttggaaacgagcctgcagatatgctggttggtcctgggaatcagtttgttgcagaagcaaaaagaatattatttggtaaagttggtattgatttatttgctggaccaactgaaatagcaataattgcagacgatactgctgatccagaaattgttgcagtagatttagtgggtcaagctgaacatggatacaattctccagcttggttatttaccacaagtaaaaaacttgcagaccaagtattgaaaagagtaccagaactaatttctgaattgcctgaattaccaaaaacaagtgccgaagctgcatggaaagattatggagaggttgtgctttgtgataacaacgaagaaatattaaaaataagtgacgagtatgcaccagagcatttagaggt

SEQ ID NO: 205754 - DNA, 1273 bp, Unknown
  Bacterial polypeptide expressing nucleotide sequence isolated from the Sargasso Sea
tttgaaaaaatcaccaaaaacttcatcaacagacgacacaaaaacaagagagatcgtagaaaatattctaaaagatattgagaaaacaaaagaagaaggatgtatcgaattatcaaaaaaatttgacaaatatgaaggtgaggtaatagttacaagagaaaaaattgaacaaattaaaaggaatttagatcctaaaacgaaagatgacattcaattctctcatgagagagtaagaaagtttgctgaagcacaattaaaaaattatggccaagattttgaggtagagctatctgatggtttatttgctggacaaaaattaattccagttaatacggctggatgttatgtacctgcaggaagatatgctcatattgcttctgcagtaatgagtgttactacagctaaagttgctggtgttaaaaatattattgtttgcagctcaccaaaacctggggttggagttcatcctgccatagtttacactgcagatttatgtggagcagatgtaataatgaatttaggtggtgttcaggctattgctgcaatgacttatggcctatttggaaatgctcctgcagatatgcttgttggtcctggaaatcaatttgttgcagagtcaaaaagaattttatttggcaaagtaggtatagatttatttgctggtcctacagaaattgcagttatagcagatgaaacagctgatccagaattagttgctttcgatttagttggacaagcagagcatggttataactctcctgcatggttatttactactagtaaatcattagctgaatatgtaatgaaaagagtaccagaattaattgctgatttaccagacttaccaagagaaaactctggtgcagcttggagagactatggagaagtcattttatgcgatacagacgaagaaatggctaaaatcagtgatgaatatgctcccgaacatttagagatacaaactaaaaaccttcaatggtttcatgatagattaaaaaactatggatcattatttattggtgaagaaactacagttgcttatggagataaatgttctggaacaaaccatattttaccaacaaaaggtgcaggaaaatatacaggtggtttatttgtaggaaaatttattaaaactttaagctttcaaagaatgacaaaggaatcaaccaaagaagtaggtgcagcgtgtgctagaatttcaagatatgagggtatggaggcacatgcaagaacgggagatgttagactaagaaaatatgggtttcaaaattag

SEQ ID NO: 205755 - DNA, 1165 bp, Unknown
  Bacterial polypeptide expressing nucleotide sequence isolated from the Sargasso Sea
atgacgattaaatatttaaaaaaggcaattaaaactccttcaacggatgattctaaaacaagaactaccgttcaaaacattttgaacgatatagagaaaagaagagaagagggaataaaagaaataactaagaaatttgataattacgacggtgaaattattttatcaaaagaaaaaatagaagaagcaataaaaaaagttgatcaaaaaactaaagatgacgtgcagtttgctcatgaaagaattagaaaatttgctgaacatcaattaaaaagcatgaacaacgagtttgagatagagctttcaaaaggattatttgcaggtcaaagacttattccagttaatactgccggctgctatatacctggagggcgctatgctcatatttcttcagcaactatggccattaccccagcaaaggttgcgggagtcaaaactataatttgtgcaagcccaccaaaagataaagatggagctcatcccggaataatttatgcagccaacctttgtggagcagatgtaattttaaatttaggaggaatagccgctatagcatctatggcatacggttgttttaacaatccggaagttgattttttagttggtgcagggaatcaatatgttgctgaggcaaaacgtattttgtttggaaaagttggtatagatctttttgctggaccaacagaaattgcaataatcgccgataaatctgcagataaagaaattgttgcagctgatatagtggggcaggcagagcatggatataattcaccaggttgggtttttacaaccgataaaactttagcagattatataatgaagaggataccagaattaattgcagaattgccagaaggacctcgatctagtgctgagcctgcttggagagattatggagaagtagtgctttgtgataccgatgaagacatggcaatcattagcgataaatacgctgctgaacatttagaggtgcatgctaaaaacttaaattggtggttaaaaagacttaagaattatggatctttatttttaggtgaagaaacaactgtagcgtatggagacaaatgttcaggacctaatcatatcttacctacaaaaggggcaggaaaatatactggcggactttacgttggaaaatttattaaatgtttaactttttcaagaa

SEQ ID NO: 205756 - DNA, 952 bp, Unknown
  Bacterial polypeptide expressing nucleotide sequence isolated from the Sargasso Sea
atgacaattaaatatttaaaaaaagcttctaaaactgcatccacagatgatactaaaacaaaagatatagtgcaaaaacttttacgagaacttgaaaaatctaaagaagacggttgcaaagaattaacaaaaaaatttgataaatatgatggggaaatagttgtttccaaagaaaaaatagaagaaataaataaaaacttagaccaaaaaactaaagatgatattaaattttcgtacgatagggttcgaaaatttgcagaagctcaacttgcaaattatggaaaagattttgaagttgaattatcagatggtttatatgctggtcaaaaattagtccctgtaaatactgctggttgttacataccaggtggaagatatgctcacatcgcatctgcggtaatgagtgttacaactgcaaaagttgcaggtgttaaaaatattattgcatgtagtccgccgaaagagggagttggtgcccacccttctattgtttatacagcaaatttatgtggagcggatataattttaaatcttggtggtgtaccggctattgctgcaatgacatatggaatgtttggaaacgctccagctgatattttagttggtcctggaaatcaatttgtagctgaagctaaaagaattttatttggaacagtaggcatagatttattcgcgggcccaacagagattggaattattgcagatgaaacagcagatccagagattgttgctgtagatttagttggccaggctgaacatggttataattcaccatgttggctatacaccactagccaaaaacttgcagatgaggtaatgaaacgagttccagaattaatagaaaaacttccagaggttccaagattaagtgctgaggctgcttggagagattacggtgaagttattttgtgtgatacagatgaagaaatggttaaggtaagtgatgactatg

SEQ ID NO: 205757 - DNA, 1135 bp, Unknown
  Bacterial polypeptide expressing nucleotide sequence isolated from the Sargasso Sea
tatggctattaatgttcttaagaaatcaaaaacagaaattgaaaaagctgcagaggatgccaaagttcgggaggttgttgaagcaacactgggtgaaattgaaaaaaatggagatgcggctgttcgtgaattaagtaaaaaatttgataattattctcctaataaatttaaattaactaaaagcgaaattgatgcagccatgcataatgtttctgcacgcgatatggatgatatcaaatttgcacagctgcagataaaaaactttgccgaggcgcagcgtgcctccatgactgatattgaaattgaaactatgcctggtgttatcctaggtcatcggaatatacctgttcaatctgttgggtgctatgtgcccgggggaaaattcccaatggttgcatcagctcacatgtcggttttgactgcgtctgtcgctggggttccccgcataattgcatcagccccaccagtaaatggagagcctcatcctgctattgtggctgcaatgcatctaggtggtgcacacgaaatttatgttattggcggaattcaagcggttggagctatggcaattggaacagaaactatagacccagttcatatgttggtaggccctggaaatgcgtttgttgctgaggcgaaacgtcagctttatggacgcgttggtatagatctctttgctgggcctaccgaaacaatggttatcgcagacgaaacagttgatgctgaactatgtgcgacagatttattgggtcaagcagaacacggctataattcacctgccgccatgataacgtgtagtgaaaaattagctcgtgaaacattaattgaaatagagcgaatactggaaattcttcctacctctgaaacagcatctgcaagttgggagaattatggggacatgatactttgcgatacacacgaagagatgctttctgttgcaaatgatatggcatatgagcatgtacaaattatgactgatcgtgatgattggtaccttgaaaatatgcattcgtacggcgccttatttttagggccgcgtaccaatgttgcaaatggtgataaagtaattggtacaaatcatacgcttccaacaaaaaaagctggtcggtacacaggtggactgtgggtaggaaag

SEQ ID NO: 205758 - DNA, 1030 bp, Unknown
  Bacterial polypeptide expressing nucleotide sequence isolated from the Sargasso Sea
tcaatgcaagatattgaaatagaaacaatgcctggcgtaattttaggtcacaaaaatattccagttcagtctgtaggttgttatgttcctggcggaaaatttcctatggtagcttctgctcatatgtcaatcgttactgctaatgtagcaaaagttccaagaattattgcctcaacgccaccttttcagggcaaacctaatcctgcggtaattgcagctatgcacttaggcggcgctcatgaaatatatatattaggtggtatacaagctgtaggcgctatggcattaggaactgatacaatatctcctgtagatatgctagtgggacctggcaatgcattcgtggctgaagctaaaagacaattatttggtgaagttggaattgatttgtttgcaggtccgacagaaactatggttatagctgataaaactgttgacgctgaactctgtgctacagatttacttggacaagcagaacacggctataattctcctgctatattaataactaacgatgaaaaacttgcaaaaaatactatagaggaaatagaaagaattttaaccattttaccaactgctgaaacagcatccattagttggaaagattatggcgaagtcattttatgtgatacatacgaagaaatgttagaagttgctaataatatttcatcagaacatgttcaagtcatgacctccaaagatgattggtttttagataatatgcattcttatggagcattatttttaggcccaagaactaatgtatctaatggagataaagtaattggaactaatcatacattacctacaaaaagagcaggacgttacactggtggcctttgggttggtaaatttctaaaaacgcatagctatcaaaaaattacttctgatgaagcggccgttaaaattggtaaatattgttcaagactttctatgttagaatcatttgttggacatgctgaacaagctaatattagaattagacgatacggaggacaaaatataccatatggtaaagctgcagaataaa

SEQ ID NO: 205759 - DNA, 1024 bp, Unknown
  Bacterial polypeptide expressing nucleotide sequence isolated from the Sargasso Sea
aatgtctattacttatcttaaaaaggccaataaaactgcttcaacagacgacacaaaaactagagaaatagttgagaatcttttgagtgaattagaaaaaactaaagaagatggctgtaagaatctaacaaaaaaatttgataaatatgatggagaaataatagtttctaaagagaaaatagaagaaattaaaaaaaatatagaccaaaaaactaaagacgatattaaattttcttatgacagagtgagaaaatttgcagaagcgcagcttaaaaattatggtcaaaactttgaagttgaattatctgagggtttatttgctggtcaatctttaattccaataaatacagctggatgttacgtaccagctggaagatatgctcatattgcttcagcggttatgagtataactacagccaaagtagcaggagttaaaaatataatttgttgcagctctcctaaacctgagacaggtgctcatccaaaaattatttacactgctgatttgtgtggtgccgatgtaatactaaatttaggtggtgtgcaggctattgcggcaatggcttttggtttttttggaaatgctccagcagatattttggttggaccgggtaatcaatttgttgctgaagcaaaaagaatattatttggtaaggttggtattgatttatttgctggacctacagaaattgctattatagctgataagacagctgatcctgaaattgttgcttatgatttagtaggacaagcagaacatggttacaactctccggcttggctttacactactgataaatctttggcagaaaaagtaatgaaaagagttccagaattaattgcagatcttccggagttgcctaaaacaaatgctgaagcagcttggagagattatggtgaagtaatactttgtgaaactaatgaggaaatggctaaaattagtgatgagtatgcgccagaacacttagaagtacaaacagataatttagattggtggttaaaaagattaaaaaattatggttct

SEQ ID NO: 205760 - DNA, 1288 bp, Unknown
  Bacterial polypeptide expressing nucleotide sequence isolated from the Sargasso Sea
aatggcaattacatacttaaaaaaatcaccaaaaacatcatcaactgacgacacaaaaacaagagaaatagtagagaatattctaaaagatattgagactagtaaagaagaaggctgtaaggagctttccaaaaaatttgataaatatgaaggtgatgtaattgtttcaaaagaaaaaattgaagaaataaaaaaaaatttagatcaaaaaactaaagatgatattcagttctctcatgaaagagttagaaagtttgctgaagcacaattaaaaaattatggtcaagactttgaagttgaattatccgacggtttatttgctggacaaaaactcattcctgtaaacacagcaggttgttatgtacctgctggaagatacgctcatatagcttcagccgtaatgagtgtaacaacagcaaaagtagctggtgttaaaaatattctagtttgtagttctcctaaacctggagttggagtacatccatcaattgtttatacagctgacttgtgcggagctgatgtgataatgaatttaggtggtgtacaagctattgcagcaatgacaaatggattatttggtaatgcacctgcagatattttggttgggcctggaaaccaatttgttgcggaagcaaaaagaattttatttggaaaagttggtatagatttatttgcaggacctacagaaattgcagtaattgctgatgagactgctgatcctgagatggtagcatatgacttagttggacaagctgagcatgggtacaattctcctgcttggttgtttactaaaagtaaaaaagttgcagattatgtaatggaaagagttccagaattaattgcagatttaccagatcttccaagagaaaattcaggtgctgcatggagagattatggtgaagtaattctttgtgacactgatgaagagatcgctaaagttagtgatgaatacgctccagaacatttagaagtccaaactaaaaatttacaatggtaccacgatagattaaaaaattatggatctttattcattggtgaagaaacaactgttgcttatggagataaatgttcaggtacaaatcacattttaccaacaaaaggtgcaggtagatacacagggggtttatttgttggtaaatttattaaaacattaagtttccaaagaatgagtaaggctgcaacaaaagaagttggtgctgcttgtgcaagaatttctagatacgaaggaatggaagcacatgctagaacaggtgatgtgagattaagaaaatacggttttcaaaactaa

SEQ ID NO: 205761 - DNA, 1324 bp, Unknown
  Bacterial polypeptide expressing nucleotide sequence isolated from the Sargasso Sea
atggaaaaaataaatatttataaatatagcagattatctcaatctgaaattttaaatctttgcaaacgagctgaaagtaatctatctgactactttgaaattgttgatgaaatcataaaaaatgttgaagaaaataaagaaaatgctcttgtagagtactcaaagaagcttgataacgtaaagtctggtttgcgagaatttaaagtttcagaagaggaattttcaagggcccatgatttaattgatgagggcatgaaagaagctttaatcttctgttctgcaaatgttaaaaagtttcatgaggctcagatgccaaaaaaagaatggatgatcgaaatgcatccaggtgtattggctggagaaaaaaatttgccaatagagtctgttgccttgtatgttcctagaggaaagggttcttttccaagtgttgcaatgatgacttctatccctgcagtcatagcaggtgtgaagacacctgtaatattcactcctcctgaagaagatggaacggttgattgtgcgacactagtcgcagcagaaattgctggcgtgaataatgtctttaaaattgggggagcgcaggcagtagcagccgcagcatttggaacagaaactattccaaaatgcttaaaaattgttggccctggcagtccctgggtggcagctgctaaaagtcgactatcacatgttattgatacaggaacaccagctgggcctagtgaggcaattgtatttgctgatcaatcagcaaatggaaaattagttgctttggacttattaattgaagctgaacatggctcagacagttcggcatatttaatttctaattcaaataatgtcattcaagaagcaaaagattttattccgcagtgttttcaaaatatgacaaaagaaagagtaaaatatgcaactgatgttttgtgtggaagaagagggggaataatacaagttgataacacagatcaagcattagattttattaatttatatgcacctgagcacttgcaaatacattctaaaaatcctgatcagtacttagataacataaaaaatgctggtgaaataatgcttggagaattttctccaatgagtattgcaaatttttccttaggtccaaacaatgttattccaactaatgcttgggcaaaaacaaaatcaccattaagtgtccatgattttataaaatctacttcaataggaaagattgataataaaggtttcgctaaactatctccttacgcaagaaaattcgctgaacatgaagggttcgacgcccatgcgaatgctgtgtcgcaaatgagattagatgctttaaaaaaataaa

SEQ ID NO: 205762 - DNA, 1260 bp, Unknown
  Bacterial polypeptide expressing nucleotide sequence isolated from the Sargasso Sea
tatggcaattgaatatttaaaaaaaggtttagatgaaaaacaaagaattgaagataatgataaagtaaaaaaaattgttgaggaaacattaagaaaaatcgaatcagaaggagatgaacatattagagagttatctcaaaaattcgataactattctccagatagttttcgattaagtgaagagcaaataaatcaattaatgagtgaagtctctgatcatgacaaggaagatattaaatttgctcaaaaacaagtgcgatcatttgcggaagcacaacttaaaactttaagtgaattagaagtagaaacgcatccaggtgtgatacttggtcataaaaatataccagtacaagcagttggttgttatgtgcctgctggtaaattcccaatggtagcttctgctcatatgtcagttgtgactgcctctgttgctggagttccaagaattgttgccactaccccaccttttaaaggtaagccaaatccagctgtcgttacagcaatgaaaatgggtggtgctcacgaaatttatgttttgggtggaatgcaaggagttggtgctatggctattggtacagaaactattaaacctgttgatatgcttgttggacctggcaatgcatttgttgctgaagcgaaaagacaattgtatggcagagttggtatcgatttatttgctggtccaactgaaacaatggttattgctgatgaaactgttgatggtgaaatatgtgcaactgatctattaggacaagctgaacatggatataattctcctgctgtgatgataacaaactcaagaaaacttgctgatgaaacatttaaagagattgatagaattttagaaattttacctactaaagaaacagcaaatacaagctggagagattatggagaaataattttatgtgatacctatgaggagatgttatctaaagcaaatgaaatagcatcagagcacgttcaagttatgacaaaaaaagatgattggtttttagaaaatatgacatcttacggagctctatttttgggtgctagaactaatgttgctaatggcgataaagtcataggcactaaccatactcttcctactaaaaaagctggaagatatacaggtggtttgtgggttggtaaatttattaaaacccacacttatcaaaagattacaaccgatgaagcagcgacacttattggagaatatggatctagactttcacaccttgagggatttattggtcacgcagaacaatgtaacgtcag

SEQ ID NO: 205763 - DNA, 697 bp, Unknown
  Bacterial polypeptide expressing nucleotide sequence isolated from the Sargasso Sea
atgaaatttcttaatattaataataagtcattctacaaagaacttgattttatattaaaaaaaagatcgcataataattctacaaaagtagataatgaagtatatcaaataatacaacaggtaaaatctcatggagataaagcattatttaaatatgcaaaaaaatttgataaatcatctattaacaaaaaaaatatattattatctaaagaagttttacaatcttataaaaacaaaatagatgacgacatattaacagcttttagaattgcaattcacaatattactaattttcataagaaacaaatgcctaaaagtttccaaatcaaaaaacatggagtcaaaacaaactctaaatggtcaccaatacaatcagtaggtctttatattcctgggggaatagcgtcttatccctcttcattaattatgaatgtcattcctgctaaagtttctggagtcaaaagaatagtacttatgactcctgcaaaatcaaataagattaatccatatgtactagctttaattgatgaattaaaattaaatgaagtttatcaaattggtggagctcattctattgctgctttagcatttggcacagaaagcataaaaccagtcaataagatatttgggcctggaaatgcttatgtagctagtgccaaaaaacaagtttttggagatgtgggcattgatttaattg

SEQ ID NO: 205764 - DNA, 1271 bp, Unknown
  Bacterial polypeptide expressing nucleotide sequence isolated from the Sargasso Sea
catggctataaaatatttaaaaaaatcaccaaaaacttcgtctactgatgatactaaaactcgagaaattgtagaaaatattttaaaagatattgaagtaaaaaaagaagaaggttgtaaagaactcggaaaaaaatttgataagtacgatggtgaaatcatagtttctaaagagaaaatagaagaaataaaaaaaaatttagatcaaaaaacaaaggatgatattcagttttcacacgaaagagttagaaaatttgcagaagcgcaattaaaaaactacggccaagattttgaagttgaactttcagaaggtttatatgctggtcaaaaattaatacctgttaatacagcgggatgctatgtaccagcaggaagatatgctcatatagcttcagctgttatgagtgttacaaccgctaaagtagctggagttaaaaatattttggtttgtagttcaccaaaaccaaaaattggagttcacccatcaattatctatacagctgatttgtgcggagcagatgtaattatgaatttaggtggagttcaagcaatagctgctatgacaaatggattatttggaaatgcgccagctgatattttggttggaccaggaaatcaatttgttgctgaagcaaaaagaatattgtttggaaaagttggaattgatttatttgctggtcctacagaaattgctgtaattgctgatgaaacagctgatcctgagatagtagcatttgacttagttggtcaagctgaacatggttataattcacctgcatggttgtttactactagtaaaaaattagcagaagaagttataaaaagagtgcctgagttaattgcagatttaccagaactacctaaacaaagtgcaggggatgcatggagagattttggtgaagttattctttgtgataatgatgaagaaatggcaaaaattagtgatgaatatgcaccagagcatttagaagttcagacaaaaaatttgaaatggtttcatgaaagattaaaaaactatggatctttatttataggagaagaaacaactgttgcttacggagacaaatgttcgggaacaaaccatattcttccaactaaaggtgctgggagatatacaggtggtttatttgtaggtaaatttattaaaacactaagttttcaaagaatgacaaaagagtctacaaaagaagttggtgctgcagctgcaagaatttctagatatgaaggaatggaagcccacgcacgaacaggcgatgtaagacttagaaaat

SEQ ID NO: 205765 - DNA, 1024 bp, Unknown
  Bacterial polypeptide expressing nucleotide sequence isolated from the Sargasso Sea
attaaaaaattatgggccaagattttgaagttgaactttcagacggtttatagtgctggacaaaaattaattcctgttaatactgccggatgttatgtcccagctggaagatatgcgcatatagcttcagctgtaatgagcgttaccacagctaaagttgcgggagtaaaaaatattttagtatgtagttctcctaaaccaaatgtaggtgtacatccctcaattgtttatactgcagatttatgtggtgcaaatgtaattatgaatttaggaggtgtccaagctattgctgcaatgacaaatggtttgtttggtaatgctccagcagacattttagttggtccaggtaatcaatttgttgctgaggcgaaaagaattttatttggaaaagttggaattgatttatttgctggacccacggagattgcaataatagcagatgaaactgctgattcagaaatagtggcttacgatttagttggacaagcagaacacggatataattcaccagcgtggttatttacaaaaagtaaaaagttagctgaagaagtaataaaaagagttccagaattaattgcagatttgcctgaactccctaaacaaagtgctggagatgcttggagagattttggagaagtaattttatgcgacaccgatgaggaaatggcaaaaattagtgatgaatatgctccagagcatttagaagttcaaactaaaaacttaaaatggtttcatgatagactaaaaaattatggttctttatttattggagaagaaacaacagttgcttatggtgataaatgttcaggtacaaatcatatacttcctactaaaggtgctgggagatatacaggtggattgtttgttggaaaatttattaaaacattaagttttcaaaggatgacaaaagagtctactaaagaagttggtgcggcagctgctagaatttcaagatacgaaggtatggaagcacatgcaagaactggcgatgttaggctaagaaaatatggtttttcaaattaaa

SEQ ID NO: 205766 - DNA, 691 bp, Unknown
  Bacterial polypeptide expressing nucleotide sequence isolated from the Sargasso Sea
ttagttggacctggaaatcaatttgtagctgaagctaaaagaattttgtttggtaaagttggtattgatttatttgctggaccaacagagattggaattatagctgatgatacagcagatccagaaattgttgcagttgacttagttgggcaagcagaacatggttataattcaccagcttggttatatacaacaagtcaaaaactagctgatgcggtgatgaaaagagttccagaattaatcgatgaattaccagaagttccaagattaagtgctgaagcagcatggagagattatggtgaagttattttatgtgacactaatgaagaaatggtcaaagtgagtgatgattatgctcctgaacatttagagttacaaacaaaagatttaaaatggttccatgaaaaacttaagaattatggatcattatttataggcgaagaaactactgttgcttatggtgacaaatgttctggtactaaccacatattacctacaaaaggagctggaaaatatactggcggtttatttgtgggaaaatttattaagacattaagttttcaaagaatgactaaagagtctacaaaagaagttggtgctgcagctgctagaatttcaagatacgaaggaatggaagctcatgcaagaactggagatgtaaggcttcgaaaatatggttattcgaattagt

SEQ ID NO: 205767 - DNA, 724 bp, Unknown
  Bacterial polypeptide expressing nucleotide sequence isolated from the Sargasso Sea
attgcagcagttgcttatggaacaaaaaaaaattgatagagtgaataagattgtgggtcctggtaacaagtatgtagcagctgctaaaaaggaagtttttggggatgttggtgttgagggaatgatagctggaccatcggaagtaaccgtcgttggtgatagattttcaaatccaggctggatagcaagtgatcttattggtcaagcagaacatgatgaacttgctcaatgtattttaatttctaaaagtaaagacttaataattcaaactaagcaagaaatttctaaacaattaaaaaaaattccaagaacagctatcgcaagaaaaagtttatcaaataacggaattttaattaaagtaaactcagataaacaaataactgatatagtgaataaaatcgctcctgagcatttagaattaaatgtaaaaaattacaaatcttttatttcaagaattaaaaatgctggctctatttgtttgggaaaatatgctgtgatggcaatgactgattataacgctggttcaaaccatatattaccaactaatggttctgctaaattttcaagcggtataagtgttaatgaattttacaaaagaatttcatatataaacttatcaaaaaagggtattgaaaagcttggaccatcagttataactcttgcaaattatgaagggttggctgcacacgctcaatctgtgaaaaaacgaattaggagaaaataa

SEQ ID NO: 205768 - DNA, 1288 bp, Unknown
  Bacterial polypeptide expressing nucleotide sequence isolated from the Sargasso Sea
aatggcaatacaatatttaaaaaaatcaccaaaaacatcttcaacagatgacaccaaaacaagagagatagttgaaaatattttaaaagatattgaaaaaactaaagaggaaggttgtaaagagctttcaaaaaaatttgataaatttgagggtgatgtaatcgtttccaaagaaaaaattgaagagattaagaaaagtttagaccaaaaaactaaagatgatgttcagttttctcatgaaagagttagaaaatttgcagaagcccaattaaaaaattatggacaagattttgaagttgaactttcagagggtttgtatgctggtcaaagattaattcctgtaaacactgctggatgttatgttcctgcaggtagatatgctcatattgcttctgctgtgatgagtgtaacgactgcaaaagttgctggtgttaaaaatattcttgtatgtagctcaccaaaaccaggtgttggagttcatcctactattgtttatacagctgatctttgtggtgcagatgtaataatgaatttaggtggagtacaagcaatagcagcaatgacaaatggtttatttggaaatgcgcctgctgatattttggtaggtccaggtaatcaatttgttgctgaagcaaaaagaattttatttggtaaagttggaatagatttatttgcaggtccaactgaaattgcaataatcgctgatgaaactgctgatccagaaattgtagcagtagatttagttggtcaagctgaacatggctataattcacctgcttggttgtatacaacgagtaaagaactagcagaaaaggtaatgaaaagagttccagaattaattgctgaattaccagaattaccaagaacaaatgctgaagcagcttggagagattacggagaagtagttctttgtgatactgatgaagagatggctactattagtgatgagtatgcacctgagcacttagaggtacaaacaaagaatttagattggttccacaacagattaaaaaattatggctctttatttgttggtgaagaaacaactgttgcttatggagataaatgttcaggaacaaatcatattttacctacaaaaggagctggaagatatacaggtggtttatttgtaggaaaatttatcaaaacactaagtttccaaagaatgacaaaagaatctacagaattagttggagctgcagctgcaagactttcaagatacgagggtatggaagcacatgcaagaactggtgacgtaagattgaaaaaatacggatatacaggttaa

SEQ ID NO: 205769 - DNA, 1015 bp, Unknown
  Bacterial polypeptide expressing nucleotide sequence isolated from the Sargasso Sea
aattatggacaagattttgaagttgaattatccaatggtctatttgctggtcaaaaattaattcctgtcaatactgctggttgctatgtgccagctggaagatatgcacatattgcttcagcagttatgagtgtaactactgctaaagtagctggtgtaaaaaatattttagtttgcagttcaccaaaaccaaatattggtgttcatccgtcaatcgtatacacagctgatctttgtggagcagatgtaattatgaatttaggtggtgttcaagcaattgctgctatgacaaatggactatttggaaatgcaccagctgatatattggttggacctggaaatcaatttgtagcggaggctaaaagaattttatttggtaaagtcggtattgatttatttgcaggaccaactgagatagcagttatagctgatgaaacggctgatcctgaaatggtagcttacgacttagttgggcaagcagagcatggttataattctcccgcatggctttttacaacaagtaaaaaagttgcagattatgttatgcaaagagttccggaactaattgctgatttacctgagttaccaaaacaaaattcggaagcagcatggagagattatggtgaagtaattttatgtgatactgatgaagaaatggcaaaaattagtgatgagtatgcaccagagcacttagaagtccaaactaaaaatttagaatggtttcatcagagattaaaaaattatggatctttatttattggtgaagaaactacagttgcttatggcgataaatgctcaggtactaatcatattctacctacaaaaggagctggaagatatactggtggtttatttgttggaaaatttatcaaaacattgagtttccaaagaatgaccaaagagtctacaaaagaagtgggtgctgcatgtgctagaatatctagatatgaaggtatggaagctcacgccagaactggagatgttagattaagaaaatatggattttcaaattaac

SEQ ID NO: 205770 - DNA, 1222 bp, Unknown
  Bacterial polypeptide expressing nucleotide sequence isolated from the Sargasso Sea
ctgaagaaggcacaacttacaccaaaatctaatgcctcagaggttcatgaaactgtaaaaaatattcttacagatatagaagctgggggtgatgaaaaggctaaagagtatgcctcaaaatttgaccagtacaaagggagtataattttaacagacgaagaaatagaggtagcaagtgagttagttccagctaagctaaaaaaagatatagagtttgcgcacgataatgtgaaacggtttgcagaaaagcagaaagaaacattaaagaatactgaaattgaaattcatcctgggtttgtaactggtcaaaaggttattccagttgatgcagctgggtgttatgttcctggtggtcgttatagtcatattgctagcgctataatgactgtaacaaccgcaaaagttgccggctgtaaatttattacggcgtgttcaccgcccaagccaaatattggcgtcgctccggcgattgtttatgccgctcatatctgtggtgccgacaaaataatggccatgggaggcgttcagggagttgcttctatgacatacggtttatttgggttgccacaggcaaatattttagttggacctggcaatcagtttgtagctgaggcaaaacgtattctgtttggtcgagttggaatagatatgatagctggccctactgatagtttgattttggcagatgaaacggctgatccatttattgtagctacagacttagtgtcacaagcagagcatggttataattcaccagtttggttggttaccgacaatgaagctttagcaagtaaagtcatgaatttagttccaaatttaatagatgatcttcctgaaactaatcgtgataatgcagctgcggcttggagggattatgctgaagtaattgtttgcgataatagagaagaaatggctgcttgctctgatgaatatgcgcctgaacaccttacagttcaggctgatgatcttgattggtggcttgaacgtctgacctgttacggctcattatttttgggtgaggaaacaactgtttcttatggtgataaagcggcgggaaccaaccatgttttgcctacttcaagagctgctaattatactggtggtttgagcgtccacaaatatatgaagatagtgacatatcaaagagcaacaagagaggggtcaaaatcgattgctgaagccacggctcggatctctcgattgggagggaatggaaggtcat

SEQ ID NO: 205771 - DNA, 740 bp, Unknown
  Bacterial polypeptide expressing nucleotide sequence isolated from the Sargasso Sea
tttctcaatgggcggggctcaagcgattgcaagtttagcgtttattcaaaaagtaaataaagtagttggaccaggtaataaatatgtggcagaggccaaaaggcaattatccggaaagattatcggaacagaaacaatgtatgctggcgcatctgaaatatgtgttcttgctgacaaagactcagatatatctcaagtagcaacatctttagtttctcaggcagaacatgacccagatagtcaatgtatattggttacaaaagataaaaatttgattaaaaaaactctgattgaagtaaaaaaaattttaagtgatctaccaagaaaaataatagcctcaaggtcattaaaaaaaaatggattatttatactagtaaagaatgataaacaaatagttgaaataataaatgaaatagctccagaacatcttgaacttaacgtaaaaaattttaaaaagtacgaaaataagattaaaaatgctggaagtatttgtaatggtcctaataccccaatgagtgcatcagattatacagttggaactaatcatgttcttccaacctttggatcctcaaaatttagctcaggtttaaatttaaatgaatttactaaaaaaatatcaattgtaaccttaagtaaattaggggtagaaaaaattggaaatccagctataactctttcggagtttgagcaattacttggtcacactcaaagtattaaatctagaataaggagaaattaag

SEQ ID NO: 205772 - DNA, 1264 bp, Unknown
  Bacterial polypeptide expressing nucleotide sequence isolated from the Sargasso Sea
atggattttgacaaattgttgaataatcttctttctaaaagaaaaaataaacttcgatcagattacatttcagtaaaaaatataattaaagatgttagaaaaaatggagataaagctctattaaaatatgagaagagatttaataaaaataaaacaattattccaaacacaaaaaaaatcaaagcctccattaaatccttagaccaaaaagtaaaaaaagctattgatgctgcttataatagaatttataaattccattcacttcaaaagtttaaagatgtttcatatattgacaggtacgaaaataaagtgaaatatagatatgttccccttgagtcagttgcgatctacgttccgggttcaaaagtttcttatccatccagtgttttaatgagtgcaatacctgcaatcgtagcaggagttaaaagaattgtgatgattaatcctggttataaaggaaggcaaaacgctgctgttttgtatgctgcaagaaaatgcaaaattaaagaaatttattcaattggtggtccttcagcaattgcagctgctgcgtatggaactaaatcaattaaacctgtgaataaaattgtaggaccagggaattcgtatgttgcttcagcaaaaaaagaggtctttggggatataggtattgagtcaatgacagctggaccttcagaagttttagttgtctgcgacaacaaatctaatccagaatggttggcaagtgatttaattgctcaagctgaacatgattctcttgcccagtgtattttaatttcaaaagataaaaacattctaaaaaaaactaaaagcgaaataacaaatcaacttaaaaatatttcgagaagctcaattgcaaaaaaaagtttaatgacgaatggcatactaatctacgaaaattcagaaaatagaattgcagaaataattaataaggtgggcccagagcatttagagcttaatataaaaaattataagtctttaattccaaaaattaagaatgctggttctatttgcttgggaaaatatgcagtgatggcaatgacagattatggggtaccgggcactaatcatgttcttccaactaatatgaccagcaaatactcaagtggattaagtgtttcagagttcattaaaaaaatttcatacataaatttatcaaaaaagggtattgaaactcttggtccatcagttataactcttgcaactaatgaaggtttagatggacatgctaaatcaattaaaaaaagattaggagaattataaa

SEQ ID NO: 205773 - DNA, 1288 bp, Unknown
  Bacterial polypeptide expressing nucleotide sequence isolated from the Sargasso Sea
tatggcaataacttacttaaaaaaatcaccaaaaacttcatcaacagatgatacaaagaccagagagattgttgaaaatattcttaaagatattgaaaaaactaaagaggaaggatgtatcgaactatcaaaaaaatttgataaatatgaaggtgaagtaattgttacgagggaaaaaattgaagaaatcaaaaaaaatttagatcctaagactaaagatgatattcaattttctcatgaaagagtaagaaaatttgctgaagcacaattaaaaaactatggtcaggattttgaagtagagttatcagatggcttatatgctgggcaaaaattaattccagttaatactgcaggttgttatgttcctgcaggtagatatgctcacatagcatcagctgtgatgagtgtaacaacagcaaaggtagctggagtaaaaaatattatagtttgtagttctccaaaaccaggtgtgggtgttcatcctgcgattgtttatactgcggatctatgtggtgcagatgtaataatgaacttaggtggtgttcaagctattgctgcaatgacatatggtctttttggaaacgcgcctgcagatatgcttgtaggcccaggtaaccaatttgttgctgaatcaaaaagaattctatttggaaaagttggaattgatttattcgcaggcccaactgaaattgcagttatagctgatgatacagcagatccagaattagttgcttttgatttagttggacaagcagaacatgggtataattctcctgcttggttatttacgacaagcaaaaaacttgctgactatgtcatgcaaagggtgccagagcttattgcagatctaccagatttacctagagaaaattcaggcgctgcttggagagactatggagaagttattttatgcgatacagatgaagaaatggctaaaatcagtgatgaatatgctcctgaacatttagaaatacagactaaaaaccttcaatggtttcatgatcgattaaaaaactacggatcattatttattggagaagaaactacagttgcttatggagataaatgttctggaacaaaccatattttaccaacaaaaggtgctggaaaatacacgggcggtttatttgttggcaaatttattaaaacattaagtttccaaagaatgacaaaggaatctactaaagaagtgggcgcagcttgcgcaagaatttcgaggtatgaaggtatggaagctcatgctcgaactggagacgtaagacttagaaaatatggattttctaattag

SEQ ID NO: 205774 - DNA, 947 bp, Unknown
  Bacterial polypeptide expressing nucleotide sequence isolated from the Sargasso Sea
taatacagcaggttgctatattccaggtggaagatatgctcacattgcatctgctgtaatgagtgtaactacagcaaaagttgctggagtaaaaaatatcattgcatgtagtccccctaaagaagaagttggtgcccaccctactattgtatacacagctgatctttgtggtgcagatgttattttaaatttaggaggagttcctgcaattgcagcaatgaccaatggattattcaaaaacccccctgcagatataattgtagggccaggaaatcaatttgttgctgaggctaaaagaattttgtatggaaaagttggtattgatttgtttgcaggaccaactgaaattggaattatagccgatgctaaagctgatccagaaattgttgcagtagatttagtaggacaagctgagcatggatataactcaccctgttggctttatacaactagtaaagaattagccgaaaaagtaatgaaaagagttccagaattaattgcagaacttccagaagttccaagaacaagcgctgaagcagcatggagagattatggtgaagtaattctttgtgacactgatgaagaaatagtgaaaattagtgacgaatatgcacctgaacatttagaagtacagaccgaaaacttagaatggtttcatgaaagattaacaaattatggttcgttgtttgtgggtgaagaaacaactgttgcatatggcgataaatgttctggtacaaatcatatcttaccaactaaaggtgcaggaagatacacaggcggattatttgttggaaaatttattaaaactttaagctttcaaagaatgacaaaagaatctactaaattagttggtgctgctgcagctagaatttctagatatgagggaatggaagctcatgcaagaacaggagatgtaagacttagaaaatatggtttttctaattaat

SEQ ID NO: 205775 - DNA, 1255 bp, Unknown
  Bacterial polypeptide expressing nucleotide sequence isolated from the Sargasso Sea
atgactataaaatatttgaaaaaagcaattaaaactccatctactgatgataacaagactagagctgctgttcaaagcatacttgatgatatcgaaaaaaggagagaagaaggtataaaagaaattactaaaaagtttgataaatatgatggtgaaataattgtatcaaaagagaaaatcgaagaagctattaaaaaagtcgatcaaaaaacaaaagatgacgttcaatttgctcatgaaagaattaaaaaatttgctgaacaccagcttaagagcatgaataatgaattcgaagtggaactttcaaaaggattatttgcaggtcaaagacttattccggttaacacagcaggctgttatatacctggaggacgttatgctcatatttcatctgcaacgatggcagttactccagctaaggtcgctggcgtaaacacaataatttgtgcaagtccaccaaaagataagaatggagctcaccctggaattatttacgcagctaatctttgtggagctgacataatattaaatttaggtggtgtagcagcgataggtgcaatgacctatggatgtttcggcaatcctccggttgattttttggttggagctggaaatcagtatgtagcagaagctaaaagaatagtttacgggcaagttggaatagatcaattcgctggcccaacagaaatagctataattgcagataaatctgcagataaagaaattgttgcagcggatatagttggtcaggctgaacatgggtacaattctcctggatggttatttacaacagataaatctttagctgattatgtaatgaaaagaataccagaattaataaatgaattgccagaacttccaaaaacaagcgccgaagctgcatggagagattatggcgaagtaatactttgtgattcaaatgaagaaatggccaaaataagtgataagtacgcatctgaacatttagaagttcatgctgaaaatttagattggtggttaaaaagactaaaaaattatggatctttatttttaggtgaagaaacaacagtagcttatggagataaatgttccggtacaaatcatatcttgccgacaaaaggtggcggtagatatactggaggattgtttgttggaaaatttataaaaacattaacttttcaaagaatgacgaaagaagctaacaaaattgtaggagcaactgcagctagactaggtagagctgaaggaatggaagcacatgctagaaccggagata

SEQ ID NO: 205776 - DNA, 1271 bp, Unknown
  Bacterial polypeptide expressing nucleotide sequence isolated from the Sargasso Sea
taaaaaatcccctaaaacatcttctacagatgatactaaaactactgagatagttaacattttattaaaagaaattgaaaattcaaaagaagatgcatgtatcaatttaactaaaaaattcgataaatacgacggtgaaattattgtttctaaagaaagaattgaaaagatcaaaaaagagttagatcaaaaaacaaaagatgacattcaattttctcatgaaagagtaagaaaatttgctgaagcccaattaaaaaactatggtcaagattttgaagtagaactttctccaggattgtttgctggtcaaaaattaataccagtcaacactgctggctgttatatacctggcggacgttacgcacatatagcctctgctgttatgagtgtaacaacagcaaaagttgctggagtaaaaaatattattgcctgtagtcctcccaaagaaggagttggagctcatccagcaattgtttatacagctgatttgtgtggtgctgatgtaatactaaatttaggtggagtccctggcattgctgcaatgactaatggactatttaaaaatccacctgcagatatcttagttggtccaggaaatcagtttgttgctgaggcaaaaagaattttatttggaaaagttggaattgatttatttgccggtccaacagaaattgctgtaattgcagatgacaaagctgatgctgaaatggtagcggtagacttagttggtcaagctgaacacggatataattctcctgcttggttatacacaaccagcaaaagactagctgaagaagtattaaaaagagttcctgaattgattgctgaattacctgaagttccaagaacaagtgctgaagcagcatggagagattatggtgaagttatactttgtgatactgatgaggaaatggcaactataagtgatgagtatgcacctgaacatctagaagttcaaactcaaaatcttgaatggtttcataaaagattaaaaaattatggttcactatttattggtgaagaaacaactgttgcttatggagataaatgctctggcacaaatcatatcttacctacaaaaggtgctggtcgttatacaggtggattgtttgtaggaaaatttattaaaacattaagttttcaaagaatgacaaaagagtctacaaaatctgttggagcagcctgtgcaaggatttcaagatacgaaggtatggaagctcacgctagaacaggtgatgcaagactgagaaaatacggtttttctaattaat

SEQ ID NO: 205777 - DNA, 1324 bp, Unknown
  Bacterial polypeptide expressing nucleotide sequence isolated from the Sargasso Sea
tatgactattcaatatttgaaaaaaggaattgctgaacaagaacgatcagctgagaatgataaagttaaaaacattgttgaagaaacattaaaaaaaatagaacaacaaggtgaccaatatgttagagaattgtcagagaaatttgataattattccccaacaagttttaggttaatagattccgagattcaaaatttaattagtaaggtatctgaagatgacattgaggacatcaaatttgcgcaaaaacaaataagacaatttgcagaagcacaacttgcaacattaaaggaattagaagttgaaacactacctggagtgatattaggtcacaaaaatattccagtacaatcagttggctgttatgttcctgcaggaaaatttcctatggtagcatccgcacacatgtctgtagtaacagcatctgttgcagatgtccctagaatagtagctactacatctccatttcaaagcaaacctaatccagcagtaattgcggctatgcatttaggtggagcccatgagatatatgtattaggtggtatgcaaggtataggtgcaatggcaataggaactgaaacaataaaaccagttgatatgcttgttggtcctggtaacgcttatgttgctgaagctaaaagacaattatttggaaaagtggggattgatttatttgctggcccaacggaaacaatggttattgcagatgatactgtagatggagaattatgtgctactgatcttttagggcaagctgaacatggatataattcacccgcagttctaattacaaattcaaaaaatttagcagagtctactctattagagattgaaagaattcttcaaattttaccaactaaagaaacagcaagtataagttggagagattacggtgcagttatactttgtgattcgtacgaagaaatgcttgataaagcaaatgaaattgcctcggaacatgtgcaagtgatgacaaaaaaagatgattggtttttggaaaatatgaaatcttacggtgcattatttcttggcccaagaaccaatgttgcaaatggtgacaaagtgattggaacaaaccataccctacctactaaaaaagccggacgttatactggcggattatgggtgggtaaatttatcaaaacacacacatatcaaaaagttttaacagatgaagctgcgaccttaataggtgagtatggctctagactttcatatttagaaggttttcttggtcatgccgaacaatgcaacatacgtctaagacgttatggcggaagaaatatagaatatgcaaaagcagcaaaaaaaattaaaaactag

SEQ ID NO: 205778 - DNA, 507 bp, Unknown
  Bacterial polypeptide expressing nucleotide sequence isolated from the Sargasso Sea
aatgaaaaaaataattaatacaagcaattcaggcttttcacaagaatttgaaaatttagtaaatactaatagatcagatgacaaagatgtaaaagatgttgtagctaatataataaatgatgtaagaaccaacggtgatgatgctttaataaagtatactaatcaacttgatcgcaatgaactttcaaaatcaaacttcattttagacgaaactgcaatcaacaatcagacagatggattatctgaaaagatatgcgaggctattcaaacagcggcagatcgagttagggcataccatgaaaaacaattaccacaggatttaagttttaatgacgatctaaaatctactcttggatatatgtggaagcctttggaaacagcagggatatatgtaccaggtggaacagcaagctaccctagtacagttcttatgaattcaataccggctatggttgcaggtgtaaaagacatagtaatggccacaccattaactgacgggcaaattaa

SEQ ID NO: 205779 - DNA, 676 bp, Unknown
  Bacterial polypeptide expressing nucleotide sequence isolated from the Sargasso Sea
atgaataaaatagatttaaaagataaagttgcaatcgttacaggaggagttcagggctttggattagctgtggttgaaaggttccttaattctgatgctaacgtagttatatgggagaatgacaaaaagttattggataaatttcaaacaataagtaatgtccataaaattcaaactgatgttagtaatgcagaaagtgtagaagctgctgtaaatgaaactataaataaatgtggaaggatcgatattttagttaataatgcaggaatagctggaccaaaccataaaacatgggaatacccaaatgaagattggcaaaaagttattgatattgatttaacaggtgtgttttattgctgtaaatatgttgtacctcagatgataaaaaataattatggtagaatagtaaatgttgcatcaatagctggtaaagagggtaatccaaatgcaatgccatatagtgctgctaaagcgggtgtaatggcaatcacaaaatctctaggcaaagaacttgcagataaaaatatcgcagtaaattgcattactccagcagctgctaaaacaagaattttcgatcaaattagtcaagagcatattgattatatgttatctaaaattcctagaaataggtttcttaaagttgaagaattagcttcaatggttgcttggctagttt

SEQ ID NO: 205780 - DNA, 1249 bp, Unknown
  Bacterial polypeptide expressing nucleotide sequence isolated from the Sargasso Sea
aatgaaaatactatcagatgtagaatcaacacttgaatatataaaagaacttagaaaaagtacatactctaatatattaactagtggtaatggtttttttgaaaaagattattctgttgaggaatatgtaaaaaaaattatggatatgactaaacttaatggcgatgattttttgtttgaattaagttcaaaattagatgatgaacaatttgggaatctacaaatatcagaaaaagaattaaaaaattcagttgatcggatatcaaaagaagaaagaaatattcttgaaaatactatttcaagaatcgaaaattttcaaaaaaagacattaataaagaactggtttgatgaaaaaaatgggtatggagaatatatcaaacccataaaatctgtaggttgctatataccaggtggaactgcacctcttatttctactgttctacatacagttattccagctaaagtagcaggagtaaaacagatatctattgcttcccctgctacaggtattgaaatgccaaataatatgctacttgcagcggcttatctatcaggagttgataatttttatacatatggagggcctcaagcgataattagtatggcagttggaactaaaaaagtttctaaagttgatatgatatgtggcccaggaaatatttttgtaatgacagcaaaaaagcttgtatatggagaggtcggattagatggaatatttgggcctactgaaactatgattgttgcagacagttcctcaaatatagaatatgttgttggggatttgatggctcaagctgaacatgatgtgcttgctcttcctatgatggctaccaatagtctagaatttgcaaaagacatccaatttttctataaaaataagcttaattcaatgaaaagaaaacatattattgaaaagtcaatgaatcgaggatttatttcagttttacaagatgaaaaagagataattgaattagtaaatcaagtagcacctgaacatttatctatagcatcagaaaagttaataaatatatctgaaaaaattgattctgctggttctatatttcttggagaaatttcttcagaagtattagctgattatgtagcaggtcctagtcatgttatgccaactaatggttccgctagatattcttcttcattatcatcaagaacttttcagaaatctatccctgtcttggcaattgataaaaaaacatttaaagaaatatgtaatgatgcagaaaattttgct

SEQ ID NO: 205781 - DNA, 1291 bp, Unknown
  Bacterial polypeptide expressing nucleotide sequence isolated from the Sargasso Sea
atgctggaaattagagaactagaaaaaaatcaagagaactttgaaagcaagttttcctcttttttaatttcaagaaataagatatccaatgaaataagtgtgatcgtaaataaaataatcaatgaagtaagagaagatggagatcaagctttaaggaaaatcacaaaaaggttggatgattttgattgcccaacatttcaagttactgaaactgaaatcaatacagccttaaaaagttttgacaaagaattgttacattcttttgagtttgcatttgaacaattattggaatatcaaacatcttgttttaattctttggacctaaagaattctaatgaacaaattactagaaagtttagagttctcgattccgtaggtatgtatgttccaggaggtaaagcttcttatccctcaacagttttaatgggcgcagctcctgctattgcttgtggtgtcgaagagatatccttgagctcaccaactcagcatggtgttcttaatcctgcaactcttgcagcagcaaaagtaactggcattaaaaagatatataagttagggggcgcgcaggcaatagccgccttagccttaggaaccaagcaggtcgataaagtagataaaataattggcccaggtaatgtttatgttgctgaagcgaagaaacaactttttggtgaggtgggtatagattctatagctggaccttcagagattgttattttatgtaatgaaacctctgatccagagactgtagcatgggatcttatggcacaagctgagcatgattctgatgcatcttccatcttaatttcaacttcagaagagcttattagcgaagttaaatcattgatagctaagaatatagatactttatccagatccaagataattacagaatccctggtttctaatggattgatagtgaaaatcgataaactttcagaagctgaaaaacttgtaaaccagttaattcctgagcatttacacatagcctttgagcagagatttgaagaggaggagaatttaaaggcaggtttaattctcaagggaaaagattctgcagtgtccttatcagactatgttttaggtcccagccatatcttgcctacaagctcctcagctagatttagctctccactatcagttgaagattttttggttagtttcagttatgtctcgctagaccgaaacaataacccagatatttttgataaatacataaaacacacatcaaatattgcaagagcggaagggttgactgcacatgcaatagcagctgaaaaaagaaagtaat

SEQ ID NO: 205782 - DNA, 1150 bp, Unknown
  Bacterial polypeptide expressing nucleotide sequence isolated from the Sargasso Sea
atgacaattacatatttaaaaaaatcaccaaagacttcatcaacagatgatactaaaaccacagggatcgttcaggatcttttaaaagatttagacaatactaaagaacaaggttgtattgatctaactaaaaaatttgacaagtatgatggtgaaatagttgtttcaaaagaaagaattgaagaaataaaaaaatccttagaccaaaaaacgaaggatgatattcaattttcatttgatcgagttcgaaagtttgctgaagctcaattaaaaaactatggccaagatttcgaagttgaattatcagatggcttatatgctggacaaaaattgatacccgtaaatacagctggttgttatatccctggcggcagatatgctcacatagcctctgcggtgatgagtgttaccactgctaaagttgctggagttaaaaatattattgcatgcagtcctcctaaagagggtgtgggtgctcatccaactatagtttataccgctgatttatgtggagcagatgtgattttaaatcttggtggtgttccagctattgcagcaatgacaaatggtttatttaataacccccctgcggatattattgtaggaccaggaaatcaatttgtagctgaagcaaaaagaattttatttggaaaagtgggtattgatttgtttgctggaccaactgaaattggaattattgctgatgctaaagccgatcctgaaattgtagcagttgatttagttggccaagctgaacacggttataattcaccttgttggttatatacaactagtaaagaacttgcagaaaaagttataaaaagagttccagaattaattgccgaacttcctgaagtcccaaggcaaagtgcagatgctgcttggagagattacggtgaagtaattttatgtgataccgacgaggaaatggtaaaaattagtgatgagtacgcaccagaacatttagaagttcaaacaaaaaatttgaaatggtttcatgaaagactaaccaactatggatcactgtttgttggagaagaaactaccgttgcttatggagataaatgttcaggaacaaaccacatattgccaactaaaggtgcaggaagatatacgggtggtttatttgttggaaaatttataaaaactt

SEQ ID NO: 205783 - DNA, 751 bp, Unknown
  Bacterial polypeptide expressing nucleotide sequence isolated from the Sargasso Sea
tggtgtgcaagctattgcagcaatgacaaacggtttatttggaaatgcacctgcagatattttggttggacctggaaaccaatttgttgctgaagcaaaaagaattttatttggaaaagttggtatagatttatttgctggtccaacagaaattgcagttattgcagacgaaacagcagatcctgaaatggttgcgtatgatttagttggacaagcagaacacggttacaattctccagcttggttatttactaaaagtaaaaaagttgcagactatgtaatgcaaagagttccagaattaattgcagatttaccagatcttccaagagaaaattcaggtgctgcatggagagattatggtgaagtaattctttgtgataccgatgaagaaatcgctaaagttagtgatgaatacgctccagaacatttagaagtccaaactaaaaatttgaaatggtaccacgacagattaaaaaattatgggtctttattcattggtgaagaaacaactgtagcctatggagataaatgctcaggtacaaatcatattttgccaacaaaaggtgctggtagatacactggtggtttgtttgttggaaaatttattaaaacattaagtttccagagaatgagtaaagcagctacaaaagaggtcggtgctgcttgtgcaagaatttctagatacgaaggaatggaagcacatgcgagaacaggtgacgtgagattaagaaaatatggattttctaattag

SEQ ID NO: 205784 - DNA, 844 bp, Unknown
  Bacterial polypeptide expressing nucleotide sequence isolated from the Sargasso Sea
tgcaaaacttgctaaggtgagaagaataattttgtctacacctaaaattgatggaaaattaaatgctggagtactctatgcagcaaaaaaagttggaattaaagaaatcatatcttgtgggggcgcacaagcaattgcatgtttggcttttatatataaatgtaacaaaatagttggaccgggcaataaatatgttgcagaagctaaaagaatattatctggcaaaatagttggaacagaagcagggtttaatggtccatcagagatatgtgtattagcggataagtattcaaatattaatcaagttgccagttctcttatatcccaagcagaacatgatgtagatagtcaatgcattttggtaacgaaagataagaacttaatcaaaaaggttaataaaaaaataattgaattgataaaaaatttaccaagaagaaaaattgctatgcaatctttaaaaaaaaatggaattatagttaaagttaaaacagataaacaaattatagatattttgaactgtataagtactgaacatttagaactcttagtaaaaaattataataaatatacaaaaaaaatatataatgcaggtagtattttaaatggagaatattctcccatgtgtgcgagcgattttacagttggaacaaaccatgttttaccaacctcaggctcagcaaagtttagttcaggtctaaatattaatgattttgttaaaaaaatatctatagttactttaaccaaaataggggtggcaaaaattgcaaatcaagctataacacttagtgagtttgaaggtcttagaggccacactcaaagtataaagtctagaataaggagataa

SEQ ID NO: 205785 - DNA, 835 bp, Unknown
  Bacterial polypeptide expressing nucleotide sequence isolated from the Sargasso Sea
tcacccaaaccagaaataggagttcatccatcaattgtttatactgctgacttatgtggtgcagatgtgataatgaatttaggtggggttcaagctatagctgcaatgacaaatggactatttggaaatgctccagcagatattttggtaggtccaggaaatcaatatgtagctgaagctaaaagaatattgtttggaaaagttggtatagatttatttgcagggccaacagaaatagcagtaatagctgatgaaactgctgatcctgaaatggtagcttatgatttagtaggtcaagcagaacatggatataattcaccagcatggctttttactacaagtaaaaaaattgctgattatgttatgaaaagagttcctgaattaatcgctgatttaccgaaattaccaagagaaaactcagaagcagcatggaaaaattatggagaagtaattctgtgtgatacagatgaagaaattgcaaaaattagtgatgaatatgctccagaacatttagaggttcaaactaaaaatcttaattggtttcataaaagattaaaaaattatggttcattatttattggagaagaaacaactgttgcttatggagataaatgttcaggaacaaatcatattttacctacaaaaggtgcaggtaaatatactggaggtctttttgttggtaagtttatcaaaacattaagttttcagagaatgacaaaagaatctacaaaggaagtcggagctgctgcagctagaatttccagatatgagggcatggaagctcatgctagaactggagatgtaagattaagaaaatatgggttttcaaattaag

SEQ ID NO: 205786 - DNA, 1270 bp, Unknown
  Bacterial polypeptide expressing nucleotide sequence isolated from the Sargasso Sea
aatgattaaaatatttgactgtaaaaatccaaactatttatcaaagttaaggcttgtacttgagaaaagaagacatggtaacaaaatcaatacagatcacgtaataaaaattgttaaagacattaaaataaataaacaaaaagcattgataaagtatgaaaaaaaatttagtaaaaatagtaaaataaaaccatcaaagaaagaaataaataattcaataaaatctcttgatcctaaaataaaaaatgcaattgattttgctttttctagaattttgaaattccattcgttacaaaaaatcaataacattaaatatacggataaattaaataacaaaattgaatataaatatattccaattcaatctgttggaatatatgttcctcacaacttaccttcaacactattaatgaatgctattttggcaaaaaaaattgttggagtaaaaagagttgtgcttgcgaatccaagattaaatggaaaattaaatcctgcagtaatgtatgctgcaaaaaaatgtggcatatcagaaattataaatgcgagtggtagtcaagctatagctagtttagcatatattcaaaaagtaaataaaattgttggacccggtaatgattttgttgctagagctaaaaaacaagtttttggtgatgttggaattgaaggaatggtagccggaccgagtgaaattacagttgttgcagacaaaaatacaaatttaaaagaagttttgacatctttgattggccaggcagaacatgatcctaattcacaatgtatattggtgtcaaataataaaaattttattaaatcttttcaaaaaaatttaaaaaatgaattaaataaaataccaagaaaaaatattgctaaaaaaagtttattaagaaatgggttaattattagagtttataataataaacaaatagttgattcaattaatgaaatagcaccagaacatttagaactaaatttaaagaattataaaaaattaattaataaaataattaatgtaggaagtgtttgtattggcaaatactctgcaatggctgttacagattacaatgttggaactaatcatattttgccaacattaggatctgcaaaattttcttctggacttaatgttagtgaattttacaaaaaaataagctacataaaattatcaaaaaaaggcattgaagttattggcaagaaggctataactcttgccgagtatgaaggattaattggtcatgctcaaagtataaaatctagaataaggagaagttag

SEQ ID NO: 205787 - DNA, 756 bp, Unknown
  Bacterial polypeptide expressing nucleotide sequence isolated from the Sargasso Sea
aagaaatttattcatttgggggaccttctgctatagcagcagttgcttatggaactaagaaaattaaaaaagtaaataaaattgtaggacctggcaatgcttacgttacagcagcaaaaaaagaggtatttggagatgtgggaattgaagggatgatagctggaccatctgaagtgacaattgtttgtgataaattttcaaatcctgaatggattgcaagtgatttaattggacaagccgaacatgatttactagctcaatgtatattaatttcaaaagataaaagatttattaaaaaggtaaaaatagaaatttttaaacaattaaaggaaattcctagaaattttattgctaaaaaaagtttaattaataatggaattttaattcatattagttcagataaaaaaattacagatgttataaataaaattgcaccagaacacttagagttaaatgttaaaaactataaatctttagtaaaaaaaattaataatgcaggctcaatttgtttaggaaaatatgcagttatggcaatgacagattataacgtaggttcaaaccatgtattgccaacgaatggttcagcaaaatattctagtggaataagtgttaatgaattttataaaagaatttcttatgttaacttatcaaaaaagggtattgaaagtcttgggccatcagttataactcttgcaaattatgagggtttagcaggacatgcttactcagtaaaaaaaagaattaggagaaaataaa

SEQ ID NO: 205788 - DNA, 1000 bp, Unknown
  Bacterial polypeptide expressing nucleotide sequence isolated from the Sargasso Sea
ctggtgttattctccggtcacaaaaatattcctgttcagtcagttgggtgttacgtaccgggtggtaagttcccaatggttgcttcagctcatatgtctgtattaacagcttcagtcgcaggagttccaagaattgtagcctcagcgccaccagttaatggtcagcctcatcctgcaatcgtagcagctatgaaattaggtggtgcacacgaaatatacgttttgggaggaatacaagcagttgctgcaatggctttaggtactgagacaataaaacctgttcatatgttagttggtccgggtaatgcatttgtggcagaggcaaaaagacaattatttgggagagtaggtattgacctatttgccggaccaacagaaactatggtaatagccgatgaaactgttgacggagaaatgtgtgcaactgatcttcttggtcaagcggaacatggctataactctcctgcatgcttaattactaattctaaaaaattggctcaagatactttaaatgaaattgatagaattttaaaaattttacccacttcagaaacagccaaggttagttgggaagattatggagacattattctttgtgatgatcatttagaaatgctatctgtagccaatgaaatggcatatgagcatgttcaagttatgacagaaagagatgaatggtatttagaaaatatgcattcatatggtgcgctctttttaggccctaggacaaatgtagccaatggagataaagtaattgggactaatcacactttaccaacaaaaaaagcaggtagatatactggaggtctatgggtaggaaagtttttaaaaacacatagttatcaaaaaattaaaactgacgatgcagctgttaaaattggagaatatggtcacagactttgcatgctagaaggtttggtaggacatgcagagcagtgtaacttaagagttcgtcgttatggtggaaaaaatataccatttggtagtgcagctgagtaaa

SEQ ID NO: 205789 - DNA, 568 bp, Unknown
  Bacterial polypeptide expressing nucleotide sequence isolated from the Sargasso Sea
tgataaagatacaaacgtaaatcaagtggtaacttcattagtttctcaagctgaacacgattctaatagtcaatgtatattggtaaccaaagataaaaaaattatcaataatgttaaaaaaggtatattaatatctttaaaaaatttaccaagaaaaaaaattgcagccagttcaataaaaaaaaacggattaatagttaaagctaataacgacaaacaaataattgatgtaattaatgaaattgctcctgagcatttggagttaaatgtgaaaaattatactaaatatagtaagaaaatttttaattcaggcagtatatgtaatggaagatatacgcctatgagtgtttcagattataccgttggaaccaatcatgttttaccaacattaggatcatcaaagtttagttcaggactaaatattaatgaatttattaaaaggatatcagttgtaactcttaccaaattaggggtagaaaaaattggaaatccagctataactctttccgagtttgaacagttagatggtcatgctcaaagtataaaatctagaataaggagaaattag

SEQ ID NO: 205790 - DNA, 1280 bp, Unknown
  Bacterial polypeptide expressing nucleotide sequence isolated from the Sargasso Sea
taaatacttaaaaaaagccgtcaaaactgcgtcaacagatgatacaaaaactcgagatatagttcaaaatttattatctgaattagaaaaatctaaagaagatggttgtaaagaacttacaaaaaaatttgataaatttgatggagagatagttgtttctaaagaaaaaattaatgaaataaataagtcgctaaatcaaaaaactaaggatgatattcaattctcatatgaaagagtaagaaaatttgcagaagcacaactgaaaaattatggacaggattttgaggtagagctttcaaaagggctttatgctggtcaaaaattagttcccgttaatactgcaggatgttacatacctggtggaaggtatgcccatatagcgtcggctgttatgagtgtaacaactgcaaaagttgctggtgtaaaaaatataattgcttgcagtcctccaaaagaaaaaatgggtgctcatccagctattatatatactgcaaatctttgtggagctgacgtgattttaaatcttggtggcgttccagctattgcagcaatgacttatggattatttgggaatgaacctgcagatatattagttggacctggtaatcaatttgttgccgaagcaaaaagaattttatttggaaaggttggtattgatttgtttgctggaccaacagaaattgcaattatagcagacgaaactgctgacccagaaattgttgctgtagatttagttggacaagcagaacatggatataattcaccagcatggctttacacgacaagtaaaaagcttgctgagcaagttatgaaaagggttcccgaattaatttctgaacttccagaattaccaagaacaagcgccgaagcagcttggaaagattatggtgaagtaattctttgtgacactgatgaggaaatggcaaaaataagtgatgaatatgctccagaacacttagaagtacaaacaaaaaatctaaaatggtttcatgatcgtctaaaaaactatgggtcattatttattggtgaagaaaccactgttgcttacggagataagtgttcaggtacaaatcacattttaccaacgaaaggtgctgggaaatatactggtggtttgttcgtaggaaaatttattaaaacattgagcttccaaagaatgactaaagagtccacaaaagaagttggtgccgcagctgctagaatatcaagatacgaaggtatggaagcacacgcaagaactggtgatgttcgattgagaaaatacggatattcaaattaag

SEQ ID NO: 205791 - DNA, 1143 bp, Unknown
  Bacterial polypeptide expressing nucleotide sequence isolated from the Sargasso Sea
tgaaggtgatgttattggtttcccaagaaaaaattgaaaaagttataaaatcattagatcaaaaagtaaaagatgatgttcagttctcctatgatagagtacgcagttttgcagagcatcaactaaagcatcttaataatgattttgaagttgagttatctccaggtctttttgctggtcaaaaattaattccagttaacagtgttggttgttatgttccagggggtcggtataataatattgcctccgctgtaatgagtatcacgactgctaaagttgctggtgttaaaaatgtaattgctgctagtcccccaaaagatgaaaatggtgctaatcctataattatttatacagcaaatttatgtggtgctgatgtgattatgaattgtggtggaataggagcaattggtgcttttgcttatggatgttttggcaatccagaagttgacatgatcgttggtccaggaaaccaatacgtagcagaggcaaaaagaattttatacggaaaagttggaattgatttatttgcaggaccaacagaaattggcattattgcagatcatactgctgataaagaaatgatcgctgttgatcttgttggtcaagctgagcacggtccaaattctcctgcatggctctatacaactgataaagagttgtgtgattatgttatgaagagagtaccagaattaattgctgaacttcccgaaacatcaaaaaataatgctgatgctgcttggcgtgattatggtgaagttgtgttgtgtgatactaacgaagaattatgccaagtaagcgatgaatacgctcctgaacacttagaagtacaagctgaacacttggattggtggttagataaattaaaaaactatggatcattatttttaggagaagaaacgacagttgcttacggcgataaatgttctggaactaatcacattcttccaaccaaaggagctgcaaaatatactggtggtttgtttgtaggtaaatttatcaaaacagttacctttcagcgcatgacaaaagaatcaaataaagaagtgggtgctgcagcagctagaatttcacggttggaaggaatggaagcacacgcacgaactggtgatgcgcgattaagaaagtatggttttcaaaattaaa

SEQ ID NO: 205792 - DNA, 763 bp, Unknown
  Bacterial polypeptide expressing nucleotide sequence isolated from the Sargasso Sea
atgaatattggtggtattggagcgattggagcttttgcttacggatgttttggtaatccagaagttgatatgattgttggtccaggcaatcaatatgtagcagaagcaaaaagaattttgtacggcaaagttggtatagatttatttgcaggaccaactgaaataggtattattgctgatcatactgctgataaagaaatgattgctgttgatttagtagggcaagcagagcatgggcccaactccccagcttggttatattccactgataaaaaattatgtgactatgtgatgaaaagagtccctgaattaattgctgaacttcccgaaacatcaaaaaataatgctgaagcagcatggcgagattacggagaagttattctgtgtgatacgaatgaagagttatgtgagattagtgatcaatatgcacctgaacatttagaagtacaaacagaaaacttagattggtggcttgaaaaattaaaaaattatggatcgttatttttaggtgaagaaacaaccgttgcatatggagacaaatgttcaggcactaatcatatccttccaacaaaaggggcagcaaaatatacgggtggtttgtttgttggtaaatttattaaaacagttactttccaacgtatgacaaaagaatcaaataaagaagttggcgctgctgctgctagaatttctcggttagaaggaatggaagcacatgctagaacaggtgatgcacgtttaagaaaatacggatttcaaaattaaa

SEQ ID NO: 205793 - DNA, 1288 bp, Unknown
  Bacterial polypeptide expressing nucleotide sequence isolated from the Sargasso Sea
atggctaaatggctgaaacaggcaatcagcaaacaggacaaagacgaagctcaacagcaggtcagggagaccgtagagaaactgctggctgatattgaaacccgtggagatacggcggtacgagaactgtcaaaacggttcgacaactgggaaccggaaaaattcaaactctccgaggaacaaatccaggaatgcatcaaccgtctggacacgagaaccctggatgacatccgttttgcccaggatcagattcgtaacttcgcacaactgcagcgtgattcgatgaaagatgtcgaagaggaaacccttcccggggtgatcctcggccaccgacacattccaatgaatcgggtagggtcctatgtgcccggtgggaaattcccgatggtcgcttccgcccacatgtcggtggtgactgcaaaagttgcaggggtcaaggatatcatcacctgcgcaccgccctaccagggcaaacccgcggacgctatcgtcgcagctcaatccatggggggtgcagatgggatttatgtgatcggaggtgtgcaggcggtggcagcgatggctttgggcaccgagagcattcccgccgtggatatgctggtcgggcccggaaacgcctatgttgccgaagcaaagcgacaactctacggcagggtcgggatcgatctttttgcaggaccgaccgaaaccctggtgattgcggataaaaccgtcgatggagaaatgtgtgccaccgatctgctgggccaggcggaacatgggccaacctcccccgccatcctgctcacgaattctgaaattctggcaaaacaaaccatggaagaagtcgaccgtcagttaaacaccctttcaaccagcgacacggcagctcctgcctggagggattatggacaggtgatcgttgcggattcctatgacgaaatggtggagattgccaatgaccttgctttcgaacatgttcaggtaatgaccgaccgtgatgactggttcctcgagaacatgagcaattacggctcgctatttctcggcccaaggaccaatgtttcctatggggacaaagtgatcgggaccaatcacaccctgcccaccctcaaggccgcgcgttatactggaggcctctgggtcgggaaatacatcaaaacctgcacctatcagaaattgctgaccgacgaagcaaccgtcaaaatcggagaatactgctccaggctctgtgagcttgagggttttgctgggcatcaggaacaggccgatctgcgtgtgcgaagataccgtaaagaggccgcgtgag

SEQ ID NO: 205794 - DNA, 511 bp, Unknown
  Bacterial polypeptide expressing nucleotide sequence isolated from the Sargasso Sea
atgattgaaaaaattataaatccacctagagagaagtggaaaaagataaatacccgtccaaattattcatctcaacttattgacaataaagtaaaaaaaatttttatgtcagtcaaaaaaaatggagataaagctctttttagatatgctgaaaaatatgaaggtgttaagctaaaaaaattaaatgtaaaacaagaaaatattcaaaactctaaaaatctaatctcagaggatttaaaaaactctataaaaattgcaaaaaagaatatcgagaagtttcatagatcccaaaaatcaaaatcagatcatataatcattgaaaaaggaattgagtgttggctagagaaacgcccaattgaaaaagttggtttatatattccaggtggttcagctcccttattttcaactattttaatgttggctatccctgcaaagattgttggatgtgatgaaattattatttgctctcctccaaaccgggagggtaaaattccagcagttattttgtata

SEQ ID NO: 205795 - DNA, 552 bp, Unknown
  Bacterial polypeptide expressing nucleotide sequence isolated from the Sargasso Sea
aatgattaaaatattaaatacaaaatcaaaagatttcaaaaagaaatttaattactatttaaatataagaagaaaatattcctcaagcaagataagtgtcgtaaaaaaaatcgttaatgacgtgaagaaaaataaagataaatcattaattaaatatgagaaaaaatttaacaatattaaaagtttgaatgtaaataaattattttattcaaaaaatgagattgaaaaaagtgttaaaacattagacaaaaaaattaaaaattcaattgatatagcttttaacagaatattttattttcataaaaatcaaaaatttaaaagttttaaacttaaagataatttcaataattctttaagctatagatcaaaaccaattaataagataggagtatacgttcctggcggcagggcaagctacccaagttcagttttaatgaattgcataccagctttgattgctggagttaaagaaatttatatgacagtgccttctataaataaaaaaataaatccgggggttttatatgcagcaaaaaaattaaagttaaaaag

SEQ ID NO: 205796 - DNA, 1288 bp, Unknown
  Bacterial polypeptide expressing nucleotide sequence isolated from the Sargasso Sea
atgacaattacatacttaaaaaaatcaccaaagacttcatcaacagatgatactaaaaccacagggatcgttcaggatcttttaaaagatttagacaatactaaagaacaaggctgtattgatctaactaaaaaatttgacaaatataatggtgaaatagttgtttcaaaagaaagaattgaggaaataaaaaaatccttagatcaaaaaacaaaagatgatattcaattttcatttgatcgagttcgaaagtttgctgaagctcaattaaaaaactatggccaggattttgaagttgaattatcagatggcttatttgctggacaaaaattgatacccgtaaacacagctggttgttatatccctggcggtagatatgctcacatagcttctgcagtgatgagtgttaccactgctaaagttgctggagttaaaaatattgttgcatgcagtcctcctaaagagggtgtgggtgctcatccaactatagtttataccgctgatttatgtggagcagatgtaattttaaatcttggtggtgttccagctattgcggcaatgacaaacggtttatttaataaccccccagcggatattattgttggaccaggtaatcagtttgtggctgaagcaaaaagaattttgtttggaaaagtgggtattgatttgtttgctggaccaactgaaattggaattattgctgatgctaaagcagatcctgaaattgtagcagttgatttggttggccaagctgaacacggctataattcaccttgttggttgtatacaactagtaaagaacttgcagaaaaggttatgaaaagagttccagaattaattgccgaacttcctgaagttccaaggcaaagtgcagatgctgcttggagagattacggtgaagtaattttatgtgataccgacgaggaaatggtaaaaattagtgatgagtacgcaccagaacatttagaagttcaaacagaaaatttaaaatggtttcatgaaagactaaccaactatggatcattgtttgttggagaagaaactaccgttgcttatggagacaaatgttcaggcacaaaccacatattaccaaccaaaggtgcaggaagatatacaggtggtttatttgttggaaaatttattaaaactttgagttttcaaagaatgacaaaaaattctacagaattagtaggtgcagctgctgcaagaatttccagatacgaaggcatggaagcacatgcacgaactggagatgttagactaaaaaaatacgggttttcaaaataat

SEQ ID NO: 205797 - DNA, 925 bp, Unknown
  Bacterial polypeptide expressing nucleotide sequence isolated from the Sargasso Sea
atggttgcatcagctcacatgtcggttttaactgcgtctgtcgctggggttccccgcataattgcatcagccccaccagtaaatggagagcctcatcctgctattgtggctgcaatgcatctaggtggtgcacacgaaatttatgttatgggtggaattcaagcagttggggctatggccctagggactgaaactattgacccggttcatatgttggtgggccctggaaacgcgtttgttgctgaggcaaaacgtcagctctatggacgagttggtatcgatctttttgctgggccaacggagacaatggtaatcgcagacgaaacagttgatgctgaattatgcgcaacagatttattgggtcaagcagaacacggctataattcacctgccgccatgataacatgtagtgaaagattagcccgagaaacattagttgaaatagagcgaatactggaaattcttcctacctctgaaacagcatctgcaagttgggagaattatggtgatatgatactttgcgatacacacgaagagatgctttctgttgcaaacgatatggcatatgagcatgttcaaattatgactgatcgtgatgattggtaccttgaaaatatgcattcttacggagctttatttctcgggccgcgtaccaatgttgcaaatggtgataaagtcataggcacaaaccatacactaccaactaaaaaagcgggccgatatactggtggtctttgggtaggcaagttcttaaaaacgcatagctatcagcgtattgaaacggacgaagccgcgaagttagttggtgaatatggttctcgattatgcatgcttgagggctttgttggccatgctgaacagtgcaatgtgcgcgtccgacgttatggaggcaaaaatgttccctatggagcagctgcagagtaat

SEQ ID NO: 205798 - DNA, 888 bp, Unknown
  Bacterial polypeptide expressing nucleotide sequence isolated from the Sargasso Sea
tatggcaagttggttaaaagaaggtatcactgaagtggaaagagaggaagcagacgcacaggtaaaggctactgtcgaagatattctaagtgacattaagtcaaggggagatgaagcactccttgaatactcccaaaagtttgataattggaaaccagctaaatttagactgtctcgtgaggaaatagacgagtgttattcaagagttaccgaacagaatattgaggatattaagtttgcccaggcacaaattcgtaaatttgctgaaattcaaaaggcagcactccaagatgtcgaagaagagacctttcccggtgttattcttggacataaaaatatccctgtgaattcagtgggatgttatgttccaggtggaaagtatcctatggtagcctctgcccacatgagtgtggtaactgctaaagtggctggcgttaaaagaataatagcttgtgcacccccctatgagggagagccagcggcagcaatcattgttgcccaagatctggcgggggctgacgaaatatattgtataggtggtgtgcaggcaatgggagcaatggcattgggaactgagcaaattgcatcagttgatatgctggtgggtcctggcaatgcatatgttgctgaggccaagagacagttatttggtaaggtaggtatcgatttgctagcaggtccaacagagacactcttgattgctgacgatactgtagacggtgaattgtgcgcggcggatcttttgggtcaggcggagcatggcccgacaagtccagctatacttgtaactaattctaaaaaacttggagaggaaacaattaaggaggtggatcgtcagttggagacgctagctaccgcatctgttgcgagtgaggcatgggagcgata

SEQ ID NO: 205799 - DNA, 595 bp, Unknown
  Bacterial polypeptide expressing nucleotide sequence isolated from the Sargasso Sea
gtaatagctgacgaaactgccgatccagaaatagtcgcttttgatttagtcgggcaagcggaacatggatataattcaccagcttggctttttacaacaagccagaaacttgctgatgaagttatgaaaagagttccagaattaatcgctgatttgcctgaattacctagaacaagttctgaagctgcttggagagattatggtgaagtaattttatgtgatacggatgaagaaatggcttcaatcagtgatgaatatgctccagaacatttagaggttcaaacaaaaaaagataaatggtttcatgaaagattaaaaaattatggatcattattcattggagaagagacaactgtagcatatggagataaatgctcagggacaaatcatattcttcctacaaaaggtgctggcaaatatactggcggtctttttgttggaaaatttattaaaactttaagttttcaaagaatgactaaagaatctactaaggaggttggagcagctgcagcaagaatttctagatatgaaggtatggaagcgcatgctagaactggcgatgttagactgagaaaatatggttattcaaactaac

SEQ ID NO: 205800 - DNA, 478 bp, Unknown
  Bacterial polypeptide expressing nucleotide sequence isolated from the Sargasso Sea
aaccataatttaattaaatctgtaaaaaaatttttagctaaagattttagtagcatacctagaaaaaaaatgcaaaaaaaaagtcttacaaaaaatgggttaattgttaaggtttataatgacaaacaaataattgattcaattaatgaaatagcaccagaacatttagagttaaatttaaaaaactataaaaaattaattaagaaaatttataacgtaggaagtgtttgtgttggaaaatattctgcaatggctgttacagattatagcgtaggaacaaaccatgttttacctacactcggctcagcaaaattttcttctggattgaatgttggtgagttttataaaaaaataagctacataaaattatcaaaaaaaggcattgaagttattggtaagaaagctataactcttgccgagtatgaaggtttaattggtcatgctcaaagtataaaatctagaataaggagaagttaga

SEQ ID NO: 205801 - DNA, 337 bp, Unknown
  Bacterial polypeptide expressing nucleotide sequence isolated from the Sargasso Sea
ttcccctgctcaaatggaatcttaaacacactgacaatagctgctgcaaaagttgcaggcatagaaacaatttataggattggtggagctcaggcaattgctgctttagctataggaacaaatcagatttcaaaggtagataaaataattggtccgggaaatatatttgttgctgaggcaaaaaaacaactttttggcgaagtaggtattgattcaatagccggtccctctgaaattcttattcttgcagacagctcttcaaatccagaaacaatagcttgggatcttatgagctcaatcctgaacacgcacttaggatgcatctgtgtgttttgat

SEQ ID NO: 205802 - DNA, 889 bp, Unknown
  Bacterial polypeptide expressing nucleotide sequence isolated from the Sargasso Sea
aatgagtgtgacgacagccaaagttgctggtgttaaaaatattatagcgtgtagcccaccaaaagaaggagttggtgctcaccctactattgtctacactgctgatctttgtggggcagatgtaattttaaacttgggtggtgttcctgcaattgctgcaatgactaatggattatttaaaaatcccccagcagacataattgttggtccaggaaaccagtttgtggctgaagcaaaaagaattttatatggcaaggtaggtattgatttatttgcaggtccaactgaaattggaataattgctgatgcaaaagctgatccagaaatagttgctgttgatttagtaggccaagcggaacatggttataattcaccatgttggctgtatacaactagtaaagaattagctgagaaagttatgaagagagttccagaattaattgcagagttaccggaggttccaagaactagcgcagaagcagcttggagagattatggtgaagtaattctttgtgacactgatgaagaaattgtaaaaattagtgatgaatacgctccagaacatttagaagttcaaacagaaaatctaaaatggtttcacgaacgattaacaaattatggatcattatttgtcggtgaagaaactacagttgcctatggagataaatgttcaggtacaaatcatattttaccaactaaaggagctggtagatacactggaggtttatttgttggtaaatttattaaaactttaagttttcaaagaatgacaaaagaatctactgaactagttggtgctgctgctgcgagaatatctagatacgaaggaatggaagctcacgccagaactggagatgtaaggctcaaaaaatacggctattcaagttaa

SEQ ID NO: 205803 - DNA, 709 bp, Unknown
  Bacterial polypeptide expressing nucleotide sequence isolated from the Sargasso Sea
tatggctataaaatatttaaaaaaggcaattaaaactccatcatctgacgataataagactagaacaaccgttcaaaacattcttaatgatatcgacaaaagaagagaagagagtattaaagaaattacaaaaaaatttgacaaatacgaaggtgagataattgtttcaaaagaaaagatagaggaagctacaaaaaaagttgatcaaaaaacaaaagatgatgttcagtttgcttatgaaagaatcaaaaaatttgcagaacatcagcttaaaagtatgaataatgaatttgaggttgaactttcaaaaggattatttgcaggtcaaagacttataccagttagttcagcaggttgttatataccaggaggacgatatgcacatatttcgtccgcaacaatggctattactccagctaaagttgctggagtaaaaactataatttgtgcaagccccccaaaagataagaatggggcccatccaggaattatttacgcagcaaatctttgtggagctgacattatattaaatttagggggaatagctgctataggttcaatgacctacggatgttttggtaatcctccagttgattttttagttggtgctggaaaccaatatgtatctgaagctaaaagaatagtttatggacaagtaggaatcgatcaatttgcgggtccgaccgagattgcaattattgcagacaaa

SEQ ID NO: 205804 - DNA, 1324 bp, Unknown
  Bacterial polypeptide expressing nucleotide sequence isolated from the Sargasso Sea
atggcaatagaatatttaaaaaaaggtttagatgaaaaacaaagaattgaagataatgataaagtaaaaaaaattgttgagaaaacattaggtaaaattgaatcagaaggcgataaacatattagagagttatctcaaaaatttgataactattctccagatagttttagattaagtgaagatcaaataaatcaattaatgagtgaagtctctgatgatgacaaagaagatattaaatttgctcaaaaacaagtgcgatcatttgcggaagcacaacttaaaactttaagtgaattagaagtagaaacacacccaggtgtgattcttggtcataaaaatatacctgtacaagcagtcggttgctatgttccggccggtaaatttccaatggtggcttctgctcatatgtcagttgttactgcctccgttgccggtgttccaagaattgttgctactaccccaccttttaaaggtaagccaaatccagctgtcgttacagcaatgaaaatgggtggtgctcacgaaatttatgttttaggtggaatgcaaggagttggtgctatggctattggtacagaaacaattaaacctgtcgatatgcttgttggacctggtaatgcatttgttgctgaagcaaaaagacaattgtatggaaaagtaggtatcgatttatttgctggtccaactgaaacaatggttattgcagatgaaactgttgatggtgaaatatgtgcaacagacttattaggacaagcagagcatggatataattctcctgctgtgatgataacaaactcaagaaaacttgcagaagaaacatttaaagagattgatagaattttagaaattttacctactaaagaaacagcgagtacaagctggagagattatggagaaataattttatgtgatacctatgaagaaatgttgtctaaagcaaatgaaatagcttcagagcacgttcaggttatgacaaaaaaagatgattggtttttagaaaatatcacatcttatggagctctatttttgggtgctagaactaatgttgctaatggtgataaagtcataggtactaaccatactcttcctactaaaaaagctggtagatatactggtggtttgtgggttggtaagtttattaaaacccatacttatcaaaagattatgaccgatgaagcagctacacttattggagaatatggatctagactctcacaccttgaaggatttattggtcatgctgaacaatgcaatgttagagtgagaagatatggtggtcttaatattgagtatggaaaaccagcttcaaaattaaaaaattaaa

SEQ ID NO: 205805 - DNA, 1270 bp, Unknown
  Bacterial polypeptide expressing nucleotide sequence isolated from the Sargasso Sea
aatgattaaaatattagattgcaagaattcaaattatttatctagtttaaaaaagatacttaataaaagaagatttggaaataaaactaatacagatgttgtaattaaaattataaatgatgttaaaaaaaataaacagaaagctttattaaaatatgaaaaaaaattcagcaaaaataataaaattaaaccaaaaaaaagagaaataaataattctatcaactcattagatcctaaaattaaaaaggcaattgattttgcttattctagaattttaaaatttcattcattacaaaaaataaaaaatattaaatatattgataaacaaatgaataaaattgaatacagatatatcccaatcgagtctgttggaatatatgttccttcaaatctaccctcaacattactaatgaatgctattctagcaaaaaaaattgttggagtaaaaagagttgtgcttgcaaatccaagattaaatggaaaattaaatcctgcagtaatgtatgctgcaagaaaatgtggtatcacagaaattatcagtgccggaggtggccaagctattgctagtttagcttacattcaaaaagtaaataaaattattggaccaggtaatgactatgttgctagagctaaaaaggaagtttttggagatgttggaatcgaaggcatgatggccggtccaagtgaaattacaattgtagcagacaaaaatacaaatttaaaagaagttttaacctcattaattggtcaagcagagcacgatataaattctcaatgtatattgatagtaaataatgtaaactttataaagtctctaaaaaaaagtttaaataaagaattaaataaaattccaagaaaagttattgctaaaaaaagtctattgaaaaatggtttaattattaaagtttataataataatcaaataattaattctataaatgaaatagcacctgaacatttagaattaaatttaaaaaattataaaaagataataaacaaaatttataatgcaggaagtatttgcattgggaaatattctgctatggcggtgacagattacaacgtgggaaccaatcatattttgccaacacttggatcagcaaaattttcttcaggattgaatgttggtgaattttacaaaaaaataagctacataaaattgtcaaaaaaaggcgttgaagttattggtaagaaagctataactcttgccgagtatgaaggtttaattggtcatgctcaaagtataaaatctagaataaggagaagttag

SEQ ID NO: 205806 - DNA, 1288 bp, Unknown
  Bacterial polypeptide expressing nucleotide sequence isolated from the Sargasso Sea
aatgacaattgaatacttaaaaaaatctccaaaaacttcatctactgatgatactaaaacgagacagatcgtagaaaatatacttaaagatatagaaaaaacaaaagaggatggttgtaaagaactttcaaaaaaatttgataaatatgaaggcgaagtaatagtatcaaaagaaaaaattgaagaaataaaaaagaatttagatcaaaaaactaaggacgatatacaattttcccatgacagagttagaaaatttgcagaagcacaactcaaaaattatggtcaagattttgaagtagaattatcagaaggtttatatgctggtcaaaaattaattccagtaaatacagccggatgttatgtgcctgcaggaagatatgctcatatagcttctgcggtaatgagtgtaactacagcaaaggttgcgggtgtaaaaaatattatagtatgtagctctcctaaaccaaatgttggcgttcatccttcaattgtttatactgcggacttgtgcggtgcagatgtaataatgaatttaggaggtgttcaggcaattgctgcgatgactaatggattgtttggaaatgccccagcagatattttggtaggccctggaaatcaatttgttgctgaagctaagagaatactgtttggaaaagtagggattgatttatttgcaggaccaaccgaaatagcagttattgcagatgactcagcagatgcggaacttgtggctttcgatttagttggacaagctgaacatggatataactctcctgcctggttatttacgacaagtagaaaactcgcagagtatgtaatgaaaagagttccagaattaattgctgatttaccagaattacctagagaaaactcagaggccgcttggagagattatggtgaagtaattttgtgtgatacagatgaagaaattgcaaagataagcgatgaatatgcccctgaacacttagaggtacagacaaaaaatcttaaatggtttcatgaaagattaaaaaattatggatcattatttataggagaagaaacaactgttgcatatggagataaatgttcaggaacaaaccatattttaccaactaagggtgcaggaagatatactggaggattatttgttggtaaatttataaaaactttaagttttcaaagaatgactaaagcttcaacaaaagaagttggtgctgcttgtgcaagaatttctagatatgaaggaatggaagctcatgcaagaacaggcgatgtaagacttagaaaatacggattttcaaattaa

SEQ ID NO: 205807 - DNA, 982 bp, Unknown
  Bacterial polypeptide expressing nucleotide sequence isolated from the Sargasso Sea
atggcaatcacatatttaaaaaaatcaccaaagacatcatcaactgatgacacaaaaaccactggtattgttcaagatttattaaaagatatagaaaacaccaaagaacaaggatgtatcgatttaacaaagaagtttgataaatatgacggtgagattgttgtatcaaaagaaagaattgagggaataaaaaaaaaattagatcaaaaaactaaagatgatattcagttttctcatgaaagagttaggaagtttgctgaagctcaacttaaaaattacggtcaagattttgaagttgagttgtccaaaggtttatatgccggtcaaaaattagtccctgttaatacggcaggatgttatatacccggtggaagatatgctcacatagcttctgcagtaatgagcgtaacaacagctaaagttgctggtgtaaaaaatattattgcttgtagtcccccaaaagaaagtgttggtgcccaccccactattgtttatacagctgatctatgtggtgctgatgtaattctaaatctaggtggagttcctgcaattgctgcaatgactaatggattgtttaaaaacccaccagcagacataattgttggtccaggaaaccaatttgtagctgaagcaaaaagaattttatttggaaaagtcggtattgatttatttgcaggtccaactgaaattggaattattgctgatgcaaaagcagatccagaaatagtagctgttgatttagttggtcaagctgagcatggatataactccccttgttggttatacacaacaagcaaagaattagctgagaaagtaatgaaaagagttccagaattaattgctgaactccctgaagttccaagaacaaatgctgatgctgcatggagagattatggtgaagtaattctttgtgatacagatgaggaaatggttaaaatcagtgataagtatgctccagaacacttagaagttcaaacagaaa

SEQ ID NO: 205808 - DNA, 703 bp, Unknown
  Bacterial polypeptide expressing nucleotide sequence isolated from the Sargasso Sea
atgttaaaaataattaattgtaagaataaaaattattcaatacttcttaaaaacttattggaaagaagaaaatataaaatgaatctagatactgagattgttccaaaaatactaagggatattaggaaatataaattcaaagcacttttaaaatatgaaaataaatttagtaataatagtgaaattaaacctaacattataaaaataagaaaatctataaaatctttagatcccaaaattaaaaaggcaatagattttgcttataaaagaatttatagctttcacaaaaaacaaaaattcaaaaatatattttacagagataatttaaataataaattagagtataagtttgttcctatacaatcagttgggatttatgtcccatcaaatttaccctcaactcttttaatgaacgcaattcctgctaaaatagctggtgtaaaaagaattgttcttgcaaacccaaaattaaacggaaaattaaattctgcagtattatatgcagctaaaaaaattggtattaaagaaatatatacaataggtggtgctcaagctattggaagtttaacatatatacaaaaggtgaataaaattattggacctggaaatgcatatgttgctagagcaaagaaggaagtctttggagatgtgggtattgaaggaatgattgcgggtccctcagagatttctgtattagctgata

SEQ ID NO: 205809 - DNA, 784 bp, Unknown
  Bacterial polypeptide expressing nucleotide sequence isolated from the Sargasso Sea
aatggcaattacttatataaaaaaagctgaaaaaactgcatttacaggtgaagatgaaacaagaactaaagtaagttcaattttaaaagatttagaaaaaacaaaggaccaaggggttaaagatattttaaaaaaatttgataattatgaaggtgatataattgttagcaaagaaaaaattgaagaaataaacaaaactttagatcaaaaaattaaagatgatattcagttttctcatgaaagagtaagaaagtttgcagaacatcaacttgaaaatcttggaaaagactcagaagttgaattatcacctggtttaatagcaggacaaaaattaatacctgtaaataccgttgggtgttacgtgcccggtggaagatataacaatatcgcctctgctataatgagtgtgacaactgcaaaagttgctggagtaaagaatgtaattgcaacaagtccaccgaaagattcaaatggtgcaaacccaattataatttatacagctaacctttgtggtgcagatgtaattatgaacattggcggtataggggcaattggtgcgcttgcatatggttgctttggtaatccagaagtagatatgattgttggacctggaaataaatttgtagcagagtctaaaaggattttatttggaaaagttggaattgatttatttgcaggaccaaccgaaataggcattattgcagatcatacagctgacaaagaaataatcgcttatgatttagttggacaggctgaacatggtcctgactctccagcttggctt

SEQ ID NO: 205810 - DNA, 1218 bp, Unknown
  Bacterial polypeptide expressing nucleotide sequence isolated from the Sargasso Sea
gatgtctttggagaaccgctttcaccaagacaagtcgttgaaaaaatctgtgaagacgtaaagcgagaaggacttgctgcggtactggattacaccaaacgcattgatcatgcgaatgtcaccgcagagaccttccgggttcctctcgaaactcttgaaaaagcccatcagagcgtagcaccagaatttcttgcagcgataagaagagtccgccagcgagtcgaacatttccagaagaagattttgccatcagatgtatgcgttccactagatggtggagggagcctgcggcagcgatacctcccacttgatcgtgttggtgtatgtgtgcctggtggtgcagcagcatatccatcaacacttcttatgactgtggtgccagctcaggtagccggtgttcctgaaattgttgttgttgctccaccaacaaagtttggctcggaaaatgagcatgtgcttgcgacgtgccacgaattgggtgtgtctactgttcttcgggtaggtggagctcaggcggttgctgcaatggcctatggtgtcgaaagtcttcagcgagttgatattgtcgttggcccagggaatctatttgttgctttagcgaaagaattcgtctacggcgacgttgcgatcgattcaattgctggcccaagtgaaatagttgttgttgccgatgaggacggaaaccccgagacaatttctgctgatatgctcgcccaggcagagcattctcctggatcagcaattctgttgacagcatgtgagtctctggcagatgcagttgcatccgtgctttccagaaggttggaaacccttgaacgagctgacttgactcgggacagtcttgatcggtttggagccattgtcattacgagaaataatgaagaatcggcgcagcttgccgatgagctggctgccgaacatctctcgattgatacgcgggatcccgaagagacactcaagaccatccggcatgctggtgcagcgttccttggtccgtttagtccggttgccgcaggtgactatgccgcagggccgtctcatgtcctaccaacaggcggtacagcgagatttgctgcagggttatcagcaaatcattttctccggagtgggagtgttctggctttgacagaagctgatctggctgaaatggccgacgatatacagcttctggctgaaacagaaggcttgacggcccatcgccgaagtgttgaaacacga

SEQ ID NO: 205811 - DNA, 553 bp, Unknown
  Bacterial polypeptide expressing nucleotide sequence isolated from the Sargasso Sea
tatgttgcatctgattttctatctcagactgaacatggtcctgacagccaagtaattttagttacaacaaataaacaaatcattaaacctattctcaaagagataaatagacaaattccttttttaaagagaaaagattttataaaacaatcaattcaaaattctaaaataatttattttgatttaaaagaaaaagcagtcaattacattaatgattatgcccctgaacactatataatttgtagtaaagatgaagactattttattgaaaatgtgaaaaatgcaggatctgtttttataggaaattattcttgtgaaagcatcggagactacgcctctggaacgaatcacacactaccaacaaatggatatgcgaagcaatacagtggagttaatttagacagttttttaaaaaaaataagctttcagaaagtaacagcagaaggtattaaaaaaattggccctgcagtagaaataatgtccattgctgaaggactagatgcacataaaaattcagtaacaattagattaaacgacctgaaaaatgaataaa

SEQ ID NO: 205812 - DNA, 236 bp, Unknown
  Bacterial polypeptide expressing nucleotide sequence isolated from the Sargasso Sea
ctttggtgattatatagcaggaccaaatcatgtgttaccaacagcaagaactgctagattttcttcaggtatatctactatagattatatgagaaggacttctttaataaaatgcgattctggtgcattaaatgaaattgccccatcagctattaaaattgcagaaaatgagggtttagatgcgcatgctttatcaatgaaaattagaatgaataattttaaaaatgaaaaataat

SEQ ID NO: 205813 - DNA, 874 bp, Unknown
  Bacterial polypeptide expressing nucleotide sequence isolated from the Sargasso Sea
agcaaaagtagctggtgttaaaaatattatcgcatgcagtccaccaaaagagaatataggtgcccatccttctataatttatacagctgacttatgtggggcagatgtaattttaaatttaggtggtgtaccagcgatagctgcaatgacttacggtttattcggtaatgcacctgcagatattttagttggacctggaaatcaatttgttgctgaagctaaaagaattttgtttggtaaagttggtatagatttattcgcgggaccaacagagattggaattattgctgatgaaactgcagatccagagattgttgcggttgacttagtaggacaagcggaacacggttataactcgcctgcttggttgtataccacaagtcaaaaattagctgatgcagttatgaaaagagttcctgaacttattgaagaattaccagaagtaccaagattaagtgctgaagcagcatggagagattatggtgaagttattttgtgtgatactaatgaagaaatggtcaaagttagtgacgattatgctcctgagcatttagaattacaaacaaaaaatttaaaatggttccacgaaaaattaaaaaattatggatcattatttataggtgaagaaactactgttgcttacggcgataaatgttctggtacaaatcatatattgcctactaagggagctggaaaatatactggtggtttatttgtaggtaagtttattaaaacattaagttttcaaagaatgactaaagagtctacaaaagaagttggtgctacagctgcaagaatttcaagatatgaaggaatggaagcacatgcaagaactggtgatgtaagacttagaaaatatggttattccaattag

SEQ ID NO: 205814 - DNA, 1000 bp, Unknown
  Bacterial polypeptide expressing nucleotide sequence isolated from the Sargasso Sea
tttgaggtagagctttcaaaaggtttgtttgctggtcaaacattagttccagtgaataccgctgggtgttatgtgccagctggaagatatgctcacatagcttctgctgtaatgagcataacaacggcaaaagtcgcaggagtaaaaaatattatttgctgcagttcaccaaaaccgaacgtaggtgcacatcctaaaattgtttatactgctgatctttgtggtgctgatgtcatattaaatttaggtggcgttcaagcaatagctgctatggcttttggcttttttaaaaatgcacctgctgatattttagttggaccaggcaatcaatatgtggcagaagcaaaaagaatattgtttggaaaagtaggtattgatttatttgctggccccactgaaatagcaataattgctgataaaaatgctgatccagaaattgttgcttatgatttggttgggcaagcagaacatggttacaactcaccagcatggctgtttacaactgacaaaaatttagcaaatgcagtcatgaaaagagttcctgaacttattcaagatcttccagaatttccaagatcaaacgctgaagctgcttggagggattacggtgaagttgttttatgtgacaataatgaagaaatggtaaaaatcagcgatcaatatgcgcctgaacacttagaggtacaaacagaaaatttagattggtggttaaaaaaattaaaaaattatggatctctttttcttggcgaggaaacaactgttgcatatggagataaatgttcaggaacaaaccatatacttccaaccaaaggtgctggaagatatacaggtggtctttttgtaggtaaattcattaaaacattaagttttcaaagaatgacaaaagagtctacagaattagttggagcagccgctgcaagactttcaagatatgaaggtatggaagcgcatgcaagaactggagatattaggcttaaaaaatacggttttaaaaattgat

SEQ ID NO: 205815 - DNA, 589 bp, Unknown
  Bacterial polypeptide expressing nucleotide sequence isolated from the Sargasso Sea
atgattaaaacattaaaattaagagaaaaaaattttgaaaaaatattgaatagcttcctgaccttaagaagagggtattcaagtaaaaaaatcactgtagtaaaaaaaattttaaatgatgttgaaatgcatggagacaaatcgcttattaaatatgagaaaaaatttaataatttaaaaactttgaaaagtaaaaacctttctttcacaaaatctgaaataaaaaaaagtataaaattcttagatcggaaagtcaaaaattctattgatcttgcttattcgagaattttcaattttcataaaaatcaaaagtttcataaatttaaaaagaaggataaaatcaacaatagtttttactatagatcaaaacctgttgagaaagtgggtgtttatgtacctggaggtaaagcgagttacccaagttccgtgttaatgaattgcattccagcctctattgctggagtaaatgaaatttttatgacagttccttctgttgatgggggattaaatcccggggtattgtatgcggcaaagaaatgtggtgtaaaaaaaatttttaaacttggtggtgcacaagccatcgcagcat

SEQ ID NO: 205816 - DNA, 772 bp, Unknown
  Bacterial polypeptide expressing nucleotide sequence isolated from the Sargasso Sea
aggcattcaagctgttggagcaatggccttaggaactgaaacgattaaaccagtagacatgttagtaggtcctggaaatgcatttgtagcggaagcaaaacgacaactgtttggtatagttggtatagatttatttgctggaccaacggaaactatgatcattgcagatgagacagttgacgcagagctctgtgctactgacctacttggacaagcagaacatgggtataattccccagcagttttaattacaaactctcataaacttgcagaggaaacattattagaaatagacagaatactaaaaatacttccaacatcggaaacagcttctatcagctggacagattatggagaagtaattgtttgtgatacttatgaagaaatgcttgaaacttcagaaaaaaaagcttttgagcatgttcaagtcatgacagatcgtgatgattggtttcttgagaaaatgacatgctatggagcactatttttaggaccaagaactaatgtgtcaaatggggataaagttattggaaccaaccataccctcccgacaaaaaaagctggtcgctatacaggtggactttgggtaggaaaatttttaaagacacacagctatcagaaaatacttacagatgaagccgcaactatagttgctgagaaatgttcaagattatgtatgttggaaggttttgttggtcatgctgaacaagcaaatatcagagcacgaagatatggtggaaaaaatattgactatggtaagggagcagattga

SEQ ID NO: 205817 - DNA, 1093 bp, Unknown
  Bacterial polypeptide expressing nucleotide sequence isolated from the Sargasso Sea
atgacaattaaatatttaaaaaaggcatctaaaactgcatcaacagatgacactaaaacaaaagatatagttcaaaatcttttaaaagaattggaaaaatcaaaagaagaaggttgtaaagaattaacaaaaaaatttgataaatatgatggagaaataattgtttcaaaagaaaaaatagaggaaataaataaaaatttagatcaaaaaactaaagacgatattaaattttcatacgatagagttcgtaaatttgcagaagcgcaacttgcaaactatggaaaagattttgaagttgaattatcaaacggattatatgctggtcaaaagctagtacctgttaatactgcgggttgttatatcccaggtggtagatacgctcacatagcatctgcggtaatgagtgttacaactgcaaaagttgctggtgttaaaaacattattgcttgtagtccccctaaagaaggaattggtgctcacccttctataatttatacagctaatttatgtggcgctgatgtaattctaaatcttggtggagttccagctatcgctgcaatgacgtatggtatgtttggaaatgctccagctgatattttagttggtcctggaaatcaatttgttgctgaagctaaaagaattttatttggaaaagtaggaattgatttatttgctggtccaacagaaattggaattattgctgatgaaactgcagatccagagattgtagccgttgatttagttggtcaagccgaacacggatataattctccatgttggttatacaccacaagccaaaaacttgcagatgaagttatgaaacgagtcccagaattaatagagaaacttccagaagttccaaggttaagtgcagaggctgcttggagagattacggtgaagttattttatgtgatacggatgaagaaatggtgaaagtgagtgatgactatgcacctgaacatttagagatacaaactaaaaatcttgaatggtttcataaaagactaaaaaattacggatcattatttattggggaagaaacaactgttgcttatggtgacaaatgttccggaactaatcatatcttaccaa

SEQ ID NO: 205818 - DNA, 1288 bp, Unknown
  Bacterial polypeptide expressing nucleotide sequence isolated from the Sargasso Sea
aatggctataacatatttaaaaaaatcaccaaaaacctcatcaacagatgacacaaaaactagagaaattgtagagaatattttaaaggacattgagagaacaaaagaagaaggatgcatcgaattatcaaaaaaatttgacaagtatgaaggtgaagtaattgtcacaagagaaaaaattgagcaaattaaaaagaatttagatcctaaaactaaagatgatattcaattttcacatgaaagagtaagaaagtttgctgaagcacaattaaaaaattatggtcaagattttgaggtagagctatctgatggtttgtttgctggtcaaaaattaatacctgttaacacggctggatgttacgtgccagcaggaagatatgctcacattgcatctgcagtgatgagtgtaactactgctaaagttgctggtgttaaaaatattattgtttgtagttcgccaaaaactggtgttggagttcatcctgctattgtttatactgcagatttatgcggagctgatgtaataatgaatttaggtggagttcaagctattgctgcaatgacctacggtctttttggaaatgctccagcagatatgcttgttggtcctggaaaccagtttgttgcagaatcaaaaagaattttatttggcaaagtaggtatagatctatttgcaggtccaacagagattgcagttatagcagatgaaacagcagacccagagctagttgcttttgatttagtcggacaagcagagcatggttacaattctccagcctggttatttacaaaaagtaaaaaattagcagagtatgtaattcaaagagttccagaattaattgaagatttaccagatttaccaagagaaaattcaggagctgcatggagagactatggtgaagttattttatgcgacacagatgaagaattggcaaaaattagtgatgaatacgcacctgaacatttagaaattcaaactaaaaaccttcaatggtttcatgaccgattaaaaaactacggatcattatttattggagaggaaactacagttgcatatggagataaatgctcaggaaccaatcatattttaccaacaaaaggtgcaggaaaatatacaggtggtttatttgtaggaaaattcattaaaacattgagttttcaaagaatgactaaagagtctactaaagaagtgggtgcagcttgtgctagaatttcaagatatgaaggaatggaggcacatgcaagaacaggggatgttagacttagaaaatatggatttcaaaattaa

SEQ ID NO: 205819 - DNA, 1288 bp, Unknown
  Bacterial polypeptide expressing nucleotide sequence isolated from the Sargasso Sea
tatggcaattaaatatttaaagaaagcacctaaaacagcatctacggatgatgcaaaaacccgagaaatcgttcatacacttctaaaagatctagaaacatctaaggaagcagggtgcaaagagttaacaaagaaatttgataaatacgaaggagatatcattgtctctaaagaaagaattgaggaaataaataaatccatagatcaaaaaactaaagacgatgtaaaatttgctcatgatagagttagaaaatttgcagaagctcaattaaaaaattacggtaatgattttgaaatagaattgtctaaaggtttatatgcgggacaaaaacttgtcccagtcaatactgcaggctgttatatcccgggaggaagatttgctcacattgcttcagctgttatgagtgttactacagctaaagtagctggtgttaagaacattattgcatgtagccctccaaaaccaaatgttggagctcatcctactataatttataccgcaaatttatgcggagctgatgtaataatgaatttgggtggaattccagctattgcagcaatgacttatggattatttaaaaatgctccagctgacatgctagttggccctggtaatcaatttgttgcggaagctaaaagaattttatttggaaggataggaatagatttatttgctggaccaacagagatagcaataatagctgatgaaaatgcagatcctgaaattgttgcagttgatttagttggtcaggcagagcatggttataattcaccagcttggctttatactacaagcaaagatttagcagacaaagttttaaaaagagtgccagaattaattaaagaacttcctgaattaccaagaaaaagtgctgaagcagcatggaaagattacggagaagttattctatgtgacactgatgaagaaatggttcagataagtgacgaatacgctccagaacacttagaacttcaaacaaaaaatttagattggttccataaaagacttaaaaattatggatcattattcattggagaagaaactaccgttgcttacggtgataaatgttcaggtacaaatcatatattaccaacaaaaggtgctggaaaatatacaggtggtttatttgtcggaaaatttataaagacattaagctttcaaagaatgacaaaagaatcgacaaaggaagtaggagcagctgctgctagactttcaagatacgaaggaatggaagctcacgctagaactggagatgtgagattaagaaaatacggtttttccaattaa

SEQ ID NO: 205820 - DNA, 631 bp, Unknown
  Bacterial polypeptide expressing nucleotide sequence isolated from the Sargasso Sea
aaaagtaggtattgatttatttgcaggtccaacagaaattggaattattgctgatgaaaacgcagatccagaaattgttgcggtagatttagttggtcaagcagagcatggatacaattcaccagcttggctttggacaacaagtaaagaattagcagaaaaggttatcaaaagagtacctgagcttattgctgatcttccagagttaccaagaactaatgcagaagctgcgtggagagattacggagaagttgttctttgtgatacagacgaggaaatggctacgattagtgatgagtacgcacctgaacacttagaagttcaaactaaaaacttagattggttccacaaaagattaaaaaattatggttctttatttatcggtgaagaaacaactgttgcttatggtgataaatgttcaggaacaaaccatattttaccaactaaaggtgctggaagatatacgggtggtttgttcgttggtaagtttattaaaactttaagtttccaaagaatgactaaagaatctactgaacttgttggagcagctgctgctagactttcaagatatgaagggatggaagctcatgcacgaactggggacgttagattaaaaaaatacggttattaa

SEQ ID NO: 205821 - DNA, 763 bp, Unknown
  Bacterial polypeptide expressing nucleotide sequence isolated from the Sargasso Sea
atgaacttaggcggtgtgcaagctattgctgcaatgacttatggtctttttggaaacgcgcctgcggatatgcttgtaggtccaggtaatcaatttgttgcagagtcaaaaagaattctgtttggaaaagttgggattgatttatttgcaggtcctacagaaatcgcagtgatagctgacgatacagctgatccagaattagttgcttttgatttagttggacaagcagagcatggatacaattctccagcttggttatttacgactagtaaaaaacttgctgaatatgtcatgcaaagagtgccagagcttattgcagatctgccagatttaccaagagaaaactcgggcgctgcttggagagactatggtgaagttattctgtgcgatacggatgaagaaatggctaaaataagtgatgaatatgcccctgaacatttagaaattcaaactaaaaatcttcaatggttccatgacagattaaaaaattatggatcattatttattggagaagagaccacagttgcttatggtgataaatgttctggtacaaaccacattttgcctactaaaggagcaggaaaatatactggtggtttgtttgttggaaaatttattaaaacattaagttttcaaagaatgactaaagagtctacaaaagaagtgggtgcagcatgcgcgagaatttcaagatatgaaggcatggaagctcatgcgagaaccggggatgtaagactaagaaagtacggatttcaaaattagt

SEQ ID NO: 205822 - DNA, 630 bp, Unknown
  Bacterial polypeptide expressing nucleotide sequence isolated from the Sargasso Sea
attgatcaagattttacaagttggtaatgttgacagttttgtagaagccagacgtcaaaaaacctcacaaaaagatagaaaaatcgtacaatcaatcttagatgatgtaagaaataatggtgattctgctgtcaaaaaatacgaacaaaaattcaatggtaaaaaaacaattcagttgcgtgtaaataagcaggaaataaaaaatgcaaagattactgatgcagaattttctgcattacagtcatctgcaatacgactatcaaaaacacagagaactctaaacaagagtttgattcaatctgtcaaaaaaattcctgatatctcatttgttcctattccaagtgttggttgttacatacctggaggtcaagctagatatccgagttcagcaattatgtctgtaattaccgctgctgaagccggagtaaagaaaattgtagttgtttctcctccaaactctgatggaaaaatagatcctatgacaattactgttgctcaaaattgtggtgcaaaaatttacaaagtaggtggtgcacaagcaattgctgcacttgcatatggaacaaaatcaataccaaaagtggataaaattgttggacccggaggaaaatttgttagtattgctaaggc

SEQ ID NO: 205823 - DNA, 566 bp, Unknown
  Bacterial polypeptide expressing nucleotide sequence isolated from the Sargasso Sea
gatggaagccaaactatttgacaattatcaggattatcttgctcaacttccctccacagtcacagaggatatctcctcaaaagtctcagagattcttgaagaagtgcgaaatcatggtgattctgcgctcaagaaactgacctatcggtttgacggaatagagctcgattcaatccgggtccaacctgaagatctccaatcagctctcaaggagttggatcccgaattgcgcaaggttctagaacaagctgcggaaaatataagaacgtttcatcaacgtcagaaaacggaaagccagctggaattcagtgacgatggtacgatgctcggatggaaaatcagtcctctcgacagtgtgggtatttatgttccagggggacgggccatctatccctcgacgttgttgatgaatgtcattccggctcaggtggcaggagtgtcaaggatcgcaatggtttcgcctcctgacacaacggggttgcctgcaaacctggttcgggcgtccgcagcattacttggagttgatgaactttattctctgggaggcgcccaggcgatagcagcat

SEQ ID NO: 205824 - DNA, 1063 bp, Unknown
  Bacterial polypeptide expressing nucleotide sequence isolated from the Sargasso Sea
atgacaatcaaatatctaaaaaaatcaccaaagacttcttctacagatgatacaaagacaagagaaattgtagaaaatattttaaaagacattgaagaaaaaaaagaagaaggatgtaaagaacttggaaaaaaatttgataagtacgatggagaaatcatagtctcaaaagaaaaaatagaagatataaaaaataatttagatcaaaaaacaaaagacgatattcaattttctcatgaaagagttagaaaatttgcagaagctcaattaaaaaattacggtcaagattttgaagttgaactttcagatggcttgtatgcaggtcaaaaattgatacctgtaaatacagcaggatgttatgtacctgcgggtaggtatgctcatatagcttcagctgtaatgagtgttacaacagctaaagttgctggagttaaaaatattttagtttgtagttcaccaaaaccagatattggagtgcatccatcaattatctatacagctgatttatgtggagcagatgtaattatgaatttgggtggagttcaagcaatcgctgctatgacaaatggattatttggaaatgcgccagcagatattttagttggacctggaaatcaatttgttgcagaagcaaaaagaatattatttggaaaagtcggtatagatttatttgctggtcctacagaaattgctgtaattgctgatgaaacagctgatcctgagatagtagcatttgatttagttggtcaagcagaacacggttataattcgcccgcatggttgtttactactagtaaaaaattagcggaagaagttatgaaaagagtacctgagttaattgcagatttaccagaactaccaaaacaaagtgctggagatgcctggagagattttggtgaagttattctttgcgatactgatgaagaaatggcaaaaattagtgatgaatacgcaccagaacatttagaagttcaaacaaaaaatttgaaatggtttcatgatagattaaaaaattatggatctttatttataggtgaagaaacaacggttgcatacggtgata

SEQ ID NO: 205825 - DNA, 895 bp, Unknown
  Bacterial polypeptide expressing nucleotide sequence isolated from the Sargasso Sea
aaaatacttaacacaaaatcaaataaatttgaaaaagaattaaattattacttaaacttaagaaaaaatttctctgtttccaaattaaagatagtaaaaaaaataattaaagatattagaaataataaagatagctctctcaagaaatatgaaaaaaaatttaacggcctaaaaaaactgaatagtaataaacttctattttctaaaaatgaaatatctaaatacattaaaaatctagatccaaatgtaaaaaaagcaattgatattgcttataatagaattttaaaatttcataaaaaacagaaatttaagagctataaattaaaagataaatacaaaaatattctttcctaccgatttgaaccaatagaaaaagttggtgtttatgtaccaggaggcagatcaagctatcctagctcagttcttatgaactgtataccagcaaaaattgcgggtgtgagaaaaatttttatgactgttccggcacttaaaggcaaagttaatccgggagttttatacgcagctaaaaaatgtggtgtaaaaaaaatttataaattaggaggagcccaagcaatagctgcattagcctatggaactaaatctgtagtaaaagttgataaaatttttggtcctggaaatgaatatgttgcattagccaaaaaagaagtgtttggaactgtaggcattgatattctggcaggaccttctgaagtaactgtaatagcggacagatactcaaacccatcttgggttgcctctgatttgattgctcaggcagaacatgatgaaatgtcacaatcaattctagttacagataacgaaaaccttattttaaatgttaaaaaatttataaatttgcaattaaaatttttacctaaaagaaaaattgcgtatt

SEQ ID NO: 205826 - DNA, 682 bp, Unknown
  Bacterial polypeptide expressing nucleotide sequence isolated from the Sargasso Sea
atgaaggtcaaaatcttcaaaggatttaaagatttttcaaaatctattgatgttgatgaaaataacgatgtttctggcatagttcaggaaattttaaaaaaagtacataagtgcggtgatgctgctttgcgagaatatactgagaaattcgacaaggcaactcctgatacatggttggttcctgagaatgcactggaagaagcattagacaacctgggtaaagatctcttgctcgttctgcagcaagcagcagataatataatgttttttcacgagcggcagaaaactaacagccagcttgatttcagttcggatggatctgtattgggctggaaagtaactcctgttgacagtgcaggcatttatgtccctggcggccgcgctgcttatccatcaaccttgctgatgaatgcaattcctgctcaaattgcggaagtccccagaatagcaattgtatctccaccgggatcttccggattacctcaccctttggttatggccaccgcagcgtttatgggtttaaaagaactttatgcggttggcggggtgcagtcaattgccgcacttgcttatggtacagaatcaattgaaaaagtagtcaaaattaccggaccgggaaatgcttatgttgtagaagctaaaagacagttatatggaatagttggaatcgactccttagctg

SEQ ID NO: 205827 - DNA, 958 bp, Unknown
  Bacterial polypeptide expressing nucleotide sequence isolated from the Sargasso Sea
tttaaattttcattctttgcaaaaaattaaaaatattaaatacgtagacaattataacaataaaattgaatataaatatgttcctataagtaaattaggattgtattgtccagcaaatttaccatcaacacttttgatgaatgctatacctgcaaaaattgcaggtgtaaaaaaaatagtcttggcaaatccaagatcaaatggaaaattaaatgctgcagttatgtatgctgcaaagaaaattggaattaaagaaatttatacagtaggtggagcgcaagctatagcaagcttagcctatattcaaaaagtaaataaaattgttggacccggaaatgtttatgtcgctagagcaaaaaaagaagtttttggagaagtaggaattgaaggaatgatagccggcccttcagaaattactatagttgctgataaaaatactaatctagaagaagttgttacatccatgattggtcaggccgaacatgatattaattctcaatgtatattaattacaaaagatattaatttaattaacaattttataaaaaatattttcattaaattgaaaaatttaccaagaaaaaatattgcaggaaaaagtttaaaaaattatggccttattgttcatgctcagaatgataagcagattatagatacaatcaatgaaatagcgccagaacacttagaattaaatattagtaattttaaaaaatacttaaataaaatttataattcaggaagcatttgtatggggaggtattcaccaatggctttaactgattataatgtaggaacaaatcatgttcttcctacttttggttcagctaaattttcatctggattaaatttgaatgatttttataaaaaaattagctatataactctttcaaaaaaaggtgttgagaaaataggagaatacgctacacatctcgctgagcatgaagaattagaaggtcat

SEQ ID NO: 205828 - DNA, 778 bp, Unknown
  Bacterial polypeptide expressing nucleotide sequence isolated from the Sargasso Sea
ggccaccttggatttgtgtggaattgaaaaaatatacaaaattggaggtgctcaggctatagctgcacttacatggggaactgaatctgttgacagtgtagatataattatcggacctggaaataaatgggttgccgaagcaaaaaaacaggctctttcaaaaataaatattgatatgttagcgggaccaagcgagatattaatcttagcagataaaaataatcgagcagattgggttgctgctgatcttttatctcaagctgaacacgatatttctgctcaggcaattttaataactgatagtgaaaatttattagaaaatgttaataatgaattagttaatcaaacagaaaatctcaagagaaaagatatagttaaaaaaagtatcgctgaaaatggttatggtattcttgtatcggatattgaggatgcgattgagatcattaataatatagctcctgaacatttatcaatattatgtaaagaaaatagtcaaatagaaaataaaatcactaatgcaggtgttatattttctgatgagtggactccagagtctatgggtgattatattattggtccaagccacattctacctacaaatggaatggctaaaagacaatcaggcttgtctgtttataatttcttgagacgtcaatcaactatctcaagtagtaaaaaaactataaatactcttggtccttcagcaatgttattggcagattgtgagggtctggatgcacatgcaaattctataaaaataagaataaaagattcttaa

SEQ ID NO: 205829 - DNA, 814 bp, Unknown
  Bacterial polypeptide expressing nucleotide sequence isolated from the Sargasso Sea
atgacactcagacttaatacaactgaccaaagctttaatggtagctttaaaaagctaattgaaaatgatcgtaatacatcccaagatgtaagtaagattgttgcatcaatactagaaaaagttaaatgtgatggagataaagctcttgtcgagctaacaaataaatatgactccaattctttcacattagaacaacttaaattaagtgaagaaaatatcaatgagctcgacagtagatgtgaagtggatattaagaaatcaatggagatagcttccaaaagaattactgagtatcataagcgtcagttgccaactgatcagttatatacagatgaaacaggaaccactttagggtaccaatggaaacctattgaaagagttgggatttatgttcctggaggaacagctagctatccaagcacggtattaatgaatgcgatcccagccatcgttgcgggggtaaaagatattgtcatggttactccagctaggaatggggagctcaatccatctactttatatgctgctaaattgctaaatataaatgaggtttatcaaatagggggcgctcaagcaataggggcactcgcatttggaactgatacaattaataaagtagataaaattgttggaccaggaaatgcctatgtagcggaggcaaaaaaacaagtatttggatcagttggaattgacatgtttgcagggccttctgaaatagtaattgtcgccgacgagtcaaataatccaaaagttactgctgctgatcttctatctcaagctgagcatgataatagcgctcaaaagtattttgatt

SEQ ID NO: 205830 - DNA, 1018 bp, Unknown
  Bacterial polypeptide expressing nucleotide sequence isolated from the Sargasso Sea
agatataaagacgaaaattttcatatccgtattgctgagattataaactctaggaaaaactttgatgaagacataactaatcaagtaaacgatataattttcgatataaaaaataatggcgatataagtctttttaaatatatgtctaaatatgacaatgtagaatgctctgcagagaatatttgctatagtaaggaagatatttcatcggcaaaaaaaaattgtacacaagaaagtattgaagcaataaaacttgctaaaaatcgtattgaggcatttcataaacatcaattacctgaagattcaatatacgaggatcaagaagaagtaagtataaagactaaatggattccactaggtagtgctggaatttatatccctggcggtactgcttcatatccaagttcagtattaatgggaataattccggcacaggttgctggaattaaaaaaatatctgcgacagttccttgtccaaataatcaaatagatcctcttgttttggccaccttggatttatgtggaattgaaaaaatatacaaaattggaggcgctcaggcaatagctgcacttacatggggaactgaatctgttgacagtgtagatataattattggacctggaaataaatgggttgccgaagcaaaaaaacaggctctttcaaatataaatattgatatgttagcaggacctagcgaaatattaattttggcagatgaaaataatagagctgactgggttgcggctgatcttttatctcaagcagaacacgatatttctgctcaggcgattttagtaactgatagtgaaagtttattagaagatgttaatattgaattagttaatcaaacagaaaatctcgagagaaaagatatagttaaaaaaagtatcgctgaaaatggttatggtattcttgtatcgaatattaaggatgcgattgagattattaataatatagctcctgaacatttatccatattatgtaaagaaaatgatcaaatagaaaacaaatcaacaa

SEQ ID NO: 205831 - DNA, 583 bp, Unknown
  Bacterial polypeptide expressing nucleotide sequence isolated from the Sargasso Sea
tagtataattgcagataaatactctaatccaagttggattgccgcagatttaattgctcaagcagagcacgacatttatgctcaatcaatactgatatcaaacaataaaaatttaattaattcagtaaataaaaatttaaaatctcaattaaatgatttaccaaaaaaaaatatcgcggcaaaaagtataaaaaattttggtatagcgatatatgcaagaaatattaaaaaaatctcagaagtaatcaacattattgctccagagcacttagaaataaattttttaaattcaacagaaataattaaacgcataaaaaatgttggctcgatttttattggaaaattttctccagaagccatgggggactatattgctggtcctaaccatgttttacccacctcaggatcagcaaagttttcttcaggtttgtctgtaaatgattttcttaagcgtcattctctaataaaaataacaaaaacaggtattgaaagattaggtccatcagttataaatttatcacaacatgaaaaactagaagggcatgcaagatcaataaaaatgagattaaaaaaggaattttaa

SEQ ID NO: 205832 - DNA, 1008 bp, Unknown
  Bacterial polypeptide expressing nucleotide sequence isolated from the Sargasso Sea
ttctgtaaaaatataattaaagatgttaaaaaaaatggagataaagcattattgaaatatgagaaaagattcaatcaaaataacataatcattccaagcacaaaacaaataaaaaaatctataaattcacttgataaaaaagtaaagaaagcaatcgatacggcttataatagaatttataaatttcattcacttcagaaatttaaaaatatttcttatacagataaattaaaaaacaaacttgaatataaatatgtgcctttagagtctgttgcaatttatgttcctggttctactgcttcatacccatccagtgtattgatgaatgctattccagcaattgttgcaggtgttaagagaatagttatgattaatccaggctataaaggaaaacaaaatccagctgtattatacgctgcaaaaaaatgtaaaataaaagaaatttattctatcggaggcccttctgctattgcagcagtatcctatgggactaaaaaaattaaaaaagttcataaaatagttggtccaggaaacgcctatgttgcggctgcaaaaaaagaagtttttggtgttgttggaattgaaggcatgaccgcaggtccctcagaagtgactgtcgtttgtgacaaattctcaaatcctgagtgggttgcaagtgatttaattggacaagctgaacatgatattcttgcacaatgtattttgatttcaaaagataaagatttgctagataaagtaaaaattgaaattaccaaacaattaaaagaaattccaagagcttctgttgcaagaagaagtttaattaataatggaattcttatgtatgtttcttcagacgctaaaataattagtgttataaataaaattgcaccagaacatttagaattaaatattaaaaattataaatcgttagttccaaaaataaaaaattcaggatcaatatgcttaggaaaatatgcagtgatggcaatgactgattataatgttggatcaaacccatgtgttgcc

SEQ ID NO: 205833 - DNA, 498 bp, Unknown
  Bacterial polypeptide expressing nucleotide sequence isolated from the Sargasso Sea
catggtaaagcagcttaactttcaagataaagatttttatatacaactagatgatatattaagcacatcttctggaaaaggaacctctgttgaaaaaaaggttttttcaattattgaagatgtaaagaataacggtgataatgctttaataaaatataataaagattttgataattgttttctttcgtcaaaagaattaatagtatcagaagaggaaattataaaagcaaaaaaaaatgtttcccagaaaataattgatgctttaaagaaagcaagagatagaatattttcctatcataaatctcagttacctgaagataatttttattatgataaacttggtattggcttaggtcataggtggacaccaatttcttcggtgggaatctatgtgcctggtggaacagcagtttatcctagtagtgttttgatgaattctattcctgcgaaagttgctaacgtaagtagaattgtaatgacagtacctgctcctaatgg

SEQ ID NO: 205834 - DNA, 697 bp, Unknown
  Bacterial polypeptide expressing nucleotide sequence isolated from the Sargasso Sea
aatgataaaaattcttaactgtaataaaaaaaactatttaaataatttagttaattttttagataaaaggagatcaaaaaaaaatgaccaaagcaaaataattgtcaagattgtaaaagatgtaaaaaaaaataaatttaaagctttaattaaatatgagaaaaaatttagtaaaaacaaagacattaagcctagtttaagaaaaataaacttagctattaaaagtctcgatccaaaaattaaaaagtcaataaactttgcatataaaagaatttataattttcatttaaagcaaaaatcaaaaaatataaattatgtagatggtctaaataataagattgattataaatatgtccctattcaatctgtaggaatatatgtgcctgcaaatttgccatctactttactgatgaatgcaattccagctaaaattgcaggtgttaaaaaaatagttcttgctactccaaaaaataaaggacaattaaatcctgcagtgctttatgcagccaaaaagttaggtatcacagaaatttattcaatgggcggagctcaagctatagcgagcttagcttatatacaaaaagtaaataaaattgttggacctggaaatatttatgttgctaacgcaaaaaaagaagttttgggtgatgtgggtgtagagggaatgtttgctggtccttccgaaataactgttcta

SEQ ID NO: 205835 - DNA, 749 bp, Unknown
  Bacterial polypeptide expressing nucleotide sequence isolated from the Sargasso Sea
ccacaaatatttaatagttttaaaaaagctatataaaaatatttcatcatttcacaaacaacaattacctaaaaatatagtctttactaataatggtgcaaaattgaaatctgtatggaagcctattgactcagttggtttgtacgtacctggaggaaaggctttttatccttcatctttaattatgaatgcagtacctgcaatcatagctggggtaaaaagaattgtttgcataacaccacccactaaatcgattaacccctattttataaaattaataaaagaattaggcataaaagaaacatattttataggaggtgctcaagctattagtgcgctaacatttggcacacaaacaatcaaaccagttaacaagatttttggacctggcaatgcttatgtagcagaagcaaaaaaacaactatatggaaaagtaggtatagatttgttagcagggccttcagaaattattgttgttgctgaaaataaaaataatccagattgggtagcatctgacttaattgcccaggcagaacatgatgaaaatgcacagtccattctaattacagatgataaaaattttgcaaccaaagtcttaaattcaattaaaaaaattaaaaaagatcttccaaaaaagaaaataattgagaaaagtttaaggaataatggcattattgccttagttgacaatatagaatttgctgcagaaattataaattttattgctccagaacatttacatatacata

SEQ ID NO: 205836 - DNA, 808 bp, Unknown
  Bacterial polypeptide expressing nucleotide sequence isolated from the Sargasso Sea
ggaaatttaaatccatatttagcagcattaattaaatatttaggaattaaagaagtttacaatattggtggagctcaagcaatagcggcattaacttatggtactgaaactattaatcctgtagataaaatttttggtcctggcaatgcatatgtcactagcgcaaaaaagcaagtatttggtaaggtaggtattgatttaatcgctggaccttcagaaataacagttattgcagatgaaaaaaacaatcctgattgggtagctgctgatatcattgcccaagctgaacatgatgaaagatcacaagctattttaattacgaatagtgaaaaattttcttcaaaggtattagttagtataaagaaaaaaattaaaaaacttccaaaaaaaaatataattgaaaaaagcttaaaaaattatggtgcaataattataatcaataaatttaaaaatgtttctaaaattgtaaatttaatttctcctgaacatttgcatttacatacaaaattagttaaagaagagtttgagaaaattaataatgcaggcttaatatttattggtgaatattctgccgaaccttttggagattatataattggtacaaatcatattctccctacatcaggttccgcaagattttcttcaggtataagtactttagactttatgaagagaacatcgtttgttaaaatgaataaaaagagtgcaacagaattagaaaaatacgtaaaccatatgacttcaatagaaaacttggatggacacaaattatctgttaaagttaggaaaaaaaatagtaataattaaa

SEQ ID NO: 205837 - DNA, 775 bp, Unknown
  Bacterial polypeptide expressing nucleotide sequence isolated from the Sargasso Sea
gcagcgaagaaatgtggtgtaaaaaaaatcttcaagcttggcggagcacaagctattgcagcttttgcttttggaactaaagttgtaccaaaagttgataagatagtcggtccaggaaacgaatacgtcgcattagctaaaaaagaagtttcaggtattgccggaatcgacatgtttgctggtccatctgaagtaactgttgttgcagataaatactctaaacctgagtgggtctcagcagatttaattgcacaatcggagcacgatgagatgtcacaatctatcttagttacaaatagtaaagatttaattcttaaagtaaataaatccataaaaaagcaactcaaatttttgccaaagagaataattgccacgaaaagtttaaataattttggtttagccatcttattaaataatctcaaagaagcaggtaaagtagtaaatattatcgcccctgaacatttacaaatctatacaaaaaatcctgatatcttattaaattcaattaataatgctggttccatttttttaggtccttattctcccgaagcgctaggagactatattgctggaccaaaccacgtattaccaacatctggaacagcaaaattctcatctggcttatcagtttacgattttttgaaaaggcaatcagtaattaaaatatcaaaaaggggtattgaaagattgggtccatcagttataactttgtcaaaatatgaaaatcttcatgggcacgctaattctgtaaaagtgagattaaaaaaaaggtaac

SEQ ID NO: 205838 - DNA, 711 bp, Unknown
  Bacterial polypeptide expressing nucleotide sequence isolated from the Sargasso Sea
taggtagttttgcttatattcaaaaagtaaataaaatcgttggaccgggtaatatctttgttgctggagctaaaaggcaggtttttggagatgtgggtattgaaggaatgattgctggcccatccgaaataacaatattagcggatagcaaaactgatttaaatgaagttactacatctatgattgggcaagcagaacatgactcaaattctcaatgtatattgataactaaaaattctaatttgatcaacaaatttaagaaagatttagaattaaaattaaaagatttaccaagaaaaaatattgcatctaaaagtatcaaaagtaatggactaattttaaaagtatataatgatagacaaattattgatgcaattaatgagatagctcctgaacatttagaaataaatgttagcaattataaaaagtataaagataaaatttttaatgcgggaagtatttgtataggaaaatattctcctatggcattaagcgactatgctgttggaacaaatcatgtattaccaactaattcgtcagctaaattttcatcagggttaggtttaagtgaattttataaaaaaattagccttataactctttcaaaaaaaggtgttgagaaaataggagaatacgctacacatctcgctgagtatgaagaattaaaaggtcatgctttgagtataaaatctagaataaataaggagtaac

SEQ ID NO: 205839 - DNA, 799 bp, Unknown
  Bacterial polypeptide expressing nucleotide sequence isolated from the Sargasso Sea
gtagaatgttctgcggagaatatttgttataatcaagaagatatttcatcagcaaaaaaaaattgcacacaagaaagtattgaggcaatcaaacttgctaaaaatcgtattgaagcatttcataaacatcaattacctgcagattcaatatatgaggatcaagaagaagtaagtataaagactaaatggattccacttgatagtgcaggaatttatatccccggtggtactgcttcatatccaagttcagtattaatgggagtaattccggcgcaagttgctggaattaaaaaaatatctgcgacagttccttgtccaaacaatcaaatagatcctcttgttttggccactttggatttatgtggaattgaaaaaatatacaaaattggaggtgctcaggcaatagctgcacttacatggggaactgaatctgttgaaagtgtggatataattattggacctggaaataaatgggttgccgaagcaaaaaaacaggctctttcaaatataaatattgatatgttagcgggacctagcgaaatattaattttagcagatgaaaataatagagcagattggattgcagctgatcttttatctcaggcagaacacgatatttctgctcaagcaattttagtaactgatagtgaaaatttattagaaaatgtaaataaagaattagttagtcaaacaaagagtctcaagagaaaagatatagctaaaagaagtatcgttgaaaatggttatggtattcttgtctcaaatattaatgatgcaattgagattattaataatatag

SEQ ID NO: 205840 - DNA, 746 bp, Unknown
  Bacterial polypeptide expressing nucleotide sequence isolated from the Sargasso Sea
gcaaaaaaatggtggagtaaaaaaaatttataaaattggaggagctcattttattgctgcatttacttatggaacaaaaaattttgttaaagttgataaaatagttggacctggaaatatttttgttgcaactgctaaaaaagaagtttttggtgatgttggtattgatatggtagctggaccatctgaggtgagtattgttggagatataaattctgatccaaacttaatcgctgctgatttaattgctcaagcggagcacgatatttatgctcagtctattttaattactaataatcaaagattaattaaatcagtaaataaatgtctaaaaaagcaattgaaaaatttacctaaaaaaaaaatagcggcaaagagtttaaaaaattttggtttagcgatttatacaagcaaaaaaaaaaaaatttgtgaaatagtgaatataattgcaccagaacatttagagttgcacacaactttcaataatgaaattattaaaagtgtaaaaaatgtgggttcaattttcattggtaaattttcgccagaggctataggcgattatatagctggaccaaaccatgttttaccaacttctggatctgcgagattttcttcaggtttatcagtgaatgattttttaaaacgacactcactaataaaaataacaaaaacaggtattgaaagattgggcgcatcggttataaatttagcaaagcatgagaatttagatggtcatgctaattctg

SEQ ID NO: 205841 - DNA, 847 bp, Unknown
  Bacterial polypeptide expressing nucleotide sequence isolated from the Sargasso Sea
aatgataaaagtaattaactgtaataaaaaaaactacttatttaacttaacaaaatttttagatttaaggagatttgaaaaaagaattgaaagtaaaattatatctaaaattttaaaagatattaaaaaaaataaaaataaaagtcttttaaattacgagaaaaaatttagcaaaaatagtcaaattaaaccaagtattaagcaaattaacaaagcaattaaatctttagatccaacagttaaaagagctatagattttacttataaacgtattctcaaattccataatttacaaaaaactaaagatattttttataaagataatctaaataataaaattgaatataaatatgtgccaattcaatcggttggcatttatgttccagcaaacttaccatctacattattgatgaatgccatcccagcaaaaattgcaggtgttaaaagaattgtactagcgaatccaaaaaataaaggaaaattaaaccctgcagttttatatgctgcaaaaaaggtaggaataaaagaaatttattcaatggggggtgcacaagctattggcagtttaacttatattcaaaaagtaaataaaattgttggacctggcaatatctttgttgctggtgctaaaagacaagtttttggagatgtaggtatcgagggaatgattgcaggtccatctgagattacagtgttagcagatagtaaaactaatttaaatcaagttactacatctatgattgggcaagcagaacatgacccaaattctcaatgtatattaatcactaaaaattctaatttgatcaaaaaatttaagaaagatctagaattaaaattaaaagatatt

SEQ ID NO: 205842 - DNA, 220 bp, Unknown
  Bacterial polypeptide expressing nucleotide sequence isolated from the Sargasso Sea
gctatgggagactatcttgcaggaccaaatcacgtactacctacatcaggtactgccaaattttcgtctggcttatccgcatatgactttttaaaaagacaatctataattaaaatatctaaatcaggcattgaaagacttggttcttcagttataaatttggctgaatatgaaaatttacatggacatgctaattcaataaaaataaggattaaataaa

SEQ ID NO: 205843 - DNA, 523 bp, Unknown
  Bacterial polypeptide expressing nucleotide sequence isolated from the Sargasso Sea
gctgaacatgatgaactttctcaatctatacttattacagaaagtaaagaattaattcacaaagtaaaacgatttataaattatcaaataaattttttaccaaaaaagaaaactatatcacatagccttaaaaactttggattaattatttttgtcaaaaacattagagaagcaacaggtgttgtaaataaaatttcaccagaacatttacaaatatgtacaaaaaaacctgagagttatttaaaacttataaataatgctggttcaatttttataggatctttttcaccagaagctatgggagattatattgctgggcccaatcatgttcttcctacctctgggaccgctagattttcatctggtctgtctgtaattgactttttaaaaagacaatcggtaattaaaatttcaaaatcaggtattgaaagacttggtccatcagttataaatttagcaaattatgaaaatttacatggtcacgcaagttctgtaagaatgagaataaaaggtaaaaattgaa

SEQ ID NO: 205844 - DNA, 808 bp, Unknown
  Bacterial polypeptide expressing nucleotide sequence isolated from the Sargasso Sea
gatttcaaaaacaattgataaaaaattaaaagactcaattgatattgcttttaaaagaattaaacaatttcactcaaaacaaaaaattaagtcttttaaatatcatgatgagtttaaaaacgaactttcgtataattactcacccattcaaaatgttggtgtttatgtaccaggaggtactgcaagttatccaagcactgtcctaatgaattgtattcctgctttagtggctggagttgaaaatatttatttaacaacaccggcattaggatctgatgttaatcctgcaattatttatgctgctaaaaaatgtggagtaaaagaaatttataaaacaggtggagcgcattcaatagctgcattaacatatggaactcgaacttttaaaaaagttgataaaatagttggcccaggtaatgcgtttgttgcgttggcaaaaaaagaagtttttggagaagtaggtattgatatggtagcgggtccatcggaagttagtataatagcagataaatattcaaaacctgattggatagcctcagatttaatagctcaagcagagcatgatatatttgcacaatccattcttattactgatagtaaagacttaatcaattctgtgaacgttagtcttaaaactcaattgattgatttaccaaaaaaaaatattgcctctaaaagcataggaaattatggtttagcaatatatgcaagttcccaaaataaaattgcagaaatagtaaacactatagcgccagagcacttagaaataaattttaaaaagtacaataaaattataaaaaaaatcaaa

SEQ ID NO: 205845 - DNA, 705 bp, Unknown
  Bacterial polypeptide expressing nucleotide sequence isolated from the Sargasso Sea
ctttaggtaccaaaacaattaagaaggtagacaaaatttttggtccagggaacgcttatgttgcatctgccaaaaaacaattttttgggactgtaggaattgacatgattgccggaccatcagaggtattggttgttgctgattcaaaaaataaccctgatcacatagcgatagacttgttagctcaagctgaacacgatgaattagcccaatcaatattaattactgatgacaaaaacttttctgacaaagtaattaaaagtatcaataattttcttaagaacttagagagacgaaagattgccatgtcaagttggaataattttggagcagttattatttgtgatgatctaaataaatcagttgaattaataaataaaattgcacctgaacatttagaaattgcagttgaaaaaccaaaaaaatttctcaaaaaaattaggaatgccggtgccatctttttaggacgtttcacaccagaggcagtgggtgattatgttgccggtcctaaccatgttttacccacagatagaactgcaagattttcttctggattaaatttattggattatctaaagagatcatctgtagttgaatgtaacaaaagaaatttaagcagaattggaaaagatgcaattaatcttgcatatgaagagggtttacaagctcatgctttatcaatagaatgcagaataattaaataat

SEQ ID NO: 205846 - DNA, 724 bp, Unknown
  Bacterial polypeptide expressing nucleotide sequence isolated from the Sargasso Sea
cgttgccgcgcttgcctatggcaccgacagtatccgttcggtcgacaagattgtcgggccgggcaatgcctatgtcgctgctgccaagcgccaggtctatggcaccgtcggaattgattcgatcgccggcccgtcggagatccttgtgattgccgattccagtaatgatcctgcctggattgccgccgacctgctgtcgcaggccgagcatgacgaggctgcccaggctatcctgatcaccgacgatgccgtcttcgccgatgcggtggacaaggctgtcgagacgacgctggcaacgctggagcgtgctgccgttgccgggcagtcatggcaggacaacggcgccatcatcacggtggcttcgatggatgacatgccgacgctggccaaccgcatcgccgccgaacatctggaacttgccgttcgcgagccgcgaagctggcttggccggatccggcatgccggcgccgtcttccttggccgttacacgccggaagccatcggcgattatgttgccgggccaaaccatgtcctgccgacggcacggacgtcgaaattctcgtccgggctcggtgtcgtcgatttcatgaagcggacgaccacggtcgaatgtgacgccagcagctttgccagcatcgcgcccgcaggggtcgagcttgccaatgccgaaggtcttggcgggcatgccctgtcgatgaccatcaggatgaacgcgcggagctga

SEQ ID NO: 205847 - DNA, 580 bp, Unknown
  Bacterial polypeptide expressing nucleotide sequence isolated from the Sargasso Sea
cgttgttgcagatagaactgctgatccagatttagttgcagcagatttaatagctcaagctgaacacgatatttatgctcaatcgattttaatcactaatgataaagatttaataaaattagttaataaatccattaaacaacaattagaaaaattaccaaaaaaaaatatagctaaacaaagtttgaaaaattttggtttagctattttagctaataatagaaaaaaaataatagagatagttaacactattgcgcctgagcacttagaattgtgcttaagaaataatgatcaaatcataaaaggtatcaaaaatgctggctcaatatttgttggaaaatattcgcctgaagctataggagattatttagcaggacctaatcacgttttacctacctcaggatctgcaagattttcatcaggactatctgttagtgattttttaaaacgacactcaactattaaaataacaaaaacaggtattgaaagattaggatcatcagttataaatttagccatgcatgaaagtttagatggacatgcaaactcagttaaaatgagattaaaaaaggaaaattaa

SEQ ID NO: 205848 - DNA, 637 bp, Unknown
  Bacterial polypeptide expressing nucleotide sequence isolated from the Sargasso Sea
tatgataattaaaaatataatctataatgacaaaaatttttttaatcagttaaagaaatttttagaaaagagaaaaatagaccaaaatcaaaacagttccattgtaaaaaaaattataattgatgtaaagaaagataaagacaatgcgattttaaaatatgagaaaaaatttaacaaaaattcacagataaaaattagtggctttaaatattcaaataacgaaataaaaaaattaataaaaaatcttgataatagaacaaaaaaatctatcgatatctcttttaatagaataaaaaaatttcactctaagcaaatattaaaaactttttcatttagagataatcataatattaaactgtcttacagatcgagccctattgacagagtaggggtttacgtccctggtgggactgccaattatccaagcactgtgcttatgaattgtatacccgcattagtagctggtgtaaaaaatatatatttaacaactcccactgataaaaaaaatacgaatcctgccgtaatttatgctgctactaaatgtggtgtaaaggagatttacaaaataggtggcgctcaagcaatcgcagcgtttgcatttggaacaaaaaaattttgcaagttgataagattgtag

SEQ ID NO: 205849 - DNA, 916 bp, Unknown
  Bacterial polypeptide expressing nucleotide sequence isolated from the Sargasso Sea
cgaattataaattttcattctttacaaaaattaaaaaatatttcttatacagacaaatttaaaaataaacttgagtataaatatttgccattagagtcagttgcaatttatgttccaggttcacttgtgtcttatccttcaagtgtacttatgaatgctattcctgcaatagtagcgggagtaaaaagaattataatgataaatccaggttttaaaggaaatcaaaatcccgctgttttgtacgcagcacgaaaatgtaaaattaaagaaatttattctattggtggtccttctgctgttgcagcagtttcctatggaactaaaaaaataaaaaaagttgataaaatagttggacctgggaattcatatgtggcagcagcaaaaaaagaggtttttggggatgttgggattgaaggtatgacagctggcccttccgaaattactattgtttgtgataagttttcaaatcctgagtgggctgccagtgatctaattggtcaagcagaacatgatcctcaagcacaatgtatattgatttcaaaagataaaaacttaatttacaaagtccaattagaaatctccaaacaattaaaaagtattccaagggaatctgtagcaaaaaaaagtttaaagagaaatggaattttaatgcatgtagctaaagaaagtaaaataattaatatcgtaaacaaaattgcacctgagcacctggagttaaatgtaaagaactacagatcttttgtatcaagaataaaaaattctggttcaatatgtttaggtaaatacgctgttatggcaatgacagattataacattggatcaaatcatatattgccaaccaatgggtccgcaaaatattcaagcggaattagtgttaacgaattttataaaagaatttcatacataaacttatcaa

SEQ ID NO: 205850 - DNA, 630 bp, Unknown
  Bacterial polypeptide expressing nucleotide sequence isolated from the Sargasso Sea
aaaaagaggtttttggagatgtgggtatagatatgttcgctggaccatctgaagttacagtgattgctgatagatattcaaaacccgattgggttgctgcagatttaattgcacaggctgaacacgataaaatgtcacaatctatactggtaaccgacagtaaagatataatttttaaagttaaaaagtttatagatgcccagctaaggtttttacctaagaaaaaaattgttttaagtagctttaaaaattttggaatcgctatacttacaaaaaatgtcagagaaacatcagaagttataaataaaatttcacctgaacatttggaaatttatacaaaaaaaccagaaacatacttaaaatttgtaaagaatgcaggttctatttttctaggagcctattcaccggaagcaatgggtgattatcttgctggacccaaccatgtccttccaacttctggaactgccaagttttcttcaggtttatccgtttacgattttctaaaaaggcaatccgtaattaaaataacaaaatcaggtattgaaagacttggtccattagttataaatctggctaagtatgaaaatttacaggggcatgctaactctgtaaaaattagaattaaataag

SEQ ID NO: 205851 - DNA, 678 bp, Unknown
  Bacterial polypeptide expressing nucleotide sequence isolated from the Sargasso Sea
  misc_feature (6)..(6): n is a, c, g, or t
aaatgnttggtccgggaaatatttttgtagcacaagctaaaaaacaagtttttggtgatgtaggaatagaaggaatgatagctggtccatcagaaatcacgattttagctgataaaaaaacgaatgttgatgaagttataacatctatgattggtcaggcagagcacgatgtaaatgcacaatgtattcttataaccaaagataagaatttaattaatgaagtccaaaaaaatatttttaaaataaatataaaaattcctagaaaaaatatttcttacaagagtcttaaaaaaaatggcttaattatttttgcgaaaacagatattcaaattaccgaagttatcaatgagatagcaccagaacatttagaattaaatatcagtaattataaaaaatacctaaacaaaatcaacaatgctggaagcatttgtattggcaaatactctccaatggcagttaccgattataattcaggtacgaaccatgttctaccaactttagcatcctcaaaattttcgtcaggcttaaatctcgatgaattttataaaaaaattagtcatataaaactgtcaaaaaaaggtgttgaagttataggaaaatccgctacacatctggctgagtatgaacaattgtttggtcatgctttaagtattagatctagaatgaggagaaagtaaa

SEQ ID NO: 205852 - DNA, 499 bp, Unknown
  Bacterial polypeptide expressing nucleotide sequence isolated from the Sargasso Sea
acaatcaatactagttactgatagcaaagatatgattcttaaggtaaaaaattttttagaaatacaattaaaatttttacctaaaagaaaaatagcatcaagtagtctcggaaaatttggttttgcaattttagttagaaattcgcaagaagtatctaaagttgtaaataaaatttctcccgaacatttagaaatatatacaaaaaaaccagacatttatttaaaatcgattaataatgtaggctctatttttttaggggcctattctccagaagctgtaggagattatcttgcaggacccaaccatgtccttccaacttctggaacagcaaaattttcttctggtttgtcagtttacgattttttaaaaagacagtctgtaattagaatgacaaaaagaggtattgaaagattgggtccatccgttataaccttatcaaaatatgagaatttacaaggtcacgctaattctattaaagtaaggattaaaagaaggtag

SEQ ID NO: 205853 - DNA, 451 bp, Unknown
  Bacterial polypeptide expressing nucleotide sequence isolated from the Sargasso Sea
ttatcttgttaagcaacttaaattcttaccaaaaaaaaagatcgcatcaataagtttaggtaaatttggtttagcaattttagtaagaaattcacgtgaagtttcagaaataactaatataattgctccggaacaccttcaaatttatactaaaaaacctgatagatatttaaaatcaattgaaaacgctggatcaatattcttaggcgcatattcacccgaagcagttggtgattacattgcaggacctaatcatgtgctcccaacatcgggcactgcaaaattttcatctggtttatctgttttagattttcttaaaagacaatcagtaattaaaatttctaaaagaggtattgaaaaattaggcccatccgttgtaaccttatcaaaatatgaaaatctctacggacatgctaattctgtaaaacttaggcttaaagaaagggagtaa

SEQ ID NO: 205854 - DNA, 652 bp, Unknown
  Bacterial polypeptide expressing nucleotide sequence isolated from the Sargasso Sea
gaatttgtatctttggcaaagaaagaagtattcggagaggtagggatagatatgtttgctggtccttccgaagttactattgtagccgacaaatattccaaccccaaatggattgcggccgacttaatagcgcaagcagaacatgatgagctttcacagtcaatacttgttacagaaagcaaagaattaatctataaggtaaaaaagtttataaattctcaaactaaaattttaccaaaaagaaaaattatatctagcagtttaaaaaattttggtttagttgttttagctaaaaacaagcaaaagatagcaagcgttataaataaaatctcaccagagcacttagagatatgtacaaaaaaacctgaaagttatttaaaacttatcaacaatgcaggctcaatttttttaggttctttctcgccagaggctatgggagattatcttgcgggacctaatcacgtgcttcctacctctggaactgccagattttcttctggtttatcagtattagattttttaaaaagacaatcagtaattaaaatttcaaaatcaggtattgaaagacttggtccatcagttataaatttagcaaattatgaaaatttgcacggtcacgctagttctgtaagaatgagattaaaaaggtaaa

SEQ ID NO: 205855 - DNA, 502 bp, Unknown
  Bacterial polypeptide expressing nucleotide sequence isolated from the Sargasso Sea
gacgctcagtcgatcctggtcagcccggatgctgacttcctcgatcgtgtcgccgagagcatcgccaagctgctgccgagcatggagcgtgcagagatcatccgcacttcgctggagggccgtggtgcgctgatccaggtggctgacatggagcaggccatcgaggtggccaaccgtatcgcgcccgagcacctggagctttcggtcgccgacccggaggcctggttgcccgagattcgccacgccggcgcgatcttcatgggccgttacaccgcagaagccttgggcgattacgtggctggcccgaatcacgtgttgccgacctccggtaccgcgcgtttttcttcgccgctgggggtgtatgacttccagaagcgctcgtcgatcatcttctgctcgccggatggtgcgtcggagctgggcaaaagcgcttcggtgctggcccgtggcgagtcgctgaccgcgcatgcgcgcagcgccgagtaccgcatcaagccctgag

SEQ ID NO: 205856 - DNA, 772 bp, Unknown
  Bacterial polypeptide expressing nucleotide sequence isolated from the Sargasso Sea
tctgttaagagaacttaaaatcaaagaaacttactttgctggtggagcacagggtattgctgcattagctttgggaactaagacaatcaaagcagtaaataaaatatttggaccaggtaatgcttttgttgcagaagcaaaaaaacaattatttggtacggttggaattgatttaattgcagggccctcagaaattattgttgtagcagataaaaaaaataatcctaaatgggttgcagcagatcttatggctcaagctgagcatgatataaatgctcaatcaattttaattactgataatttaacttttgctaaagaagttctaaaaaatatagaatatttaaataaaaatatgcttaagaagaaaactatttcaagaagtcttaattgtaatggattaattttattggtaaataatttcaaaaactgtgctgatataataaattttatagcaccagagcatttacatttacatataaaatcatataaacgaattctcccaaaaatatcaaatgccggaggaatatttttaggagaatattcggcagaagcttttggagattatattgttggaacaaatcacattctaccaacctctggtgctgcaaaattttcatctggtttaggtgttttagattttatgaaaaggagctcaatagtccaaatgaattcaaaatctttccaagatttatcaaatgacacaaaaaatatggcaagtattgaaggacttgaagcacataaaatgtcagtaacaattagacaaaagaagtaa

SEQ ID NO: 205857 - DNA, 331 bp, Unknown
  Bacterial polypeptide expressing nucleotide sequence isolated from the Sargasso Sea
aatcaatttgcccctgaacacctagaaattcttactaaagattcaaaaaaaattctcgaaggtatagaaaatgcaggagcgatttttttagggaaatggaccccagaagctgttggagattatcttgctggaccaaatcatactttacctacatcaggaaattctagatttagcggttctttgggggttgaaacttttatgaaaaatacttcagtaatagaatttaatgaagaaagtttaaaagttaatagccttgatattattaatctcgctaaaagtgaaggcttacatagccacgctaactcagtacaaataagatttgaagattaac

SEQ ID NO: 205858 - DNA, 599 bp, Unknown
  Bacterial polypeptide expressing nucleotide sequence isolated from the Sargasso Sea
gatgccggttttcctcaattttgatgatccccaattcgatcagcattttgatgagattttaaattctgagcgtgacgccaatcgggatgttaacagtgtagtttctgatattttagcagatgttaaaagacgaggggatgaagctctaatacaattaactgatcggtttgataaaattaaattaacaaaagaagagttaagcttttcaaaaaaagaaataaacgagctttcagctgaagtaaaaagcaatgagcgtaaagccttagacttagctgccagtagaataaaagtattccatgaaaaacaaaaacctgaggatgtaatttggattgatgatattggagttgaacttggatggagatggacgcctcttgacgctgtaggtatttatgttcctggtggattagcaagttatccatcttcagtgcttatgaatgcaataccagccaaagttgctggtgtaaaacgtgttgcaatggttgttccaacgccgcatgggaaaattaatccggcagtcctgtatgctgcaaaactttctggtatagatgaaatatacagaattggaggtgcgcaagctatcgcagcgctagcttatggaa

SEQ ID NO: 205859 - DNA, 757 bp, Unknown
  Bacterial polypeptide expressing nucleotide sequence isolated from the Sargasso Sea
aggtattaaggaaacatattttgtaggtggagctcaagcaattagcgcgctaacatatggcactgagactattaagccagtaaataaaatatttggtcctggtaatgcttatgtagcagaagcaaaaaaacaaatatatggaaaagttggaatagatctacttgcaggaccatcagaaataattattgtcgctaacaataaaaatgatccagattgggtagcgtctgacttaatagctcaagcagaacatgatgaaaatgcacagtccattttaattactgataataaaaatttttcatcaaaagttataaattcaattacaaaaattaaaaaagatcttccaaagaagaaaataattgagaaaagtttaaataataatggtgtaattattttggttgacaatattgaacacgctgcaaaaattataaattttattgcaccagaacatttacacttacacatttctaattataaaaaattattatcaaagataaataatgcaggtggtatttttttaggtgagtattctgttgaagcttttggtgattacattgtaggaactaatcatgtattgcctacatcaggagctgcaaaattttcatcaggattaggtgttttagattttatgaaaagaaactctgttgttgagatgagccaaaaatcttttaatgctctttcagaagatactcaaaaaatgtctggacttgaaggtctagatggacataaactgtcagttaaaattagacaaaagaaataa

SEQ ID NO: 205860 - DNA, 421 bp, Unknown
  Bacterial polypeptide expressing nucleotide sequence isolated from the Sargasso Sea
ctgaattatatccctggcggcactgcttcatatccagtttcagtattaatgggggtaattccggcgcaagtgctgggaattaaaaaaatatctgcgacagttccttgtccaaataatcaaatagatcctcttgttttggccaccttggatttatgtggaattgaaaaaatatacaaaattggaggtgctcaagctatagctgcacttacatggggaactgaatctgttgacagtgtagatataattatcggacctggaaataaatgggttgccgaggcaaaaaaacaggctctttcaaatataaatattgatatgttagcgggaccaagcgaaatattaatcttggcagatgaaaataatagagcggattgggttgctgctgatcttttatctcaagcagaacacgaattccgctcaggca

SEQ ID NO: 205861 - DNA, 942 bp, Unknown
  Bacterial polypeptide expressing nucleotide sequence isolated from the Sargasso Sea
ttaaatcccaatggaaaccaattgagtcagtgggattatatgtgcctggcggtaaggctttctacccatcatcattaattatgaatgcaatacccgcaaaaattgccggtgttaaaagaattgtctgtgttacaccaccaacactagaattaaacccatattttttagcattgctaaatgagcttaatattaaagaaacttattttgttggaggtgcacaagcaattgctgctcttacatatggtacaaaaacaataaaaccagtaaataaaatttttggtcccggcaatgcttttgttgctgaagcaaaaaaacaactttttggaaaagttgggatagatttaattgcaggcccatcagaaattgttgtagttgctaatcatgaaaataatccgcaatgggtggctgctgatttaatggctcaagcggaacatgatgctaatgcacagtcaatattaataactgataatttaaaatatgctaaattagtattgcaagaaattaaaaaattatatccattatctaaaaataaaaaaattatcgaaaaaagtcttacaaataatggattaataattatagtaaaaaatattgaggagagtgcaaatattataaattttattgcacctgagcacttacatatacaaataaaaaattataaatatttattaaacaatattaataatgccggaggaatcttcataggtgattattcaaccgaagcatttggagattatattgctggaaccaatcatgtacttccaacatcaggcgctgcaaaattttcatctggattaggagttttagactttatgaaaagaagctcagtagttgagataaattttaaatcatttaatcagcttaaagaggacacagagaatatggcctcgatagaaggcttagatgcacataaattatcagttaaaattagacaaaataaataaa

SEQ ID NO: 205862 - DNA, 585 bp, Unknown
  Bacterial polypeptide expressing nucleotide sequence isolated from the Sargasso Sea
ccagggaagtgctggtgatcgcagaccacaccgccaaaccagagcaggtggcggccgatctgctggcccagggggagcacgatcccctcgcctcctccgtgctgatcaccaactcgcaccagcttgctgacgtgatcggtaccaccatctccgaacagctggagatgcacccccgtcgcgacatctgcgaggcatccctgcgggactggggactggtggtggtctgtgacgacctcgaaagctgcgcccagctcagtgacagctttgcccccgagcacctggagctgctggtggagcgtccggaggccctggccgatcggatcgaacacgccggtgccatcttcctgggcccctggtcaccggaggcggtcggtgattacctggctggcccgaaccacacattgcccacctgtgccgcggcccgcttcagcggtgccctcagcgtggaaacgttcatgcgccactcctcgatgatccagttcaaccgcgcggccctggaggccacggcctcagcggtgtgtgaactggctgaaagcgaaggattgcacagccatgccgaatccgttcgcaagcggctcagctgag

SEQ ID NO: 205863 - DNA, 712 bp, Unknown
  Bacterial polypeptide expressing nucleotide sequence isolated from the Sargasso Sea
tatggggacagaatctattgaagcagtagataaaattgttggtccaggtaattcttttgttgcagctgcaaaaagaaaattatttggccaagttggaatcgactctgttgctggaccatctgaggttcttataattgcagataatgaccaaaatccgtcatggatagctgcagatcttttagcgcaagcggagcatgatgaaaatgcaaaatcaatcttaataactgatagtttaaattttgcaaaaacagttgaatcagaagtaaataaacttttagttaatttaagagataatggcactactaaaaaaagttggtttaaaaacggagtaattattgtagtaaatgatataaatgattcaattgaaatagctaacagaatagctgcagaacatttgcaaatctgtactaatgatcctggattaatattaaataatattgtaaatgcaggagcaatttttttaggagagcatacacctgaagtttttggtgactatatattgggttcaaatcacgttttacccacatccagggctgctagattctcttcctcactttcagtattagattttatgaagagaacttcaatatcaaaaatgtcattagcagcttccaagtatttgggagctgcagctaaaacacttgcaacttctgaaactcttaatgcacatgctatttcagcaagtttacgtatttcttcaaaagatgaataa

SEQ ID NO: 205864 - DNA, 535 bp, Unknown
  Bacterial polypeptide expressing nucleotide sequence isolated from the Sargasso Sea
tatgattacttggtcatctctttcggtaaatgagaaaaaacaggcgctagcccgcccggctatggccaatagccaacagttaaagcagaccgtgggcgacattatcgcccgcgttgaaaaagaaggcgatgaggcagtacttgattacacacgtaaatttgactgcccagacttaactagccttgtactttcacaagaaaacattgatgctcttgctgcgaaggtaacgccagaggtagcaagtgctatcgatactgcgttcaacaacataaaaatgtttcacgaagcgcaaatgcctagtgatatcgcgctaaccacaacgcctggtgttaaatgcgagctgcgcttcaccgcccttgatgcagtgggtctttatattccaggcggcagcgcgccgcttccttctaccgtattgatgctaggcgtacctgcattggtggcgggctgcgaaaataagctactttgtactccaccaaacaaagaacagcttatcgcgcctgaaattgcgtatgcggccagaaaatgcggcatcgac

SEQ ID NO: 205865 - DNA, 688 bp, Unknown
  Bacterial polypeptide expressing nucleotide sequence isolated from the Sargasso Sea
ccctgtagataaaattgttggccctggaaatatttacgttgctactgcaaaaaagtttgtatttggtaaagttggtattgatgcttttgctggcccttccgagatcttggttgttgctgactctaaaggaaatgctgaatggacagcaatcgatcttttatctcaatcagagcatgataaagggtcaagagctattttaatttgtgactcaagtgattttgctgataaagttgaagaaaaaattaaattccatttaagtggtattagtaggtcagaaatagctgttaaaagttggggtgataatggtctaataatcattgtagataatattaacaatgtaggtcctattattgatagaatcgcacccgaacacttacagttatcgattgaaaatccaaaagagttacttagcaagtttactaatgcaggctctatttttcttggtagaaatacgccagaagctctgggagactatatagcaggtcctaatcatgtattacccacttctcgaacatctcgttttacatcaggtttatcagttttagattttctaaaaagaagttcaattatagagagtagcaataagtctttgaatgcgcttagtgaggatattctggctattgcagagtgtgagggattgtctgcacatgcgttatctgtttcaattaggctaaacgataaaacttag

SEQ ID NO: 205866 - DNA, 904 bp, Unknown
  Bacterial polypeptide expressing nucleotide sequence isolated from the Sargasso Sea
atgaagatcataaataataaagaatacgctatccaagagttaaaaaggattgctactcgaactgactcagaaaacaataataaaataaatgcaattgtagaagaaatacttcaagaggtaaaaaattatggagatatggcagtggaaaaatataccagaaaatttgatggttttaaccctgaccctatgcaagtcagtaaagaggaattaaaggatgcatggaatgaaattgatagcaatttaaaaagctctcttgagttagcctataacagagttaaaaaattccatgaaaaagaaattccatcatccttcactttaaaaggagaacatggcgatacagtccaacggagatggttaccagtgaaaaatgcaggtatttatatccccggaggtagagctgcttatccaagtactgttttaatgaatgcaatacctgcaacagtagcaggagttgaagaaatcataatggtatctcctggaaatagagaaggtaaaataaacaaaactgtactagctgcagctcacctatcaggaatcaataaagtttttagaattggtggagctcaagcaattggtgctctagcatttggcacaaatcaaatcaataaagttgatgttattacaggtccagggaatatttatgtaactactgcaaaaaaactaatttatggctctacaggaattgattctttggcaggtccaagtgaaatattaatcattgcagatgaaacagctaaaagcactctaatagcatctgatttacttgcacaagcagaacatgatcctttagcgtcttcaatacttttaactacttcaaataaacaggcaaaagaagtattaggagaaatttataaaaaaatagataatcatccaagaaaagaaatttgcttggattcaataaaaa

SEQ ID NO: 205867 - DNA, 850 bp, Unknown
  Bacterial polypeptide expressing nucleotide sequence isolated from the Sargasso Sea
attttttcattaaaacgtaatgcaattaatagtacaattaggaagattcgtgagtctcaggaaatctcatacaaaaatgtaaataaaactgttgcttcgattattgatgatgttaaaaaatttggtgataaagccatatttaagctaacaaagcaatatgataattttgatttaaatcttcaaaatttaaaagttaaaaggtcattgattacaaattcttcaactacattgaattccgatttgaaaaagtcaattaagaaagctattcaacgcgtttctttttatcagaaaaaaaaattacctagatcttttttatttaaagataatttgggaaataaattgggatggtcagttagccccttggacagtgtaggaatatatgttccaggtggaacagcatcttatccatcaagcttgattatgacagcagttttagcaagagttgcaggtgttaaaaaaatatcaattgttacaccaccctcgcaacatggtctcaataaagcagttttatttgttgcagattgtttaaagatcgacaatatatatcaggtaggtggggcacaagcaatagctgctttagcttatggaaccaagacaattgagaaagttaataaaatcgttggtccaggaaatatttttgttgcaactgccaaaaaacaggtttttggtgatgttgggattgacatggtggctggtccaagcgaggtccttataataggggataagagttctagttctgaaataattgctgcagatttattggcacaggctgaacatgatattaatgcatcctcaattttagtaactacatctaaaacattagctcagaaagttttagctgatgtaaaaa

SEQ ID NO: 205868 - DNA, 936 bp, Unknown
  Bacterial polypeptide expressing nucleotide sequence isolated from the Sargasso Sea
ataaaatagaatataaatacttaccaattcaatctatcggcatttatgttccagcaaacttaccgtcaactttgatgatgaatgctattccagcaaaaatagcaggtgtaaaaagaattgtactagcaaacccaaaaaataatggaaaattaaattctgctgttttatatgcagcaaaaaaattaggaatcaatgaaatttattcaatgggaggcgcacaagccataggtagtttagcttatattcaaaaagtaaataaaattgttggtcctggcaatatctttgttgctggtgctaaaagacaagtttttggagatgtgggtattgaaggaatgattgccggaccatctgaaataacaatattagcagatagcaaaactaatttaaatgaagttactacatctatgattggccaggcagaacacgactcaaattcacagtgtatattaatcaccaaggatttaaatttgattaaaaaatttaaaaaagatttagaattaaaattaaaagatttaccaagaaaaaatattgcatctaaaagcattaaaaataatggactaattttaaaagtatataatgatagacaaattattgatgcaattaatgagatagctcctgaacacttagaaataaatgttggcaattataaaaagtataaagataaaattgttaatgcgggaagtatttgtataggaaaatattctcctatggcattaagcgactatgctgttgggacaaatcatgtattaccaactaatgcatcagctaaattttcgtcaggcttaagtttaagtgaattttataaaaaaattagccttataactctttcaaaaaaaggtgttgagaaaataggagaatacgctacacatctcgctgagtatgaagaattaaaaggtcatgctttgagtataaaatctagaataaataaggagtaac

SEQ ID NO: 205869 - DNA, 763 bp, Unknown
  Bacterial polypeptide expressing nucleotide sequence isolated from the Sargasso Sea
aatgaaatatataaagttgagaggagcacaagcaattgcagcattagcaattgggacagattcaatcaaaaaggttgataaaatttgtggccccgggaatgcttatgttgcttctgctaaaaaacagttatttggttccgttgggatagatatgattgcaggaccttcagaaatacttgttttagctgataggaaaaataatccaaagcaaatagcaattgatttattatctcaagctgagcacgatgaattagcgcagtctatattaataactgataatgaagtatttgcttataaagttaaaaaaaatataattaatgaattaaaaactcttgaaagacggaaaatagcaaaaaaaagttgggaaaaatttggatcgattattattgttaaaaagatctccgatgcaattcaattaatcaatgaaatttctccagagcacctagaattagccataaaggatgctagaaaattatcaaaaaaaatcaataatgctgggtcgatatttattggaagaaacactccagaagctataggtgattatattgctggtccaaatcatattttacctacagatagaactgcaaagttttcttcaggacttaatgtcctagattttcttaaaagaatttctttagtcgaatgtgatttagaaagtttaaaaaaaattggtccaaacgctattttattagcaaaagaagaaggtttaggtgcccatgcattgtctattagttcaagaattgataaagattcaaaaaattaa

SEQ ID NO: 205870 - DNA, 811 bp, Unknown
  Bacterial polypeptide expressing nucleotide sequence isolated from the Sargasso Sea
gctaagattcatccagctattctttacgctgcttcagtggttggggttgataagctgtataaggttggtggggcacaggccatcgcggcgatgacttttggtacagaaaccataccgcaggttcataagatctttgggccagggaaccaatatgtgacggctgctaagcaattggctatcaaatatggcttggctatagatatgccagcaggcccatctgaagtggcggtttatgcagatcattcggccattccagcttttgtagccgcagatttgttgtcacaagctgagcatggagtagattcgcaggtgcttttggtggcagatacacaagaggtggtaaaggctgttcgggaagaactcaatctacaattgaaggatttaccacgacaagagatagcacgcaaggctttagagcatagcatatccattgttttaactgaccaacaaaatgctatcgatttattaaatgattatggagcagagcatttaattttaagtgtacaagaccctcataaaatttcagcaaagataaaaaatgcaggttccgtgtttttagggaatcttaccccagaatctgcaggagactatgcttctggcaccaaccatacccttcctacaaatggatatgccaaaatgtatagtggtgtatcactggatagctatgtgaagatgattacctatcaagagttgacagaggagggtattcgaaatttggggccaattgttgaaaaaatggctgctgcggagcagctggaggcacataaaaatgcggtcaccttacgattaaaatctgtgagtgatgtttgat

SEQ ID NO: 205871 - DNA, 701 bp, Unknown
  Bacterial polypeptide expressing nucleotide sequence isolated from the Sargasso Sea
gacaaaaacaataaataaagttgataaaattgtcggtccaggaaatgaatatgttgcattggcaaaaaaagaagtttcaggagtatctggtattgatatattcgctgggccgtcagaagttactgttgttgcagacaaaaactctaatccagaatggatttctgcagatttaattgctcaatctgaacatgatgagatgtcacaatcaatcttagtaactgaaagtaaagatttaataaataaggttcagtattgtattaacagacaacttaaatttttaccaaagaaaaaaattgcatcaataagtttaagtaaatttggtttggcaattttagtaagaaattcgagtgaagtttcacaaacaatcaatatgattgccccagaacatctacaaatttatacaaaaaaacctaacaaatacttaaaatcaattgacaatgctggatcaatatttttaggagcttattcgcctgaagcagtcggagattaccttgctggaccaaatcatgttttacctacctcaggaactgcaaaattttcatctggtctatctgtatttgattttcttaaaagacaatcagtaattaaaatatctaaaaggggtattgaaaaattaggtccatccgttgtaaccttatcaaaatatgagaatctccacggacacgctaattctgtaaaatttagaataaaagaaaggtagt

SEQ ID NO: 205872 - DNA, 913 bp, Unknown
  Bacterial polypeptide expressing nucleotide sequence isolated from the Sargasso Sea
aaaaaattttttttatcaagacaatctaggaaataaattattttataaatatgttccgatagaatccattggcatttatgttccagcaaaccttccttcaacattattaatgaatgctatacctgcaaaaatagcaaaagttaaaagaattgtactagcgaatccaaaattaaatggaaaacttaatccagctgtattgtatgtagctaaaaaaattgggattaaggaaatttattctatgggtggtgctcaagcaatagctagtttagcatacattcaaaaagtcaataagataataggaccaggaaatatttatgttagcaaagccaaaagagagatatttggtgaagtaggtatcgaaagtatgattgccggaccatctgaaattactattgttgcagatagaaaaactagttttaatgaagttattacatctttgataggtcaagctgaacatgacaaaaattctcaatgtatattaattactaaagatactaaattaattagcaaaattaataaaaatatctttaaatatttaaaaaaacttccgagaaaaaaaataatttatcaaagtcttaataataatggtttattaatcaaagttaaaaatgaaaaacaaattatcgaaataatcaatgaaatagcaccagaacatttagagttaaacatcaaaagttataaaaaatacttgaataaaattactaatgctggaagtgtatgtttaggaaatttttcagctatggcggtttcagattataatgttggaaccaatcatgttttaccaacatatggatcggcaaaattttcttcaggattaaatttaagcgaattttataaaaaaataagctttattaatttatcaaaaaaaggcattgaagttattggcgagaaagctataactcttgccgagtat

SEQ ID NO: 205873 - DNA, 901 bp, Unknown
  Bacterial polypeptide expressing nucleotide sequence isolated from the Sargasso Sea
tctgttggaatatatgttccagcaaatttaccatctactttgttaatgaatgcgattcctgcaaaaattgcaggtgtaaaaaggattgttattgcaaatccaaaaaataatggcaaacttaatcctgcagttctttatgtagcaaaaaaattaggtataaaagaaatttactcaataggaggtgcacaagccataggaagtttggcttatattcaaaaagtaaataaaattgttggcccaggaaatatttatgttgcaagtgccaaaaaagaagttttcggcgatgtggggatagaaggcatgattgctggtccatcagagataactgtacttgctgatggaaaaaccaaattgaatgaagtaacaacttctatgattggtcaagcagagcatgatattaatgcacaatgtatattaatcaccaaagacactaatttaattaaaaaattcaaaattgacttattacgcaaattaaaagatttaccgagaaaaagtatagcttacaaaagtattaaaaataatggcttaataataaaagtaaataatgacaaacaaattattgatattattaatgaaattgctccagagcatttagagttaaatgtagtaaattacaaaaaatatgtagataaaattattaatgccggtagtatttgtataggcaaatattcaccaatggcattaagtgattatgctgttggaacaaaccacgtattgcctacaaattcatcatctaaattttcatcaggattaagtttaagtgagttttataaaaagattagctatattaaattatcaaaaaaaggagttgaagttataggaaaatcagctacacatctggctgagtatgaacaaatgtttggtcatgctttaagtataagatctagaatgaggagaaatt

SEQ ID NO: 205874 - DNA, 865 bp, Unknown
  Bacterial polypeptide expressing nucleotide sequence isolated from the Sargasso Sea
ttaaaggacattctattgaacggtgatagagctttattaaaatataccaagaaatatgataactatgacgcgaaaaaaataaaaaatcttaaagtttcacaaaaagaaataaataattctttcaaaataataagcaaagaggatttatcagcaataaaatttgctgcaaaaaatatttataaatttagtaatttacaaaaaataaaagactggaaatattctgattcaattggcattacttttggtcaaaaatgttcacccattgaaaaagtaggtatatacgttccaggaggatcagcatcctatccatcttctgtcctaatgaatgccataccagcaaaagtagctggtgtagataatatagtcatggtaaccccagccactaatggcgaaataaatccagcagtgttagttgcagcaaaagttgcgggtgtaaattcaatttataagataggtggtgctcaagctattgctgcattagcttttggtaccaagattattccaaaggttttcaaagtggttggcccaggtaataattttgttgcaacagcgaaaaagactttatttggtcagattggaattgatagttttgcaggcccctctgagataatgattgtagccgattctacagccaatgtagattggctgacagcagatatatttgctcaatctgaacatgataatcaagcgcaatcaatattagttacgaacagtcaggagttaattaaaaaggtctcaaaaaatattgaaaaaaaaatccaaaatatgaagagaaaaagaataataaagcattctttagaaaactacggattgatgatcaaaacgaaaagtattagtgaaagcaaaaaaattataaatttggtgc

SEQ ID NO: 205875 - DNA, 910 bp, Unknown
  Bacterial polypeptide expressing nucleotide sequence isolated from the Sargasso Sea
ataattattccaaactcaaaacaaataaaacaatctataaattcacttgataaaaaagtaaagaaagcaatcgatacggcttataatagaatttataaatttcattcacttcaaaaatttaaaaatattgcttatacagataaattaaaaaacaaacttgagtataaatatgtacctttagagtctgttgcaatttatgttcctggttctactgcttcatacccgtcgagtgtgttgatgaatgctattccagcaattgtagcaggtgttaagcgaatagtcatgattaatccaggtcataagggaaaacaaaatccagcggtattatatgccgctaaaaaatgcaaaataaaagaaatttattctattgggggcccttctgctattgcagcagtatcttatgggactaaaaaaattaaaaaagttcataaaatagttggtccaggaaacgcatatgttgcggcagcaaaaaaagaagtttttggtgttgttggaattgaaggtatgaccgcgggtccttcagaagtgactgtcgtttgtgacaaattctcaaatcctgagtgggttgcaagtgatttaattggacaagctgaacatgatattctcgcacaatgtattttgatttcaaaagataaaaatttgttagataaagtaaaaattgaaattacaaaacaattaaaagaaattccaagagcttctgttgcaagaagaagtttaattaataatggaattcttatgtatatttcttcagacgttaaaataataagtgttgtaaataaaattgcaccagaacatttagaattaaatattaaaaattataaatcgttagttccaaaaataaaaaattcaggatcaatatgtttaggaaaatacgcagtcatggcaatgactgattataatgtggatcaaa

SEQ ID NO: 205876 - DNA, 911 bp, Unknown
  Bacterial polypeptide expressing nucleotide sequence isolated from the Sargasso Sea
gatgatgtaagcataaagactaaatggttaccattagatagtgctggaatttatattcctggtggaactgcttcatatccaagctctgtattaatgggcgtgataccagcgcaagtagctggggttaaaaaaatatatgccacagttccttgtccaaataatgagatagatccgcttgttttagctactttggatttatgtggaattgaagaaatttataaaattggaggcgctcaagcaatagctgccttaacatggggaactgaaactgttcaaaatgtagatataataattggccctggaaataaatgggtagctgaggcaaaaaaacaagctctttcaaatattaatatcgatatgctggcggggccaagcgagatattaattttagcagataaagataacagagcagattgggttgctgcggatcttttatctcaggcagaacatgatatttctgcgcaagctattttaattactgattgtgagaactttctagaaaatgttaatgaagaattattaatacaaacagaggcacttaaaagaaaggatatagtcaaaaaaagtattgctgataatggttatggaattcttgtaaaaaatattcaagatgcaattggcattattaacaatatagctccagaacatttatcacttttatgtaaagaaaatgaatatatcgaaaaaaagataactagtgctggagttattttttcaaatgagtggacgccagagtctatgggagattatataattggtccaagccatgttctacctactaacggtatggctaaaagacaatctggtctatctgtttttaattttttaaggcgccaatcaacgatatcaagcaccaaaaaaacaataaacaaacttggtccatcagcaattttattggctgagtgtgaagg

SEQ ID NO: 205877 - DNA, 874 bp, Unknown
  Bacterial polypeptide expressing nucleotide sequence isolated from the Sargasso Sea
aaatttcatactaagcaaaaaattttgtcttttaaatttaaagataaatacaaaaacgagctatcttacaagtattcagcaatagataaagtcggagtttatgttcccggaggtacagcaagttatccaagcactgtacttatgaattgtataccagctatagttgctggagtaaaaaatattttcttaaccactccatgcttggactcaaaaataaatcctgcaattgtttacgcagcattaaaatgtggggtaaaagaaatttataaaaccggaggacctcattccatagctgcattagcgtatggcacaaaaacatttgaaaaagtcgataaaatcgttgggcctggcaacaagtttgttgctcaagcaaaaaaagagatttttggtgaagtaggaatagatatgatagctggtccatcagaagttagtatagttgcagactcctcagccaatccagattttattgcagctgacttaattgcacaggcagaacatgatacaaatgcccaatcaattttaattactaataataaaaacttaattcgattagtaaatatatctttaaaatatcaaatcaaaaaattaccaaaaaaaaatattgcttctaaaagtttaaaaaatttcggcttagcggtattagcttataataaaaaagatattttaaaggccattaacactatagcccccgagcatttagaggtatgcactaatatgaataatgaaataattaaaggtgttaaaaatgcaggatcgatttttataggcaaattttcgcctgaagccgttggtgattatatagctggacctaaccatgttctacctacatcaggctcagcaagattttcatctggtttatctgttaatgattttt

SEQ ID NO: 205878 - DNA, 918 bp, Unknown
  Bacterial polypeptide expressing nucleotide sequence isolated from the Sargasso Sea
cgatatatgtgcccggctctaccgtctcatacccctcaagtgttttaatgaatgctatccccgcaatggtagcaggtgtagaaagaataattatgattaatcctggttataaaggaaaacaaaatccagcagttttatatgcagctaaaagatgtaaaattaaagagatttactctattggaggaccttcagctattgcagctgcagcttatggaacgaaaacaattaaatcagttgataaaatagttggaccaggcaatgtttatgttgctgcagctaaaaaagaagtttttggagacgttggtattgaaggaatgacagctggaccttctgaagttacaatagtatgtgataaatattccaatccagtttggattgctagtgatttaattggtcaggcagaacatgatcctcttgcacaatgtattttaatatctaaaaataaaagtttaatttctaaagttaaattagaaatttttaaacaactaaaaaaaattcctagaaattcaatcgctaaaagaagtttgactaataatgggattttaatgcatattgcttctgataaaaaaattatagaaacagtaaatcaaattgcacctgaacacttagaattgaatattaaaaattataaatcattcatctctagaatttataacgctggatcaatttgtttaggaaaatatgcagtcatggctatgacagattataatgttggatcaaatcatgtattaccaactaatggttctgcaaaattttcttctggaataagtgtaaatgaattttataaaagaatttcttatattaacttatcaaaaaagggtattgaaagtcttgggccatcagttataactcttgcaaactatgaagggttagttggacatgctaattcggtaaaaaaaagaattgggagaaaataga

SEQ ID NO: 205879 - DNA, 765 bp, Unknown
  Bacterial polypeptide expressing nucleotide sequence isolated from the Sargasso Sea
ctgatttatgtcaagtagataaaatatgtagaatgggcggtgctcatgcaattgctgccctcgcatatggaacaaagaatattcctgcagtagacaaaattgttggaccaggcaatatttatgtgacattagcaaaaaaaagtgtttatggtgatgttgggattgataacatagctggaccctcagaggtagttattgttgctgacagaactaataatccagattggattgcaatggatttattttcacaagctgagcatgatgaattggctcagccgatattgattagctcaaattctcaggtacttaagaatgtccaagattctattgagaaacttatacctactatgttaaggaaagaaattatatcaaggtctattaataacagaggtatatttataaagactaaaaataatagagaaatttgcaagattgtaaatgatatagcacctgaacatcttgagttgatgtctaaagattataaaaccttattaaaaactatacacaatgcaggtgcaatatttttaggggaatatagccccgaggtatttggagattattgtgctggaccaaatcatgtgctcccaacctcaggatcagcaagattttcctcgccccttggagttgaagactttcaaaaaaaatcaagtttaattaatgtttcaaaaaagacagccctggagctaagtaagatatcaatatcaatggctttatcagaaggtttacaagctcatgctttatcagctaagttgcgaggaaaataaa

SEQ ID NO: 205880 - DNA, 970 bp, Unknown
  Bacterial polypeptide expressing nucleotide sequence isolated from the Sargasso Sea
atcaccgagtttcataaaccccaaataccgaaggatatagattatacagatgattgtggtgtacgtttaggcagtcgatggcgtccaatagagtctgtaggtttatatgtgccaggcggcactgcagcttatccctcttccgtgttgatgaattctattcctgcacaagttgcaggagtagagagaattgttatggtagttcctgctcctgagggttatcttaatccctcagttttaacagcagctggactgtccggtgttaatgaaatttatcggattggtggagcacaagctattgcatctttagcatatggcacagaaaccattgcctcagtaaacaaaatagtagggcccggtaatgcttatgttgctgcagctaaaaaacaggtttttggggttgtgggcattgatatgattgcaggaccttcggaaataactgtagttgccgattcaaataatgatcctatatggatagctgcagatttgctgagtcaggctgagcatgacgaatcatctcaagcaattttaattactgataacaaatcatttgctcactctgtggagctagctgtgctagagcatctaaataatttacctagatctatagttgctcgatcttcctgggagaggaacggagcaataattctagtgccagaaattgaatcagcaataccaactattaatctaatagcaccggaacatcttgagctcgcgtgtgaccagtgcgagtttatagctgatagggtcataaatgctggagccatctttttaggggcacatacacctgaagccataggtgattacattgccgggactaatcacgttcttccgactggtcggacctctcgtttttcttctgggcttggtgttcttgattttatgaaacggacgtcattagtttcatgtagcccctctagtttacagatgataggtcctgaggctgttactttggcgaatgctgaaggtctgg

SEQ ID NO: 205881 - DNA, 662 bp, Unknown
  Bacterial polypeptide expressing nucleotide sequence isolated from the Sargasso Sea
tttgtctgtgagccaaccggccgtcgctcccctgcgcatcgtgcgggatccggaacaggcccagacagaactacagcgcttatcaagccgcacggctcagacccagcaaagcgaggccagacagcgggtcgacgcgattcttgcagcggtcttcgaccgcggtgatgcggcgatcgcagacttcacagaacagttcgatggctttcggcctctgccgatggcggttccccaggaagcgctcgaacaggcctggaccacgctgccgaccaacctgcgtgatgccctggagctggcccatcgccgcatcaccgatttccaccaacgccaacgtcccgccgacctagcagtaacaggtccccacggcgagcagctcggacggcgctggagaccggtgcagcgggcgggtctctacgtgcccggcggacgcgcggcctaccccagcacggtgctgatgaatgcagtaccagcccgtgtcgctggggtgaaagagctggtgatctgttcccccgccggccgggatggcaaggtcaaccctgtggtgctggcagcggcgcacctcgccggcgtgaagacggtgttccgcctcgggggcgcccaagccattgccgccatggcctacggcagtgaaagcgtgcccaaagtggatgtgatcagcggcccag

SEQ ID NO: 205882 - DNA, 707 bp, Unknown
  Bacterial polypeptide expressing nucleotide sequence isolated from the Sargasso Sea
gatggcatcgaaaataaatagtagtaaccctaacttttacgagttgtttgaaaagcttctggcgcgaagagcgacaagggttgaagatgctactaaggtttcagcagatattatcgaaaaagtgaggaaacgcggagatgaagcgcttattaaactcaccaaggagttagatgggctggacctaatatcaacgggtttaattgtagatagtgatgaaattgacgaagctattaatagaataactactgatcaatacgatgcactgaaatttgcggcagataggataacggcgtttcatcttaaacaaatgccggataattttgaatacttagatgagacagaggtaaaaatgggaatgcgctggagttcagtcgactctgtcggtctatatgtgcccggtggtacagcgtcttacccaagctcggtgctaatgaatgccataccggccaaagtggcaggggtaccgagacgggtgattgccgtacctcaaacctgtggatctataaacccattggttctcgctgcagcaaaactggctaacgttcaggaagtttatcgagttggaggcgctcaagcgatagcagcgttggcttatggaacagagacaattagtccggtcgataaaattgttgggccagggaacgcctttgtcgctgccgcgaaaaaactagtctatggcgttgttggaatagactccatcgcggggc

SEQ ID NO: 205883 - DNA, 736 bp, Unknown
  Bacterial polypeptide expressing nucleotide sequence isolated from the Sargasso Sea
atgaagacgtgtccgattagccgattggatatatccgagcctgactttgaggccgcctttggccgtttgcttatcagcccggcagaggccgacgcggaccttgcgcagaccgtgacacagattgtggcagcgatagtgcaagagggtgatgccgcgctggtcaggtataccaacgaactggatcgacgagctgtagaagaagctcaggcgctgcgtgtcagctcggatgccatcgaacaggctttatccgatttgaaccccgaggtgtcttcggcgcttacgcgggcggcggcgcgtattcgggggttccacgaacgtcagcgtaccgagagttggcaatacgaggacgaagaaggcaacctgctgggtcagcgagtctcaccgctcgactgtgtgggggtttatgtgcccggcggtcgggcgagctatccgtcttcggtgctgatgaacgcgattcctgcgaaagttgcctgtgtcgagcgcgttgtcatggtcgcaccggcgcccgacggggagatcaatcccgcggtgctggcagccgcggcgttggcggatgtcgatgaggtatataccgtgggcggcgcccaagctgtcgcggcactggcctacggcacggccaccataccgagggtcgacaaaattgtcggtccgggtaaccgcttcgtcgccgaggcaaagcgccaggttttcgggcgcgtgggcatcgacatggtcgccggcccctctgagatttgat

SEQ ID NO: 205884 - DNA, 871 bp, Unknown
  Bacterial polypeptide expressing nucleotide sequence isolated from the Sargasso Sea
atgataaaagtaattaattgtaataaaaaaaactatctaaataacttaattaagtttttagatttaaggagatctggaaaaagaattgaaaataaaactatatctaacattttaaaagatattaaaaaaaataaaaacaaaagtcttttaaaatacgagaaaaaatttagtaaaaatagtcaaattaagcctagtataaagcaaattaataaggcaattaaatctttagatccaacaattaaaagagctatagattttgcttataaaaggatactcaaatttcataatttacaaaaaactaaagatattttttacaaagataatctaaataataaaatagaatataaatacgtaccaattcaatcagttggcatttatgttccagcaaatttaccatcaactttgttgatgaatgctattccagcaaaaatagcgggtgtaaaaagaattgtactagcaaatccaaaaaataatggaaaattaaatcctgcagttttatatgcagcaaaaaaattaggaattaatgaaatttattcaatgggaggcgcacaagccataggtagtttagcttatattcaaaaagtaaataaaattgttggtcctggcaatatctttgtagctggtgctaaaagacaagtttttggagatgtaggcattgaaggaatgattgcaggcccatctgaaataacaatattagcagatagcaaaactagtttaaatgaagttacaacatctatgattggccaggcagaacatgactcaaattcacagtgtatattaattaccaaggatttaaatttaattaaaaaatttaaaaaagaattagaattaaaattgaaacagataccaaggcaaagtattgccactaaaa

SEQ ID NO: 205885 - DNA, 963 bp, Unknown
  Bacterial polypeptide expressing nucleotide sequence isolated from the Sargasso Sea
ttcttgggcagatggtgaggccctgggagattgcggggatttacgttccggggggcaaagcttcttatccatcatctgtgctgatgaatgccattcccgcaaaggttgctggggtcaagcagatagtaatgtgttcgccttttcctgagggtcagacacgaccgcatgttttggttgcagccgatttagctggggttacggaaatatataaaattggaggagcgcaggcggttgcggccatggcgtttgggaccgacacaattccccgtgttgataaaattgttggaccaggaaatatatttgtagctttagctaaaaggttggtttttggaatcgtcgacattgatatgattgcgggccccagtgaaattcttattgtggcggatcattctgctaacccgtcttacgtggccgccgacctactttctcaggcagaacatgatgaagcagcggttcctattctagtaactccggatgaggtgttggctgaagatgtgcaaaaggaattggaaaagcaggtgaaagttttgagtaagaaggatattgctgaaacttctttgagaaataattgttgtttgctggtaactgaatcgctccaagatgcaatagatatggcaaataaaatcgcaccagagcatttggaacttgccctggaaaagccgaaggagtgggctacaaagatacaaaatgcgggggctatttttctggggcattacaccccggaggctatgggagattaccttgccgggcccaaccatgttttacccacgagtggtactgcacggttctcgtcacctcttggggtgtacgattttatcaagcgcaccagtttgatctcctatacaagagaagctttgcaaaattgcggtaaaactgtacaattattagcagaaatggaggatttgggagggcataaaaattcggtgaaattgcgactggataggcctgaaaaaaaatcctaaa

SEQ ID NO: 205886 - DNA, 880 bp, Unknown
  Bacterial polypeptide expressing nucleotide sequence isolated from the Sargasso Sea
aacttaccatctacattattgatgaatgctgtcccagcaaaaattgcaggtgttaaaagaattgtactagcaaatccaaaaaataatggaaaattaaatcctgcagttttatatgcagcaaaaaaattaggaattaatgaaatttattcaatgggaggcgcacaagctataggtagtttggcttatattcaaaaagtaaataaaattgttggaccaggtaatatctttgttgctggagctaaaaggcaagtttttggtgatgtgggtattgaaggaatgattgctggcccatccgaaataacaatattagcggatagcaaaactgatttaaatgaagttactacatctatgattggacaagcagaacacgactcaaattcacagtgtatattaatcaccaaggatttaaatttgattaaaaaatttaaaaaagatttagaattaaaattaaaacagataccaaggcaaagtattgctactaaaagcataaaaagtaatggactaattttaaaagtatataatgatagacaaattattgatgcaattaatgagatagctcctgaacacttagaaataaatgtaagcaattataaaaagtataaggataaaatttttaatgcgggaagtatttgtataggaaaatattctcctatggcattaagtgactacgctgttgggacaaatcatgtattaccaactaattcgtcagctaaattttcatcagggttaagtttaagtgaattttataaaaaaattagccttataacgctttcaaaaaaaggtgttgagaaaataggagaatacgctacacatctcgctgagtatgaagaattaaaaggtcatgctttaagtataaaatctagaataaataaaaagtaac

SEQ ID NO: 205887 - DNA, 738 bp, Unknown
  Bacterial polypeptide expressing nucleotide sequence isolated from the Sargasso Sea
agaccttcccaacgcgcaaaaactgccgggcgtggacgtggagacgctgccaggcgtacgttgccagcaggtgacccgccctatcgcctccgtcggcctctatattcccggcggttctgcgccgctgttctcgacggtactgatgctggcgacgccggcgcgcatcgcgggatgccaacaggtcgttctgtgctccccgccgccgattgccgatgagattctttacgcggcccagctttgcggcgtgcgcaccatcttcaacgtcggcggcgctcaggcgattgccgcgctggctttcggcaccgagtcggtggccaaagtcgataaaatttttggcccgggcaacgccttcgtcaccgaagccaagcgccaggtcagccagcgtctggacggcgcggcgatcgatatgccggcaggaccgtcagaagtgctggtgattgccgacagcggcgcgacgccggactttgtcgcctccgacctgctgtcgcaggcggaacacggcccggattctcaggtgatcctgctgactccggatgcggcgatgggacaacaggtcgcccgcgccgttgagcgccagctggcggagctgccgcgcgctgagaccgcccgggaagcgctctcggccagccgtattatcgtggcccgcgatctcgcccagtgcgtagaaatctccaaccagtacggtccggaacacctgattatccagacccgtaacgcccgtgaactggttgacagcat

SEQ ID NO: 205888 - DNA, 776 bp, Unknown
  Bacterial polypeptide expressing nucleotide sequence isolated from the Sargasso Sea
ttttatccctcatctttaattatgaatgcagtacctgcaatcatagctggagtaaaaagaatagtttgtataacaccgccaactgaatcaattaatccatattttataaaattaattaaggaattaggtattaaagaaacatattttgtaggaggagctcaagctatcagtgcgcttacttttggcactcaatctattaagccagtaaataaaatatttggacctggtaatgcttatgtggcagaagcaaaaaaacaattgtatggaaaagtaggtatagatttactagcaggaccatctgaaataatagttgttgcggacaatgataataacccagattgggtagcttcagatctaatagctcaagcagaacatgatgaaaatgcacaatcaattttaattacggataataaagattttgcaactaaagtcttaagttcaattaaaaaaattaaaaaagatttatcaaaaaaggaaataattgaaaaaagtttaaataataatggaattattgctttggtcgataatatggaatttgcttcagaaatcataaatttttttgcaccagaacatttacatattcacatttctaataataaaaaattgttatcgaatataaataatgctgggggtatatttttaggtgaatattctgtcgaagcttttggtgattatattgtaggaactaaccatgtattgcctacatcaggagcagcaaaattttcatcaggtctaggtgttttagattttatgaaaagaagctctgttgttgagat

SEQ ID NO: 205889 - DNA, 912 bp, Unknown
  Bacterial polypeptide expressing nucleotide sequence isolated from the Sargasso Sea
ttaaatttcattctttgcaaaaagtaaaaaatatcaagtatctagataaatttaaaaatagaattgaatataaatatgtacccattcaaaaggtaggtatttatgttccttcaaatttaccctcaacattactaatgaatgtaattccagctaaaattgctggtgttaaaaaaatcgtaattgctaatccgatattaaacggaaatctaaattcagcagtaatgtacgctgctaaaaaatgtggagtgaatgaaattataacctgtggtggtgcccaggcaatagcaagtttggcctatattcaagaggtaaacaaaatttttgggcctggaaataattatgtagcaaaggctaaacaattagtgtttggggatgtaggagtggaaggtatgatcgcaggtccctctgaaatttgcgttgttgcagatgatagaacagatctaaatgaaattactacttcattgttaggtcagtcagaacatgataaaaattcacaaagcatactaattacaaaatataaagatataatttataaagttcaaaatgatattaaaattaatataaacaaattatctagaaaaaaaataatttccaaaagtttaaaaaatcatggtcttttaatcttatgtaaaaatgacaatcaaataattgatgtaattaatgaaattgctcctgaacatttagaattaaatatctcaaattataaaaaatatttagacaaaatttgtaatgcaggtagtatttgtattggcaaatatagccctatggcagtcacagattatactgtaggaaccaaccatacattgccaacattaggatctgcaaaattttcgtctggacttaacttaagtgaattttataaaaaaattagctatataactctttcaaaaaaaggagtgaaaaaattgtaaa

SEQ ID NO: 205890 - DNA, 748 bp, Unknown
  Bacterial polypeptide expressing nucleotide sequence isolated from the Sargasso Sea
ataaaagaaatatattgtatgggaggcgcccaagcaattgcaagtttagcttatattcaaaatgtaaataaaattgttggtccaggcaatatttatgtagcgggagctaaaagagaagtttttggagatgtaggaatagaaggaatgatagctggaccatcagaaatcaccgttgttgcagacgcaaaaacaaaccttaatgaagttattacttcacttattgcacaagcggaacatgatgttaattcacaatctatattaattacaaaagataaaaatttaataaataatttaattaaaaatattcctgacagtcttaaatatttaacaagaaaaaaaatagcttttaaaagtttaaaaaataatggtttaattatttatgcaaaaaacgataagcaaatagttgaagctataaatgaaatctctcctgagcatttggaattaaatgttattaattataaaaaatatttagataaaatatataatgctggaagtatttgtattggaaaatattctccaatggcagtgactgattataatagtgggactaaccatgtacttccaactatgggaagtgctaaattttcatctggattgagtgtaagtgaattttataaaaaaattagccacataaaactatcaaaaaaaggtgttgagaaaataggagaatacgctacacatctcgctgagtatgaagaattaaatggtcatgctcaaagtataaaatctagactaaggagaaaataaa

SEQ ID NO: 205891 - DNA, 700 bp, Unknown
  Bacterial polypeptide expressing nucleotide sequence isolated from the Sargasso Sea
ggcacaaaatctattttacctgtaaataaaattgttggccctggaaatgcttacgttgcagaagctaaaagacaagtatttggtcaagtaggaattgactcaattgccggaccttcagaagttttaattatctgtgacgaaacagctaaccctgatcatgttgcaatagatcttttatcacaagcagaacatgatgagttagcccagtcaattttaataacaacaagtaaagaaatcgcaataaaagtgaaactttctgtagaaaaatttcttatggaaatttctagatcaaaaattgctagttcatcatggtataactttggagctataattttagttgaaaacttaaatcaagccatagaattaataaatataaaggcgcctgaacatttacaattaattcttaaaaatgcacaaaaggttataaaaaaaataaaaaatgcaggagctatctttgttggtccttatactcctgaagcagtgggtgattatattgctggaccaaatcacgttcttccaacaaacggaacagcaaaattttcgagtggattaggagttatagatttttacaaaagaaccaccatagttaactttaataaaaacagcctaaatgaacttggaaaacatgtaataacattagctgaagcagaaggtttagaggcacatgcaaggtctatttcaatcagaaatgataaataat

SEQ ID NO: 205892 - DNA, 388 bp, Unknown
  Bacterial polypeptide expressing nucleotide sequence isolated from the Sargasso Sea
aaaaattggggggttaattgtgatttgcgataattatgaagcatgtattgagctaagcaataactttgcccctgaacacttagaaattcttactgaagattcaaaaaaaatcctttcaggtatacagaatgcaggagcgatatttttaggaaaatggaccccagaagcagttggagattatcttgctggacctaatcatactttacccacatcaggaaattctagatttagcggatctttgggcgttgaaacttttatgaaaaatacttcaataatagaattcaatgaagaaagtttaaaagttaatagccttgatattattaatcttgctaaaagtgagggcttacatagccatgctaactctgtaaaaataagatttaaagattag

SEQ ID NO: 205893 - DNA, 409 bp, Unknown
  Bacterial polypeptide expressing nucleotide sequence isolated from the Sargasso Sea
ttgcgtttcaagtattaaaaattatggattggcaatttacgcaaataatttaaacaaaatcattgaagctgtaaatacaatagcaccagagcaccttgaaattgaatttaaaaattataggaatatgataaaaaaaatcaagaatgcaggatcaatttttattggcagattttccccagaagctatgggggattacatagctggcccaaatcatgttctgccaacttcgggatcagcaaaattttcctctggtttatctgtaaatgattttttaaaaagacattctcttataaaaattacaaaatcaggtattgaaagattaggtccatcagttataaatttagcagaacatgaaaatttagaaggacacgctaactcgattaaaataagattaaaaaaaggatattaa

SEQ ID NO: 205894 - DNA, 862 bp, Unknown
  Bacterial polypeptide expressing nucleotide sequence isolated from the Sargasso Sea
tgtagcaggtgttccaaacatatatttgaccactccatctttagatttaaaaattaatcctgctgtagtttacgctgctaaaaaatgtggagttaaaaaaatctataaaactgggggagcacattcaatagctgcttttacttatggcacaaaaaattttgagaaagtagataaaatagttgggccaggaaatgcttttgtagcatttgctaaaaaagaagtttttggagatgtaggtattgatatggtagcgggaccatctgaagtaagcattgtaggtgacaaatactctgacccaaacttgattgctgcagatttaattgctcaagcagaacacgatatatatgctcaatcaattttaattactgataatgaaaaattgataaattcagttaataaaagtcttaaacaacagttaattaatttacccaaaaaaaaaattgctattcaaagtttaaagaactttggattagcaatttttaccaataagagaaataaaatatcagagataattaatgctattgcaccagagcatttagaattatgtacatcttttaataataaaattattaaagatgttaaaaacgcaggatcaatatttattggaaaattttctcccgaagcaattggtgattatctggcaggaccaaaccatgttttgcctacctcaggttccgctagattttcttcaggtttgtctgttaatgattttttaaaaaggcattcattaataaaaataacaaaaacaggtattgaaagattaggtgcatcggttataaatttagctaattatgagaatttagatggtcatgcaaactctgtgaaattaagacttaaaaaatttaataataaaaaaggttaa

SEQ ID NO: 205895 - DNA, 682 bp, Unknown
  Bacterial polypeptide expressing nucleotide sequence isolated from the Sargasso Sea
accagtaaataaaatctttggaccaggaaatgcttatgtagctgctgctaaaaaacaagtttttggaaaagtaggtatagacctagtcgcaggtccatcggaaatagttgttgttgcagataatgataataatccagaatgggtagcttctgatttaatggctcaagccgagcacgatgaaaattctcaatcaattcttattactaatagtaaggtattttctgaaaaagttttagatagaattgaaaatttaaaaaaaggactaagcaaaaaagatataatcaatactagtttacgaaaacatggtttaattattttaatagatgatcttaacttatcttctgatattattaataaaattggtcctgaacatttgcatttacaatcatctgaaaaagaagaaattttaaaaaaagtaaataatgctggtggaatttttttaggtagctactcgactgaagcctttggagattatgtagcaggaacaaaccatgttttaccaacatctggtgcagctaaattttcttcaggattaggggtaattgattttatgaaaaaaagttcaatagttgaaattaataaaacaagttttaacacactctcaaaacatgtagaaaatattgctgatgtggaaaatctagatgcacacaaattgtcagttacaattagacaaactaaataa

SEQ ID NO: 205896 - DNA, 721 bp, Unknown
  Bacterial polypeptide expressing nucleotide sequence isolated from the Sargasso Sea
aaacaaaaagtaaaaaatttaaaatttaaagacaatttaaaaaacttaattgaatataaattttcgccaatcgaatccgttggaatatatgtacctgctaatttacctagtacactattaatgaatgcaattcccgcaaaactagcaaatgtaaaaagaattgtattggccaatccaaagcttaatggaaaacttaattctgcaatgctatatgctgcaaaaaaattaaatattcatgaaatatattcaatgggaggagcacaagcaattggaagtttagcatatattcaaaaagtgaataaaattgttggtccaggaaatgattatgttgcaagagctaaaagagaagtttttggagatgttggaattgaaggaatgatagcaggaccaagtgaaataactatagtagcagataaaaaaactaattttaaagaagtcattacttctatgataggtcaagctgaacacgatgctaattcgcaatgtatattgattacaaataatctaaatataattcaatcattgaaaaaatttttaaataaagagataaacaaaatacccagaaaaatgatagtaagaaaaagccttttaaaaaatggattaataattagaacttataatgataaacagacgataaattcaattaatgaaattgcaccagagcatctagagttaaatataaaaaattataaaaaattagttaagaaaataaataatgtag

SEQ ID NO: 205897 - DNA, 706 bp, Unknown
  Bacterial polypeptide expressing nucleotide sequence isolated from the Sargasso Sea
aagcctagcttatatttatcaagttgacaaaattactggacccggtaatgattatgttgctaaagcaaaacaattagtatttggtgatgttggaaccgaaggtatgattgctggtccatcagaaatttgtatcattgcagataaaaaaacaaaacttaacgagatcacaacatcaatgttgggacagtctgaacatgacgaaaattcacaaagtatacttgttacaaagtttaaagatctaatttacaaagttcaaaatgatattaagattaatatcaataatttatctagaaaaaaaataatatataaaagtttaaaaaatcatggcctaatagtactgtgtaaaaatgataaacaaataattgatgttgttaatgaaattgctcctgaacacttagaactaaatatttcaaattatagtaaatatattagtaaaatttataatgccggaagtatttgtattggtaaaaatagtcctatggcgttaaccgattataatgtaggaagtaatcatactttaccaactctaggatcggctaaattttcctctgggttaaacttaaatgaattttataaaaaaattagctatattacgctttcaaaaaaaggtgttgaaaaaatcggtgaaagtgcgatacatcttgcaaattatgaaaggcttacagctcatatattgagtataaaatctagaatgaggagaaaataa

SEQ ID NO: 205898 - DNA, 568 bp, Unknown
  Bacterial polypeptide expressing nucleotide sequence isolated from the Sargasso Sea
tggaatttacgttccagccaaccttccatcaacactattaatgaatgctattccagcaaaaattgctggagtaaaaagaattattttagctaatccaaaattaaaaggaaaattaaacgcagctgttttatatgctgcaaaaaaaattggaattaaagaaatatattctattggtggagcacaagccataggtagtttagcttatattcaaaaagtaaataaaattgtaggacctggaaatatttacgttgctaaagcaaaaaaagaagtttttggagatgtaggaatcgaaggaatgattgcaggaccttcagaaattactgttgttgcagataaaaaaactaatattaatgaagtcatcacatcaattattggtcaagctgagcatgatgttaattcacaaagtatattaataaccaaagatagaaatttaataaataaatttagaaaaaatatattaaataatataaaaatattaccaagaaagaaaattattgaaaaaagtttaaaaaaaaatggtttagcaatatatgccaaaaatgacaaacaagttattgatgcaattaat

SEQ ID NO: 205899 - DNA, 865 bp, Unknown
  Bacterial polypeptide expressing nucleotide sequence isolated from the Sargasso Sea
ttatgttcctggaggtaaggcagcgtatccctcatctgttttgatgaacgttattcctgcacaagttgcgggggttcaggaaatcatcatggttgtaccaacccccgatggggaaagaaacgatctggttttagcatcagcagcaattcttggagtaaacaaaatttttagtattggaggagcacaagcaatcgctgctttggcttttggcaccaaactaattcctaaggtagataaaatagttggtcctgggaatatgtttgtagctgctgcgaaaagacaggtttttggttttgtgggtattgatatgatagccggaccttccgaagttgttattattgcagacgaaaatgccaacgcagattgggttgcaatggatcttttagctcaagctgagcacgatgaggaggcaagcgctattttaatttctcccaatgccaatattattaaatctgttgagaaatcaatcgaaaaatttttaccacaaatggaaagagctgaaattattcaagcatcactcaataataatggtttaattataaaaactaaagattttgctcaagcggttgagatagtaaacattattgcacctgagcacctcgaacttgcggtaattaatccagaaatattgcttgaagacataaaacatgctggtgctatttttatgggtaattattctgcagaatcgatcggtgattattgcgctggacctaatcatgtcctacccacatctcatacggccagattttcatcacctttaggtgtttatgattttcagaaaaaaacatctcttataaaatgtgatggtaattcagtttcagaaatagcaagagttgcgtctattttggcacatggtgaaggttta

SEQ ID NO: 205900 - DNA, 842 bp, Unknown
  Bacterial polypeptide expressing nucleotide sequence isolated from the Sargasso Sea
catgaaggaaaatgatttacgaattacacgtatttcgacaatagaaattgattttaaaagtcggttaaaagcttgtctcaagcgtgagatgttggataacgaggagatttatcagaaggttactagcgtccttgaaggtgttaggcaacatggtgacattgctgtacttgaatacacaaataaatttgataacttttcggtggaaagttttcaggacttagttgttactccaaatcagttagaggactccttaaaaagaatacctgaatcgcagagaaatgctctggaacacgcagcgaacagaatacaaaaatatcatgagcggcaagttacctcttcgtggcaatatgaggatgaagacggatctgttttaggccaaaaagtcactccgctagagcgagttgggatttatgtgccaggaggaaaggccaattatccgtcttcaatgttgatgctagctatacctgccagggtggcaggggttaaagacataatcgcggctgtgccgacacgttacgacacaaaaaatgatttaatatttgctgccgcgaaagtggctggtgtgaatcaagttttaacgatgggcggcgcccaagctatcggcgcattggcttatgggacggagacgctagagaaggtagataaaattgcgggtcccggcaatgtttatgtcaatgttgcgaagagaatggttttcgggcaggtcggcatagatatggttgcgggtccatctgaattaactgttatttatgatggtacaactgaccctgattggatagccgcagatctgttctcgcaggctgagcatgacgagtttgcccagtcgatattaatatctccta

SEQ ID NO: 205901 - DNA, 605 bp, Unknown
  Bacterial polypeptide expressing nucleotide sequence isolated from the Sargasso Sea
tatgaagattataaataataaacaaaaagctctccaagagttaagaagaatttcacaaagaactacctctggagacaataaaaaaataaattcaattgttgaaaatattcttcaagaggtgaaatttcatggagatatagctgtagaaaaatatacaaaaaaatttgatggattctatcctaaaccaatgcaagtaagtactagggatttaaaaactgcgtgggaagagacagatcagcatttaaagcaatcattagaaattgcctatcaaagaataaaaaaattccatgaaaaagaaatccctgaatcatttactataaagggagaatatggtgactacgtccaaagaagatggatgcctgtaaaaaatgctggtttatatattcctggagggagagcggcatatccaagtacagttttaatgaatgcgatacctgcaaaagtagctggagttaaagaaatttcaatggtatcccctggaaacaaaaaaggggaaataaatacaactgttttagccgctgcttacttatcaggggttgataaagtttttagaattggtggagctcaggcaattggcgcattagcatttggcacaaagcaaataa

SEQ ID NO: 205902 - DNA, 503 bp, Unknown
  Bacterial polypeptide expressing nucleotide sequence isolated from the Sargasso Sea
catgagcttcaataccctgattgactggaatagctgtagccccgaacagcaacgcgaactgctgatgcgcccggctatttccgcctcggaaagcatcagccgtacggtggacgagatccttgagaacgtcaaaaataacggcgaccgggcgctgcgtgaatacagcgcgaagtttgataaaaccgaggtcggcgcgctacgcgtcactgaggaagaaattcagcaggccagtagccgcctgagcgacgaactgaagcaagccatgcaagcggcggtgcgtaatattgatgccttccacaccgcgcagatcctaccgccggtggatatcgaaactcagccgggtgtgcgctgccagcaggttacccgccctatcgcttccgtgggtctgtatattcccggcggttctgcgccgctgttttctacggtgctgatgctggcaaccccggcgcgcatcgcgggctgcaaaaaagtagtgctgtgctcgccgccgccgattgccgatg

SEQ ID NO: 205903 - DNA, 965 bp, Unknown
  Bacterial polypeptide expressing nucleotide sequence isolated from the Sargasso Sea
tcacttattgcccgtctagacagttcggcccccgatttcgatgcggcatttgcccgccttctagtaagccccgccgagtcagattcggcgcttgcggagacggtctcaagcatcattgcagccgtcgctgtcgagggggacgcggcgttgttgcgctttacaaaccagtttgacagtcgcgcgttgagtgaccccgcaaactttaaggtgtctccctcggcgttaatatcggctttgcaggcgattgatcccggggtgcgcgaggcgttagaacatgccgcggccagaatccgcgattttcatgagcggcagttaggtcaaagctggcagtaccgcgacgacacgggcagcctgctggggcagcgtgtctcggcgatggacagggtaggtctgtatgtcccgggggggcgggccagttatccctcatccgtgctcatgaatgcgatcccagcaaaagtggccggcgtctcacaggttattatggtggttccggccccgagcgacgagatcagtccggtcgtattggccgccgctcagctggctggcgttgattgtgtgttcactatcggaggggcgcaggcgataggggctctggcttacgggacagggacggtgccgcgggtagacaagatagtggggcccggcaaccgtttcgtcgcggaggcgaaacgacaggttttcggcagggtgggcatagatatgattgctgggccctccgaaatcctgatcatcgctgacggctcagtaaagccggagtgggtagcgatggatctgttcgcgcaggctgagcacgatgagtatgcccaggccgtcctgatttccccggacgctgtgtacctcgatgccgtagcagcctgcattgctgatttgctgccatctctggctcgtcgagagattgtgagcgccgcattgaaaaatcgtggcgccttggtaaaggtgccagacctcgatgctgcagcgtcttt

SEQ ID NO: 205904 - DNA, 808 bp, Unknown
  Bacterial polypeptide expressing nucleotide sequence isolated from the Sargasso Sea
tttaaaaaaaaatttaaggatttgatatatgatgaaagaaaatcaaacgataaaattaatattacagttacaaaaattttaaaccaaatacttgaaaatggtgatgatggtctaaattattgtgtaaataaatttgataaaataaatgttaaacaaattaaagaattatttattccgaaagacatcttaaaaaaagcttacgatggacttaagaaagaacataaaaaagcattaaatattgcagctaatagaataaaaaaatttcataaacagcaaattcctaaaaactttagatatagagataatcttaaaattaatctagctttaacccactcaccaataaactccgcaggtttttatgttcctggaggtaaagcaatttatccatcgtcagtattaatgaatgcaattccggccttagttgctggcgttgagaggagagtacttgtaagcccaatttcagatttaaataagtcatctattgttcttgcagcggcccatgttgcaaaagtaactgagtttgttcgtatgggtggagctcatgcggttgccgcacttgcttatggcactaaaactatctcgcctgtagacaaaattgtgggaccaggaaatgcttatgttgcagaagctaaaagacaagtatttggtaaagtaggaattgattcaattgcaggaccttcagaggttttaattgtatgtgatgaaacagctaatcctgatcatgttgctatagatcttttatcacaagcagaacatgatgagttagcccagtcaattttaattacaacaagtaaagaaattgcaacaa

SEQ ID NO: 205905 - DNA, 841 bp, Unknown
  Bacterial polypeptide expressing nucleotide sequence isolated from the Sargasso Sea
tttgcctctttaaatttggaggatactgataatgagataacccgaaagtttagggtgatagaatctgtaggtatttatgtaccaggaggcaaggcctcttatccttcgactgtattaatgggagctgcaccggctatagcctgcggtgtaagagatatttcaataacttcccctgctcaaaatggaatttcaaatacactaacaatagctgctgcaaaagttgctggcattgaaacaatttataggattggtggagctcaggcaattgcagctttagctataggaacagatcagataactaaggtagataaaataattggaccaggaaatatatttgttgctgaggcaaaaaaacaactttttggcgaagtgggtattgattcaattgccggtccctctgaaattcttatccttgctgatagctcttcaaatccagaaacaatagcttgggatcttatggctcaatctgaacacgactcagatgcatctagtgttttgatctcagatagtgaagacataatagctaatgtaaaagaaatcatatcaactgaaatagattcacttgagagatgttccattattaaagaatcaatcagctcaaatggactgataattaaaatcgataatttttctgaagccaaacaattagtaaacaagattgcccctgaacatttacatttagcttttgatcatgttaattatcgagatgaaaattcattaatagcaggcttgattctgaaaggtgagaattcagccaactccttttctgattatgttctaggtcctagccacatacttcctactaattcatcttcgagatttagctcacctctatcagtag

SEQ ID NO: 205906 - DNA, 776 bp, Unknown
  Bacterial polypeptide expressing nucleotide sequence isolated from the Sargasso Sea
aacggagataaagctgtcttgggttatgaaaaaaaattttcaaaaataaaaactaaatcaaataaaatttttttctctagcaaagaagtaaataagctttcgaaaaaaatagataaaaagttaaagaaagctattgatttagcttttaatagaataaaaaaatttcatttaaagcaaaaattttcttcttttaaatttaaggataaatataaaaatgagctgtcctacagatattcatcaatagaaaaagttggagtttatgtgccaggcggaacggcaagttatccaagtactgttttaatgaattgtatcccagcaatcgttgctggagtaaagaatatatatttagcaacaccgtcattagactccaaaataaatccagctatagtttatgcagcaaagaaatgtggagtaaaaaaaatatataaaactggaggtgcccagaccattgcagctttagcctatggaacaaaaaaatttgaaaaagtagacaaaatagtcgggccaggaaatacatttgttgcatgtgcaaaaaaagaagtttttggtgatgtaggtatcgatatggtggcaggcccatctgaagtaagtatagtagctgataaaactgccgatcccgatcttgtcgcagcagatttaattgctcaagcagaacatgatatttacgctcaatcaatattaattactgataacaaaaatttaattagtttagtgaatttatctcttaaaaaacaattaaaaaaattaccaaaaaaaagtatagcatctcaaagttt

SEQ ID NO: 205907 - DNA, 802 bp, Unknown
  Bacterial polypeptide expressing nucleotide sequence isolated from the Sargasso Sea
aacgatctagtttttagcaaatcagaaataaataaaattattaaaagattagatacaaaaacaaaaaactctattaatgttgcttttaaaagaatttataattttcataaaaatcagaaattcaaagattttaaagttttagataaatttaaaaattctcttacttacagatctatgcccatagaaaaggttggagtttatgtaccaggtggtattgctaattatccaagctctgtattaatgaattgcattccggcaattgttgcaggagttaaacaaatttatttgaccgttccttgtatgggaaaaaaaataaacccaggcgtactatatgctgcacggaagtgtaaggtcaaaaaaatttataaattaggtggtgctcaagcaattgctgcttttgcatatggcactcaaacaataaataaagtcgataaaattgtaggacctggaaatgaatatgtagctctggcgaaaaaagaagtttttggacaggtaggaatagatatgtttgctggcccttccgaagtgaccataatagccgataaatactctaacccagactggatagctgctgacctaatagcccaagccgaacacgatgaaatgtcacaatcaattcttataactgacaaccaaaaaattattataaaagtaaaaaaagctctcggatctcaaattaaatttttacccaaaaagaggatagctgcaaaaagtttgagaaagtatggaatagctgttttagcaaagaattcaaacgaaatttcaaatataacaaacaaaattgcacctgagcacttacaaa

SEQ ID NO: 205908 - DNA, 553 bp, Unknown
  Bacterial polypeptide expressing nucleotide sequence isolated from the Sargasso Sea
caaagcactcacatagcatctgatttgctagcacaagcagaacatgatcctttagcttctgcaatacttctaactacatcagagaaccaagcaaaagaagttttaaaggaactttataaaaaaatagatgatcatccaaggaaagaaatttgcatgcaatcaatacaaaattggggattaattgttatttgccaaaattatgaatcatgcattgaactaagcaataactttgctccagaacacttagaaattctaacttttgattcaaaaaaaattcttgaaggtattgataatgcaggagcaatatttttaggtaaatggaccccggaagctgttggagattatatagctgggccaaatcatactctgcctacatcaggaaatgccagatttagcggttctttaggagttgaaacttttatgaaaaacacctcaataatagaatttaatgaagaaagtttaaaagtcaacagtcttgatatcattaaccttgccagaagcgagggcttacatagtcacgctaactcagtacaaataagatttgaggattagc

SEQ ID NO: 205909 - DNA, 463 bp, Unknown
  Bacterial polypeptide expressing nucleotide sequence isolated from the Sargasso Sea
attagtaaatttaagactaaaagcacaaattaaaaatttaccaaaaaaatatatagcatctaaaagcattaaaaactatggattagcaatatatgcaaaaaataatgaaagaattttagatgtaatcaatatcatagctcctgaacatttagaaatagattgcaaaaatcataataagttgattaaaaaaattaaaaatgcgggttcaatttttattggtaaattttcaccagaagctatgggagattatgttgctggtccaaaccatgtattgcctacatctgggtcagcgaaattttcttctggattatcagtgaatgatttcttaaaacgacattcgctaataaagataacaaaatcaggtattgaaagattaggtccatcagttataaatttagcaatgcatgaaaatttagaagggcacgctaattcgataaaggtaagactaaaaaaaggaatttaa

SEQ ID NO: 205910 - DNA, 346 bp, Unknown
  Bacterial polypeptide expressing nucleotide sequence isolated from the Sargasso Sea
tggtgttgaactaagcaataaatttgcccctgagcacctagaaattctcactaaagattcaaaaaaaatacttgcaggtatagagaatgcaggagcaatatttttaggaaaatggaccccagaagctgttggagattatcttgctggaccaaatcatactttgccaacatcaggaaattctagatttagtggttctttgggggttgaaacttttatgaaaaatacttcaataatagaatttaatgaagaaagtttaaaagttaatagcgttgatattattaatcttgctaaaagtgagggcttacatagccacgctaactcagtagaaataagatttgaagattag

SEQ ID NO: 205911 - DNA, 745 bp, Unknown
  Bacterial polypeptide expressing nucleotide sequence isolated from the Sargasso Sea
atctgcagagaatgttcaagagtattattcgaaacaacttcatggcgattttgaaataacccaagatgggatgaaaataaagtctcgtgctgtaccggtaaccaaggcaggttgttatgtgccaggtgggcgagcggcttacccatccacagtgataatgactgctgttccagcaaaaatggctggggttgatcatgttgttattgcagttcccccagatgaaaacggagaaatacccaagtcagttttggctgctgcagccatttctggagtagaaaaaatacatccaataggcggcgcacaggcgatagcagctcttgcctatgggacagaagaagtggatccagttgatgtgattgttggcccaggaaatatttatgtatcactggctaagcaagaagtgtctagcacagtcagagtgccctcttcttttgctggcccatcagaagtcgttgttatggcggatgagacagctgaacctgatttagtggctatggacttagtggttcaagcagaacatggacctaatggcctgtcttggcttattacttggaaagaagaaatagctgcaagagttcaagcggaaatagaaaagatacttgtggcgtctcgcagaaaagaagaaattgagtccacattgtccaactctggttactgtgttttggtcgaaggccctgatcaggcattaattgtgtcagaagctgttgcccctgagcatttacaactgatgattcaagagtcggag

SEQ ID NO: 205912 - DNA, 844 bp, Unknown
  Bacterial polypeptide expressing nucleotide sequence isolated from the Sargasso Sea
ttataaagatgatgatggtaatgagttagggcaaaggataacaccactggaccgagttggtgtctatgtcccgggaggtaaagcggcctatccttcttcggttttaatgaatgtcattcctgcacaagttgcaggcgttaaagagattgttatggttgtgccaactcctgaaggagaaagaagtgatttagtgctagctgcagcagaaattttaggtgtaactaaaatttttagtattggtggagcacaggcaattgcagctctagcttttggcacagatcttataccgaaagttgataaaattgttggccccgggaacatttttgtagccgcagcaaaaagagaagtttttggctttgtaggtatagatatgattgctggcccatcggaagttgttattgttgcagataaaaatgctaatgtggattgggttgcaatggatcttctggctcaagccgaacatgatgaggaggcaactgcgatattaatttcacctgataaaagttttattgaccgtgtagagaaaagtattattaaatttttacccgatatggaaagggcgagtattataaaggcgtcattaaagaagaacggcataatgataaagactgaggattttaaacaggcaatcaacattgtgaatattttagcgccagagcatctagaattagctgttactaatccggaggaattattgtctggtgttaaacatgcgggtgctatttttatggggagttattctgcagagtcacttggagattattgtgccggccctaatcatgttttaccgacagggcgtacggctagattttcgtcaccactaggcgtttacgattttcagaaa

SEQ ID NO: 205913 - DNA, 663 bp, Unknown
  Bacterial polypeptide expressing nucleotide sequence isolated from the Sargasso Sea
ggtgtaaaagagcttattcttgtcactccgacaccaagtggtaaggttaacccacttgttttacttgcggccaatatggttggaataaacaaaatatttaagattggaggtgctcaggccatcgccgcactcgcttttggtactagctcggttcctgttgtagataagatagccggtccaggaaattcatttgtgaccgaagcaaaaagacaggtttttggaaaaactggaatagatatgatagctggtccctcagaggttttgattattgctgatgaaaaaaacagatctgattggattgctattgatctcatgagccaggccgagcatgatgaaaactctcgagcggtattggtcacaactagcaccgagcttgcgaaggctgtgaagggagaagtggaaaaaatcttaggaaaactagaaagaagagatattgcgcaaaaaagctggcacaattttggggcaataatcgttgtgaaaagtttggatgaggcctgtctattatcaaataaaattgctcccgagcatttgcaattatttgttcaaaatccgctgtccatcctgaaaaaaattactaatgctggctcggtctttttaggtgctttttctccggaggcaatcggagattacattggaggtactaaccatatattgcccacggct

SEQ ID NO: 205914 - DNA, 615 bp, Unknown
  Bacterial polypeptide expressing nucleotide sequence isolated from the Sargasso Sea
gcattgatatggttgccggtccatcagaggtaagtataattgcagacaaaaactcgaatgctaattggatagcctcagatttaatcgctcaagctgagcatgatattttagcacaatcgatattgatatcaaataatagaaatttaattaaatctgtaaaattgagtattaaatctcaattaaaagatttacccaaaaaaaatatcgcatcaaaaagtattaaaaatttcggtttggcaatatatgctagcaactctaaaaaaatttcagaaattgttaatttaattgcccctgagcatttggaaataagtttttctaaatcaaaagatttaattaaaaaaattaaaaatgctggctccatttttattggtaagttttctcctgaagctatgggagactatattgctggccctaatcatgtgctaccaacttcagggtctgcaaagttttcttcaggtttatctgtaaatgattttttaaagcgccattctttaataaaaataacaaaaacaggtattgaaagattagggccatcagttataaatttatcacaacatgaaaatttagaagggcatgcaagatcagtgaaaataagactaaaaaaggatttataat

SEQ ID NO: 205915 - DNA, 841 bp, Unknown
  Bacterial polypeptide expressing nucleotide sequence isolated from the Sargasso Sea
atcaaaataaaaagagaaaaatcagaggatgtgaatgcgtctgtgtcaaaaatactcgaggcggttaaatctaggggtgacgacgccttggttgaatttacgaaatcttacgatgatttcgatattaacccggcgaagatgaggatcgctgaagatgatatagatatagcagtaaaatcatgctcagcctctgagatagaagcactaaatttagcagctgatagaataaaggattatcacaaaaagcaaatgccagaggatttgcaatatatcgatgctatgggtgttacgttaggttatagatggagccctgttaattctgtcggtatttatgttcctggtggaatgggtgcatatccctcttctgtattaatgaatgctataccagcaaaaatagctggtgttaaaagattagtaatggtggttcccaccccaaaaggtaatatcaattcattagtgctcgcggccgcaaaaatagcgggtgtcgatgatatatttaggataggcggtgctcaagctgtagcggctctcgcatatggtaccgatagcgtaccagcggtggacaaaattgtcgggcccgggaatgtgtatgtggccactgcaaagaaacaggtctttggggtagtagggattgatatgtttgccggaccctccgaagtgttggttgtagcagatgctgaaaatgatccaaattggattgcctctgatttgttagcacaagccgaacacgacgcaagtgctcaagctatattgatcactgatgatgaggggtttgcaaattccgttgatattagattacaagaaatagcaaagaatttgtcacggtctgatactgctttat

SEQ ID NO: 205916 - DNA, 872 bp, Unknown
  Bacterial polypeptide expressing nucleotide sequence isolated from the Sargasso Sea
agatattagtaatggtgcaaaaaatatatctaatgaactttttgatgcattaaaagtatcttcgaaaagaatttatgaatttgcaaaacgtactatgccttcaagttggtttgatccagtgacagggctaggtgaatcagttgttcctatgcaaaaagtaggtttatatgtccctggaggtactgctacctatccttctacagttcttatgtcttctatgatagcaaaagcagtaggtgttcctgaaattattttatgtactcctccaaaaataaatggtatgcctgatgatagcatacttgcagctgctcaaattgcaggaattgataaggtatattgtattgggggagcccaagcaatcgcagctatggcatatggtacccaaacaataccaaaagtagataaaatatgtggtccaggaaacatttttgttaccttagcaaagaaaaaagtttttggtgaagtgggaatagatggattatttggaccaactgaaacagttgttatagcagatgaaattgctcggccagagttttgtgctgcagatatgttagctcaagctgagcatgatgaattagcatttcctgttcttattacaacatcagaaaatatacttaataatgttgaaattgagctcaataggcaattagagaatttagatagaaaccaaattgcaaaggaatctataaataataattgtgcgttaatattggtagataatgttgaaatgtgtgtggaactttctaatttgattgcacctgaacacgtttgtttaaatattcaaaaccccaatgattgggtgaaacagatcatcaatgctggtgctatctttgtaggggattattctgcggaagttatgggagattacattg

SEQ ID NO: 205917 - DNA, 673 bp, Unknown
  Bacterial polypeptide expressing nucleotide sequence isolated from the Sargasso Sea
gatggcattgaaaataaatagtagcgatcccaacttctacgagttgtttgaaaggctcttggggagaagagcgacaagggtcgaagatgctactaaggtttctgcagacataatcggaaaagtgaggaaaagcggagacgaggcgcttattaaactcaccaaggagttggatgggattgacctaacatcaacaggtttaatcatagatggcgacgaaattgacgaagctattaataaaattaatattgatcaatacgatgcactgaaatttgcggcagataggataacggcgtttcatctaaaacagatgccagatagttttgaatacttagatgaggcagaggtaaaaatgggaatgcgctggagttcagtcgactctgtcggtctatatgtgcccggtggtacagcgtcttacccaagctcggtcctaatgaatgccataccggcaaaagtggcaggggtacctagacgggtgattgccgtacctcaaacccgtggatctataaacccattggttctcgctgcagcaaaattggctgacgtacaggaagtttatcgagttggaggcgctcaagccatagcagcgttggcttatggaacagagacaattagcccggtcgacaaaattgttgggccagggaatgcctttgtagctgctgcaaaaaaactcgtc

SEQ ID NO: 205918 - DNA, 661 bp, Unknown
  Bacterial polypeptide expressing nucleotide sequence isolated from the Sargasso Sea
ttgaataaaagaaaacgttcccaaaaaaatcagacttctaaagtaagtaaaattattaataatgttaggaaaaatggagataaagccgttctaaactatgagataaaattttcaaaaattaaaaagaaaactaataaaatattttttactaataaagaaataaatgctatttcaaaaaaaatagacaaaaaaattaagaaagcaattgacttagcttataacagaatcaaaaaatttcattcaagtcaaaaattttcatcatttaaaattaaagataaatataaaaacgagttgtcctataagtacttatctttagaaaaagttggtgtttacgttcctggtggaacagcaagttatccaagcactgttctaatgaactgtataccagcgatcgttgctggggtaaaaaatatatatttagctaccccagcattagactcaaaaataaatccagcgattgtttatgcagcaaaaaaatgtggagtaaaaaaaatttataaaacaggtggagctcattcgatagcagcatttgcttatggtacaaaaaattttgaaaaagtagataagatagtcggaccaggaaatgcattcgttgcttgcgccaaaaaagaagtttttggagatgtaggtatagatatggtggcaggaccttcagaggtaa

SEQ ID NO: 205919 - DNA, 948 bp, Unknown
  Bacterial polypeptide expressing nucleotide sequence isolated from the Sargasso Sea
aaaacaaaaaactctatcaatattgcttttaaaagaatttataattttcataaaaatcagaagttccaagattttaaagttttagataattttaaaaattctctttcttacagatctatgcccattgagaaggttggggtttatgtcccaggtggtattgcgaattatccaagctctgtattgatgaattgcattccggcaattgttgcgggagttaaacaaatttatgtgaccgttccttgtgtaggaaaaaaaataaacccgggcgtactatatgctgcacagaagtgtaaggttaaaaaaatttataaattaggtggcgcacaagcaattgctgcttttgcatatggaactcaaacaataaataaggtcgataaaattgtgggacctggcaatgaatacgtggctttagcgaaaaaagaagtttttggacaggtaggaattgatatgtttgctggaccttctgaagtgaccataatagcggataaatattctaacccggactggatagctgctgacttaatagcccaagccgaacacgatgaaatgtcacaatcaattcttataactgacagcaaaaaaataataataaaagtaaaaacagctctcagatctcaaattaaatctttaccaaaaaaaaaaatagctgcaaaaagtttgaaaaaatatggaatagctgttttagcaaagaattcaaatgaaatttcaaatataacaaacaaaattgcacctgagcatttagaaatactaacatctaatccacaaaaatatttaaaaaaaataaataatgctggttctgtttttctaggtaaatattcgcccgaagctatgggtgattatattgcaggaccaaatcatgtgctacccacatctggtactgccaagttttcatctggtttatccgcatatgactttttaaaaagacaatctataataaaaatatctaaa

SEQ ID NO: 205920 - DNA, 826 bp, Unknown
  Bacterial polypeptide expressing nucleotide sequence isolated from the Sargasso Sea
ctgactaagtttttagatttaaggagatctggaaaaagaattgaaaataaaactatatctaacattttaaaagatattaaaaaaaataaaaacaaaagtcttttaaaatacgagaaaaaatttagtaaaaatagtcaaattaagcctagtgttaatcaaattaataaggcaattaaatctttagatccaacaattaaaagagctatagattttgcttacaaaaggatactcaaatttcataatttacaaaaaatggaggatattctttataaagataatctaaataataaaattgaatataaatatgtgccaattcaatcggttggtatttatgttccagcaaacttaccttcaactttattgatgaatgctattccagcaaaaatagcgggtgtaaaaagaattgtactggcaaatcctaaaaataatggaaaattaaatcctgcagttttatatgctgcgaaaaagttaggaataagagaaatttattcaatgggaggagcacaagccataggtagtttggcttatattcaaaaagtaaataaaattgttggaccgggcaatatctttgttgctggtgctaaaagacaagtttttggagatgtaggtattgaaggtatgattgctggcccatctgaaataacaatattagcagatagcaaaactaatttaaatgaagtcaccacatctatgattgggcaggcagaacatgactcaaattctcaatgtatattgatcactaaaaattctaatttgatcaacaaatttaagaaagatttagaattaaaattaaaagatttaccaagaaaaaatattgcatctaaaa

SEQ ID NO: 205921 - DNA, 472 bp, Unknown
  Bacterial polypeptide expressing nucleotide sequence isolated from the Sargasso Sea
aaaaatttcattgaccgtgtagagaaaagtattattaaatttttacccgaaatggaaagggctaatattatagaggcgtcattaaaaaagaacggcataatgataaagattgaagattttaaacaggcaatcaacattgtaaatattttagcgccagagcatctagaattagcagttactaatccggaggaactattgtccggtgtaaaacatgcaggcgctatttttatgggtagttattctgcagagtcacttggagattattgtgccggccccaatcatgttttaccgacagggcgtacagcaagattttcgtcgccattaggggtttacgattttcagaaaaaaacatcactaatcaaatgccggaatggctctgtttcgaatatagcagaagtggcgtcaattttagcacgcggagaaggattgaccgcacatgctcgttcagctgagtttcgtaacgattcctaaa

SEQ ID NO: 205922 - DNA, 760 bp, Unknown
  Bacterial polypeptide expressing nucleotide sequence isolated from the Sargasso Sea
tggtattaaaaaaatatattgcatgggtggctctcaggcagttgctgcaatggcatatgggactgaaagcgtggcaccagtaaataaaatcgttggacccggcaatatttacgtcgccgaagcaaaacgtcaagtttcaggacttgttggaattgacatgtttgctggaccttctgaaatagttgtaatttctgaccagaatagtgatccaaaaattatttctgctgatctcatagcccaatctgagcatgataaaggtgctcaaagcattctaattacaactgatcaagcattagctgaagcagttgaaaaagaagtgcctagtcaattagagtctcttccaagaaaagaaattgcatcagtaagctgggataaaaacggcaaaatcattgttgtgcgtgatctcaaagaggcttttgatatctcaaatcaattagcccctgaacatctcgagcttgctatagataatgcgagagattttcttaaatatattgttaatgcaggtgcagtatttctcggcagaaatacacccgaagcattaggtgactatgttgctggcccaagtcatgtattgcctacgtctaggagtgcaaaattttcgtcaggattatcagtatttgactttctaaagaaaatatcactggttgaatttacaaaagaaggtattgaagaaatcggaaatagtgctatgacaatcgctgaaaatgaaggtcttgacggccattcaagatcgatagaatataggctttcaaaaaaataa

SEQ ID NO: 205923 - DNA, 922 bp, Unknown
  Bacterial polypeptide expressing nucleotide sequence isolated from the Sargasso Sea
aataaataaaactttagatcaaaagattaaagatgatatacaattctctcatgaaagagtaaggaagtttgcagaacatcaactagaaaatcttggaaaagactcagaagttgaattatcgcctggtttaatagcaggacaaaaattaataccagtaaataccgttgggtgctacgttcctggtggaagatacaataatatcgcctctgctataatgagtgtgacaactgcaaaagttgctggagtaaagaatgtaattgcaacaagtccaccaaaagattcaaatggtgctaacccaattataatttatacagctaacctttgtggtgcagatgttattatgaacattgggggcataggagcaattggtgcacttgcatatggttgttttggtaatccagaagtagatatgattgttggacctggaaataaatttgtagcggagtctaaaagaattttatttggaaaagttgggattgatttatttgcaggaccaactgaaataggaataattgcagatcatacagctgacaaagaaataatcgcttatgatttagttggacaggctgaacatggtcctgactctcctgcttggctctacactactgataaatctttatgcgattatgtaatgaaaagagttccagaaattattcaagaattacctgaacacaacagaaataatgctgatgctgcgtggaaagattatggagaagtaattatgtgtgataccaaagaagaaatgatgaaagtgagcgatgaatatgcacctgaacatttggaggttcaagctgaagacttagactggtatttaaaaaatcttaaaaattatggttcattatttttaggtgaagaaacaacagttgcgtacggagataaatgttctggaccaaatcatattttaccaacaaaaggggcagga

SEQ ID NO: 205924 - DNA, 681 bp, Unknown
  Bacterial polypeptide expressing nucleotide sequence isolated from the Sargasso Sea
tttggataaaaggagatctggaaaagcagtagacacttcgatagttccaaaaattttaaaagacatcaaaattaatggaagaaaagcacttttaaagtatgagaaaaaatttagtaaaaatacagagatagttccttcaaaagataaagtaaaaaaagcaattaataaattggaacctaagattaaaaaaagtatcgatttagcttataatagaatttttaagtttcattcactacaaaaaccaaaaaatattaagtatgtagatgatttcaaaaataaacttgaatataagcatgtgccactacagtctgtaggtatttatgtaccagctaatttaccatctacattattaatgaatgcagtgcctgcaaaaatttcaggtgtaaaaagaattgttttggccaatccaaaacttaatggaaaactaaatcctgcagttctttatgcagcaaaaaaagttggaattaaggaaatttactcaatgggtggtgcccaagccatagcaagtttagcgtatattcaaaaagtgaataaaattgttgggcctggaaatatttatgttgcaagaagcaaacgtgaagtctttggtgatgttgggacagaaggaatggtcgctgggcctagtgaaatttgtgttttagcagatagtaaaactgatctaaatcaagttataacatctat

SEQ ID NO: 205925 - DNA, 781 bp, Unknown
  Bacterial polypeptide expressing nucleotide sequence isolated from the Sargasso Sea
aagcaaaattcagcagttttatatgcagcgcgtaaatgtaaaattaatgaaatttattcaattggaggaccaccagcaattgcagcagcagcttatggaactaaaaaaataaaaaaagtaaataaaattgtaggacctgggaacgcatttgttgtcgctgctaaaaaagaagtatttggtgatgttgggattgaaggaatgattgctggtccatcagaaatagcaattgtctgtgataaattttcaaatcctgaatgggttgctagtgatttaataggtcaagcagaacatgataattttgctcagtgtatactcatatctaaatataaacaattaattgaaaaagttaaaactgaaatttttaaacaattaaaaaaaattccaagagcatctattgctaaaaaaagtttaatgagtaacggaattttaatgcatattagttctgataaaaaaataattgatattataaataaaattgcacctgagcacttagagcttaatgttaaaaattataaatcatttattccaaaaattaaaaactctggatctatttgtttaggtaaatatgcagttatggcaatgacagattataatgtaggatcaaaccatgtgttacccactaatggttcagcaaaatattctagtggtataagtgttaatgaattttataaaagaatttcttatataaacctatcaaaaaagggtattgaaagtctcggaccatcagttataacacttgcaaactatgaagggttggttggacacgcccaatctgtaaaaa

SEQ ID NO: 205926 - DNA, 826 bp, Unknown
  Bacterial polypeptide expressing nucleotide sequence isolated from the Sargasso Sea
ctgccaaggattgctggtgttgaaagaattgttttagccaaccccaaacttaatggaaagttaaatccagctgttttatatgccgctaagaaagtcggaattaatgaaatatattcaatgggtggcgcacaagctatcgcaagtttagcctatattcaaaaagtaaataaaattgttggacctgggaatatttttgttgctgcagcaaaaaaagaattattcggtcaggtaggcatagagtctatggtggctggtccttcagaaataacaattttagcagattacaaaactagaatagaagatgtactcacatcaatgataggccaagcagaacatgatgaaaattcacagtgtattcttatttcaaaagatttaaaattgataaaaaaatttcaaaaaaagattaaagaaaaaataaaaaaattaccaagaagatcaatagcttataaaagtcttaaaaataatggattgacaatatttgcaaaaaaaaactcagacataattaattcaataaatgaaatagctccagagcacttagaaataaatatttcaaaaccaaataaaataattaataaagtaattaatgttggaagtatttgtattggtaaatattctcccatggcagttactgattacaatgcgggaacaaaccatgtattaccaacttttggttctgcaaagtttgcgtcaggattgaatgttaacgaattttataaaaaaattagctatataactctatctaaaaaaggtgttgagaaaataggagaatccgctacacatctcgcagagtatgaagaattatatggtcatgctttaagtataagat

SEQ ID NO: 205927 - DNA, 832 bp, Unknown
  Bacterial polypeptide expressing nucleotide sequence isolated from the Sargasso Sea
attaaaaaatttcacttaaaacaaaaattttcaaattttaagtttaaggataaatataataacgaactttcttataaatattcatcaataggaaaagttggagtgtatgtacctggtggtactgcaagttacccaagtacagttttaatgaactgtattcctgctatagtagcaggtgtgaaaaatatatatttaacaacaccctctatagactcaaaaataaatccggcggtagtttatgctgcaaaaaaatgtggagtaaaaaaaatttataaaactggaggagctcattcaattgctgctttaacatatggcacaaaaaactttgagaaagttgacaaaatagttggacctggaaatgcttttgtggcatttgcaaagaaagaggtttttggagatgtaggtatagatatggtagctggaccttcggaagtgagtattgtaggtgataaaaattctgatccaaaattaatagctgcagacttaatcgcccaagccgaacatgatatttatgctcaatcaattttaattacagataataaaaaattgataagcgcagttaataaaagcttaaaacaacaactagttaatttaccaaaaaaaaaaattgctattcaaagcttaaaaaaatttggattagcaatatacactaacaaaagaaataaaatttcggagataattaatacaatagcaccagaacatttagaattatgcacctcatttaacaatagattaattaaagaggtaaagaatgcaggctcaatattcattggaaaattttcaccaaaggccatcggtgactatttggcaggacctaatcatgtttgcctac

SEQ ID NO: 205928 - DNA, 759 bp, Unknown
  Bacterial polypeptide expressing nucleotide sequence isolated from the Sargasso Sea
tttgttattaagaaggaagataaaagttcaaataaattcagtatctgtaataaaaataataaatgatatcaaaaaaaatggagataaggcattattaaaatatgaaaaaaaatttaatcaaaataggacaattgcaccaagcttaaatcgtatttcaacatctatcaaatccctcgatccaaaagtaaaaaaagctattgatctcgcttattctagaattcataaatttcattctttgcaaaaatttaaaaatatttcttacgtagataaatttaaaaatagacttgaatataagtacctaccaatcgagtccgttgcggtttatgtgcctggatcatcagcatcatatccatcaagtgttttgatgaacgctattccagcaatagtggctggagtaaaaagaatagttatgattaatccagggtaccaaggaaaacaaaatgctgctgttttatacgctgctaagaaatgtaaaattaaagagatatattcaataggtggcccatcggctattgcagcagttacttatggcacaagaaaaattaataaagttagtaaaattgtaggacctggtaatatgtatgttgctgctgctaaaaaagaagtttttggtgatgttggtgttgaaggaatgacagcaggaccttctgagattacagttgttggtgatagattttcaaatccagtatggatagcaagcgatcttgttggccaagcagaacatgatgaacttgcacaatgtatattaatctcaaaaaa

SEQ ID NO: 205929 - DNA, 808 bp, Unknown
  Bacterial polypeptide expressing nucleotide sequence isolated from the Sargasso Sea
ggtcatataaatgatttgaccattgcggctgcaaaaatagttggtattgacaagattgcaaggctaggcggcgctcaagcgatagctgctttctcttttggaacaaaaactattcctaaagtagacaaaatagtaggcccggggaatgcctatgttgcagaagcgaaaaggcaattatttggtaacgtaggtattgattcaattgcagggccgtctgaaatagttattttagccaatgaaacatcctcgccagaaatagttgcttgggatcttatggcccaagcagagcatgatgaagatgctagtacaatcttaattagtacttcagataaaattactgaagaaataaaagagattatagaaagtgaattaccaaaccttgaaagagctgagatcatcaaatcttcaatgaacagtaatggtttaataatacaaatagaagatctaaaacaatctatagaacttattaatagattagcgccagagcaccttcacttagctttcgataataaacagatagatacaaaggaaattattgcaggaataattcttgaaggagaagattctgctgtttctttttctgactatgtcttaggaccaagccatatactgcctactaattctagcgccagattcagctcacctttgtctgtagaagattttattgttagctcatcaaaagtcatcttaaactctgaacgcaataaagattcttacaatgaattagttgaaaatacttcgataattgccagagcagaaggtttaacggctcatgctatatccgctgaaaagagaagaaaagattaat

SEQ ID NO: 205930 - DNA, 806 bp, Unknown
  Bacterial polypeptide expressing nucleotide sequence isolated from the Sargasso Sea
actgcattccaagaaagagtcgctaccgagtctcttaaacagatcaaggagtatatccgtgaaacttaacactgtacatggtctccagaaggcagaaggtgtgctaacgcgctttgacccactagatattggttcactaccagaatccatagtacagcgcacgcacgaactatttggtccaaatactagccctcaggattccgtactaaaaatacttgctgacgtgagagataagggtgacgaagcagtcttccactatgcagagttactagatgatacttcactgaagagtgctgaagtctccctaaaagacctagaattggctagagaatcactatcagatcatctagtacagtctttacatctagccgccgagcgtattgaacactttcacaaatccacattgcccgaaaactgggtagactaccaaagcggattaggagaattgattaggccattggaacgagttggactatacgcccccgggggaacggcagcatacccttccacagtgctcatgacagctataccggctcgagttgctggagttaaggagataatacttacaactccaaaacgcggagagcagcccataaacccagcggtactagttgcagcagagattgcgggtgtcgacaaggtataccagatcggcggagtacaggccattggagcattagcttacggaacggaatctattcgaaaagtcgacaaaatttgcggcccaggaaacatatttgtggcatatgccaagaagattgtccaaggccaagtcgacatcgacggcatatttggtcccactgaga

SEQ ID NO: 205931 - DNA, 769 bp, Unknown
  Bacterial polypeptide expressing nucleotide sequence isolated from the Sargasso Sea
attggatgaattaggaatacatgaagtatatcaagtaggaggtgctcaagctattgcagctttaacatttggaactcctactattaatccagtaaacaaaatatttggaccaggaaatgcttatgtagcttcagctaaaaagcaagtttttggaaaagtgggtatagatttagtagctggaccatcagaaataattgtagtagcggatgcacaaaataatgctgaatgggtggcaagtgatctaattgctcaagctgagcatgatgaaaatgctcaatcaatacttataactaatagtaaagcttttgcggataaagttcttgataaaatagaaaatcttaaaaatcttttaagtaaaaaagatataattagtttaagcttaaaaaaaaatggaataggtattatcatggatgatttaaatgactcttataaaattattaataaaatcggccctgaacatttacatctacaatcatctgaaaaacaaaatatattaaaaaaaataaataatgctggtggaatttttattggaagttactcagctgaagtatttggagattatattgttggtacaaaccatgtattacctacatcgggggcagccaaattttcatctggtttgggtgttattgactttatgaaaaaaagttcaattgttgaaatgaataaaaatagttttgaaactttttcaaagcatgttgagaatatagctaatgtagagaaattagatgcacataaattatcagttagaattagacaaacaaaaaaa

SEQ ID NO: 205932 - DNA, 924 bp, Unknown
  Bacterial polypeptide expressing nucleotide sequence isolated from the Sargasso Sea
attagatctggccatagatgaatctgaattgcgatcggcctttgaagaaatccctaagaaagatagcgacgcgttggtgcaggctgcaaatcgaatagaaaaatatcatagggcacagaaacaaggtgactttcagataactgatgattctggaaataacttagggcaggtagttacagctctggatcgtgtcggagtgtatgttcccggaggtcaagcggcctatccttcgtctgtgcttatgacagtgatcccggccacagtagctggagtatcggaaatcgcagtggcggttcccacacctcaaggccggcgtaattctcatgtgcttgcagcactgcatataacaggggtgagggaagtatattcaatcggaggtgctcaagcggttgcggcgatggcctatggcaccgaaactataagaaaggtcgacaagattgtcggaccgggcggagcaattgtggcggctgctaaacggctggtatacgggcctgttggagtcgatatgattgccggcccgagcgaggtgctaataattgctgatccaacagctaacccggattgggtcgccttagatctattttcccaagcggagcacggtgagaattcgcaaagtattttgctttgtccggacgagaattttttaaggcttgttgaagagtcgatggaaaggcacattgactcgttgagccgcaaaaatattatcgtgaaatcccttgaaaccaggggggcttttgtccttaccaaagatttggaggaagcggttacgatatcgaatattattgcgccggagcatcttcaactcgccgtcgccaaaccccgaaaactaatgcggcaagtaagacatgctggagccatatttctgggtgtgagaaccccggaagtcttaggtgactattcggcaggtcccagtcacgttcttcc

SEQ ID NO: 205933 - DNA, 933 bp, Unknown
  Bacterial polypeptide expressing nucleotide sequence isolated from the Sargasso Sea
gatcaagggaatgttctagggcaacttgttcgagggatggagcgcgcaggaatttatgtgcctggcggaaaagcagcgtatccgtcaacggtgatcatgacggcaatcccggcccgagtagctggcgttagagagataattgcgtgtgtccctgcaccaagaggtgtttgtaacaaaacggttctcgctgcagcccatttatgtggagtcgatagagttttctcaatcggaggtgctcaagccattgctgctcttgcctttggaactaagttagtgccaaaagttgataagatagtggggcccggaaatttatacgtagcaaaggctaaggaaaagctttttgggagagtggggatcgacatgatagcaggaccttctgaagtggttatcgttgccgatgatactgtagatccattatgggtagttcaagatatgtttgcccaagctgagcacgatgagctagcgcaggcgattgttgtttccgcgagccagagcgttatcgataatgtgcgacaaactatcgaagagaaaattaaagacgaacagagaagagggataattgaagatgctctcaaagaccgcggagcattaataaaagttcgagatttgaaagaggctctaaaagtagtgaaccttctgtcacccgagcaccttcagctgtcgatcaaagatgctgcgggattcgccaaaaatgtagaaaacgctggagctgtattcgtcggtgcgagtacaaccgaagcagttggagattatgctgctgggcccagtcatgttttgcctacaaacggaactgcaaggttctcttcaccattaggggtctatgattttcagactcgcacatcagttattgagtgctctaaagaaggttccaagagtttgaataggactgcatctattatcgctttagaagaaggactcttttcacattctaag

SEQ ID NO: 205934 - DNA, 886 bp, Unknown
  Bacterial polypeptide expressing nucleotide sequence isolated from the Sargasso Sea
tatgagtatggcatgcagtattcagctatagatacagtaggcctatatgttccaggagggcgagcactatatccgtcttcagtagtaatgaatgcggttcctgcagcaatagcaggagtgtctcatttagtagttgctactcccccacaaaaaaatgggcttattgcgccagaagtgttagtggcatctgccgagtgtggggttcacactattataaaagctggaggagctcaagttatttttgcaatggcacacgggacagagcaaattccaaatgttgataaaatagtaggtcctggaaatgcgtatgtagatcgggccaaacaaatggtatatggcataattgatattgataagcctgcaggtccttctgaagtcttggtgtatgtaacagataaaaaatatgcggcctatgcggcggcggagttgttggcccaatgtgagcatgatccctctgcttcggggagtgttctttcaacagataaatcaacgttagaggaagtaaatagtgagatagcattacagctatcaacattaaaaagaagcgatattataaaaaaggcattaaaaaatagtagtttattttatgtagagacagaagaagatgcaataaaggctattaatacgattgccactgagcatttatgtttattagtagataactctaaagagttgctggctcagattaaacatgccggggctattttttgtggaccctatacacctgttgctttaggggactacattgcgggcccaaaccatgttcttccaactgcgcgagctgctcgatttgcatcgccattatcagtaactgattttatgaaattttcaacggtgctagaatgttcaaaggggcacttgcagaggctgcaagaggatgtaaaga

SEQ ID NO: 205935 - DNA, 748 bp, Unknown
  Bacterial polypeptide expressing nucleotide sequence isolated from the Sargasso Sea
gcttatagtcgaatttataaattccattctttgcaaaaatttaagaatatttcgtatacagataaatttaaaaataaacttgaatataaatatttacctttagagtctgtggcaatttatgttcctggttcacttgtatcttatccatcaagtgtacttatgaatgctataccagcaattgttgcgggagttaaaagaattgtaatgataaacccaggttttaaaggaaaccaaaatccagctgttttatacgctgcgagaaaatgcaaaattaaagaaatttactctattggcggtccatctgctatagcagctgtttcttatgggactaaaaaaattaaaagagttgataaaatagttggacctggaaattcatatgtagctgctgcaaaaaaagaagtttttggtgatgtcggtatcgagggtatgactgcaggaccttctgaaataactattgtttgtgataaattctcaaatcctgaatggactgcaagtgatttaatcggtcaagcagaacatgatcctcaagcacaatgtgtattgatttcaaaagacaaaaaactaattagtaaagttcaaatggaaatttcaaaacaattaaaaagtattccaagagaatctgtggcaaaaaaaagtttaaagagaaatggaattttaatgtatgtagcaaatgataataaaataattaatattgtaaataaaattgcacctgagcacttggaattgaatgtaaaaaactacaaatctt

SEQ ID NO: 205936 - DNA, 676 bp, Unknown
  Bacterial polypeptide expressing nucleotide sequence isolated from the Sargasso Sea
ttccggaccgggcaacgccttcgtcgccgcggccaagcgtcgggtgttcggacaggtcgggatcgacatgatcgcggggccatcggaaattctggtcatcgctgacgcggacaacgaccccgactggatcgccgtcgatctgttgagccaggccgagcatgacgagagcgcgcagtcgatcctgatcacgacggatcgcgcgtttggcgaagcggtcgccggtgctgtggacaagcgtctcgaaacgctggaacggcgcaagattgcaggaaagagctgggcggatttcggagcggtcatcaccgtgcgcaatgtggaggaagctgtcgcgctgtccgaccgcatcgcgccggagcatctggagatcgcctgtgccgatgctcaggatatcgcggacacgatccgccacgcgggcgcgatctttatcggcgcatggacgccggaggcgatcggggattatgtcggcgggccgaaccacgtgttgcccacggcgcgatccgcacggttttcgtccgggctgtccgtcctcgatttcatgaagcgcacgaccctcgcccgcatgacacccgacgctctggcagcgatcggacctgcggcggaaaccctcgccatctccgaagggctggaggcgcatggcctgtctgtccgcgcccgtctcgaaaggctgaacacatga

SEQ ID NO: 205937 - DNA, 780 bp, Unknown
  Bacterial polypeptide expressing nucleotide sequence isolated from the Sargasso Sea
tttatgcatcatcttcaatgggaatagagaaaatattgcgcgtgggaggtgcgcaagctattgccgctttggcgtttggaaccgagtcaattgaaaaggtgaataagattacggggccaggaaataagtatgttgctgaggctaaaaggcaagtatttgggagggttggcattgattctgtggctggtccatcagaagttttgctgatttgcgataaaagcatgccagagaaaattgcagctatagacttattagctcaagctgaacatgatgaaaatgcccaatcgatcttaattacaaacgataaagagtatgcattaagggttgaaaatgaaattgaaaattatttaaagaatttgaaaagaaaagaagttgctagacgtagttgggaaaattttggagcaatggttatcgttcctgacttcaaaaaatcaattgaagtttcaaatctaattgcaccagaacatttacaactttgttttgaaaatgctgaaatatatttaaactctattacaaatgctggctcagtcttcctaggttattggtctccagaagcgatgggtgattatattactggttcaaatcatgttttgcctaccaatggaacagcaaagttttcttcatctctctccgtatttgacttcatgaagagagttgcttttactaaagtaaatgagaatggttttaagaagcttggtccctcagttgttagactagccgattcagaaggtcttcaagcacactctctctctgtttctgagagacttaaaaatctttaat

SEQ ID NO: 205938 - DNA, 730 bp, Unknown
  Bacterial polypeptide expressing nucleotide sequence isolated from the Sargasso Sea
aatgggtggtgctcaggctattgcaagtttagcatatattcaaaaagttaataaaattattggacctggaaatatttttgttgctgcagcaaaaaaagaattatttggccaggttggtatagagtctatgatagctggtccttcagaaataacaattttagcagataataaaactaaaatagaagatgttcttacatcaatgataggtcaagcagagcatgacgaaaattcgcagtgtattctaatttcaaaagatttaaaattgattaaagaatttcaaaaaaaaattaaagataaaataaaaaaaataccaagaagatcaatagcttttaaaagtcttaaaaataatggtttagtaattcttgcaaaaaaaaattcagatataattaattcaataaatgaaatagctccagagcacttagagataaatatttcaaaaccagacaaaataattaataaagtaatcaacgttggaagtgtttgtattggtaaattttctccaatggcagttacagattataatgccggcacaaatcatgtcttaccaactttcggatctgcaaagtttgcgtctggattgaatgttaacgaattttataaaaaaattagctatataactctatctaaaaaaggtgttgagaaaataggagaatccgctacatatctcgcagagtatgaagaattatatggtcatgctttaagtataagatcaagaatgaggagaaagtaa

SEQ ID NO: 205939 - DNA, 700 bp, Unknown
  Bacterial polypeptide expressing nucleotide sequence isolated from the Sargasso Sea
tataaagatgatgatggtaatgagttagggcaaaggataacgccactggaccgggttggcgtctatgtcccgggtggtaaagcggcctatccttcttcggttttaatgaatgtcattcctgcacaagtggcaggcgttaaagagattgttatggttgtaccaactcctgaaggagaaagaagcgatttagtgctagctgcagcagaaattttaggtgtaactaaaatttttagtattggtggagcacaggcaattgcagctctagcttttggtacagatcttataccgaaagttgataaaattgttggccccgggaacatttttgtagccgcagcaaaaagagaagtttttggctttgtaggtatagatatgattgctggcccatcggaagttgttattgttgcagataaaaatgctaatgtggattgggttgcaatggatcttctggctcaagctgaacatgatgaagaggcaactgcgatattaatttcacctgataaaagtttcattgaccgtgtggagaaaagtattattaaatttttacccgatatggaaagggcgagtattatagaggcctcattaaagaagaatggcataatgataaagactgaggattttaaacaggcaatcaacattgtgaatattttagcgccagagcatctagaattagctgttactaatccggaggaattattgtctg

SEQ ID NO: 205940 - DNA, 771 bp, Unknown
  Bacterial polypeptide expressing nucleotide sequence isolated from the Sargasso Sea
catgagtatcgttactgctaaagttgcgggtgtgaaagaaattattgcatgcacacccccaacaaaaggcaaacctcactttccaaccattacagccatggccttagcaggtgctaatgagatctatttattaggtggtgtgcaagctgttacagcaatggctaagggcacggaaacaataaaatctgtagatatgcttgttggcccaggtaatgcttatgtagcagaagcgaaacgagaactttatggatcggttggcattgatttatttgcaggaccaacagaaatattagtcatagctgatgaaagtgcggataaagaaatggtagccacagatttgttgggacaggcagaacacggtcctacttctcctgcaatattattaacaacatcaagtaagttagcaaaatcaatcgatgaagagattgaactccaattaaaaactctttcaacagccagtgttgcaggattagcttggaaagactatggggaaatcattcttgtcgatacagaagaagaattagtagaaaaagcaaatgaaatcgcaagcgaacatgttgaagtactaactcataaccctgactatttccttaagaatttaataaattatggatcgctctttctaggacatgaaacaaatgtcgcttacggcgataaagtcattggtactaatcatactctgccaacaaaaaaagctgctaaatatactgggggtttatgggttggaaaatttattaaaactgtcacctatcaaaaatgcacacctcaagc

SEQ ID NO: 205941 - DNA, 773 bp, Unknown
  Bacterial polypeptide expressing nucleotide sequence isolated from the Sargasso Sea
ttccacgatcgacagaaagcagacagccagcttgatttcagttcggatggctctgtattgggctggaaagttacacctgttgacagtgcagggatttatatcccgggaggacgcgctacttatccatcaaccttgttgatgaacgtaattcctgcccaaattgctgaagtacctagaattgctcttgtttctccacctggaccttcaggattacctcaccctttggtaatggccaccgcagcttttttaggtctagaagagctttatgcagtaggcggagcacagtcaattgccgcactggcatatgggacagaatctattcaaaaagttgtcaaaattaccggccccggaaatgcttatgtcgcagaagctaaaagacaggtatatggaacggttgggatagaatcctttgcgggaccaagtgaaattatgattgtctgcgatcgtgaagatatcccagttgactatcttgctagagacatgctgtctcaggctgaacatgatcctgatgcaggagcttttctagttacaacatcagataaacagtcaaaaaaagtggcagatcgtataaaaaaactagtcccaaaactaccaagaaaaggaattatcgaagcttcatttaagaatcgttcagcaataattctggtaaaggatttggaagaaatatttgaaatggtaaatgaacttgcgccggaacaccttgaggtacttaccaaagaaccatttaatgacctataccgaattcgtaacgcgggagctatttttcttggtcc

SEQ ID NO: 205942 - DNA, 822 bp, Unknown
  Bacterial polypeptide expressing nucleotide sequence isolated from the Sargasso Sea
tattaaaagatttcataaaaaacaatttccacaaaattataaaattcataaaaatggtttgaaaacagaatctacatggaagcctattgactcagtaggcctttatattcctggaggaaaagctatttatccctcttcattaattatgaatgcagttcctgccaaagttgccggagtaaaaagaatagtagtagttactccacctcaatctggtaaaattaatccctatattttagctttactgaaagagttggctattgatgaaatttatcaagttggaggagcgcatgctattgcagcattagcttatggtacggaaagtattaaaccagtaaataagatttttggtccaggcaatgcttatgtaacaagcgcaaaaaaacaagtttttggaaaggttggaatagatttaattgcaggaccttcagaaatagttgtagttgcagataagaacaataatccagaatgggtagcatctgatttaattgctcaagcggagcacgatgttaatgctcaatcaattttaattactgatgataaagatttttctaatttagtcttatttaatttaaaaaaacttagtaaagaaattaaaaataattatattgtgaataaaagtttaaataattttggtattataattttaactaataatttagataatagtcataaaataattaatcatatagctccagaacatttacatttacaaaataaaaacaaaaaaaaattattaaaaaaaattacgaatgctggagcaatttttattggagaatatgctactgaagtttttggggattatatagttggtacaaatcatgt

SEQ ID NO: 205943 - DNA, 790 bp, Unknown
  Bacterial polypeptide expressing nucleotide sequence isolated from the Sargasso Sea
aatgattaaaatattaaacatcagaaaaagcaattatttaactcaaataaatggattattaaaaaaaaggcaaaataatacaacaagtaagatagttatagttaaaaaaataattgatcaaattaaaagaaatggagacaaagctctaattaaatatgaaaaaaaatttagtaaaaattctcaaattatacctagtaaaaatattataaaaaaaagtattagatctcttgatccaaaagtaaaaaaatcaatagatattgcttatagtagaatattaaaatttcattcaaagcaaaagatccaaaacataaattataaagataagttaaataataaatttcaatacaaacatttacctataaattccattggtgtttatgttccaggcggaaatgcaagttttccttcaacagttttaatgaatactattccagcaaaaatagcaggtgtaaaaagaattgtcttagtaaatccaaaaattcaaggtcaacaaaatcctggagttttatatgctgcaaaaaaagttggtattaaagaaatttattctattgggggagctcaagccatagcggcattggcttatggaacaaaaaaaattaaaaaagtaaataaaatagttggtccaggaaatatttttgtttccacagctaagaaagaagtttttggagacgtaggaattgatatgatagctggaccttctgaaattactgtagtggcagataagcattctaatcctgattggattgctgcagatcttctagcgcaagcggaacatgatttaaattctcaa

SEQ ID NO: 205944 - DNA, 772 bp, Unknown
  Bacterial polypeptide expressing nucleotide sequence isolated from the Sargasso Sea
cattcctgcaaaagttgcaggagttaaaagaatagttatggttgtgcctgctcctaatggaaaaataaatccattagttctttttgcagctgacttagttggcattgaagagatttatagagtgggaggggctcaagcaatagcagccttggcttatggaactaaagaaataaataaggtggaaaaaattgttggaccaggaaatacatttgtatcttctgcaaagagaaatgtttatggtcatgtaggaatagatacagttgcggggccttcagaggttttgattgtttccgattctattagtaatccttcttggattgcagcagatattttagctcaagctgagcatgatattgatgcacaatctattttaatttgtgatagtgaggattttgccaataaagtagaggaatatgtatataagcaccttgaaaaaattaataatttttctttggcaaaaaagagttgggaaaataatggtattattattattaataataataataccttagatacgataaaaactatcgatttaattgcaccagaacacttagagctatcgatttctaatcctttggaattagttaaagatatctctaattcaggagcaatttttcttggtaggtatactcctgaagctataggagattatttagcaggccctagtcatgttttaccaacatcaagatcatcaagatttgattccgggctttcagtatttagtttcttaaagagaagttcgcttattgagtgtaataaaaaagtatttaat

SEQ ID NO: 205945 - DNA, 844 bp, Unknown
  Bacterial polypeptide expressing nucleotide sequence isolated from the Sargasso Sea
gtagctggagttaaaaaaatatatgccacagttccttgtccaaataatgagatagatccaattgttttagctacttttgatatatgtggaattgaaaaaatttataaaattggaggcgctcaagcaatagctgctttgacatggggaactgaaactgttcaaaatgtagatataataattggccctggaaataaatgggtagctgaggcaaaaaaacaagcactttcaaatattaatatcgatatgcttgctgggccaagcgagatattaattttagcagataaagataacagagcagattgggttgctgcggatcttttatctcaggcagaacatgatatttccgcgcaagctatattaattactgattgtgaaaactttctagaagatgttaataaagaattattgatacaaacagaggcacttaaaagaaaggatatagtcaaaaaaagcatttctgataatggctatggaattctggtaaaaaatattcaggacgcaattggcattattaacgatatagctccagaacatttatcacttctatgtaaagaaaatgaatatatagaaaaaaaaatcactagtgctggagttattttttcagatgagtggacgccggagtctatgggagattatataattggtccaagccatgttttacctactaacggtatggctaaaagacaatctggtctatctgtttttaatttcttaagacgtcaatcaacgatatccagcactaaaaaaacaataaaaaaacttggaccatcagcaattttattggctgattgtgagggccttgatgctcatgcaaattctattaaaattagaataaaagattaat

SEQ ID NO: 205946 - DNA, 688 bp, Unknown
  Bacterial polypeptide expressing nucleotide sequence isolated from the Sargasso Sea
aatgattcttagattaaatgcaaacggtaaaaattttcaaaaagaattagtaaaaaaaatcaataaaagatcggttttctctaataaagattacaatgtagcaaaaaaaattgttctggatgtaaaaaaaaatggagataaagctgtactgaaatatgagttcagatttaataaaaataaaagaattaattctaattatagtagtatttctaaaattataaaaagtttaaatccaaatgttaaaaaatctatagattttgcataccagagaattttaaaatttcataaaaaacaaaagtcaaaagatataaaattttcagataacttaaataataaaattgattataagtataaaccactgaactcggttggaatttatattccaggcggaaatgcaagttttccttcaacagttttgatgaatgcaattcccgcaatgcttgctggtgtaaaaagaattgtaattgcaaatccagttagagataagaaccaaagtgcagctgttttatatgcagcaaaaaaatgtggtgtaaaagaaatttatcgaataggtggtgctcaagctatagctgctcttgcttatggaacaaaaacaattcaacgcgtagataaaatagttggacctggtaatatttatgttgctgcagcaaaaaaaatagtttttggagaagtaggaatcgatatgata

SEQ ID NO: 205947 - DNA, 920 bp, Unknown
  Bacterial polypeptide expressing nucleotide sequence isolated from the Sargasso Sea
aagaaatattaaaattaacggaaaaatagtaaaaaaaataattcaagaaattaaattaaatggtgactcagcaattgtaaaatatgaaaaaaaatataataaaaatactgaaataaaaataaataaaaataagattctaaaaaatattaaaacgctcgatccaaagataaagaaagcaatagatttttcctataatagaatttttaaatttcactctaagcagaaaattcaaaattataattataaagataaattaaataataaaatagattataaatatatccctttagattctgttggaatttatatcccaggtggaaatgcaagttttccttcgacacttttaatgagcggtataccagcaaaaattgctggggttaaaagaatagtgatggtaaatcctaaacttaaaggaaaactaagttctggtgttttgtatgctgcaaaaaaaattggaatttcagaaatatattcaattggtggagtccaagcaattgctagtttagcttatggaacaaaaaaaattaaaaaagtaaataaaattattggaccaggaaatatttttgtttcaacagcaaaaaaagaagtctttggtgatgtgggcattgatatgatagctggaccttccgagattactgttgtagcagataaattttctaatccagaatgggttgcttcagatcttttagctcaggctgagcacgatttgaattcgcaatgtattttgatttcaaaagataaaaaaattatagaaatggtaaaaaattctattttaaatcagcttaaagttttaccaagaaaagatattgctaaaaaaagtttacagcaaaatagtatttttatacatgctactactgataaagaaattttgtatacgattaatacaatagctccaagaacatttagaattaaatgttaat

SEQ ID NO: 205948 - DNA, 661 bp, Unknown
  Bacterial polypeptide expressing nucleotide sequence isolated from the Sargasso Sea
tatgaaaattaaaacattgaacacatctcaagctaacttcgacaagaagctacgtgatcatttatcttttgaacaaggaaattatgagtctgtagagaagacagtaaataagattttaaaaaaaattagagaaagtggagatagtggcttgagactattagttgagaaatacgacaagacattctataaaaagatttctgacgctattgtaactaaagaggaaatcagtgatgcatactcattaacaccaaataaaatcatatctagtctgagaaaagccatgcgcaatataaaaactttttcaaaacaacaaaaacttgaaagttggtctattaaagttaaaggatcaaagttgggagaaaaagttacacctataaatagtgtagggatctatgtacctggaggtaaggcaagctatccgtcaactgttttaatgaatgctatccctgcacaagttgccggagtaaagaacattacaatggtttgtccacctgtggcaggcaaactaaatccactagtactaatagctgccgatttatgtggtgtaaataaatttataaatttggtggtgcacatgctattggcgctcttgcttttggtactgaaactatcaaatcagttgataaatttgtttggtcagggaaatatttatgttgcgact

SEQ ID NO: 205949 - DNA, 820 bp, Unknown
  Bacterial polypeptide expressing nucleotide sequence isolated from the Sargasso Sea
taagtatttaccgattgagtcagtcgcaatttatgtaccaggatcgtctgcgtcttatccttcaagtgttttaatgaatgctattccggctatggttgcaggtgttaaaagaataattatgatcaatccaggacataaaggaaaacaaaatccggctgtattatatgcagctaaaaaatgtaaaattaaagaaatatattctattggtggtccctcagctattgcagcagttgcttatggaacaaaaaaaattaatagagtgaataagattgtgggtcctggtaatatgtatgtagcagctgcaaaaaaagaagtttttggagacgttggtgttgaaggaatgatagctggaccgtcagaggtaacagttgttggtgatagattttcaaatccaatctggatagcaagtgatcttattggtcaagcagaacacgacgaactcgctcaatgcatattaatatcaaaaagtagggatttgataattcaaaccagaagtgaaatctctaaacaattaaaaaaaattccaagaacagctattgcaagaaaaagtttattttataacggaattttgattcaggtaagcacagataaagaaataattgatattgttaatagaattgcaccagaacatttagaattaaatataagaaatttccggtcatttattccaaaaataaaaaatgctggatctatttgtttagggaaatatgctgtaatggctatgactgattataatgttggatcaaatcatatactaccaacaaatggttcggctaaattttctagcggtataagtgttaatgaatttataaaaagattt

SEQ ID NO: 205950 - DNA, 873 bp, Unknown
  Bacterial polypeptide expressing nucleotide sequence isolated from the Sargasso Sea
atttcttatacagataaattaaaaaataaacttgaatataaatatgtacctttagactctgttgcaatttatgttcctggctctaccgcctcatacccatcaagtgtattgatgaacgctattccagcgattgtcgcaggagttaagagaatagttatgatcaatcctgggtataaaggtaaacaaaatccagcagtattatacgccgcaaaaaaatgcaaaataaaagaaatttattccatagggggtccttctgctattgcagcagtatcgtacgggaccaaaaaaatcaaaaaagttaataaaatagtagggccgggaaatgcatatgttgcagcagcaaaaaaagaagtttttggtgatgttggaattgagggcatgacagcaggaccctcagaagtgactattgtttgtgacaaattctcaaatcctgagtgggttgcaagtgatttaattggacaagctgaacatgatattcttgcacaatgtattttaattacaaaagataaaaatatgcttgataaagttaaaaatgaaataactaaacaattaaaaaaaattccaagagcttctgttgcaagaagaagtttaattaacaatggaattctaatgtatatttcgtcagaaaataaaataataagtgttataaataaaattgcgccagaacatttagaattaaatattaaaaattataaatcactagttccaaaaataaaaaattcaggatcaatatgtttgggtaaatatgcagttatggcaatgactgactataatgttggatcaaaccatgtgttaccaactaatggttctgcgaaatattcaagcggcataagtgtaaatgaattttataaaaggatttcatacataaactta

SEQ ID NO: 205951 - DNA, 373 bp, Unknown
  Bacterial polypeptide expressing nucleotide sequence isolated from the Sargasso Sea
aattgttatttgcgaaaattatgattcatgcattgagctaagcaatgactttgctccagagcacttagaaattttaacttttgatccaaaaaagattcttgaaggtattgataatgcaggagcaatatttttagggcactggacgccagaagcagttggagattacctagctggaccaaatcatactttacccacatcaggcaattcgaggtttagcggttccttaggtgttgaaacttttatgaaaaacacttcaataatagaatttactgaagaaagtttaagagttaacagtcttgatattatcaatcttgctaaaagtgaaggtttacatagtcacgctcattcagtacaaataagatttcaagattag

SEQ ID NO: 205952 - DNA, 727 bp, Unknown
  Bacterial polypeptide expressing nucleotide sequence isolated from the Sargasso Sea
aaagaaaaatttgcattgtatgaagcaattaaaaatataacttttgtatcaaagtctcagcttaaaactattaataatacaatagagccaataaatggtttaagtatatgggaaagatatgtcccaattaatagtgtaggtttatatgttcctggaggaactgcacctcttgtgtcatcgtttttaatgcaagtgattccagccattacagctggatgtaaagaaattgtaatatgtacaccacctcagcaaaatggaaaaatacatccagcaatactttggttagccgaacaacttgaggttgataatgttttcaaaattggtggagctcaagcaattttgtctttggcaaatggttatttaggcattccaaaagtagataaaatatttggtcctgggaatacatatgttgcagaagcaaaaaaatatgtaagcaataaagttgctattgatttatatgcaggacctagtgaagttatggtagttacaaatgaagataaaaatatttctttagctgctgttgacgctttatcacaacttgaacatggaatagattcttgtgcatttgtgttatctaaatctaaaacaatcttaaaaaaggttgctgaggagataaaaaaattatctaaagagttatcaagatcagatcaaatagaacctgcaatagaaaatatttctttaattaaatgtaattcagatgacgatatcattaatatgataaatagtt

SEQ ID NO: 205953 - DNA, 864 bp, Unknown
  Bacterial polypeptide expressing nucleotide sequence isolated from the Sargasso Sea
atagttttaaagataaatataaaaatattttttcctatcgttcaagacctataaataaagtaggggtatatgttccaggtggtacagcaagttacccaagctctgttttaatgaattgcattccagcaattgttgctggcgtaaaagagatttttatgacagttcctgcattaaatggcaaaatgaattcaggcgttttgtacgctgcaaaaaaatgtaaagttaaaaaaatttataagttaggtggcgctcaagctatagcagcttttgcttatgggaccgagacagtttcaaaggttgataaaattgttggaccaggaaacgaatacgttaatttggccaaaaaagaagtttttggacaagcgggtattgatatgtacgcgggaccctcagaggttacaataattgcagataaattttcaaatccttcttgggttgcagcagatatgattgcacaagcagagcatgacaaaaaatctcaatcaatattagtctctcaaagcaaagaattaatttataaagttaaagagtctataaatattcaattaaaaaatttaccaaaaaaaaatattgcagcaaacagtttaaaaaatttcggcatagcaattcttagcagtgatagtcgtgagattgcagatattgttaatcaaatctcaccagaacacttacaaatttattcgaaaaatcctaaaaattatttaaaaaatataaacaattcaggatctatttttttgggcggttattctccagaggcaatgggagactatttagcgggtccaaaccacgttttaccaacttcagggactgctaatttttcttctggattatcagtttatgattttctcaaaaagacagtcaagtaat

SEQ ID NO: 205954 - DNA, 964 bp, Unknown
  Bacterial polypeptide expressing nucleotide sequence isolated from the Sargasso Sea
aataattttctagtaactagtgaagaattcaaaacagctttaaaagattgcagtaaagagtatataaattcgatacatttggccgctaacagaataaaaaaatatcaaacaaaaattttacctaaaagtatatattttaaagataatataggtataaaaatgggttgtatttggtctgcaatttcttcttgtggcttatacgttccaggaggcaaagcaatttatccttcttctgtattaatgaatgcgattcctgctaaaattgctggagtaaaaagagttgtaataactacaccggcaaataataataaaatcagtcctgagattttggtagcagctcatgttgcaggggtcaatgaagtatataaaataggcggagtgcaagcagttgctgctctagcatttggaactgagagtataaagaaagttgataaaatagctggccctggaaactcatttgtcgctgaagcaaaaaaacaagtttatggacatgtagggattgattctattgctggtccttctgaaatattaattattgcagataaacattctaatgcaaagtggatagcaatagatttactttctcaagcagagcatgatgaagaagccagggctattttagttacagatgataataaattaattaaaaatgtagatttttatataaaatattttttgaaaaaaatatctagaaaaaatattgctattaaaagtattaaaaataatggtttagctattttaataaatgatattaaatactctcatttaattgcaaattatattgcaccagagcatttacaaattatgtcaaaaaataaaaaatctttattaaaaaaaattacaaatgcaggcgctatgttcgtaggaaattactcaccagaagctttaggagattatgtagctggtcctagccatgttttgcctacttcaggaaacgccagatttgagtcaggttgtcagtttt

SEQ ID NO: 205955 - DNA, 877 bp, Unknown
  Bacterial polypeptide expressing nucleotide sequence isolated from the Sargasso Sea
gagaaaaaatttagtaaaaatagtcaaattaagccaagtattaagcaaattaataaagcaattaaatctttagaccctaagattaaaagagctatagattttgcttacaaacgaatactcaaatttcattctttacaaaaaactaaagacatcttttacaaagataatttaaataatataattgagtataaatatttaccaattcgatcggttggtatttatgtcccagcaaacttaccatcaacactattgatgaatgctataccagcaaaaattgcaggtgttaaaagaattgtactagcaaatccaaaaaataatggaaaattaaatcctgcagttttatatgcagcaaaaaaattaggaattaatgaaatttattcaatgggaggcgcacaagctataggtagtttggcttatattcaaaaagtaaataaaattgttggaccgggcaatatctatgttgctggagctaaaagggaggtttttggagatgtaggtattgaaggaatgattgctgggccatctgaaataacaatattagcagatagcaaaactaatttaaatgaagttactacatctatgattgggcaagcagagcatgactcaaattctcaatgtatattgatcactaaaaattctaatttgatcaacaaatttaagaaagatttagaatttaaattaaaagatttaccaagaaaaactattgcatctaaaagtattaaaaataatggactaattttaaaagtctataatgatagacaaattattgatgcaattaatgagatagctcctgaacatttagaaataaatgttagtaattataaaaagtataaggataaaatttttaatgcgggaagtatttgtgtaggaaaatatt

SEQ ID NO: 205956 - DNA, 550 bp, Unknown
  Bacterial polypeptide expressing nucleotide sequence isolated from the Sargasso Sea
atggattccgcagacctaatcgctcaatctgaacacgatgaaatgtcacaatctattttagtatccgatagtaaatatttaattgataaggttcaatattatcttattaagcaacttaaattcttaccaaaaaaaaagatcgcatctataagtttaggtaaatttggtttagcaattttagtaagaaatgcacgtgaagtttcagaaataacaaatataattgctccggaacatcttcaaatttatactaaaaaaccagatagatatttaaaatcaattgataacgctggatcaatatttttaggcgcgtattcacctgaagcagtcggtgattatattgcaggacctaatcatgttctcccaacatcaggcactgcaaaattttcatctggtttatctgttttagattttcttaaaagacaatcaataattaaaatttctaaaagaggtattgaaaaattaggtccatccgttgtaaccttatcaaaatatgaaaatctctatggacatgctaattctgtaaaacttaggcttaaagaaagggagtaat

SEQ ID NO: 205957 - DNA, 379 bp, Unknown
  Bacterial polypeptide expressing nucleotide sequence isolated from the Sargasso Sea
ggggttaatagttatttgcaagaattatgaatcatgtattgaactaagcaataaatttgctccagaacacttagaaattttagctttaaattcaaacaaaattcttgaagggatagagaatgcaggagcaatatttttaggaaaatggaccccggaagctgtgggagattatctggctggaccaaatcatactttacctacatcaggaaattctagatttagcggttctctgggagttgaaacttttatgaaaaatacttcaataatagaatttaatgaagaaagtttaaaagttaacagtcttgatattataaatcttgctaaaagtgagggcttacatagtcatgcaagctcagtacaaataagatttgaagattag

SEQ ID NO: 205958 - DNA, 619 bp, Unknown
  Bacterial polypeptide expressing nucleotide sequence isolated from the Sargasso Sea
ttgacggaacgcgagcgggtggaggtgatgcgtcggccgcgggtggattttacgtcgattttggacgtcgtgcgaccgatcgtggaggcggtggagacgcgcggggacgacgcggtgcgcgagtacacgcagaggttcgacggggtggaattggacgcgacgacggtgcgggtggaggatttgccggaaccggtgttggatgatgatgtgaagaaggcgtttgacgtggcgtatgagaatatcgcggcgtttcacgcggcgcaagcgcgaacgggagacgtggacgtgacgacgatgccgggggttcggtgccgacgggtgtcgagacccatcggtgcggtcggattgtacgttccgggggggaccgcggtgttgccgagcacggcgttgatgctggcggtgccggcgaagatcgcggggtgcgagagagtggtgctcgcgacgccgccgagaaaggacgggtccatcgttcccgaggtgctgtacgtggcgaaaaaggctggcgtgacgcacattctcaaggcgggcggggcgcaagcgatcgcggcgatgggattcggaacggagacgtgccccaaggtggataagctcttcggcccgggtaaccagttcgttaccg

SEQ ID NO: 205959 - DNA, 776 bp, Unknown
  Bacterial polypeptide expressing nucleotide sequence isolated from the Sargasso Sea
tgctgcgaaaaaatgcaatataaaagaaatttactcaattggtggcgctcaagcaatagcagctttggcgtatggaacaaaaaaaattttgaaagttaataaaatagttggtccaggtaatttatatgtaactgcagcaaaaaaagaagtttttggagatgtgggtatagatatggttgctgggccttcagaaattacagttgtaggtgataaatttagtaatgcagattggatttcatcagatttaattgctcaagccgaacatgatgaattatctcaaagtattttgatatcaaaagataaaaatttaattaataaggttcaaaattctttaattaatcaattaaaaagtttgccaagaaaattaattgcgtcgaaaagtttaaataaaaatggtattttgatttatactaattcagataaaaaattggttgaaatagttaatagattggcaccagaacatttagaattaaatctcagaaattataaaaaaattgttaataaaattagaaatgcaggttcaatttttttaggcaaatattcaacagaagcttttggagattacttggcaggtactaatcatgttttaccaacttcaggatctgctaaattttcgtcagggttaagtgtttatgatttttataaaagaatttcttatataaacttatcaaaaaagggtattgaaactcttggcccttcagttataactcttgcaaactttgaaggtttagaaggtcatgcaagatcagtaaaactaagaattgggagaaaataga

SEQ ID NO: 205960 - DNA, 521 bp, Unknown
  Bacterial polypeptide expressing nucleotide sequence isolated from the Sargasso Sea
ggctgaacatgatcttgatgcaggagcatttttagtcacaacatcagagaaccaggcaaaaaaagtggcggagcgtataaaaaaattggttcctaaacttccgcgaaaagaaattatcgaagcttcatttagtaaccgttctgcaataatcctggcaaagaatttggaggaaatatttgaaattattaatgaatttgcgccggaacaccttgaaatcctgacaaaaaaaccttttgaagatctatataaaattcgcaatgcaggcgcaatttttcttggtccaaacacacctgaaccagtaggtgattattttgctggaccaaatcacactttgcccacttcagcttgtgcaaaattttcttcaccactaggggtacaggactttgtaaaaacaagttctgttatcagttattctgctgaacgtcttaaaaaccagggagaacaaattattcgttttgcagaagaagaagaactgttttcgcatgcagcagcaatccagacacgtctggataatttttaaa

SEQ ID NO: 205961 - DNA, 667 bp, Unknown
  Bacterial polypeptide expressing nucleotide sequence isolated from the Sargasso Sea
aattgcacacaagaaagcattgaagcaatcaaacttgctaaaaatcgtattgaggcatttcataaagatcaattacctgaagattcaatatataaggatcaagaagaagtaagtataaaaactagatggattccacttgatagtgctggaatttatatccctggcggcactgcttcatatccaagttcagtattaatgggagtaattccggcgcaagttgctggaattaaaaaaatatctgctacagttccttgtccaaataatcaaatagatcctcttgttttggccaccttggatttatgtggaattgaaaaaatatacaaaattggaggtgctcaggctatagctgcacttacatggggaactgaatctgttgacggtgtagatataattattggacctggaaataaatgggttgccgaagcaaaaaaacaggctctttcaaatataaatattgatatgttagcgggaccaagcgaaatattaatcttagcagatgaaaataatagagcggattgggttgctgctgatcttttatctcaagcagaacacgatatttctgctcaggcgattttaataactgatagtgaaaatttattagaaaatgttaataatgaattagttaatcaaacagaaaatctcgagagaaaagatatagttaataaaa

SEQ ID NO: 205962 - DNA, 715 bp, Unknown
  Bacterial polypeptide expressing nucleotide sequence isolated from the Sargasso Sea
cttctaaacgtaagaataaacggggaccatgctgtagaaaaatatacaaaaaaatttgatgggttcaatcccaaaccaatgcaagtaagcgcaaatgaattgaagtctgcatgggatgagacagatgatcacttaaaaaaatctttagaaattgcctatcaaagaataaaaaaatttcatgaaaaagaaatccctatttctttcactattgagggagagcatggtgactctgtgcaaaggagatggaggcctgtaacttccgccggcctatacataccgggaggcagagctgcatatccaagtaccgtattaatgaatgccatccccgcaaaagtagcgggtgtaaaagaaattttaatggtatctccaggtgatacaaaaggccaaataaataaaactgttttagctgcagcttacttatcagaaatagacaaggtttttagaattggaggagcacaagcaattggtgcattagcatttggaacagatcaaataaaaaaagttgatgttatttcaggaccaggaaacatctttgtaaccaccgccaaaaaaatgatttatggatttactggaattgattcactagcaggtccaagcgaaatattaatcatcgctgataaaacagccaatagttcgcaaatagcggcggatttactagcgcaagctgagcatgacccattaccatcatcaattcttttaactacttccaaaagat

SEQ ID NO: 205963 - DNA, 784 bp, Unknown
  Bacterial polypeptide expressing nucleotide sequence isolated from the Sargasso Sea
attaatccatattttataaaattaataaaggaattaggtattaacgaaacatattttgtaggaggagctcaagctattagtgcgctaacgtttggcactcaaactattgagccagtaaacaaaatatttggacctggtaatgcttatgtagcagaggcaaaaaaacaattgtatggaaaagtaggtatagatttactagcaggaccatctgaaataatagttgttgcaaacaacaataataatccagattgggtagcttcagatctaattgcccaagcagaacatgatgaaaatgcgcaatcaattttaattacggatagtaaagattttgtaactaatgtcttaagttcaattaaaaaaattaaaaaagatttatcaaaaaagaaaataattgaaaaaagcttaaataataatggaattattgctttggtcgataatatagaacttgcttcagaaatcataaattttgttgcaccagaacatttacatattcacatttctaataataaaaaattattatcaaaaataaataatgctggtggtatttttttaggtgagtattctgttgaagcttttggtgattacattgtaggaactaatcatgtattgccgacatcaggagcggcaaaattttcatcagggttaggtgttttagattttatgaaaagaacctctgttgttaagatgaataaaaaatcttttaatgctctttcaaaagatactcaaaaaaggtcaggacttgaagggttagatggacataaattatcagttaaaatagacaaaa

SEQ ID NO: 205964 - DNA, 538 bp, Unknown
  Bacterial polypeptide expressing nucleotide sequence isolated from the Sargasso Sea
attgcagcagatttaatagcccaagctgaacatgataacttttcacaatcaattttaatatctaataataaaaaacaaattaaggcagtaaatctatcaattattaaacaacttaagaatttaccaaagaaaaaaattgcatcatatagtttgagaaattttggctattcaatattatcaaaaaattggaaaagaacgattgagataataaatgaaattgctcctgaacacttagagcttgcaataaaaaattatggtaaaattttaaaaaaaatagaaaatgcagggtcaatttttgttggaaagtactcaccagaagctatgggtgactatcttgctggccctaatcacgttctcccaacgactggctctgctaaattctcctcaggtttatcagtatttgattttttaaaaagacaatcattaattaaaatatcaaaatcaggtattgaaagattaggtccgtacgttataaatttagcaaattatgaaaaactggaaggtcatgcaagatcggttaaaaaaagaattggttaaa

SEQ ID NO: 205965 - DNA, 804 bp, Unknown
  Bacterial polypeptide expressing nucleotide sequence isolated from the Sargasso Sea
ttatgttccagcaaatttaccatcaaccttacttatgaatgctattccagctaattttgctggtgtaaaaagaattgttttagctaatccaaaacttgatgggaaacttaacccagctgttttatatgcagcaaaaaaggtaggtataaatgagatatattctatgggaggtgcacaggcaatagcaagcttagcctttatacaaaaagttaataaaattgttggacctggaaatatttttgttgcgacagctaaaaaggaattatttggtcgagtaggtatggaggctatgattgctggaccatctgaaataacagttttagctgacaaaaaaacagatatagaagatgtactaacttcaatgattggccaggcagaacatgatgaaaattcacaatgtattttaatttcgaaagatattaatttgataaaagattttcaaaaaaaagttaaaaacaaaatgaaaagcttgccaagaaggctaatcgcatacaaaagtcttaaaaataatggtttagctatactagtaaaaaataattctgatataatatatgctgttaatgaaattgcaccagaacatcttgaagtaaatatttcaaaatctcaaacaatcttaaaaaaaattataaatgtcggaagtgtttgtattggaaaatactcccctatggcagttacagattataacgctggaacaaaccatgttctaccaacatttgggtcagcaaagttttcatctggtttaaatattgatgaattctataaaaaaattagctatattactctatctaaaaaaggtgttgagaa

SEQ ID NO: 205966 - DNA, 732 bp, Unknown
  Bacterial polypeptide expressing nucleotide sequence isolated from the Sargasso Sea
tcctggttctactgcttcatacccatcaagtgtgttaatgaacgctatcccagcaattgttgcaggagttaagagaatagttatgattaatccaggctataaaggaaaacaaaatccagccgtattatacgccgcaaaaaaatgcaaaataaaagaaatttattctattggaggtccttctgctattgcagcagtatcttatgggactaaaaaaattaaaaaagttcataaaatagttggtccaggaaatgcatatgttgcagcagcaaaaaaagaagtttttggtgttgttggaatagaaggtatgactgcaggtccttcagaagtgactgttgtttgtgacaaattctcaaatcctgaatgggttgcaagtgatttaattggacaagctgaacatgatattcttgcacaatgtattttgatttcaaaagataaagatttgctagataaagtaaaaattgaaattactaaacaattaaaagaaattccaagagcttctgttgcaagaagaagtttaattaataatggaattcttatgtatatttcttcagacgctaaaataacaagtgttataaataaaattgcaccagaacatttagaattaaatattaaaaattataaatcgttagttccaaaaataaaaaattcaggatcaatatgtttaggaaaatatgcagtgatggcaatgactgattataatgttggatcaaaccatgtgttgccaactaatgg

SEQ ID NO: 205967 - DNA, 826 bp, Unknown
  Bacterial polypeptide expressing nucleotide sequence isolated from the Sargasso Sea
gaataccaaattaagttcaatttggaaaccaatggattcagtaggcttatatgtgccgggaggtaatgcagtttatccatcctcattaattatgagtgtagttccagcacaaatagcaggagtaaaaagaatagtttgcgcaacacctccatcaaataattttaacccatatatcgcttttttattagatgagttaaatattaatgaagtttatcaagttggtggtgctcaggcaattgcagctttaacatacggtacccaaacgataaaatcagttagtaaaatttttggaccaggaaatgcctatgttactgctgcaaaaaaacaggtttttggaaaggttggaattgatttagtagctggcccatcagaaattattgttgtggcagatgaagaaaataatccagaatgggttgctagtgatattatggctcaggcagaacatgatgaaaacgcacagtcaatattaatcacaaatagtaaaacttttgcaaataaagtattagagcaaatagaaaatctcaaaaatactttgagcaaaagaaaaatagttgagattagtttgaaaaaaaatggcttaatagtaatcatggatgatttaaaattatcatataatattattaataaaatagctcctgaacatttacaccttcaatcaaaagaaaaagaaattatttttaaaaatattaacaatgctggaggaatatttttaggtgattattcaactgaagcatttggagattatgtagcaggaacaaatcatattttacctacttctggagcagcaaaattttcatcagggttgggtgttatagattttatgaaa

SEQ ID NO: 205968 - DNA, 832 bp, Unknown
  Bacterial polypeptide expressing nucleotide sequence isolated from the Sargasso Sea
attgataaagtatgaaaaaaaatatagcaacaattctaatattattactcaaaaaaaagatttaaattatggagctagaatcctaagccctaaggtaaaaagagcaatcgatttttcatttaatagaatatttaaatttcactcaaaacagaaagtaaaaaatataaaatacaaggataaattaaataataatttgtattataaatatatcccaattgaatctgttggagtttatgttccaggtggaacagcaagctttccatctacagttttgatgaacgtgataccagcaataattgcaggggtgaaaagaattgtaatagttaatccaaaaatagatggcaaacatagtcctgcagttttatacgcagcaaaaaaaactggtataaatgaaatatattctattggaggcgctcaagcagttgctgctttagcttacggtacaaaaaaaataaaaaaagttgataaaattattggccctggaaatatttttgtttctaatgcaaaaaaaaaactttttggagaggttggaatagacatgattgctggaccttctgaaattacaatcttagcagataagtttgctaatcccgaatgggtttctgccgatctaatagctcaggcagagcatgatataaattctcagtgtattttaatttcaaaagatataaattttattaaaaaagttaattttttaataaaaaaacaattaatacatttaccaagatcaaatattgcttcaaaaagtttgaagttaaatggaattttaattaatgcaaaagatgataaccaaataataaatattataaatgatattgcacctgagcatttg

SEQ ID NO: 205969 - DNA, 817 bp, Unknown
  Bacterial polypeptide expressing nucleotide sequence isolated from the Sargasso Sea
taatgtagtgaaaagaattgtcaatgatgtaagaaaatacggagatagatcattaattaaatatgaaaaaaaatttaataatcttacagctctttcagtaaagaaattatttttttcaaaatctgaaatacaaaaaaatattaaagatttggatgtttctgtaaaaaattctatagatatttcttttaagaggatctctacttttcacaaaaatcaaaaatttaaaaattttaaacttaaggataactataacaattatctttcttatagatcaaaacctttggacaaagtaggagtttatgtacctggtggaagagctagttacccaagctcagtcttaatgaactgcgtaccggcaataattgcaggggttaaaaatatttatatgactgtaccatcaacaaacggaaatgtgaatcccggagtattgtacgctgcaaaaaaatgtaaagttaaaaaaatttataaattaggtggagctcaagcaatagcggctttttctcttggaacaaaaacagtggaaaaagttgataagattgttggaccaggaaatgaatatgttgccctagcaaaaaaagaagtctcgggtatttcaggtattgatatgtttgctggaccctccgaggttacaattgttgcagataaaaactcaaacccagagtggatctctgcagatttgattgcacaatccgaacacgatgaaatgtcacaatctattttggtatcagaaagtaaaaatttaattttaagtgtgcaaaaatttttagtaaaacatcttagatttctacctaagaaaaaaattgcatctaaaagttta

SEQ ID NO: 205970 - DNA, 832 bp, Unknown
  Bacterial polypeptide expressing nucleotide sequence isolated from the Sargasso Sea
agctcaaaacaaataaaaaaatccataaattcactgataaaaaaagtaaagaaagcaatcgatacggcttataaaagaatttataaatttcattcacttcaaaaatttaaaaatatttcttatacagataaattaaaaaacaaacttgaatataaatatgtgcctttagagtctgttgcagtttatgttcctggttctactgcttcatacccatcaagtgtgttgatgaatgctattccagcaattgttgcaggcgttaagagaatagttatgattaatccaggctataaaggaaaacaaaatccaggcgtattatacgctgcaaaaaaatgcaaaataaaagaaatttattctatcggaggcccttctgctattgcagcagtatcctatgggactaaaaaaattaaaaaagttcataaaatagttggtccaggaaacgcatatgttgcagcagcaaaaaaagaagtttttggtgttgttggaattgaaggtatgactgcaggtccttcagaagtgactgtcgtttgtgacaaattctcaaatcctgagtgggtcgcaagtgatttaattggacaagctgaacatgatattcttgcacaatgtattttgatttcaaaagataaaaattttctagacaaagtaaaaattgaaattactaaacaattaaaagaaattccaagagcttctgttgcaagaagaagtttaattaataatggaattcttatgtatatttcttcagactctaaaataataagtgttgtaaataatattgcaccagaacatttagaattaaatattaaaaattataaatcgttaattccaaaaataaaaa

SEQ ID NO: 205971 - DNA, 781 bp, Unknown
  Bacterial polypeptide expressing nucleotide sequence isolated from the Sargasso Sea
aaaaataaattttggaaagatgaaaaaggtgttaagttaggttttagatggacaccaattaattctattgggatttatgttcctggtggtttagcatcatatccttctagtgttttaatgaatgcaattccagcaaaagtagctggtgttggaaatattacaatggttactccaaccccattgggaaaaataaaccctcttgttttatatgctgcaaagattgcgggagttgataaaatcataaaaattggtggggctcaagcaattgctgcactagcctatgggacagagtccattgacgctgtggataaaatagttggtcctggcaattcttttgttgcatctgccaaaagaaaagtattcggtcaagttggtatagattctgttgcaggaccttcagaagttttaattatttctgatagtgatcaaaatccatcatggattgccgcggatcttttggctcaagctgagcatgatgagaaagcaaaatcaatccttattactgatagtatttattttgcaaaggctgttaaactggaggttgagaaattattaagaaatttaaaggataatataattgcttcaaaaagttggagtgaaaatggtaaaataattgtagttaatcaattaaaagattctatcaatttagctaacacaatagccgcagaacacttacaaatttgtattaaaaaaccagaattattattagataaaattgtaaatgcgggtgcaatttttctaggtgaaaatacgcctgaggtttttggtgattatattttgg

SEQ ID NO: 205972 - DNA, 918 bp, Unknown
  Bacterial polypeptide expressing nucleotide sequence isolated from the Sargasso Sea
cggttggtttatatgtgccagggggccgcgcagcatacccctcatcggtactaatgagcgccattccagcaaaaattgcaggttgtgatcgaatcgtaatggtatcccctccaacgggcggtagtattccaccagccgtattagttgcggctgatattgccggagtgagcgaaatttatcaagtgggaggcgcacaagcggtatttgcattggcgcatggcacacaatctattcaagcggttgataaaattgttggaccaggcaacaaatatgtaacagctgcaaagcaaatggtgtatggctgtgttgatattgataagccagcaggcccatctgaggtatgtgtggcaatagattctattgattatgcagcgtatgccgcagccgaatgcttagcacagttagagcatgatcctgatgcttcggcaattgttattaccacgtcccctgatattgcagctgcagtaaataatcatgccattgaacaattaaaaattttaaagcgacaagacattattaatcagtcaaaagaacatgcggtaattgtggtggttgaatctgatcaagaattattggaatcaattaatcaggtagcatctgaacatttagttttgttggttgatgaaccaaatagcttaagaagtcaggtacgccatgcgggctccattttttgtggcccatattcgcctgtatcgttgggcgattattatgctgggcccaatcatgtattgccaacggcacgttcagcaaggtttgcttcgcccttaggtgtgatggactttatgaagtattcatcgtatttagagtacagtaagcaggcccttgaaaatgcacaatcagatattcaagccttaactctagccgaaggatttgatgcacattatcaagcggtagcagtacggtttaatgatggctaaa

SEQ ID NO: 205973 - DNA, 664 bp, Unknown
  Bacterial polypeptide expressing nucleotide sequence isolated from the Sargasso Sea
catgacctttcgggctaacacccaaaccccgggatttgatgaccaactagaggcatttctggcccagaaacgagagagcgccacggatgtgtccggcgtggtcttatcgattatagggcggatccgggcagagggcgataaggccttgtttgatgtgacaaaagaactcgacgggaatgacattgatgcagatacaattcgggtcagtcggtccgaaatcgaagaggctcttggggcgtgtaaaagtgaaacgctagacgcgctggtattggcggccgaccggattcgtgcttttcacgaaaaacaggtgccctgtaaccttgaatatacggacgacgcaggggtcaagctgggctatcgttggtcacctgtccaagcggccgggctttatgtgccgggtggcacggcagcctatccatcatccgtgctaatgaatgcccttccggcgaaggtggcgggtgttggccgtctcgccatggtagtgccagcatcgggtggagagctcaatccgtatattcttgcagctgcccatattgccggcgtaagtgaaatataccggattggcggggcccaagccgtggctgcgctagcatatggtaccgagagtgtggcgccggtgaatgtcattgtgggtccgggtaatatctatgtggcaaccagcgaa

SEQ ID NO: 205974 - DNA, 904 bp, Unknown
  Bacterial polypeptide expressing nucleotide sequence isolated from the Sargasso Sea
tttgaatgatatcaaaaaagggaatgattcctctataataaaatatgaaaaaaaatttaatagactgaaaaatttaagaaaaaaagatctttgtttttcatcttctgaaattaaaaagaatattaatttattaaatgaaagaacaaaaaaagatatcaatttagcttataatagaattcttaattttcataaaaatcaaaaaataaggactttttctacaactgataaatttaaaaatagattttcatatagaactgtgccgatagaaaaaataggagtttatgtccccgggggtaaagcaagctatccaagctcagtcttgatgaattgtattccagcaattgtggccggagtacctgaaattttcatgactgtacctagtttaaataaaaaaataaatccaggtattttatatgctgcaaaaaaatgtggagttaaaaaaatttataaacttggtggagcccaagccatagcagcatttgcatatggaactgaaacagttcaaaaagttgataaagttgtaggaccaggcaatcaatatgtttcattagcaaaaaaagaggtatttggagaagttggtattgatatgttcgcaggtccatccgaagtcactgttattgcagacaaatattctaatccaaaatggatagcagctgatctaatagctcaagcagaacatgatgaactctcgcaatctattcttgttactaataacaaagaattaatttataaagttaataaatttttaagttttcagatagctcttttgccaaaatacaagattataaaaagtagtttaaaaaattttggattagctatttttgcaaaaaatatgagagatgttgcaaacgttgtaaacaaaattgcacctgaacacttggaaatttgtacaaaaaaaccctga

SEQ ID NO: 205975 - DNA, 724 bp, Unknown
  Bacterial polypeptide expressing nucleotide sequence isolated from the Sargasso Sea
gatgccggttttcctcaattttgatgatccccaattcgatcagctttttgatgagattttaaattctgaccgtgacgccaattgggacgttaacagcttagtttctgatattttagcagatgttaaaggacgaggggacgaagctctcatacaattaactgatcggtttgataaaattaaactaaaaaaagaagagctaagcttttcaaaaaaagaaatagacgaactttcagctaaaataaaaagcaatgagcgtaaagccttagacttagccgctagtagaataaaagtattccatgaaaaacaaaaacctgaggatgtaatttggagtgatgatattggagttgaacttggatggagatggacccctatcgacgctgtaggtatttatgttcctggtggattggcaagttatccatcttcagtgcttatgaatgcaataccagccaaggtagctggggtaaaacgtgttgcaatggttgttccaacgccgcatgggaaaattaatccggcagtcctttatgctgcaaaggtttctggtatagatgaaatatacagaattggaggtgcgcaagctatcgcagcgctagcttatggaacgtcaagcatttcacctgtggataaaattactggaccaggtaattcttacgtggctgccgccaagcgacaagtttttggtaaagtcggaatagatatgattgctggcccctctgaagtttggtaa

SEQ ID NO: 205976 - DNA, 862 bp, Unknown
  Bacterial polypeptide expressing nucleotide sequence isolated from the Sargasso Sea
ccgggcggcgaggcgggccacacggtggcggcggtggaggcggcgggctgctacgcgcccggcgggcgctacccgctgccgtcgaccgtgctgatgaccgccgtcaccgcgcgcgtcgccggctgcgagcgcgtcgtcgtcgcctcgcccaagccgtccgtggtgacgctggcggcggcgtacgtggccgaggcggacgtgctcctgccgattggaggcgcgcacgcgatcgccgcgctggcctacggcgcgggcgagctgctcgagccgtgcgacgccgtcgtcggccccggctcgatgtgggtcaccgccgccaagtcgctcgtcgccggccgcgtcgccatcgacatgctagcgggcccgtccgagtgcctagtcatcgcagacgagatggccaagcccgacgtcgtcgctaaggacctcctcgcacaggccgagcacgaccccgccgcgctgcccgcgctgatctgcctctccgagagcttcgccgccgccgtcgacgccgcgatctccgagcagctcaagacgctagccacggccgagatcgcatccgccgcgctccaaaacggttacgcggtggtggtgggctcgatcgccgaggctgcggccatctccgataggctggcggtggagcacgtcgagctgcacgtggagaacgcgatggagctcgggcgatcgctcaagcactatggcggcctcttcgtgggcggaggcgcggccgaggtcctcggcgactacggagcggggcccaaccacacccttcccaccggaggcaccgcgcgctcgaccggaggcctctgcgtgctcaccttcatgcgtgtgcggacgtggatgcgcgtcgacgacaagaacgcggccaagg

SEQ ID NO: 205977 - DNA, 410 bp, Unknown
  Bacterial polypeptide expressing nucleotide sequence isolated from the Sargasso Sea
agagatttgtatgcaatcaattacaaattggggattgatcgcagtttgcaaaaattatgagtcatgtatgaaactaagtaatcaatttgcccctgaacatctggaaataataactgttaatccaaaagaaattctcaaaggtattgagaacgctggagcaatatttttaggaaaatggacacctgaagctgttggagattatttggcaggtccaaatcatactttacccacatcaggaaattccagattcagtggctctttgggtgttgaaactttcatgaaaaatacttcaataatagagtttaatgaaagaagtttaaaagttaatagtgctgatattataaacttagcaaatagtgaaggccttcatagtcatgctaattctgttcaaataagattcgaagattagc

SEQ ID NO: 205978 - DNA, 667 bp, Unknown
  Bacterial polypeptide expressing nucleotide sequence isolated from the Sargasso Sea
taaagataatctaaataataaaatagaatataaatacgtaccaattcaatctatcggtatttatgttccagcaaacctaccatcaactttgttgatgaacgctattccagcaaaaatagcgggtgtaaaaagaattgtactagcaaatccgaaaaataatggaaaattaaatcctgcagttttatatgcagcaaaaaaattaggaattaatgaaatttattcaatgggaggcgcacaagccataggtagtttagcttatattcaaaaagtaaataaaattgttggtcctggcaatatctttgttgctggtgctaaaagacaagtttttggggatgtaggtattgaaggaatgattgccggtccatctgaaataacaatattagcagatagcaaaactaatttaaatgaagttactacatctatgattgggcaagccgaacatgactcaaattcacagtgtatattaattaccaaggatttaaatttgattaaaaaatttaaaaaagatttagaattaaaattaaaacagataccaaggcaaagtattgccactaaaagtataaaaagtaatggactaattttaaaagtatataatgatagacaaattattgatgcaattaatgagatagctcctgaacacttagaaataaatggttggcaattataa

SEQ ID NO: 205979 - DNA, 742 bp, Unknown
  Bacterial polypeptide expressing nucleotide sequence isolated from the Sargasso Sea
acagcatcgggaggagcccaggccatcgccgccatggcctgggggagcgaaaccatccctgcggtggacgtgatcaccggcccgggcaatttgtacgtcaccctcgccaagaaagcggtgtacgggagggttgggatcgactctctcgccggacccagcgaagtgctgatcatcgcggacgacaccgctgacgcagaacttgttgcagcggatctgttggctcaggccgagcatgacccgatggcggcagcgatcctgctgaccaccagtgatcggctgcttcaggaggtgccaggccagctccaacaacagctgctggatcacccgcgaaaagaggtgaccgaagcctccatccgcgactggggattgatcgtgcactgcagcgatcttgatcaagccgcagagctctctgattgctttgcgcccgagcacttggagctactggtggccgaccctcgcagcctggctgagcggatccagcaggccggtgccatcttcatcggttcacacagcccagaagctgccggtgattaccttgccggtccgaaccacacgctgcctacatcaggtacagcccgcttcagtggcgcactgagcgttgaaacattcatgcgccacaccagtctgatcaatttcaaccgtgaggcgctggaagccaccggagcggcgatcatgacgctggcagccagtgaagggctccacagccatcgggaatcagtccgccggcgtctacagcgctaag

SEQ ID NO: 205980 - DNA, 511 bp, Unknown
  Bacterial polypeptide expressing nucleotide sequence isolated from the Sargasso Sea
tgagctttcacaatctatattagttactaatagtaaagaattaattttcaaggttagaaaaattcttaattatcaaataaattttttaccaaagaaaaaaattatttcttctagtttaaaaaattttggtttagctatatacgcaaaaaatgcaaaagaaatttcaagtattgtagataaaatttcacctgaacatttagaaatatgcacaaaaaatcctcaaatgtatttaaaattaataaataatgcaggatcaatttttttaggatcgttatcacctgaagccatgggagattacttggctggcccaaaccatgttttaccaacttcaggaacggcaagattttcatctggtttgtcagtttttgactttttaaagagacagtctgtaataaaaatttctaaatcaggtattgaaagacttggtccttcagttataaatttagcaaattatgaaaatttacatggtcacgctaattcagttaaaattagattgaaaggaaaaaattga

SEQ ID NO: 205981 - DNA, 817 bp, Unknown
  Bacterial polypeptide expressing nucleotide sequence isolated from the Sargasso Sea
ccttcaacaggtaaaataaataaagcaatcagaacattagacccaaagattaaaaagtctatagattttgcttatgaaagaatttttaaatttcatactaagcaaaaaattaaagatataaagtatatagataatttcaaaaataaactggaatataaacatgttccaattcagtcagtaggagtttatgtaccagcaaatctaccttcgacacttctaatgaatgcagttccagcaaaaatatctggtgttaaaagaatagtgctagccaatcctaagcttaatggaatgttaaatcctgcggttctctatgcggctaaaaaagttggcattaaagaaatttattctatgggcggtgctcaagctattgcaagcttagcatatatccaaaaagtaaataaaattgttggacctggaaatatatatgtagcaagaagtaaacgtgaagtgtttggagatgttggcacagaagcaatggtagctggtccatctgaaataacagtcttagcagacagaaacactaatttaaatgaagttacaacatcaattataggtcaagcagagcatgatattaattcacagtgtatcttaataacaaaagatactaatttaataaaaaaattcaaaatcgatttgatatctaaattaaaaaaattacctagaaaaaatatagcaagtaaaagtttaaaaaaaaatggtttaatcctaaaagttaaaaatgataaacagattgtcaatgtaatcaatgagatagcacccgaacatttagagttaaatgttaagaactataaaaaatataaaaataaaattttaaatg

SEQ ID NO: 205982 - DNA, 814 bp, Unknown
  Bacterial polypeptide expressing nucleotide sequence isolated from the Sargasso Sea
cacaaaagacagatccctaagaacgactttttcaaagataagcacggaattttacttggagggttatggaacccaattgaatctgttggtttatatgtcccaggggggacagcagcttatccgtcttctttaataatgaatgctgtaccagcaatagttgctggggtgaaaagaattgttattactgttccggcaatcaatggtgttttaaatcctgtaatattagcctgtgctaatctgcttggtataaaagaaatttataaaataggaggtgcacaagcaatagctgcacttgctatgggaacaaaaaaaattagaaaagttgataaaatagtgggtcctggaaatgcttatgttgccactgcgaaaaaaaaattatttggattagttggaattgatatgattgctggtccgtcagaaatattaataattgctgacaaaaaaaataacccagaacatattgcaattgatcttttatcccaagctgaacacgataagttagcccagtcaatattgattacagatgatgagagttttgctaaaaaagttattcaaaatattaaaattcttttgaaaaaaatcgatagaaaagatatagcaagtgagagctggaataattatggtgtcgtgattataagtaaaaccattcaaagttcaatttcacttgcgaatcaaattgcaccagaacatttagaattagcgattgataactcaaaaaaatatctaaaagaaattaaaaacgcaggtgcaatttttcttggaaaatatactcctgaggcaattggtgattacgttgctggtcctaaccatgttt

SEQ ID NO: 205983 - DNA, 644 bp, Unknown
  Bacterial polypeptide expressing nucleotide sequence isolated from the Sargasso Sea
aatggtaaaaactgaaaaagacctagatttatgggtagctgaatatattaaaaattcaaaaggtttcttaagtactattgatacaaaggtagcaaaaataattaaagatgtaagaaatcggggcgatgaagcaatcatagagctctcaagaaaatttgaccacgttgatttaaaagaaagtaacttctattttacggatgcggaaataaccaaagccgaactggaggtccctaggaaagaaagagaagctctagagttagcactttctaggattaagtcctatcatgaaaagcaacttccaaaggataagttttggagagatgaattgggagtagaattaggatttagatggtctcctctttcatcaattgggatttatgttccaggtgggatagcatcttatccttctagtgttcttatgaatgcagttcctgccaaagtcgcaggggtcaaaagtataactatggctacacccacgccatcgggtagaataaatcccttagttctctttgcagccagaatggctggagttgataaaataataagggtgggaggagctcaggcgatagctgcattggcctatggaacaaaaaacattaatccagtagataaaatagtaggtcctggtaatgcttatgtagcag

SEQ ID NO: 205984 - DNA, 805 bp, Unknown
  Bacterial polypeptide expressing nucleotide sequence isolated from the Sargasso Sea
tttgatggtttcaaccctgaccctatgcaagttagtacggaggaattaaagaacgcgtggagtgaaattgatagcaatttaaaggtttctcttgaggtagcccataaaagaattaaaaaattccatgaaaaagaaattccattatctttcacaataaaaggtgaacatggtgattcagtccaaagaagatggagaccagttaaaaatgcaggcatttatataccaggaggtagagctgcttatccaagtaccgtattaatgaatgcaatacctgcaaaagtagcaggagtagaagaaatcttaatggtatctcctggaaacactgaagggaaaataaacaaaactgttttagccgctgcttacctatcagggatcaataaagtttttagaattggaggagctcaagcaattggtgctttagcatttgggacaaatcaaatcagaaaagttgatgtcattacaggtccagggaatatctatgtaactaccgctaaaaaactaatttatggctccacagggatagattctttagctggtccaagtgaaatattaatcattgcagatgaaacagctcaaagctcccatatagcaagtgatctacttgcacaagcagagcatgatcctttagcttcttcaatacttctaactacatcaaagagccaggcaaaagaagttttagaggaactttatgaaaaaatagatgatcatccaagaaaagaaatttgcatgcaatcaattaggaattggggattaattgtagtttgcgaaaatcatgaatcatgtattgaattaagcaataactttg

SEQ ID NO: 205985 - DNA, 736 bp, Unknown
  Bacterial polypeptide expressing nucleotide sequence isolated from the Sargasso Sea
attaagaaaaaccttaaattattaaatagtagaacgagaaaagatattgatcttgcctacaatagaattttaaactttcataaaaatcaaaaaattaaaactttttctttaactgacaaatacaaaaataggttcgcgtatcgaacaaaaccaattgaaaaagtaggagtctatgttcctggaggtaaggcaagctatcctagctcagttttgatgaactgtatccctgctattgtggctggagtgaaagaaatatttatgacagttccaagtttaaataaaaaaataaatcctggaattttgtatgcggctaaaaaatgtggtgtaaaaaaaatttataaacttggaggagctcaggctataggagcttttgcatatgggaccgaaacagtttttaaagttgataaagttgtaggaccaggaaatgaatttgtatctttagcaaaaaaggaggtgttcggagatgtaggaattgatatgtttgccggaccgtctgaagttactgtgatagcagataaatactccaatcctaaatggattgctgctgatttaatagctcaagctgaacacgacgagctttctcaatctattcttgtaactgatagcaaagaactaatatttaaagttaaaaaacttataaattttcaaaaaaatcttttgccaaaaaaaagaattatatctagtagtttaaataattttggtttagccatttttgcaaataatagaaagaaatgca

SEQ ID NO: 205986 - DNA, 616 bp, Unknown
  Bacterial polypeptide expressing nucleotide sequence isolated from the Sargasso Sea
catgccaaaacgccttaatttctgcgaaccggggttcgaaagccaattttcagccctcttatccgaaaagcgcgaaactgaaacggatgtcaacgacggggcggcggcaatcctggatgatgtccgctcccggggcgaccgggccgtttgcgaggcaacggctaagtatgatcggtttgatattagcccggacgaaatgactttctcccccgatcagattgcccaggcgcaggctcagtgcgaccctgagactcttcaggcgttggagttggccgctgcaaggattcatgcgtttcactcaaagcagcggccagatgattttgatgaaaccgacgctgcagggctccgcttaggttaccgatggacggctgttggagctgccggtctttatgtcccgggtggcaccgcagcctatccctcatccgttttgatgaacgcgatacccgcaaaagttgctggagtcgagagattagtcatggtgtctccaacacccgatggcgtggtcaaccccctagttttagccgccgccaagatctcaggcataaatgaggtttaccgcatcggcggcgcccaggccatcggcgccctggcatacggaacggcaacgattgcccca

SEQ ID NO: 205987 - DNA, 853 bp, Unknown
  Bacterial polypeptide expressing nucleotide sequence isolated from the Sargasso Sea
ctagttgctggagttcagagaattgtgcttttaaacccttcatacagaggaattcaagatcctgcagttttgtatgcagcaagaaaatgtaaaattaatgaaatttattcaattggaggacctccagcaattgcagctttagcatatggaacaaaaaagattaaaaaagttgataagatagttggtcctggaaatgcttatgttgcagcagcaaagaaagaagtttttggagatgtaggtattgaaggtatgacagccggaccatcagagatattaattgtaagtgataaatcatctaacccagagtggatagctagtgatttaattggtcaagcagaacatgatgaactcgcacaatgtattttaatatctaaagaaaaaaaaattattgaaaaagtaaaaatagaaatattaaaacaactaaaaaaaattccaagagcaagagttgcaaaaaaaagtttgttaaataatgggatattaatatatgccaattctgataggaaaattttagaaattataaacaaaattgcacctgaacatttagaattaaatataaaaaactacaaaccttatctaacaaaaataaaaaattcaggttcaatttgtttaggaaaatatgcaataatggcaatgactgattacaatgttggctcaaatcatattctcccaactaatagcactgctagatactcaagtggtataagtgttaacgaattttataaaagaatttcatatataaatttatcaaaaaagggtattgaaagtcttggaccatcagttataactttagcaaattatgaggggttagttggtcatgctctctctgtaaaaaaaagaattaggagaaaataga

SEQ ID NO: 205988 - DNA, 631 bp, Unknown
  Bacterial polypeptide expressing nucleotide sequence isolated from the Sargasso Sea
atgaaaatattaaaacataatgatattaagcttaaaagttttctaagaagaagcaaagttcttaatgacgatagtatatataaaaaagtaaaagaaattatttttaatgtaaaaaaaaatggagataaagcgcttataaaatatgccaaacaatatgataaaattgatattgataaaaaagaatttaaattaaatttaagatctcaaaaaataaattcaaaacttgataaagaaattttaaatagttttaaaatagctataaaaaatataactaagtttcataaaaagcaattacctataaatattgatcaaaatgaaaataatatcaatctccaatctgtatggaagcctatagactcagttggcctttatgttcctggaggtaatgcattttatccttcatctttaattatgaatgtaattcctgcaaaaatagctggcgttaaacgaattgtttgcgttaccccaccttgtaaagaaattaatccttatcttatagctctgctaaaagaattaaaaataaaagaaacatattttgttggaggtgctcaagcaattgctgctctagctctaggaacaaaaacaataaaaccggtgaataaaatttttggacctggaaatgcttatgttg

SEQ ID NO: 205989 - DNA, 844 bp, Unknown
  Bacterial polypeptide expressing nucleotide sequence isolated from the Sargasso Sea
caacaaatatttaatagttttaaaaaagctataaaaaatatttcatcatttcacaaaaaacaattaccgaaaaatataatttttaataataaaagtgcaacattgaaatcagtatggaagcctattgactcagtaggtttgtatgtacctgggggaaaggctttttatccttcttctttaattatgaatgcagtaccagcaataatagctggagttaaaagaattgtttgtataactccacccaataaatcaattaatccttattttataaaattaataaaagaattaggtattaaagaaacatactttataggaggcgctcaagctattactgcactaacatttggtactcaaacaattaaaccagttaacaaaatttttgggcctggcaatgcttatgttgcagaagctaaaaagcaattatatggaaaagtaggaatagatttacttgctgggccatcagaaataattgttgttgctaataataaaaataatccagattgggtagcctctgacttaatagctcaagcagaacatgatgaaaatgcacagtcaattttaattacagacgataaaaattttgcaacaaaagtcttaaattcaatcaaaaaaattaagaaagatttaccaaaaaagaaaataattgagaaaagttttaaaaataatggcatcatcgttttggttgacaatatagaacttgctgtagaaattataaattttattgcaccagaacatttacacttacacatatctaattataaaaaattattaccaaagataaataatgcaggcggtatttttttaggtgagtattcagttgaggcttttggtgattatatgtagg

SEQ ID NO: 205990 - DNA, 696 bp, Unknown
  Bacterial polypeptide expressing nucleotide sequence isolated from the Sargasso Sea
aaaatctatttttacctgtaaataaaattgtgggtcctggaaatgctttcgttgcagaagctaaaagacaagtatttggtcaagtaggaattgactcaattgccggaccctcagaggttttaattgtctgtgatgaaacagctaaccctgatcatgttgctatagatcttttatcacaagcagaacatgatgaattagcccagtctattttaataacaacaagtaaagaaatcgcaacaaaggtaaaacttttggtagaaaaacatcttatggaaatttctaggtctaaaatagctagttcttcatggtatgattttggggctataatcttagttgaaaacttaaatcaagctattgaattaataaatataaaagcacctgaacatttacaattaattcttaaaaatgcaaaaaaggttataaaagaaataaaaaatgcaggagctatatttgttggtccttatactccagaagctgtgggtgattatattgctggaccaaatcacgttcttccaacaaacggaacagcaaaattttcgagtggattaggggttatagatttttacaaaagaaccacaatagtaaactttaataaaaacagccttaatgaacttggaaaacatgtaataacattagctgaagcagaaggtttagatgcacatgccaggtcgatttcaatgagagtagacaaataat

SEQ ID NO: 205991 - DNA, 814 bp, Unknown
  Bacterial polypeptide expressing nucleotide sequence isolated from the Sargasso Sea
tgttttagccaatccaaaacttaatggaaaacttaatcctgcagtcttatatgctgctaagaaagttggaattaaagaaatatattcaatgggtggtgcacaagcaattgcaagcttagcatatattcaaaaggttaataaaattgttggacctggaaatatttttgttgctgcagctaaaaaagaattatttggccaggtaggtatagagtctatggtagctggtccatcagaaataacaatattagcagacaaaaacaccaaaatagaagatgtgctaacatcaatgataggtcaagcagaacatgataaaaattcacaatgtattcttatttcaaaagatttaaaattgataaaagagtttcaaaaagaaattaaagaaaaaataaagaaattacctagaagatcaatagctttccaaagtcttaaaaataatggtttagcaattcttgcaaaaaaaaattctgatataattaattcaattaatgaaatagctccagaacacttagaaataaatatttcaaaaccagataaaataattaataaaataattaacgttggaagtgtttgtattggcaaatattcccccatggcagttacagactataatgctggcacaaatcatgtcctgccaacttttggatctgcaaagtttgcgtcaggattgaacgttaacgaattttataaaaaaattagctatataactctgtcaaaaaaaggtgttgagaaaataggagaatccgctacacatctcgcagagtatgaagaattatatggtcatgctttaagtataagatcaagaatgaggagataa

SEQ ID NO: 205992 - DNA, 808 bp, Unknown
  Bacterial polypeptide expressing nucleotide sequence isolated from the Sargasso Sea
agagggtgatgccgcgctggtcaggtataccaacgaactggatcgacgaactgtagaagacgctcaggcgctgcgtgtcagctcggatgccatcgacctggctttatccgatttgaaccccgaggtgtcttcggcgcttacgctggcggcggcgcgcattcggggtttccacgaacgtcagcgtaccgagagttggcaatacgaggacgaagaaggcaacctgctgggtcagcgagtctcagcgctcgactgtgtggggatttatgtgcccggcggccgggcgagctatccgtcttcggtgctgatgaacgcgattcctgcgaaagttgccggtgtcgagcgcgttgtcatggtcgcaccggcgcctgacggggaaattaatcccgcggtactggcagccgcggcgctggcgggtgtcgatgaggtgtataccgtgggcggcgcccaagctgtcgcggcactggcctacggcaccgccaccataccgagggtcgacaaaattgtcggtccgggtaaccgcttcgtcgccgaggcaaagcgccaggttttcgggcgcgtgggcatcgatatggtcgccggcccctctgagattttgatcctcgcggacgggtcggttgacccagagtgggtcaccacggacttgttcgctcaggcagagcacgacgaatacgctcaagcggtgctgatttcgcccgagagtgactatttggatggggtggaggcctgcattgcgcgactgctgcccacgttatcgcggcgcgatattgtgacagcggcgctcaaaaaccgcggcgccctaatcaaggtg

SEQ ID NO: 205993 - DNA, 757 bp, Unknown
  Bacterial polypeptide expressing nucleotide sequence isolated from the Sargasso Sea
ttgtgtggtgtgaataaaatttataaattcgggggcgcgcatgccattgctgcccttgcttttggcaccgagactatcaaaccagttgataaaattgttggaccaggaaatatttacgttgcgaccgcaaaaaagaaagtttatggaactgttggcatagatagtttcgcaggaccatcagaggttttgattatcgcagatcaaaatgcatgccctgaacttgttgcaatagatatgtttgcacaagcagaacatgatgagctagcacaagcgattcttatgacatcaagtaagaagcttataaactctgttaatcttaaaattaatagcttaataaaagaacaatcgagaaaagagattattgaaaaatctctaagcacgagaggtttatttatcaaagttaaaaacataaaagaaattataagtattgcaaatgaaattgctcctgaacatctagagatatttggttatcaggatataaaattagaaacaaaaatcgataatgcaggtgctatattcataggtaaaaatagccccgaagtttttggagactattgcgccggaccaaaccatgttttacctaccagcgggtcagctaaatacgcttccccccttggcgtttacgattttttaaaaagaaccagcttgatgaagatatcccaagcacactcaagagaactatcaagtacagcatcattattggccgactgtgagggattaagcgctcattctaagtctgctaagctcagaaaataat

SEQ ID NO: 205994 - DNA, 1039 bp, Unknown
  Bacterial polypeptide expressing nucleotide sequence isolated from the Sargasso Sea
ttgagtacgcggaataaaagttttgataatcagctatcttattatcttgatttaagaaaaaaaaattcaagctctaaattattagttgttaggaagattttaggagatataaaaaaaaacaaagacgcttctcttatcagatatgaaaaaaaacttaatggtataaaaaagttaaataaaaaaaatctttttttttcaaaatttgaaataaaaaaaagtcttaagctattaaacaaaaaaactaaaagagatattgatcttgcttataatagaatcttgagctttcataaaaatcaaaaaattaagactttttcaataactgataaatttaaaaataaatttacatatcgtacaaaaccaatagaaaaaataggagtttatgtcccaggcggtaaagctagttacccaagctcagttcttatgaattgcatccctgctattttggcaggtgtgtctgagatttacatgacagttccttctttaaacaagaagattaactctggcgttttatatgctgcaacaaaatgtaaagtaaaaaaaatttataaatttggaggagttcaagccataggcgcttttgcatacggcacagactccgtggagaaagttgataaaattgttggaccaggcaatgagtttgtatctttggcaaagaaagaagtttttggagaggtgggtattgatatgtttgctggaccttccgaagttactgtcatagcagacaaatattctaatcccaaatgggtcgcagctgacctaattgcacaagccgaacatgatgagctttcacagtcaatacttgttacggacagtaaggaattaatttctaaagtgaaagaaattataaacttacagataaaatttttaccaaaaaaaagaattatatccagcagtctaagtaattttggtttagcagttttggctaaaaacatgcgagatatagtaagagtcataaacaggatttcaccagaacatttagagatatgcacaaagaggcccgaaggctatttaaaacttgtcaacaatgctggttcaattt

SEQ ID NO: 205995 - DNA, 1265 bp, Unknown
  Bacterial polypeptide expressing nucleotide sequence isolated from the Sargasso Sea
ggagcaggcccggcaggagctggctcgcttggcgagccgcaacgtcagcagcagtcagcagcaggcccgctctctggtggacggaatcctcgaggatgtctgccagcgcggagatgccgccgttgctgagtacaccgaacgcttcgaccgctttcgccccgttccgatcgcggtgccgaaggacgatctgggccgcgcctggcaggagctgccggagaacctgcgcgatgccctcgatctggcacaccgtcgcattcaggaatttcaccaacggcagcgcccgcaggacatcgccgtcacgggagtgcatggcgagaagctcggtcgacgctggcgacccgtggaacgcgccgggctctatgtgccagggggtcgggccgcttacccgagcacggttctgatgaacgccgtcccggcgaaggtcgccggtgtgaacgacatcgtgatctgttcgccggcgggacccgacggtcaggtgaacccggtggttctcgccgcagcccacctcagcggcgtacgcaccgtgatgcggatcggcggcgcccaggctgtggccgccatggcttacggcaccgaaagtgtgccgaaagtggatgtgatcagcggccccgggaatctgtacgtgaccctggccaagcaagccgtctacggccaggtgggcatcgattccctggcaggacccagcgaagtgctggtgatcgccgaccagagcgcggtgccgtcgcaggtggctgcggatctgctggcccaggcagagcacgaccccctcgcggccgccattctgatcaccaccaacgcagctctggccgagacgatcggagacgagatcgcacgccagctcgaggggcacccccgccgggagatctgcgaagcctccctgggcaactgggggctggtggtggtctgcgatgacctggaaacctgcgcgcggctcagcgacgggttcgcgccggagcatctcgagctgctcgtggagcgaccggaacctctggccgatcgcatccaccatgccggagcgatcttccttgggccctggtcccccgaagccgtgggcgactatctcgccggtccgaaccacacgctgcccacctgcggtgcagcccgcttcagcggtgcactgagtgtggagaccttcatgcgccacacctctctgatcgggttcaacaaggccgccctggaggcgacggcttcagcggttcaggagctggccgtgagcgaagggcttcacagccacgccgactcggtgaggaggcgcctcagctgag

SEQ ID NO: 205996 - DNA, 829 bp, Unknown
  Bacterial polypeptide expressing nucleotide sequence isolated from the Sargasso Sea
atgccggttttcctcaattttgatgatcccgaattcgatcagcattttgatgagattttaaattctgagcgtgacgccagtcgggatgttaatagcgcagtttctaatattttagtagatgttaagaaacgaggggacgaagctctcatacaattaaccgatcggttcgataaaattaaattaacaaaagaagagttaagcttttcaaaaaaagaaatagacgaactttcagcaaaaataaaaagcaatgaacgtaaagccttagacttggccgctagtagaataaaagtattccatgaaaaacaaaaacctgaggatgtaatttggattgatgatattggagttgaacttggatggagatggacgcctcttgacgctgtgggtatttatgtccctggtggattggcaagttatccatcttcagtgctgatgaatgcaataccagccaaggtagctggtgtaaaacgtgttgcaatggttgttccaacgccgcatgggaaaattaatccagcagtcctttatgctgcaaaagtttctggtatagatgaaatatacagaattggaggtgcgcaagctatcgcagcgctagcttatggaactccaagcatttcacctgtggataaaattactggaccaggtaattcttacgtggctgccgctaagcgtcaagtttttggtaaagtcggaatagatatgattgctggtccctctgaagttttggtaattgctgatgagaataatgatccagagtggattgctttggatttacttagtcaagctgaacatgataaaagcgctcaatctatattgattactacaagtcagaatt

SEQ ID NO: 205997 - DNA, 1168 bp, Unknown
  Bacterial polypeptide expressing nucleotide sequence isolated from the Sargasso Sea
ctgcaaagcaaccctttgcgcttggctgatcagctgcaacaaagcttaatagcgggattatccgatgagctaaaaactgctattcagattgcatatcgcaatatccacagctttcacgcggctcagttgccgcaaaacatccgcattgaaactcagccaggtgtagtttgtgaactgaattacagcgccttagatcaggtcggtttgtatgtgcccggtggcagcgcgcctttgccatcgactgtactgatgctgggagtgccagctcaactggctgggtgtcgccgtgtggtgttagtcacacctcctggtcagccttcagctggtgatattgccgctgaaattgtgtatgccgcatcactgtgtggcataacggagatttacaccttaggtggagctcaggccgtggcggctttggcctatggcaccgaaaccattggcaaagtggataagatttttggccctggtaaccgttttgttactgaagccaaacagcaagtcagccaggatgcacgtggcgctgctattgatatgcctgccggcccttctgaagtgctggtgattgccgatgataacgccaatccggtctttgtagcggcagatttattatctcaggccgaacatggcccggattcccaagtggtgttggtcagcccaagcgaagctttgctggtcaataccatcagtgagctaaaacgtcagaccactttattaccgcgcgctgaaattgctcaaaaagctcttgctaacagcagactgattttaacgccggatttagccacagcggcacaagtgagcaatcaatacgcgcctgaacacttaattattcaaacttctgacgaccaaggcttgcttaacaagctgaccaacgccgccagtatttttgttggtccttatacgccggaatcagctggtgattatgccagtggtactaaccacgtattgcccacttatggctacagccgtaatcacagcagtttaagtttggccgacttttatcgtcgttacacagtgcagactttaacagcagctggcatgcgcgatttaggcccaactattgtcaaattggccaaagccgaaggattagatgcgcacgccaatgcggtgtcgttccgattagcagagttagaacttgcagcacaaatttcagagggaaatccatcatgag

SEQ ID NO: 205998 - DNA, 940 bp, Unknown
  Bacterial polypeptide expressing nucleotide sequence isolated from the Sargasso Sea
atgaagataataaataataaaacagaagctattgaagaattaaagaggatttctacccgaactaattcagaaaataataataagataaatacaattgttgaagaaattcttcaagaagtaaaaatttctggtgataaagcagtagaaaaatataccaaaaaatttgatggtttcgatcctaaccctatgcaagtgaatgcggatcaaataaaaaatgcatgggatgaaattgataacaatttgaaacgctcacttgaggaagctcacaaaagaattcaaaaattccatgaaaaagaaattcctcaatctttcacgataaaaggtgaacatggtgatattgttcaaagaagatggaaaccagttaaaaatgcaggtatttatattcctggaggaagagctgcttatccaagtactgtattaatgaatgcaattccagcaaaagtagcaggagtagaagaaataatcatggtatctcctgggaataaagaaggggaaataaacaaaactgttttagctgcagctcacttatcaggtatcaataaagtatttaggattgggggggctcaagcaattggtgcattagcatttggcacaaatcaaattaataaagttgatgttatatcaggtccaggaaatatatatgttacaactgcaaaaaaactcatttatggctctacaggcattgattcattagctggtccaagtgaaatattaatcattgcagatgaaacagctcaaagcactcatatagcatctgatctacttgcacaagcagaacatgatcctttagcttcgtcaatactactaactacatcaaagaatcaggcaaaagaagttttagaggaactttataagaaaatagatgatcatccaagaaaagaaatttgcatgcaatcaataaaaaattggggttcaattgtgatttgcgagagtttctgaa

SEQ ID NO: 205999 - DNA, 1087 bp, Unknown
  Bacterial polypeptide expressing nucleotide sequence isolated from the Sargasso Sea
aatgattaagattgatagcaaaaaaaaaggcttttttaaaaaacttgaagttattttaaatcgaagaagaaagctagatactacaaacagcaaaattgtatcaaagataattagtgatgttaaaaaaaacaagacaaaggcattactaaaatacgaaatcaaatttagtaaaaataataaaattactttaccaaataaaataattaataattcagtaaaaagacttagtagagaaattaaaaattctatagattttgcgtatggtagaataattaagtttcatattcttcagagaaaaaatttaaaaaatatttcctacaaagacaaattcaaaaacaaacttgaatacaatatagtgccaatacaatctgttggaatatatgtcccagcaaatcttccttcatcccttttaatgaacgcaattcctgctaaggtttcaaatgtgaaaaaaataattcttgcaacacctaaacccgatcccgcagttatgtatgctgcaaaaaagcttggtattaaagaaatttattttatgggtggggctcaagctatcgcaagtttagcctatatccaaaatgtagataaaatagttggtccaggaaataaatttgttgctgaagccaagagacaaatatcaggaaaaattgttggaacagaatctatgtttgctgggccatctgagatttgtgtcgtcgctgataaatttactaatataaatcaaattgctacatctcttgtctcacaagctgagcatgatccaaatagccaatgtattttagtaacaaaagataaatctatattgccaaaggttaatttagctataaaaaaaataattaaaaaattaccaagaaaaaaagttgccactaaatcacttaaaaatcatggattagtaattatagttaaaaatgataatgaaattgtaaatactataaattcgattgctccagagcatttagaaattaatgttaaaaattttaaaaaatatgttaataaaatttataatgttggaagtatttgtaatggaaaattcacaccgatgagtttaagtgattatactgtaggaactaaccacattctaccaacaagggaa

SEQ ID NO: 206000 - DNA, 1207 bp, Unknown
  Bacterial polypeptide expressing nucleotide sequence isolated from the Sargasso Sea
tttggataaaagaagatctggaaaagcagtagacacttcgatagttccaaaaattttaaaagacatcaaaattaatggaagaaaagcacttttaaagtatgagaaaaaatttagtaaaaatacagagatagttccttcaaaagataaagtaaacaaagcaattaatacattagaacctaagattaaaaaaagtatcgatttagcctataatagaatttttaagtttcattcactacaaaaaccaaaaaatattaagtatgtagataattttaaaaataaacttgaatataagcatgtgccactacggtctgtagggatttatgtaccagctaatttaccatccacgttattaatgaacgcagtacctgcaaaaatttctggtgtaaaaagaattgtcttggccaatccaaaacttaatggaaaactaaatcctgctgttctttatgcagctagaaaagttggaattaatgaaatttactcaatgggtggtgctcaagctatagcaagtttagcatacattcaaaaagtgaataaaattgttgggcctggaaatatttatgttgcaagaagtaaacgtgaagtctttggtgatgttgggacagaaggaatggtcgctgggcctagtgaaatttgtgttttagcagatagtaaaactgatctaaatcaagttataacatctatgattggacaagcagaacatgatgtaaactcccagtgtattttaattacgaaagataaaaaattagcaaataaatttaatatagaaataaaagaaagtatcaaaaaagttcaaaggaaaagagttgttttaaaaagtttaaaaaataatggattaattatgttagcccaaagtgataagcaaataatagaagcaattaatgaagttgctccagagcacttagaaattaatgtgtctaataataagaagtatttaaatcaaattcataatgcaggaagtattatgattggaaagtattctccaatggctgtctcagattataatgttggttcaaaccatgtattaccaactttaggatctgcgaaattttcatctggactaaatcttagtgaattttataaaaaaattagccatataactctcacaaaaaaaggtattgagaaattaggagaatccgctacacatctcgctgagtatgaagaattagataatcatgctcaaagtattaaatctagaatgaggagataa

SEQ ID NO: 206001 - DNA, 1073 bp, Unknown
  Bacterial polypeptide expressing nucleotide sequence isolated from the Sargasso Sea
aatggaggtcaaaatcttcaaaggatttaaaactttttcaaaatccattgatgttgatgaaaacaatgacgtttctggcatagttcaggaaattataaaaaaagtacgtaagagcggcgatactgctttgcgagaatatactgagcaattcgacaaggcaactcctgattcatggttggttcctgagaccgtactagaagaagcattagacaacctagggaaagatcttttggtcgttctgaagcaagcagcagataatataatgttttttcacgagcggcagaaaactaacagccagcttgatttcagttcagatggatctgtattaggctggaaagtaacgcctgttgacagcgcaggtatttatatccctggaggtcgagctgcttatccatcaaccttgctaatgaatgcaattcctgcccaaattgcggaagtccctagaattgctattgtatctcctccgggatcttccggattacctcaccctttggtcatggccaccgcagcgtttttgggtttaaaagagctttatgccgttggtggggttcagtcaattgccgcacttgcatatggaacagaatcaattgaaaaagtagtaaaaattaccggcccgggaaatgcttatgttgtagaagctaaaagacagttatatggaatagttggaatcgactccttagctggaccaagtgaaattatgattgtaagtgaccgagaggatattcctatagattatcttgtgagagacatgctctctcaggctgaacatgatcctgatgcgggagcatttttagtcacgacatcggagaatcaggcaaaaaaagtggccgaacgtataaaaaatctggttccgaaacttccgcgaaaagaaattatcgaagcttcatttagtaagcgttctgcaatagtcctagcaaaagatttggaggaaatatttgaaattataaatgaaattgcaccagaacaccttgaaatcctgacaaaaaaaccctttgaagacttatataaaattcgcaacgcaggcgcaatttttcttggtccaaacacacctgaaccagtaggtgattattttg

SEQ ID NO: 206002 - DNA, 652 bp, Unknown
  Bacterial polypeptide expressing nucleotide sequence isolated from the Sargasso Sea
gatgaaaaaaattattaatacatctgaaaaagattttgacagtcaattcactgaacttttaaatattgatagaaatatcagtgagaatgttgaagaagttgtcagaaacatagttcaagatattaaatccaatggggatagttcattagtcgaaaatacaaataaatttgataaaaataatttgtccataaaagaaatagcagtttctgaagatgagattgatactttagtaaaagatctttctcctaaacttattgatgcaattgatttagcttattctaggatcgagacttatcatcaaaaacaaattccaagtgatctttcttatgaagatgaaactggagcaaaattaggatatatttggaatccaattagttctgttggcatttatgttccgggaggaacagctagttatcctagtacagtattaatgaatgctgttccagctaaggtggcaggtgtagaagatattacaatggtatcaccttctacagattctaaaataaatccctcaatattatatgctgctaaaaaagtagggattaataaaatttacagaataggaggcgctcaagcaattgctgcattagcttatggaactgaaactatcaaaacagttgataaaatagttgggccaggaaatatttatgtt

SEQ ID NO: 206003 - DNA, 825 bp, Unknown
  Bacterial polypeptide expressing nucleotide sequence isolated from the Sargasso Sea
tttgtgtaacgcctccgtctaataatttaaacccttatattgcttttctattagatgaattaaatatttcagaagtttatcaaattggtggcgcgcaagcaattgcagctttaacatatggtactcagacaattaagccagtgagtaaaatatttgggccaggaaatgcctatgttgcctctgcaaaaaaacaggtttttggaaaagttggaatagatttagttgcaggtccttcagaaattattgttgttgcagatgaagaaaataatccagaatgggtcgctagtgatattatggctcaagcagagcatgatgaaaatgcacagtcaatattaattactaatagcaacacttttgctacaaaagtattggagcatattgaaaatcttaaaaaaaatttgagcaaaaaaacagtagttgagattagtttgaaaaaaaatggcctaatagtgataatggatgatttgaaattatcatatcaaattattaataaaatagccccagaacatttacatctgcaatcaaaagaaaaagagattatttttaaaaatgttaacaatgctggggggatatttataggtgactattcaactgaggcatttggagattatgttgcaggaaccaatcatatcttacctacttctggagcagctaaattttcatcaggtttaagtgtaactgatttcatgaaaaaaagctctgtggttgaaattaataagttaagttatgaaaatttatcaaaacacgttgaaaatatatctgatgttgagaatttagatgctcataaattgtcagttacgattagacaaacaaaacaaaattaat

SEQ ID NO: 206004 - DNA, 874 bp, Unknown
  Bacterial polypeptide expressing nucleotide sequence isolated from the Sargasso Sea
aatggcagcaggtcctgccatagcatcccaggttaaagatttatatctaacttctccttgtatcggaggtcatatcaatgatctaaccgttgccgctgctaaagtagcaggtattaagaatattgcaaagctaggcggtgctcaatcgatagcagctttttcattcggaacagaatctattcctaaagtggataaaattgtaggccctgggaatgcctacgttgctgaagctaaaaggcaattatttggtaaagtaggaattgattcaatagctggaccatcagagatagttgtcttagctaatgaaacttcttccccagaattagtagcatgggacctcatggctcaggctgaacatgacgaagatgcaagttcaattttaattagcaattcaaacgaaatcattcgtgaagtaaaagaaattataaagaacgagtgttctaatcttgaaagggctatgattgttaaatcttctttgaagaacaatggtctaatagtaaaaatagacaatcttaaacaagcaatagatctaatcaatagactggctcctgaacatcttcacttggcttttgaagatcatgagatagatataaatgatttagtggcgggaataattcttgaaggaactgattcagctgtttccttatctgactacgtcttaggaccaagccatatattgcctacaaattctagtgccaggtttagctcgccattgtctgtagaggatttcttaattagctcatctaaagtagctataaaatctgaatccaataaagacttgtacaaaacattggcggaaaaaacttctctaattgctagagctgaaggtttaactgctcacgccatttccgtcgaaaagagaaaaaaagactaa

SEQ ID NO: 206005 - DNA, 1275 bp, Unknown
  Bacterial polypeptide expressing nucleotide sequence isolated from the Sargasso Sea
catggatgcgatatctgctgctgttattgaacgtacggaggcagtattcggcaaaggcgtctctcctgctcagtccgtagttaagattatagaagaagtacgtcaaaagggtgatgaggcggtgctgaagtacgctaggatgtttgacgacccagatatcactagtacttcttatgatatgtccctgttagatcaggcagaatctagcatatcaaaagagttgtgggattcattatcattggccgctgaacgaatcgaagagttccattctaagacaatgcctaacatggagactgaaacttcaagaggtgtttcagaaattgttaagccacttcaaaaaataggggtttatgttcctggtgggacagctgcatatccatcgactgttttaatgactgtgattcctgcaaaggtcgcgggatgtgaatctgtttgcatggtaactcctaaattagctggcagagatatgaatcctgtagtgttagcagcggcaaagatagcgggtgttgacaatgtttatcagattggaggcgttcctagtatagctgcgttagcatatggtactgaaacaatcccccaagtggataaaatatgcggacctggtaatgtcttagttgcctacgccaaaaaattagttcaaggtcaagtagatatagatggtatttttggtcctaccgaaaccatagtgattgcagataagacggcatctcccgaattttgtgctgcggatatgattgctcaggcagaacatgatcccatggctaccgctattcttataactgatgatgccggcttgatagaaacagtagaaaatgctttagatgatcaacttgagcaacatgctaggggtgagatggccaaacaggcactcttaagcagaggaaaagtcgttctcgttgaaaatctggccgaaggtatagagatcgcgaatagtattgctccagagcatttgtgtttgatggtagaaaataccgcttattggaaaactcaggttagaaatgctggaggcctattcttgggggaatactctcctgaagtgatgggtgattatgttgcgggacctagccatgtaatgccgacgggaggtacggctcgattcagttcggctttaagcgtacatcatttccttaagaccatgcctgtagttgagctgagcagcaaagaatttgaaagattagctccggatgcagttaatatcgcacaggcggaggggctaacagcacattcaaatgctctatcaataagattaaagacggtatcgaataattctgggaa

SEQ ID NO: 206006 - DNA, 1193 bp, Unknown
  Bacterial polypeptide expressing nucleotide sequence isolated from the Sargasso Sea
tttgatgaatattaaaaaaaatggagatacttcattaattaaatatgaaaaaaaattcagcgggataagaaaattaaataaaaaggatcttttcttttcaaaatctgaattaaaaaaagaacttaaaaaattgaataaaaaaattaaaaaagacattgaccttgcttataaaagaattctaaattttcacaaaaatcagaaagttaaaactttttctttgactgacaaatttaataacaaactaacatatcggacaaatcccattgaaaaaattggtgtttatgttcccggaggaaaggctagctatccgagctcagttctaatgaactgtatacctgctattgtagcaggggtacccgaaatttttatgactgttccaagtctaaataaaaaaataaatcctggaattttatacgctgcaaagaaatgcaaagttaaaaaaatctataagctgggaggcgcacaagctatagctgctttagcgtacggtacacaaactatacaaaaagttaataaaatcgttgggccaggaaatgaatttgtttctttagctaagaaagaagtttttggagaagtaggtattgatatgtttgctgggccttccgaggttactgttattgcagataaatattctaatccaaaatggattgcggcagatctaattgcccaagcagaacatgatgaacttgcacagtcaatattggtaactaataacaaggaaataatttacaaagtaagcaagtttataaattttcaaataaatttcttgccaaagaaaaaaataatatctaacagtataaaaaactttggattggcaatttttgctaaaaacaacaaagaaattgcaagcatagttaataagatttcaccagaacatttggaaatttgtacaaaaaaacctgaaagttatttaaagacaataaataatgctggttcaatttttctaggatctttttcaccagaggcaatgggagattacctggcaggaccaaaccatgtccttccgacttctggaacagctagattttcgtctggtttatctgttctagactttttaaaaagacaatcagtaattaaaatttcaaaatcaggcattgaaagacttggtccatcggttataaatttagcaaattatgaaaatttacatggtcacgcgagttctgtaagaatgagaataaaaggtaaaaattgaa

SEQ ID NO: 206007 - DNA, 1183 bp, Unknown
  Bacterial polypeptide expressing nucleotide sequence isolated from the Sargasso Sea
atgaaaataataaaatttaataaaaatttttataatcaatttaagacaaaaattgaaaaaagaaattcattatcaagtaaatcaattcaagaagatgtaaaaaaaattatttatgatgttaaaaaaaatggcgataaatctctaattaagtatgcagcaaaatttgataaagttaaaattagcagacaagatcttagtttagatttatcgaaaataaaaatacaatctaaagttgagccacaaatatttaatagttttaaaaaagctataaaaaatatttcatcatttcacaaaaaacaattacctaaaaatatcatctatactaataacggtgcaacattgaaatctgtatggaaacctattgattcagttggcttgtacgtacctggaggaagggctttttatccctcatctttaattatgaatgcagtacctgcaatcatggctggagtaaaaagaattgtttgtatcacaccaccaactaaatcaattaatccatattttataaaattaataagggaattaggtattaaagaaacatattttgtaggaggagctcaagctattagcgcactaacgtttggcactcaaactattaagccagtcaataaaatatttggacctggtaatgcttatgtagcacaggcaaaaaaacaattgtatggaaaagtaggtatagatttgctagcaggaccatctgaaataatagttgttgcaaataacaataataatccagattgggtagcttcagatctaatagctcaagcagaacatgatgaaaatgcacaagcaattttaattacggatagtaaagattttgcaactaaagtcttaacttcaattaaaaaaattaaaaaagatttatcaaaaaagaaaataattgaaaaaagtttaaataataatggaattatagctttggtcgataatatagaacttgcttcagaaatcataaattttgttgcaccagaacatttacatattcacatttctaataataaaaaattattatcgaatataaataatgctggcggtatatttttaggtgaatactctgtcgaagcttttggtgattatattgtaggaactaaccatgtattaccgacatcaggagcggcaaaattttcatcaggtctaggtgttttagattttatgaaaagaagctctgttgttgatatgaataaaa

SEQ ID NO: 206008 - DNA, 727 bp, Unknown
  Bacterial polypeptide expressing nucleotide sequence isolated from the Sargasso Sea
ggctattgctgcagctgcttatggaactaataaaattaaaaaagttgataaaattgtaggacctggaaatatttatgttgctgctgcaaaaaaacaggtatttggtgatgttggaattgagggaatgactgctggtccttctgaagtaacggttgtctgtgataaattttcaaatccagcatgggtagctagtgatctaattgggcaagcggaacatgataaacttgctcaatgtatattaatctcaaaagataaaaaaattattgaaaaggttaaaactgaaatttcaaaacaattggaagaaattccgaggtcatcaattgctaaaaaaagtctgatcgaaaatggtatactagtttttataaattcagataaaaaggttatagaagtagtaaataaaattgctcccgagcacctagaacttaatgtgaaaaattataaatctttagtatctaaaataaaaaatgctggatcgatttgttcaggtaagtttgcagttatggccatgacagattataatgttggttctaatcacgtattgccaactaatggttctgctagatattctagtggtataagtgtaaatgaattttataaaagaatctcatatgtaaatttatcaaaaaagggtattgaaagtcttggaccatcagttataactcttgcaaattatgaaggtttagctgcgcatgcgctatctgtaaaaaaaaggattaggagaaaatag

SEQ ID NO: 206009 - DNA, 1102 bp, Unknown
  Bacterial polypeptide expressing nucleotide sequence isolated from the Sargasso Sea
aataaataaaactttagatcaaaagattaaagatgatattcaattctctcatgaaagagtaaggaagtttgcagaacatcaactagaaaatcttggaaaagactcagaagttgaattatcgcctggtttaatagcgggacaaaaattaatacctgtaaataccgttgggtgttacgtgcctggtggaagatataacaatatcgcctctgctataatgagtgtgacgactgcaaaagttgctggagtaaataatgtaattgcaacaagtccaccaaaagattcaaatggtgcaaacccaattataatttatacagctaacctttgtggtgcagatgtaattatgaatataggtggaataggagcaattggtgcactagcttatggttgctttggtaatccagaggtagatatgattgttggacctggaaataaatttgtagcagagtctaaaagaattttatttggaaaagttggaattgatttatttgcaggaccaaccgaaataggcattattgcagatcatacagctgacaaagaaataatcgcttatgatttagttggacaggctgaacatggtcctgactctcctgcttggttatacacgacagataaatctttatgtgattatgttatgaaaagagttccagaaattattcaagaactacctgaacataacagaaataatgctgatgctgcatggagagattatggagaagtaattatgtgtgataccaaagaagaaatgatgaaagtaagtgatgaatatgcacctgaacatttagaggttcaggctgaaaacttagattggtatttaaaaaatttaaaaaattatggttcattatttttaggtgaggaaacaacagttgcatatggtgacaaatgttctggaccaaatcacattttaccaacaaagggagcaggaaaatatactggcggcttatacgttggaaaatttataaaaactgttacttaccaaaaaatgagtaaagaatctaataaagaagtcggtgctgcagcagctagaatttctagatatgaaggtatggaggctcatgctagaactggtgatgtgagacttagaaagtatggtttctctaactaa

SEQ ID NO: 206010 - DNA, 637 bp, Unknown
  Bacterial polypeptide expressing nucleotide sequence isolated from the Sargasso Sea
caaaaaaaacaattgtatggaaaagtaggcatagatttactagcaggaccatctgaaataattgttgttgcaaataacaataataatccagattgggtagcttcagatctaatagctcaagcagaacatgatgaaaatgcacaatcaattttaattacggatagtaaagattttgtaactaaagtcttaagttcaattaaaaaaattaaaaaagatttatcaaaaaagaaaataattgaaaaaagtttaaataataatggaattattgctttggtcgataatatagaacttgcctcagaaatcataaattttgttgcaccagaacatttacatattcacatttcaaataataaaaaattattatcgaatataaataatgctggcggcatatttttaggtgaatactctgttgaagcttttggtgattatattgtaggaactaaccatgtattgccgacatcaggagcagcaaaattttcatcaggtctaggtgttttagattttatgaaaagaacctctgttgttgagatgaataaaaaatcttttaatgctctttcagaagatactgaaaaaatgtcaggacttgaaggtctagatggacataaattgtcagttaaaattagacaaaagaaataat

SEQ ID NO: 206011 - DNA, 1297 bp, Unknown
  Bacterial polypeptide expressing nucleotide sequence isolated from the Sargasso Sea
gatgttaaatttactaagatataaagacgaaaattttcatatccgtattgctgagattataaactctaggaaaaactttgatgaagatataactaatcaagtaaacgatataattttcgatataaaaaataatggcgatataagtctttttaaatatatgtctaattatgacaatgtagaatgttctgcggagaatatttgttataatcaagaagatattttatcagcaaaaaaaaattgcacacaagaaagtattgaggcaatcaaacttgctaaaaatcgtattgaagcatttcataaacatcaattacctgaagattcaatatatgaggatcaagaagaagtaagtataaagactaaatggattccactagatagtgcaggaatttatatccccggtggtactgcttcatatccaagttcagtattaatgggagtaattccggcgcaagttgctggaattaaaaaaatatctgcgacagttccttgtccaaataatcaaatagatcctcttgttttggccactttggatttatgtggaattgaaaaaatatacaaaattggaggtgctcaggcaatagctgcacttacatggggaactgaatctgttgaaagtgtagatataattattggacctggaaataaatgggttgccgaagcaaaaaaacaggctctttcaaatataaatattgatatgttagcgggacctagcgaaatattaattttagcagatgaaaataatagagcagattggattgcagctgatcttttatctcaagcagaacacgatatttctgctcaagcaattttagttactgatagtgaaaatttattagaaaatgtaaataaagaattagttagtcaaacaaagagtctcaagagaaaagatatagctaaaagaagtatcgctgaaaatggctatggtattcttgtctcaaatattaatgatgcaattgagattattaataatatagctcctgaacatttatcaatattgtgtaaagaaaataatcaaatagaaaacaaaatcactaatgctggtgttatatttgctgatgaatggactccagaatctatgggtgattatattattggtccaagccatattctacccacaaacggtatggctaaaagacaatcaggcttgtctgtttataatttcttaaggcgtcaatcaactatctcaagtagtaaaaaaactataaatactcttggtccttcagcaatgttattagcagattgtgagggtctagatgcgcatgcaaattctataaaaataagaataaaagattcttaa

SEQ ID NO: 206012 - DNA, 1267 bp, Unknown
  Bacterial polypeptide expressing nucleotide sequence isolated from the Sargasso Sea
atggatgagttttatcggcagcaagccaacaggaagctcaattttaatgaaatatccggtgaagttgatgctattatttcatcaatcaagaaagataaagactccgcacttctaagttatacaaatgagtttgataataatcagctatctcaagaagatataaaactcgataagaatatgttgagtaaaagcattgaaaatatcagcaaagaacttttaagttccttaaaatatgcccatgatagaattcttgcataccataaaaagttaaaacctgaaaatttgtcttacactgatcaaattgatattaaaatcgagcaaagatggacaccagtagagtcggttggtgtctatgtaccaggtgggaaggcaatatatccaagcagtgttcttatgaatgttataccggcactagttgcgggtgtaaggcgtattgtaatggtaacaccatcaatgaatggcatccttaataattcgatactggcggcagcaagcatctgtaatgtaaaagaagtctataatatcggtggggcccaagccatcgcagctcttgcctatgggactgatcaaatagataaagttgatatgattgtaggtccagggaatagttatgtagcagctgcaaaaaaacaggtttttggtgatgtaggtattgatatggtcgcgggaccatcagaggttatggttgttgctgattcagacatggatttagaatgggttgtagaagatctttttgcgcaagcagagcacgacgataatgcccaatcaattctagtaacaaaggatattgattttgcaaaaagagttctggaacgaataaatcaaagattagaggatcttgatgatggggcaacactcaaaaatagttggacccgatatggatgcataataatatgtgaaacaaacaaagaaatcataaaatttataaatgaaatcgcccctgaacatttgcaattatgtacgccagacgcgcgtgatttatcagagcaagttaaaaatgctggggcaatatttattggtaaatatacaccagaagctgctggtgattatgttgttggcacaaatcacgtattacccacaatgcaaacagcaagattttcgtctggactatcggttcaaagttttatgaaacgaacatctattgttgagtgtgataagtcgaactttaatgaaatagccccaagcgcgatcagaattgctgagcaagagggtcttatatcacatgctaactcattaagagcgagattaaaccgaaaagatgattaag

SEQ ID NO: 206013 - DNA, 781 bp, Unknown
  Bacterial polypeptide expressing nucleotide sequence isolated from the Sargasso Sea
ttgtatgcggcaaagaaatgcggtgttaaaaaaatctttaaactcggtggagcacaagccatcgcagcatttgcttttggaaccaaagtagtgccaaaagttgataagatagttggtccgggaaacgaatacgtcgcattagccaaaaaagaagtttcaggaatttcaggaattgacatgtttgctggtccatctgaggttaccgttgttgctgataaattctcgaaacctgagtgggtctcagcagatttaattgctcaatcagagcatgatgaaatgtcacaatctattttagttacaaatagtaaagatttaattcttaaagtaaataaatcaataaaaaagcagctcaaatttttaccaaagagaatgattgcctcgaaaagtttaaagaatttcggtttagctatactattaaataatctcaaagaagcaggtaaagtagtaaatattattgcccctgaacatttacaaatctatacaaaaaatcctgatatctttttaaattcaattaataatgctggttccatttttttaggtccttattctcctgaagcgttaggagactatattgctggcccaaaccacgtattaccaacatctggaacagcaaaattctcatccggcttatcagtttatgattttttgaaaaggcaatcagtaattaaaatatcaaaaaggggtattgaaagattgggtccatcagttataactttgtcaaagtatgaaaatctttatgggcacgctaattctataaaagtgagattaaaaaaaaggtaat

SEQ ID NO: 206014 - DNA, 1297 bp, Unknown
  Bacterial polypeptide expressing nucleotide sequence isolated from the Sargasso Sea
aatgacaaaaataattaattctgtagatcaaaattttgagaatgattttaataatcttctcacaatgaacagatcaagtgactcggacgttactcagactgtggcagcgatcattgacgatattagaaaaaacggagatgaagcgcttttgaaatatactcatcaatttgataaaaatagccttgatattaacaacatactgcttggagaagatgaaattgaaaggcaatcacgtgacgtgccgagtgatctttgtgatgcgcttaaagtatcaatggatcgtgttcgcacttatcatgaaaagcaattaccgaatgatttagtttatgaagacaatcttaactcaaagttaggatatgtttggcgtccagttgagtcagtgggtatttatgtcccaggtggtactgcaagttatccaagtacagtaattatgaacacaataccagcggttgtagccggtgttgaagatatcaccatggttacaccaatgactaataccgctataagttcttcagtgttatatgccgcaaaaatttgtggaataaaaaaaatatactgtataggaggtgcccaggctgttgctgctctggcatatggaaccaagaccataaaatctgttaataaaattgttggaccaggcaatatttatgttgctgaagcaaaaagacaagtttcaggtttcataggcatcgatatgtttgccggcccatcagaggtagtcattattgctgatgaaaaaaatgatccaaaaattgttgcagccgacctcattgctcaagctgaacatgaccaaagcgcacaaagtatacttttaacaaccgatcagaaattaggagatgctgtaaataaagaagtcgagaaccagatagattcccttcctcgaaaggatatagcggcttcaagctggaaaaataatggaaagataattatcactcaaaatcttgaagaagctgttttattatctaataaattagcaccagaacacttggaattattagttgataatccggaagatattcttaaaagaataaaaaatgctggagcagtttttatgggccgtaacacacctgaggcacttggagactatttagcaggtccaagccatgtacttcccacttctagaagtgctaaattttcttctggactatctgtttttgattttctcaaaaaaatatcacttgttgaattttcaaaagaaggtattgaacaagttggagatagtgctattaaaatcgcagataatgaaggtcttgacgggcattcaagatcaatagaatataggcttacaaaaaaataa

SEQ ID NO: 206015 - DNA, 1288 bp, Unknown
  Bacterial polypeptide expressing nucleotide sequence isolated from the Sargasso Sea
aatgaagatcataaataacaaaaaagaagctattgaagaattaaaaaggatttctactcgaactaattcagaaaacaataataagataaatagaattgttgaagaaattatccaagaggtaaaaatttctggagatatagcggtagaaaaatatacgaaaaaatttgatggtttctaccctaaccctatgcaagtgagtgcgaatcaaataaaaaatgcatgggatgaaatcgataacaatttgaagcgctcacttatggtagctcatgaaagaattcaaaaattccatgaaaaagaaattcctcaatcttttactataaaaggtgaatatggtgatatcgtccaaagaagatggagaccagttaaaaatgcaggtatttatatccctggaggtagagctgcttatccaagtacagtattgatgaatgccatacctgcaaaagtagcaggagtagaagaaattataatggtatctcctggtaataaagaaggagaaataaataaaactgttttagctgcagcttacttatcagggatcaataaagtttttagaattggaggagctcaagcaattggtgctttagcatttggcacaagtcaaatcaataaagttgatgtcatttcaggtccggggaatatatatgttacgactgcgaaaaaactcatttatggctctacagggattgattctttagctggtccaagtgaaatattaatcattgcagatgaaacagctcagagcactcatatagcatctgatctactagcgcaagcagaacatgatcctttagcttcatcaatacttttaactacatcaaaaaaccaggcaaaagaagttttggaagaactttataaaaaaatagatgatcatccaagaaaagaaatttgcatgcaatcaataaaaaattggggtttaattgtgatttgcgagaattacgaatcatgtgttgaactaagcaataactttgcccctgaacacctagaaatccttaccatagattcaaaaaaaattcttgcaagtatagagaatgcaggagcgatatttttaggaaaatggacgccagaagctgttggagattatcttgccggaccaaatcatactttacccacatcaggaaattctagatttagcggttctttaggggttgaaacttttatgaaaaatacttcaataatagaatttaatgaagaaagtttaaaagttaatagccttgatattattaatcttgctaaaagtgaaggattacatagccacgctaactctgtagaaataagatttgaagattag

SEQ ID NO: 206016 - DNA, 1252 bp, Unknown
  Bacterial polypeptide expressing nucleotide sequence isolated from the Sargasso Sea
aatgataaaaattgatagcaaaacatcaaattactataaaaaacttaaaacaattttagatcgcagaaggaagttagatacagctaatttcacaaaagtatcaagaataatagcagatattaaaaaacaaaaaaaaaaagcgttaataaaatatgagattaaatatagtaaaaatgcaagaattacattaccaaaaaaaataatcaacaaatctgtaaaaaatcttaatagagaaattaaaagctctatagattttgcttataatcgaataatgaagtttcatatgctacagaaaaaaaatttaaaaaatatttattacttagacaaatataaaaataaacttcagtacaatttagttccgatacaaactgttggaatttatgtacctgcaaatctaccatcttctctgttaatgaatgcaatacctgcaaaggtgtcaaatgtaaaaaaaatcattcttgcaactccaaagcttgatccagcagtaatgtatgctgctaaaaaagttggcatcaaagaaatatactttatgggcggagcacaagctatagctagcctagcttatattcaaaatgttgataaaatagttgggcctggaaataaatttgttgctgaagctaaaagacaaatatcaggcaaaattgttggaacagagtctatgtttgcaggaccttctgagatatgtgtagttgctgacaaatttactgacataaatcaaattgccacttctttagtttcacaggcagagcacgatccaaatagccaatgtattttattaacaaaagataagaaaatattaccaaaagtaaatcttgctataaaaaaaataataaagtcattacctagaaaaagaatagccaatcgatctcttaaaaatcatggaataaatataataattaaaaatgataaagaaattataaatacaataaacttaattgccccagaacacttagaaattaatgtaaagaattacaaaaaatatttaaataaaatatataatgttggtagtatctgtaatggcaagtatacgccaatgagcttaagtgattacaccgttggaaccaatcatattcttcccacaagtggaagcgcaaaattcagttcaggtttaagtataaatgaatttattaaaaaaatttctattgttactcttagtaaattaggggtagaaaaaattgggaatcaagctataaaactctctgagtatgaaaaactatttgctcatactcaaagtattaaatctagaatgtaa

SEQ ID NO: 206017 - DNA, 1267 bp, Unknown
  Bacterial polypeptide expressing nucleotide sequence isolated from the Sargasso Sea
aatgattaaagaaattaactgtaaaaatagtaactttaaaaagaaattaaaaaattttttagaaaaaagaaggtctggaaaaactattaatacatcaattgttttaaagataattaaagatattaaaaaaaataaattgaaagctttaattaaatacgaaaagaagtttagtaagaatacaaaaattaagccatccaaaaaagaaataaatcagtctataaaaaatttagatcctaagattaaaaaagctatagattttgcttactctagaatattcaagtttcactcaatgcaaagagcaaaaaatattaaatatgtggaccaatataaaaatcaaattgaatataaacacatcccaattcaaaaggttggagtttatgtgcctgcaaatttaccctcaacattattaatgaatgttattccagccaaattagctggagtaaaaagagttgtagttgctaacccattagtaaatggaagattaaatgctgctgtaatgtatgctgcaaaaaaatgtaatgtaaatgaggttataacttgtggtggtgcccaagctattgggagtttagcttatattcaaaaagtaaataaaattactgggccaggcaatgattatgtggcaaaagctaaacagttagtatttggtgatgttggggttgaaggtatgatagctggtccttcagaaatttgtattcttgcagataataaaactgaaattaatgaaattactacttcgatattaggacaatcagaacatgatgaaaattctcaaagtatattaattacaaaatataaagatttgattactaaagttaaaaaagatattaaagttaaattaaaaaaattacctagaaaaaaaattatttcaaaaagtttaaataatcatggtcttttagttctatgtcaaagcgataatcaaataatagatttaattaatgagattgcacctgagcatttagagttaaatatttcaaatgcaaaaaaatatattaataaaatttttaacgctggaagcatatgcattggtaaatatagccctatggcagttactgattataacgcaggaagcaaccatactttgccaactttaggatctgcaaaattttcttcaggtctaaatctaagcgaattttacaaaaaaattagctatattaatctttcaaaaaaaggtgttgaaaaaattggtgaaagtgcgatacatcttgcaaattatgaaggcctaacggctcacatgttaagtataaaatcaagaatgaggagaaaataa

SEQ ID NO: 206018 - DNA, 1161 bp, Unknown
  Bacterial polypeptide expressing nucleotide sequence isolated from the Sargasso Sea
actggataaaactgcgcagcaggctttattagagcgcccgctgcagcaggaatccgacagtttaaaacagacggtgaaagatattatccgtgctgtgcgaagcgaaggcgatacagctttgctgcgttttagccgcgaattcgacaagctgcaaagcaaccctttgcgtttgtcggacgagcagcaacaaagcttaattgcctctttatccgatgagctcaaaaccgctattgagatagcgtatcgcaatatccgtacctttcatgccgcgcagttgccagaaaatatccgcattgaaactcagcctggtgtggtctgtgaactcaattacagtgctttggatcaagtcggtttgtatgtaccgggtggcagcgcccctttgccttcgactgtactgatgctgggtgtgccggcgcaactggctggttgtcgccgtgtggtgttagtgacacctcctggtcagcctgaagcgggtgatattgccgctgagattgtgtatgcagcatctctttgtggcattaccgagatttatactttaggtggcgctcaggctgttgcggctttggcttacggcactgaaaccattggtaaagtggataagatttttggccctggcaatagatttgtcactgaagcaaaacagcaagtcagtcaggatgcccgtggcgcagctattgatatgccggctggcccttctgaagtgctggtgattgccgacgacaacgctaacccggtgtttgtagcggcggatttattatctcaggccgaacacggcccggattcccaagtggtgctggtcagcccttctgaagctttactggtcaatactatcagtgagcttaaacgtcagacagctttattaccacgagctgaaatagcacaaaaagccctgagcaacagcagattgattttaacgccggatttagccacagcggctttggtcagcaatcaatacgcgcctgagcacttaattattcaaacttctgacgatcaaactctgcttggcaaactgaccaacgccgccagtatttttgttggcccttacacgcctgaatcagcaggtgattatgccagtggtactaaccacgtattacccacttatggttatagccgtaaccatagcagtttaagtctggccgacttttatcgtcgttacacagt

SEQ ID NO: 206019 - DNA, 586 bp, Unknown
  Bacterial polypeptide expressing nucleotide sequence isolated from the Sargasso Sea
cccagcgaagtgctggtgatcgcagaccacaccgccaaaccagagcaggtggcggccgatctgctggcccaggcggagcacgatcccctcgcctcctccgtgctgatcaccacctcgtaccagcttgctgatgtgatcggtaccaccatctccgaacagctggagacgcacccccgtcgcgacatctgcgaggcatccctgcgggactggggactggtggtggtctgtgacgacctcgagagctgcgcccagctcagtgacagctttgcccccgagcacctggagctgctggtggagcgtccggaggccctggccgatcggatccaacacgccggtgccatcttcctgggcccctggtcaccggaggcggtcggtgactacctggctggcccgaaccacacattgcccacctgtgccgcggcccgcttcagcggtgccctcagcgtggaaacgttcatgcgccactcctcgatgatccagttcaaccgaacggccctggaggccacggcctcagcggtgtgtgaactggctgaaagcgaaggactgcacagccatgccgaatccgttcgcaagcggctcagctgag

SEQ ID NO: 206020 - DNA, 1267 bp, Unknown
  Bacterial polypeptide expressing nucleotide sequence isolated from the Sargasso Sea
atgattaaaacaatagattgtaaaagttcaaattatttaaataaattaaaagcaattcttgaaaaaagaagatcaggaaacaatgttaatacggatatagtaaaaaaaattgtaaaagatattaaaaaaaacaaattaaaagcattaaaaaaatatgaaaaaaaattcagcaataatacacaattaaaaatatcaaaaaaaaaaattatcaaatcaattaagaagttagatcccaaagttaaaaaagcaattgattttgcttataatagaatattaaaatttcataaaactcagaaagtaaaaaatttaaaatataaagatagtttaggtaattctatagaatataaatttttacctatcgaatctgtaggaatatatgttcctgctaatttacctagtactttattaatgaatgcaattcctgcaaaaatagcaaatgtaaaaagaattatattagcaaatccaaaaataaatggagaactcaatcctgcaattctttatgcagcaaaaaaattaaatattgggataatttattcaatgggtggagctcaagctattgcaagcttggcttatatacaaaaagtaaataaaattgttggaccgggtaatgattacgttgcaagggcaaagaaagaagtttttggagatgttggtatagagggaatggtagctggcccaagtgaaattactgttgtagctgatcaaaatacaaattttaatgcagtaatcacatctatgattggtcaagctgaacacgatgttaactctcaatgcatattaataactaaaaataaaaatttaattaaattatttaaaaaacttttggataatgaattaaaaaaaatacctagaaaagatattgcaaaaaagagtattttaaaaaatggattaattattaagacttataataacaaacaaataatagatgttatcaatgaaatagcacctgaacacttggagttaaatataaaagattataaaaaactaataaacaaaattaataatgcaggaagtatatgcattggaaaatattctgcaatggctgttacagactataacgttggtacaaatcatattttaccaacacttggatcagcaaaattttcatcaggattaaatgttagtgaattttataaaaaaacaagctacattaaattatcaaaaaaaggcattgaagttatcggcaagaaggctataactcttgccgagtatgaaggtttaattggtcatgctcaaagtataaaatctagaataaggagaagttaga

SEQ ID NO: 206021 - DNA, 718 bp, Unknown
  Bacterial polypeptide expressing nucleotide sequence isolated from the Sargasso Sea
atgcaaaagcttgttaaatttttggataatagaagattaggaataaattttaatacttctattgtccctaaaattttaaaagatattaaaaaaaataaattaaaagcacttttaaaatacgaaaaaaaattcagtaaaaatttagaaattataccaagtgttaataatatcaataaatctattaaatctttagatccaaaaattaaaagatcaatagattttgcatataatagaatttataaatttcactctaagcagaaaattaaagatatcttgtacaaagataaatataaaaataaattagaatataaatctatacctttacagtcagttggaatatatgttccggcaaacttaccatccacactcttaatgaatgctattcctgcaaaaattgcaggtgttaaaagaattatattagcaaatccaaaattaaatggaaatttaaatcctgctgtactttatgcagcaaaaaaaattggaattaaagaaatctattcaataggtggagcacaagccattggtagtttagcttatattcaaaaagttaataagattattggtcctggaaatatttatgtggcaagagcaaaaaaagaactattcggtgaagttggcatagaaggaatggtagcaggaccttctgaaattacaattgttgcagataaaagaaataatttagatgaagtattaacctcaaatgataggacaagctgag

SEQ ID NO: 206022 - DNA, 952 bp, Unknown
  Bacterial polypeptide expressing nucleotide sequence isolated from the Sargasso Sea
atgtcttgcctctttaaatttggagatactgataaagagataacccgaaagtttagggttatagaatctgtaggtatttacgtaccaggaggcaaggcctcttatccttcaacagtcttaatgggagctgcacctgctattgcctctggtgtgagtgatatttcaatatcttctccagctcaaaaaggaatcttaaacacactgacaatagctgctgcaaaagttgctggcatagaaacaatttataggattggtggagctcaggcaattgctgctttagctataggaacagatcagatatcaaaggtcgataaaataattggtcctggaaatatatttgttgctgaggcaaaaaaacaactttttggcgaagtaggtattgattcaatagccggtccctctgaaattcttattcttgcagatagctcttcaaatccagaaacaatagcctgggatcttatggctcaatccgaacacgactcagatgcatctggtattttgatttcggatagtgaagagataatagctaatgtaaaagaaatcatatcaattgaaatagattcccttgaaagatgctctattattaaagaatcaataagctcaaatggactgataattaaaatagataatttttctgaagctaaacagttagtaaacaagattgcacctgaacatttacatatatcttttgatcatatgaattataaagatgaaaattttcttatagcgggcttgattctaaaaggagagaattcagctaactccttttctgattatattctaggccctagccatatacttcctactaattcatcttcaagatttagctcacctctatcggtagaagacttcttagtgagttatagttatatttcactcgacagggaaaagaatataaaacaatccaatgaatatattgaccatacttcgaagatagctaaagccgaggggt

SEQ ID NO: 206023 - DNA, 1128 bp, Unknown
  Bacterial polypeptide expressing nucleotide sequence isolated from the Sargasso Sea
aaaaatacaataaaaattcaattatatttccttcaccaagcaaaatttcaaaatcaatttcaagtcttgataaaaaagttaaaagatcaatagatattgcttataatcgtatttataaatttcattctcttcaaaagttcaaaaatatttcttataaagataaatttaacaataagcttgattataaatatttgcctttagattcagttgcaatttatgttcctggttcaacagcttcatatccatcaagtgttttaatgaatgcaataccagcaattgttgctggtgttaaacgaatagttatgattaatcctgggcataagggcaaacaagactcagctgttttatacgctgcaagaaaatgtaaaattaaagagatttatgcaataggcggtccgtctgcaattgcagcagttgcatatggaactaaaaaaataaaaaaagtaaataaaattgtaggacctggaaatatatatgttgcagcggcaaaaaaagaagtttttggtgatgttggtatagaagggatgacagctggaccatctgagataatgattgtatgtgataaattttctaatccagcgtgggttgctagtgatttagttggacaagcggaacatgatccattagctcaatgtattttaatttctaaagaaatgaaacttattgaaaaagtaaaaatagaagtatttaatcaattaaaaaaaattccaagaaattctattgctgaaaaaagtattataaataatggagttttgattcataccagttcagataaaaagatattagatattataaataaagttgcacctgagcacttagagttaaatgtaaaaaattataaatcatttttgtcaaaaattaataatgcaggttcgatttgtttaggaaaatatgctgttatggctatgacagattataatattggtacaaaccatgtattacccaccaatggttctgcaaaatattctagtggaataagtgtgaatgaattttataaaagaatttcttatattaacttgtcgaaaaagggtattgaaactcttggaccatcggttataactcttgcaaattatgaagggttaacaggacatgctaactctgtaaaaaaaagaattaggagaacataaa

SEQ ID NO: 206024 - DNA, 771 bp, Unknown
  Bacterial polypeptide expressing nucleotide sequence isolated from the Sargasso Sea
ttgtggctgcagatttatgtaaagtagatagtatttttaagatgggaggagctcattcaattgcagcacttgcttatggaaccccaaccatacctaaagtcgacaaaattgtaggtccaggaaacttattcgtcagtactgctaaaaaatttgtttttggcgatgtcggcatagataatatagctggaccctctgaaattgttattgtggctgataaaaaaaataacccagatatgattgctattgatttattttctcaagctgaacatgatgaattagctcagccgattttaatatccaaaagccatcttctaatagaaagtgtattcaattctatgaaaaaactgttaccaagaatgtcaagaaagaaaattatcatggagtcaattaagaatagaggattatttataaaaacaaatagtgattcagaaactgtcaatatagtaaacactattgctcctgaacatctcgagcttatgtatcatgataaaaaatttctgaaacaaattagaaatgctggcgctattttcttaggtgaaaacagcccagaagtttttggagattattgtgctgggccgaatcatgttttaccaacatcaggatctgcaagattctcatcaccactaggtgtatatgattttcttaagagatctagtgttataaagatttctaaaaaagatgcgaatgtattaagtaagatatctagcgtacttgctgatgctgaaggtcttcaagcacattctttatcagcaaaaatccgagggaaataga

SEQ ID NO: 206025 - DNA, 1078 bp, Unknown
  Bacterial polypeptide expressing nucleotide sequence isolated from the Sargasso Sea
tatgaagatcataaataataaaaaagaggctatccaagaattaaaaagaatttctactcgaactgatttagaaaacaataacaagataaatgcagttgttgaagagattcttcaagaggtgaaaacttatggcgatatagcagtagaaaaatatacaagaaaatttgatggtttcaatcctaaccctatgcaagttagcacgaatgatttaaaggatgcatgggatgagattgataacagtttaaagcgttcacttgaggtagcccataaaagaattaaaaaattccatgaaaaagaaattccatcatctttcactatagaaggtaagcacggtgataaagtccaaaggagatggagacccgtaaaaaatgcaggtatttatatccctgggggtagagctgcttatccaagtactgtattaatgaatgcgatacccgcaaaagtagcaggagtgccggaaattataatggtatcccctggaaataccgaggggataataaacaaaactgttctagctgccgctcacctatctggaatcaataaagtttttagaattggaggagctcaagcaattggtgctttagcatttggcacaaatcaaatcgataaagttgatgttatttcaggtccagggaatatctatgtaacgactgctaaaaaactaatttatggctctacaggaattgattccttagctggtccaagtgagatattaataattgcagatgaaacagctcaaagcaaacatatagcatctgatttactagcacaagcagaacatgatcctttagcttcttcaatacttctgactacatcaaagaaccaggctaaacaagtattagaagaactttataaagaaatagagggtcatccaagaaaagaaatttgtatgcaatcaatagaaaactggggattaattgtcatttgcgaaaatcatgaatcatgtatagaactaagcaataattttgcgccggagcacttagaaattttagcttttgatccaaaaaagattcttgaaggtatagagaatgcaggagcaatatttttagggaaatggacgccggaggctgttggagat

SEQ ID NO: 206026 - DNA, 1168 bp, Unknown
  Bacterial polypeptide expressing nucleotide sequence isolated from the Sargasso Sea
aaaaaaaatggtgataaagctttattgaaatatgaaaaaaagtttaataaaaataatgttattgttccaactactaaacagatcaataaatctattaaatctttagataaaaaagtaaaacaatctatcgatgatgcctacaatagaatttataaatttcattctttacaaaaattccaaaatatttcatacactgataaatttaaaaataaaattgaatacaagtattcaccactagattctgttgcaatatatgtaccaggttcaaccgcatcctatccatctagtgtattgatgaatgctattccagccattgtagcgaaagtaaaaagaattataatgatcaatcctggatataagggaaagcaaaatcctgctgtactttacgcagctaagaaatgcaaaataaaggagatttattcaattggtggtccctcagctattgctgctgttgcttacggaacaaagaaaatttcccctgtaaataaagtaatcggtccagggaaccaatttgtagctgctgcaaaaaaagaagtttccggagatattggcatagaagcgatgacagctggcccttctgaagttttaattgtagctgacaaaaactctaatccagaatggattgcaagcgatcttcttggtcaggcagagcatggtgaactatctcaatgtattttaatttcaaaaaataaaaatattttggaggaaacaaaaaaagaagttttaaaacaattaaaagaactaccaagatcatctattgcaaaaaaaagtttaatgatgaacgggatattaatacaagttaattcagataaaaaaattattgaaattacaaacaaaattggacctgaacacttagaattaaatgttaaaaattttaaatactttacagataaaattaaaaattcaggttctgtatgcttaggtaaatacgcagttatggcaatgaccgattatggtgtacctgggagcaatcacgttttgccaacaaatactactagtaaattttctagtggtttgaatgtgtcagagtttatgaaaaaaatatcatatataacgctatcaaaaaaggggattgataaacttggaccatcagctataacgttggcgaattatgaaggtttgcatggtcatgcacaatcaatcataaaaagaataaggagaaaataaa

SEQ ID NO: 206027 - DNA, 1081 bp, Unknown
  Bacterial polypeptide expressing nucleotide sequence isolated from the Sargasso Sea
gatattaattcagcaaaagaaaattgtttccaaagaaagtatcgatgcaataacgctagccaaaaatcgtattgaagcatttcataaacatcaattacctgaagattcaatatacaaagataatgatgatgtaagcataaagactaaatggttaccattagatagtgctggaatttatattcctgggggaactgcttcatatccaagctctgtattaatgggcgtgataccagcgcaagtagctggagttaaaaaaatatatgccacagttccttgtccaaataatgagatagatccgcttgttttagctactttggatttatgtggaattgaagaaatttataaaattggaggcgctcaagcaatagctgccttaacatggggaactgaaactgttcaaaatgtagatataataatcggccctggaaataaatgggtagctgaggcaaaaaaacaagctctttcaagtattaatatcgatatgctggccggaccaagcgagatattaattttagcagataaagataacagagcagattgggttgctgcggatcttttatctcaggcagaacatgatatttccgcacaagctattttaattactgattgtgagaactttctagaagatgttaataaagaattagtagtacaaacagaggtgcttaaaagaaaggatatagtcaaaaaaagcattgctgataatggttatggaattcttgtaaaaaatattaaggatgcaattggcattattaacgatatagctccagaacatttatcacttttatgtaaagaaaatgaatatatcgaaaaaaagatcactaatgctggagttattttttcagatgagtggacgccggagtctatgggagattatataattggtccaagccatgttttacctactaatggtatggctaaaagacaatctggtctatctgtttttaatttcttaaggcgccaatcaacgatatcaagctccaaaaaaacaataaataaccttggtccatcagcaattttattggctgattgtgaaggccttgatgctcatgcaaattctattaaaattagaataaaagattaa

SEQ ID NO: 206028 - DNA, 493 bp, Unknown
  Bacterial polypeptide expressing nucleotide sequence isolated from the Sargasso Sea
gtcgatcttggtcagcccggatgctgacttcctcgatcgcgtcgccgagagcatcgccaagttgctgccgaccatggagcgtgccgagatcatccgcacctcgctggaaggccgtggcgccttgatccaggtagcggacatggcgcaggccatcatcgttgccaaccgcatcgcccccgagcacctggagctgtcggtggccgacccggaggcctggttgcccgagattcgccacgccggcgcgatcttcatgggccgttacaccgcagaagccttgggcgattacgtggccggcccgaaccacgtgctgcccacttccggcaccgcgcgattttcctcgccgctgggggtgtacgacttccagaagcgctcgtcgatcatcttctgctcgccggatggcgcgtcggagctgggcaagagcgcttcggtgctggcccgaggcgagtcgctgaccgcgcatgcgcgcagcgccgagtaccgcatcaagccatag

SEQ ID NO: 206029 - DNA, 1303 bp, Unknown
  Bacterial polypeptide expressing nucleotide sequence isolated from the Sargasso Sea
tatggatattttgacttgggcagcgttatccgtcgatgaacaaaaagccgcgctccaacgctcacctttaattggtgacagcggcttagaacaaagtgttcgggccattgttgatgccgtagctagccgtggcgatgcggcgctaaaagagtttaatcaaaagtttgatggctttaatagtgccaatatcgacagtctgcgtttaagtgaaagcgagattagcgccgccagcgcacgagtctcgaccgaacttaaagccgccattgcccaagcgatggccaatattgatgtgttccacagcgcgcagcaatttcgccccatcgacattgaaacccaagcaggggttcgctgcgagcttcgtagcgaaccgattgaaaaagtcggtttatatattcccggtggcagcgccccattaatctcaaccgtactgatgttggccctgcctgccaaaattgctggctgcgaaaaacgcgtattggtgagtccgccgccgattaacgatgcaattgtgtatgcggcaaacgcctgtgggatcaccgaaatctatcaagtgggcggcgcgcaggccattgccgcactggcctttggcactgaaacgattcccagcgtcgataagatttttggcccaggcaatcgttatgtcaccgaagccaagcgcttagtctcgcaggacggtcgctgcactgtgtctattgatatgcccgcaggcccttctgaggtattagtgattgccgatagcgatgccaatgcgcagtttattgccgcagatttactctcgcaagcagagcacggcccagattcacaggtcattttagtcacggattctgagccattagcacaagctatcaatcaagcactcgagtcacaactggccgctctaccacgccaagagattgccgcaaccgccctaaacagtagccgcaccattttagtcaaagatatgcaggaagcagcacaggtatcgaatagttacgggcctgaacacttaattattcaaacccgcttcccacgggacgtactcaagcatattcgtgccgcaggctcagtgtttttaggcgcctatacacctgaatcggttggagattatgccagtggcactaaccatgtattgccgacttacggttacagccgcgcggtatcgagcctctccttggccgactttagccgccgctttacggtgcaagaactcagtgccaagggcctactcggactcgggcaagcggtaatgacccttgccagtaatgagttactcgatgcccataaaaatgcggtcgcgatacgcttagccagtcttaaggactga

SEQ ID NO: 206030 - DNA, 1270 bp, Unknown
  Bacterial polypeptide expressing nucleotide sequence isolated from the Sargasso Sea
aatgattaaaatattagattgtaaaaacccaaattatttatccagattaaaactaatacttaataaaagaagatttaaaagcaaaattaatacagatattgtaattaaaattgtaaaggatattaaaaaaaataaacaaaaggcactactaaagtatgaaaaaaaatttagtaaaaatactaaaataaaaccaacaaaaaatgaaataaccaaatcaataaagtctctagatcctaaaactaaaaatgcaattgattttgcttattctagaattttgaaatttcattccctacaaaaaactaaaaatattaaatatgtagataaacttaataacaaaattgaatatagatatattcctattcaatctgttggaatatacgtgccatctaacctaccttcaacattattgatgaacgctattctagccaaaaaaattgttggagttaaaagagtagtacttgcaaatccaagattaaatggaaaattaaatcctgctgtaatgtacgctgcaaaaaaatgtggtatctcagaaattataagtgctggtggcagtcaagcaatagctagtttagcatatattcaaaaagtaaataaaattgttggaccaggcaatgattatgttgcaagagctaaaaaagaagtttttggagatgttggaattgaaggaatggtagctggtccaagcgaaattacagttgtagcagataaaaatactaatttaaaagaggttctaacatctttaataggtcaagcagaacatgataccaattcacaatgtatactaatagtaaataatcaagattttataaagtctttaaaaaaagttttaaaacaagaattaaataaaattccaagaaaaaatattgctaaaaaaagtcttataaaaaatggattaattcttagagtttataataatacacaaataattgattcaattaatgaaatagcaccagaacatttagaattaaatttaaaaaattataaaaaattagttaataaaataaaaaatacaggaagtatttgcattggaaaatactctgcgatggcagctactgattacaatgtaggaactaatcatgttctaccaacacttggttcagcaaaattttcttcaggactaaatgttggtgaattttataaaaaaattagctatataaaactttcaaaaaaaggcattgaagttattggtaagaaggctataactcttgccgagtatgaaggtttaattggtcatgctcaaagtataaaatctagaataaggagaagttag

SEQ ID NO: 206031 - DNA, 1303 bp, Unknown
  Bacterial polypeptide expressing nucleotide sequence isolated from the Sargasso Sea
tatggatattttgacttgggcagcgttatccgccgatgaacaaaaagatgcgctccaacgctcgcctttaatcggtgacagcggcttagaacaaagtgttcgggcgattgtcgatgctgtggctagccgtggcgatgcggcgctgaaagagtttaatcaaaagtttgatggctttaatagcgccaatatcgacagtctgcgcttaagtgaaagcgagattagcgccgccagcgcacgagtctcggcagaacttaaagccgccattgcccaagcgatggctaatattgatgtgttccacagcgcgcagcaatttcgccccatagacattgaaacccaagcgggtgttcgctgcgagcttcgtagcgaaccgattgaaaaagtcggtttatatattcccggcggcagcgcgcccctcatttcgaccgtgatgatgttggccctgccagcaaaaattgccggctgcgaaaaacgcgtattggtgagtccgccgccgattaacgatgcgattgtgtatgcggccaacgcctgtgggatcaccgaaatctatcaagtgggcggcgcacaggccattgccgcactggcctttggcacagaatctattcccaacgtcgataagatttttggcccgggtaatcgttatgtcaccgaagccaaacgcttagtctcccaggacggtcgctgcactgtgtctatcgatatgccagcggggccttccgaggtgttggtgattgccgatagcgatgccaatagcgcatttattgccgcggatctactctcgcaagcggagcatggcccagattcgcaggtcattttagtcacggattctgagccattagcacagacagtcaatcaagcgctcgcgtcacaactggccgccctaccgcgccaagagattgccgcgaccgctctaaaaggcagccgcaccattttggtcaaagatatgcaggaagcggcgctcgtgtcgaatcgctatgggcccgaacacttaattattcaaacccgcttcccacgggacgtactcaagcatattcgcgccgcaggctcagtgtttttaggcgcctatacacctgaatccgttggggattatgccagtgggactaaccatgtgttgccgacttatggttacagccgcgcggtatcaagcctctccttggcagactttagccgccgctttacggtgcaagagctcagtgccaagggcctgctcggactcgggcaagcggtgatgacccttgccagcaatgagttactcgatgcccataaaaatgcggtcgcgatacgcttagccagtcttaaggactga

SEQ ID NO: 206032 - DNA, 1024 bp, Unknown
  Bacterial polypeptide expressing nucleotide sequence isolated from the Sargasso Sea
gctcataacattgatcaggcacagtttgagctaaggaaaattactgagagaacatctggaaccgttcaagatgaagctataaaggtagttgacgatattcttaaaaacgtaagggaaagaggggatgaggcacttacagaatacacttctcgctttgatggatttctaacggaaaaatttcaagtttcatcagatttaatactgaaagcttgggaagagactcctagggaacttcaagattcacttttattggcaaaaaaaagaattgaaaaatttcatagtcttcaggtaccaaaaaatattacttatacaggacccaatggtgaaacacttggaagaagatggagccctgttgaaaaagcaggcatttatattcctggcggaagagccgcctatcccagcaccgttttaatgaatgctattcctgcttatgttgcaggagttaatcaaattattatggtttctcctgctaactctcaaggagagataaaccaaaccgttttagctgcagcacatattacaggtatcaacaaaatctttcgtcttggaggcgctcaagctatttgcgcacttgctagtggaactgaatcaattccaaaagtagatgtaattactggaccaggaaatatttatgtaacgttggcaaagaaaaaagtttatggaaaggtaggaattgattctttggctggtccaagcgagatcctaataatcgctgatcaatcagcaaaattagaacatgttgcatctgatatgttagctcagtcagaacatgatcctttagcctcagcgatactaataactacaaatacaaaattagctgaaaagttacccgcagaaattgagcgccaactaatcaatcatccaagattaaaaatatgtcaagaatcaatttccaactggggtttaatagtcctttgtgatgatttagaaacttgtgcgcaattaagcgatacttttgccccagaacatcttgaattacttgtagaggacccaaaaaaattatcagaaagcataaacaatgctg

SEQ ID NO: 206033 - DNA, 1065 bp, Unknown
  Bacterial polypeptide expressing nucleotide sequence isolated from the Sargasso Sea
tttggaatcaaggagatctggaaagaatattgatacaactatagttaaaagaattctaaaagacgtaaaattaaacaagaacaaggcattgttaaaatatgaaaaaaaatttagcaataacaattcgataaaaattaaaaacaatgagctaaaaaattcaattaaatctttaaatgaaaaaataaagcaatcaattgatttagcatatgataggatatttaattttcacaaaaaacagcagagaaaaaatattttttataaagataaatataataataagctagcctataaatatgttccattgcagtcagtaggaatttatgttcctgcaaatttaccctcaacattgcttatgaattctataccagccaagattgctggtgttaaaagaattgttttggccaaccccaaacttaatggaaaattaaatccagctgttttatatgctgctcagaaagttggaattaaagaaatatattccatgggtggtgcgcaggctattgcaagtttagcatatattcaaaaagttaacaaaattgttggacctggaaatatttttgttgccgcagctaaaaaagaattatttggtcaagtaggtatagagtctatggttgctggtccctcagaaataacagtattagcagataataaaacagatatagaagatgtgcttacttcaatgataggtcaagcagaacatgatgaaaattcgcaatgtattcttatttcaaaagatttaaaattgataaaagaatttcaaaataaaattaaagaaaaaataaaaaaattaccaagaagatcaatagcttttcaaagtcttaaaaataatggtttatcaattcttgcaaaaaaagattctgatgtaattaattcaataaatgaaatagctccagaacacttagaaataaatatttctaaaccaaataaaataattaataaaataatcaacgttggaagtgtttgcattggtaaatattctcccatggcagttacagactataatgctggcacaaatcatgtcttaccaacttttgggtctgcaaagtttgcgtcaggattgaacgt

SEQ ID NO: 206034 - DNA, 1003 bp, Unknown
  Bacterial polypeptide expressing nucleotide sequence isolated from the Sargasso Sea
aaacggatactcaaatttcactctttacaaaaaactacagatatattttataaagataatctaaataataaaattgagtataaatatttaccaattcaatcggttggtatttatgtcccagcaaacttaccatcaacactattgatgaatgctataccagcaaaaattgctggtgttaaaagaattgtactagcgaatccaaaaaataatggaaaattaaatcctgcagttttatatgcagcaaaaaaattaggaattaatgaaatttattcaatgggaggcgcacaagctataggtagtttggcttatattcaaaaagtaaataaaattgttggaccgggcaatatctttgttgctggagctaaaaggcaggtttttggagatgtaggtattgaaggaatgattgccggcccatctgaaataacaatattagcagatagcaaaactaatttaaatgaagttactacatctatgattggtcaagccgaacacgactcaaattctcaatgtatattgataactaaaaattctaatttgattaacaaatttaagaaagatttagaattaaaattaaaacagataccaagacaaagtattgccactaaaagtataaaaagaaatggactaattttaaaagtatataatgatagacaaattattgatgcaattaatgagatagctcctgaacacttagaaataaatgtcggcaattatgaaaagtataaagataaaattgttaatgcaggaagtatttgtataggaaaatattctcctatggcattaagcgactatgctgttgggacaaatcatgtattaccaactaatgcgtcagctaaattttcatcagggttaagtttaagtgaattttataaaaaaattagccttataactctctcaaaaaaaggtgttgagaaaataggagaatacgctacacatctcgctgagtatgaagaattaaaaggtcatgctttgagtataaaatctagaataaataaggagtaac

SEQ ID NO: 206035 - DNA, 681 bp, Unknown
  Bacterial polypeptide expressing nucleotide sequence isolated from the Sargasso Sea
tttggataaaaggagatctggaaaagcagtagacacttcgatagttccaaaaattttaaaagacatcaaaattaatggaagaaaagcacttttaaagtatgagaaaaaatttagtaaaaatacagagatagttccttcaaaagataaagtaaacaaagcaattaatacattagaacctaagattaaaaaaagtatcgatttagcctataatagaatttttaagtttcattcactacaaaaaccaaaaaatattaagtatgtagataattttaaaaataaacttgaatataagcatgtgccactacagtctgtaggtatttatgtaccagctaatttaccatccacattattaatgaacgcagttcctgcaaaaatttctggtgtaaaaagaattgttttggccaatccaaaacttaatggaaaactaaatcctgctgttctttatgcagctaaaaaagttggaattaaggaaatttattcaatgggtggtgcccaagctatagcaagcttagcgtatattcaaaaagtgagtaaaattgttgggcctggaaatatttatgttgcaagaagcaaacgtgaagtctttggtgatgttgggacagaaggaatggtagctgggcctagtgaaatttgtgttttagcagatggtaaaactgatctaaatcaagttataacatctat

SEQ ID NO: 206036 - DNA, 757 bp, Unknown
  Bacterial polypeptide expressing nucleotide sequence isolated from the Sargasso Sea
gtaaaagaaatttataaaattggaggcgctcactctatagcagcctttgcctacggtaccaaaacttttaaaaaagttgataagatcgttggacctggaaacgcatatgttgcagctgcaaaaaaagaagtatttggagatgtggggatagatattgtagcaggtccatccgaagttagtgtagtagcagataagtatgcaaatcctaattgggtagcttcagatttgattgctcaagcagaacacgatgtttatgctcaatcaatattgatttcaaacaatttagaattgataaaaaatgtaaagatttgtcttaaagatcaattaaaaaacttacctaaaagaaaaatagcatctaaaagtttaaaaagttttggacttgtcatacatgttaaaaataaaaaaaaaattttaaagattattaatcaaattgctcctgaacacttacaactttatgtgaaagatcttaaaagctatacaaatggtatctcgaatgcaggatcagtctttttaggcaaattctctccagaagcaataggggattatttagctggcccaaatcacgttttgccgacttctggttcagcaagattttcatcaggtcttggtgttagtgattttttaaagcgtcattcgataataaaaatttcaaaatcaggtattgaaagattgggttcttcagttataaatttagcccaacatgaaaatttacaaggacacgcgaactctgtaaaaataagattaaaaagggaataaa

SEQ ID NO: 206037 - DNA, 1045 bp, Unknown
  Bacterial polypeptide expressing nucleotide sequence isolated from the Sargasso Sea
atgaaagttttaaattatagttctatcaatttctggaacgaattagataatcatctttctttaagagaaatagaaactagttctagaatcgaagctgatgttaaatctataattgcagacataaaaaaaaatggagatgataaaattattcaatatgcaaaagacttcgataatattacaataaaaacagatgatataaagttgcaagatttaaaaaagttttattcttttgataatttaaataaagatactgtagagagctttagactagctataaaaaatgtaacaaaatttcatgaaaaacaattacctcaagactatgagattgaaaatatggatacaaaacttaaatctgtttggaaaccaatagattctgttggtctttatatcccaggaggcaatgctgtatatccctcatctctaattatgagtgtcgtaccagcacaaattgctggagttaaaagaattgtttgtgttacaccaccgtctaacgattttaatccatatatagcttttttattagatgaattaaatatttctgaagtttttcaagttggaggagctcaggctattgcagcgttatcatatggaactcaaactattaaaccggtaaataaaatttttggaccaggaaatgcttttgttgcagctgcaaaaaagcaggtttttggaaaagtaggtattgatttggtagccggtccttccgaaattattgttgtagcagacgaaaaaaacaaccctaaatgggttgctagcgatcttatggctcaagctgaacatgatgaaaacgcacagtcaattttaattacaaatagtaagatatttgcagatcaagttttggaacaaattcaaaatctaattaataaagttagtaaaaaacaaataattaatttaagcttgaaaaaaaatggactaattgtggtaatggatgatttattattatcttacaaaattataaataaaatagctccagaacatttacatcttcaatcgagcgaaaaacaaaatattctcaagaatgtaaataatgctggaggaatatttt

SEQ ID NO: 206038 - DNA, 1297 bp, Unknown
  Bacterial polypeptide expressing nucleotide sequence isolated from the Sargasso Sea
atgttaaatttattaagatataaagacgaaaattttcatattcgtattactgagattataaactctagaaaaaactttgatgaagatataactaatcaagttaacgatataattctggatataaaaaataatggcgatatgagcctttttaagtatatgtctaagtatgacaatgtagaatgttctgcggagaatatttgctataatgaggaagatatttcatcagcaaaaaaaaattgtacaaaagaaagtattgaagcaatcaaacttgctaaaaatcgtattgaggcatttcataaacaccaattacctgaagattcaatatatgaggatcaagaagaagtaagtataaagactaaatggattccactagatagtgctggaatttatatccccggcggtactgcttcatacccaagttcagtattaatgggagtaattcccgcgcaagttgctggaattaaaaaaatatctgcgacagttccttgccctaataatcaaatagatcctcttgttttggccactttggatttatgtggaattaaaaaaatatacaaaattggaggtgctcaggctatagctgcacttacatggggaactgaatctgttgacagtgtggatataattatcggacctggaaataaatgggttgccgaggcaaaaaaacaggctctttcaaatataaatattgatatgttagcgggacctagcgaaatattaattttagcagataaaaataatagagctgattggattgctgctgatcttttatctcaagcagaacacgatatttctgctcaggcaattttagtaactgatagtgaaaatttattagaaaatgttaataacgaattagttaatcaaacagaaaaactcgagagaaaaaatatagttaaaaaaagtatcgctgaaaatggttatggtattcttgtatcggatattgaggatgcgattgagattattaataatatagctcctgaacatttatcaatattatgtaaagaaaatgatcaaatagaaaacaaaatcactaatgctggtgttatattttctgatgaatggacaccagaatctatgggtgattatattattggtccaagccacattctaccaacaaatgggatggctaaaagacaatcaggcttatcagtttataatttcttaagacgtcaatcaactatctcaagcagtaaaaaaactataaatactcttggcccctcagcaatgttattggcagattgcgagggtctggatgcacattcaaattctataaaaataagaataaaagattcttaaa

SEQ ID NO: 206039 - DNA, 1303 bp, Unknown
  Bacterial polypeptide expressing nucleotide sequence isolated from the Sargasso Sea
tatgaaacttgagaccataaaatggaaagaactgactgaagatgaaaaaatagcatctctcaagagacctgttattgagagcatagaggaacaagagtcggttatcactgagatattcaatgaggtcaaatctaatggcgatcaagccattaagagatatacaaagatgtatgacggtgtagagattgataatcttttgatgagcgacaaagaaattacttctgcgtttgatagggttccaaatactttgattcagtccatcgaaaatgcaattgaaaatgtcaaaacatttcatgaaaaaaccttccaaagcgatacaaataaggttgaagtaagaaccggagtaaattgtcagataataaaaagacccatcgaaaatgtaggtctttatatacctgcaggaaataatccacttccttcgactgcaataatgttgggtgtaccctcctcgcttgccatgaataaggaatccattgtcgtttctccgcccaatgactcaggcgttgtgaatgattcaattgttgttgcagcaaaattaagcggcataggaaggatttgtaaagtgggaggagctcaatcaattgctgctctagcatacggcaccgaatcaattcctcaggtggataaaatatttggaccgggaaatagttgggttaccaaagccaaacaaatgatctctttattaaacctccctgtttcaatcgatatgccagctggaccaactgaagttctgattatttccgatgggaataccaatcctgaattcattgcttatgatttactatcacaagctgaacacggcgtagattctcaagttatacttatttctcagaatgattcatttctcaaaaaagttgcaatcgaaatcgataaagcaatatcaaaaatcagaacccaagagattgctaaaatttcaatgaaaaattccaaattaatttttgttgatgacattcaggaagcaattaatatctcaaattattatgcgccagagcacttgatcattaactgcaagaatgcagaaaaactagtacaaaaaatatcatcagcaggttcagtatttctgggcgaatggagcccagaatctgcaggtgattactgcagtggaaccaatcatgttttgcctacggcaggctttgcaagatcatacagtggtttgtctgtagatagtttttgcaaatcaatatctgttcaaagtttgaccaagaaaggattagagatgattggcgatgatattatcaatcttgcaatggcagaagggctagaggcacatgcaaaagcagttgaagtaaggattaagaaatga

SEQ ID NO: 206040 - DNA, 385 bp, Unknown
  Bacterial polypeptide expressing nucleotide sequence isolated from the Sargasso Sea
aaattggggattaattgtgatttgtgagaattatgaatcatgtgttgaactaagcaataactttgcccctgaacatctagaaattcttactatggattcaaaaaaaattcttgcaggtatagagaatgcaggagcgatatttttaggaaaatggactccagaggctgttggagattatcttgctggaccaaatcatactttacctacatcaggaaattctagatttagcggttctttgggggttgaaacttttatgaaaaatacttcaataatagaatttaatgaagaaagtctaaaagttaatagcctggatattattaatcttgctaaaagtgagggcttacatagccacgctaactcagtacaaataagatttgatgattag

SEQ ID NO: 206041 - DNA, 493 bp, Unknown
  Bacterial polypeptide expressing nucleotide sequence isolated from the Sargasso Sea
cctgctgtgtccggacgatgcattcattgcccgcgtgcgtgacgcgatcaacgaattgctgcctaccatgccgcgtcaggacgtgatccgcgcgtcgctcgaaggccgtggtgcgctgatcaaggtgcgcgatatggccgaggcctgcgcgattgccaacgacatcgcaccggagcatctcgaaatctccgcgctggagccgcatcaatggggtcagttgattcgccacgccggtgcgatcttcctcggccgctacaccagcgaaagcctcggcgactactgcgcggggccgaatcatgtgctgcctacgtcgcgtaccgcacggttttcgtctccgttgggcgtctacgatttcttcaagcgctcgagcgtgatcgaggtcagcgcggaaggcgcgcagacactgggtgagatcgccgccgaactcgcttacggcgaaggcctgcaggctcacgcccgtagtgctgaataccggatgcggcaaggcggctga

SEQ ID NO: 206042 - DNA, 694 bp, Unknown
  Bacterial polypeptide expressing nucleotide sequence isolated from the Sargasso Sea
atgattacttggtcatctctttcggtaaatgagaaaaaacaggcgctagcccgcccggctatggccaatagccaacagttaaagcagaccgtgggcgacattatcgcccgcgttgaaaaagaaggcgatgaggcagtacttgattacacacgtaaatttgactgcccagacttacctagccttgtcctttcacaagaaaacattgatgctcttgctgcgaaggtaacgccagaggtagcaagtgctatcgatactgcgttcaacaacataaaaatgtttcacgaagcgcaaatgcctagtgatatcgcgctaaccacaacgcctggtgttaaatgcgagctgcgctttaccgcccttgatgcagtgggtctttatattccaggcggcagtgccccgcttccttctaccgtattgatgctaggcgtacctgcattggtggcgggctgcgaaaataaactgctttgcacaccgccaaataaagagcagttgattgcacctgaaattgcctatgcggcaagaaagtgcggcatcgacaagatttttttgtgtggtggtgcacaagcaatcgctgctatggcgcttggtacagagactatcccgcaggttgataaaatttttggcccgggtaacagctttgtgactgaagctaaacagcaagtaagccaacgtgccgatggtgcagctattgatatgc

SEQ ID NO: 206043 - DNA, 1873 bp, Unknown
  Bacterial polypeptide expressing nucleotide sequence isolated from the Sargasso Sea
atgaagttaataaatagatcaaaatcaaaattacctattaattggaaatcttctacgatcaattctaaggatattgaaaacacagcctttagatatagagatttaattatcaataatggtactaaggcctttaacataattaatgatgagttaaagcttccaaatataaaatcttttaaagttagagctgcagaaataaataaatctgaaaattctgtttcagatgatttaaagaaagctattctagattcttcaaacaatatcaaattaatttgtgaagaagaaagaaaaaatttaagctcttcatcaatcgaaaccactaaaggaatcactctttggaaagaatttagatcaattgagacagtgggtctatatgttccaggtggctcagcaccattgatatcgtcttttcttatgcaacttatacctgccaaagttgccggatgtaaaaatatagttgtatgcactcccccattaaaatctggttctatagctccggaaatcttgtggattgctaaattatttggaattgaatcaatatataaagtcggtggtgctcaagctatatttgcgatggcatatggaacaacggttattcccaaggtagataaaatttttggtccaggtaattcttatgtaaatattgctaaaaaaatatgttctgaagatgttgcaatagatttacctgcgggcccaagcgaagtcatggttgtttctgacgatgagacaaaagctgggctggttgcagctgatgtattgtctcaacttgaacatgatgctgcttctaaggcatttgtactttcaaacaatttaaatttacttaaaaagattaaaaaagaaataaatattcaactttcttcactttcaagaaaaagtattttggaaaaaagtttgttaaatcttcagttaattaaaacaagatcgatggttgatagcatttgtatgattaatgaatgcgctcctgagcacttaattcttctagatgacgattactcaaagtttttatcaggaatttataatgcaggttctatattttgtggctcattaagtccagagtcttttggcgattattcttcagggtccaatcatgtgcttccaacaaatggtatggctaaagtattttctggattaggagtaaaagattttggaaaacagataaacgtgcaaacagcatcgtctgagggttttttaaatttaaaagatactgttattaccatggctaatgctgaatcgcttgatgctcatgcaagggctgtagaaattcgagaaaaacttgcagttactaaatcgcgatcaagaatttcatccgagattagaaaaaccaatgaaacaagcatatatatcaatttaaatcttgatggaaccggacaatacaatattgataccggattaaaatatttagatcatctgctcgaacaattttctaaacatggatcaattgatctaaatatttcttgcttaggagatctagaaatcgatgaacatcatacaattgaagatatcgcaattactttaggctcaacgattaataaagcattacaagaaagaaaaggtatatcacgttatgcttcgagtgaaatcctagttatggatgaagtaaaatgcaatgtaagcattgatctatgtaccagaagatttttaaattttaaatgctctgatcttagagaaagagttggcgatttcccaacagaaatgtttgaacatttctttatttctttgataaattctgctgcttttacttgtcacattgataccatcggcagcaattcgcatcacttattagaggctacatttaaaacatttgctagatgtcttcgatcagcaatagtcattgaatccaatcaaacatcatcaacaaaaggattgatgtgag

SEQ ID NO: 206044 - DNA, 1327 bp, Unknown
  Bacterial polypeptide expressing nucleotide sequence isolated from the Sargasso Sea
catgcagaccctgatctggaagaccctctcccccgcccagcaggccgacgtactgacccggccggccctgagtgacgaagccgacatcggcgccgtggtacgggagatcatcgctgcggtgcgcagccggggcgacgaggccctgcgcgagctgagccagcgcttcgagcgcgccccgcgccaacaactgcaggtgagcgacgccgaaatcgaggccgcctgcgcccgcttggatgacgatatcaaggacgccatcgaggcggccattgccaacattcgcaccttccacgcagcccaagtgcagccggtggtgcgggtggagacccagcccggggtggtgtgcgagctgcgcacccagcccatcagccgggtcggcctctacgtaccggggggcagcgcgccgctcccctccaccgtgatgatgctggccattccggcccgcctggccggttgccgtgaagtggtgctctgcaccccgtcgcccgccagcgacgagatcctgttcgccgcccgcgcctgcggggtcgagaaggtgttcgccatcggcggcgcccaggccatcgccgccatggcctacggcacacagagcatccccaaggtggacaagatcttcggcccgggcaacgcctatgtgaccgaagccaagggccaggtatcccgcgactggcgcggcgccgccatcgacatgccggccggcccctccgaggtgctggtgatcgccgacgagagcgccaacccggccttcgtggcggccgatctgctctcccaggccgagcacggccccgacagccaggtggtgctggtgaccacctcgccgctgctggccgatgccatcaacggcgagatcaaacgccagctggccaagctgactcggcgcgatatcgccgcgcaggcgctcggcagcagtctggtgatcctctgcgacgatctgacagaagcctgtaccatctccaacgcctacgcgccggagcacctgatcgtgcagacccgcgcaccccgcgatctactggatcagcttgagaatgccggctccatcttcctgggagcatggacaccggaatcggtcggcgattacgccagcggcaccaaccacaccctgcccacctacggttatgcccgcacctgctcgagcctgggcctcgccgattatcagcgccgctacacggtgcaggagctgagcgagcgcggcattcagggccttggccccatcgtcgagcgcatcgcccaggccgaggggcttgatggccacaaaaatgccgtcaccctcagattgaacgccctggccgccacgtcccaacaaacagcacagcagaaggatttgtcatga

SEQ ID NO: 206045 - DNA, 1294 bp, Unknown
  Bacterial polypeptide expressing nucleotide sequence isolated from the Sargasso Sea
tatgttcaaaagtgagttagatatatctaggaaaggatttgaatcagacctatcaaattttttgactttaaaacaatcagttgacgaggaggttgttgcttctgtaactaaaatactaaaagaagtttcatctagaggagattcagctcttatagagcttacaaaaaaatttgatgactatatgttggaaaatttttttctttcacaagatgaaattaatgctagttttaaaaatgtaaataaagaagttgtgactgctttggaggttgctttcgagaatattattcaatttcactctaaatgtagagattctttaaacctagaacccatagattcagaaatctcaagaacatttagaccaattagaagtgctttactttatgtcccaggtggcaaggcttcatatccatcttctgttttaatggctgcagggcccgcaatagcgtgtcaggttaaagatttatttctaactactccatctataaatggagtggttaatgatctgactgttgctgctgcaaaaatagctggaatcgagaaagttgctaagttgggtggtgcccaagctatagcagcattttcttatggaacagagtcgattcctaaagtcgacaaaatagtaggacctgggaatgcttacgtagcagaagctaaaagacagttatttggcacagttggtatagattcaatagctggaccatctgaaattatagttttagcaaatgaaacttcttcaccagaaatagtggcttgggatcttatggctcaagctgagcatgatcaagacgcaagttcaatcctaatctgtaactcaaatgaagttatcaaagaaataaagcaaatcatagcgaatgaattgccaaagcttgaaagagctaaaattataaagtcctcattaaccaataatggtcttattataaaaattgaatctcttgagcaatctatagaaattataaatagattctctccagagcacttacatttagcttttgatggtaatgagattgacccaaatgacttaatagcaggaatagtcttattaggcagtgactcagcagtttctttttcagactatgttttaggccctagtcacatattgcctactaatggaagttctagatttagttccccattatccgtagaagatttcattgtcagttcaacaaaagtaaatatgcaaattcagactgagaaaattacgttcaacgaattgattgacaatacatctttaatagctagagcggaaggtttaacagcacatgcaattgcggtagaaaagagaaaaaaacactaa

SEQ ID NO: 206046 - DNA, 1297 bp, Unknown
  Bacterial polypeptide expressing nucleotide sequence isolated from the Sargasso Sea
atgaaaattttttcattaaagcgtaatgcaattaatagtacaattagacagattcgtaagtctcaagaaatctcatacaaaaatgtaaataagactgttgcttcgattattgatgatgttaaaaaattaggtgataaagcaatatttaagctaacaaagcaatatgataattttaatttaaatcttcaaaatttaaaagttaaaaggtcattaatttcagattcttcaactaaactgaattctgatttgaaaaagtcgattaaaaaagctatccaacgtgtttcttcttatcagaaaaaaaaattacctaaatcttttttatataaagataatttaggaaataaattgggatggtcagttagtcctttggacagtgtaggtatatatgttccaggtggaactgcttcttacccatcaagcttgattatgacagcagttttagcaaaagttgcaggtgttaaaaaaatatcaattgttacaccaccctcacaagatggtgttaacaaggccgttttatttgtcgcagattgtttaaagatcgaaaatatatatcaggtaggtggggcccaagcaatagctgctttagcctatggaaccaagacaattgagaaagtcaataaaatcgttggcccaggaaatatttttgttgctaatgcaaaaaaacaggtttttggtgatgttgggatcgatatggtggcaggcccaagtgaagttcttataataggggacaagagtgctagttctgaaataattgctgcagatttattagcacaggctgaacacgatgttaatgcatcatcaattttagtaactacatctaaaatattagcacagaaagttttagctgatgtgaaaaaattaactaaggaatctcctagaaaaaatataataagtaaatccttaagaaataatggaaaaatttttcttatgaattcccttgagagctgtatagatttcagtaacagttttgctccagaacatttagagctacttgtaaattcacccgagagattgttaaataaaatatgtaatgccggatctatttttcttggaaaaaattcagctgaggcatttggtgattatatagcagggcctagtcatgtattaccaacaggaggaagtgcatcattctcttccccactaagttccttagattttattaaatattccagtgtaaccaagatttctgataaaggtttaagattattaggcaaaaatgttgaagtcatggcagaatccgaatccctttttgcacataaaaattctataagtttaagattaaggaacaagaaatgag

SEQ ID NO: 206047 - DNA, 1042 bp, Unknown
  Bacterial polypeptide expressing nucleotide sequence isolated from the Sargasso Sea
ttctgctgaaattaatcaatctataaaaaaactaaatccaaaaatcaaatcttcaatagattttgcatataaaagaatttttgattttcataaaaagcaaaaaataaaaaatataagatatttcgataagtatagaaatttaatacaatacaaaaatgtcccattaaattcagtaggtatatatgttccagcaaatttaccaagctctttattaatgaatgcaatcccagctaaaattgcaaaagtaaaaagagtagtattggcgaatccaagagttaatggaaaattaaatccagcagtaatgtatgctgctagaaagttaggaataaaagaaattttatcaattggaggagctcaggcaatagcaagcttgtgttatatccagaatgttgacaagattataggtcctggcaataattttgtatctcaagccaaactttcattgtttggagatgtcggaacagagagtatgatagcagggcctagcgagatttgtgtaatcgcagataaaaatacaaatataaatgaaatatcaacatcattggtaggacaggctgaacacgatgaaaactctcaatgtattttaattactaaagataaattattaattaagaaggtaataaataaaattaatattttactaaaaagaataccaagaaaactaattgcattaaaaagtctaagaagaaatggtttaataatttatgttagtaaagatagcaagattccaaaaattgtaaatttaatttcaccagaacatttagaaatcaatgtagttagacctaacaaatatttaaaaaaaatatttaacgtaggaagcatatgcgttgggaagtattctgctatggcagcttctgactacacagttggaacaaaccatgttctgcccacttcaggatcagcaaaattttcttctggacttaatgtaggtgagttttataaaaaaataagccagataaaattatcaaaaaaagggattgaagttattggcaagaaagctataaatctagccgagtatgaaaattttacatggacatgttga

SEQ ID NO: 206048 - DNA, 1318 bp, Unknown
  Bacterial polypeptide expressing nucleotide sequence isolated from the Sargasso Sea
catgtccatcaccatccgcaagctcgattcgacgagcgaaggcttcggcgccgagctgcgcgcgctgctcgcattcgaggcgagcgaagatgcggcgatcgagcaatcggtcgcgcagatcctcgccgacgtgaagtcgcgcggcgacgccgcggtgctcgagtacacgaaccgcttcgaccggctgaacgcgacgagcgtcgccgcgctggagctgccgcaggacgcgctgcagacggcgctcgacggcctcgcgccgaaggcgcgcgcggcgctggaagccgctgccgcgcgggtgcgtgcgtaccacgagaagcagaaaatcgagtgcggcacgcacagctggcagtacacggaaagcgacggcacggtgctcggccagaagatcacgccgctcgaccgcgtcggcctgtacgtgccgggcggcaaggccgcgtatccgtcgtcggtgctgatgaacgcgattcccgcgcgcgtcgcgggcgtcggcgagatcgtgatggtcgtgccgacgccggacggcgtgaagaacgacctcgtgctcgccgcggcgctgctcggcggcgtcgatcgcgtgttcacgatcggcggtgcgcaggcggtcggcgcgctcgcgtacggcacggcgacggtgccggccgtcgacaagatctgcggccccggcaacgcgtacgtcgcgtcggcgaagcgccgcgtgttcggcacggtcggcatcgacatgatcgccgggccgtcggaaattctcgtgctgtgcgacggcacgaccgatccgaactgggtcgcgatggacctgttctcgcaggccgagcacgatgaactcgcgcaatcgatcctgctgtgcccggacggtgcgttcctcgagcgcgtcgaaaaggcgatcgacgagctgctgccgtcgatgccgcgccgggacgtgattcgcgcgtcgctcgaaggccgtggcgcgctgatcaaggtgcgcgacatggccgaagcgtgccggatcgcgaacgacatcgcgcccgagcacctggaaatttccgcgcttgagccgcagcaatggggccagcagatccgccatgcgggcgcgatcttccttggccgctacacgagcgaaagcctcggcgactactgcgcgggcccgaaccacgtgctgccgacgtcgcgcaccgcgcgcttctcgtcgccgctcggcgtgtacgacttcatcaagcgctcgagcgtgatcgaggtcagcgcggaaggcgcgcagacgctcggcgagatcgcgtccgagctcgcgtacggcgaagggctgcaggcgcacgcgaagagcgccgagttccggatgaagaactga

SEQ ID NO: 206049 - DNA, 985 bp, Unknown
  Bacterial polypeptide expressing nucleotide sequence isolated from the Sargasso Sea
tcacattaaacaaaaaaacaagaatattttatataaagatggtttaaataataaaatagaatataaatatgtaccaatccaatcggtaggcatatatgttccagcaaacttgccatctacattattgatgaatgcaattcctgcaaaaattgcgggtgtaaaaagaatcgtactagcaaatccaaaaaataatggaaaactaaatccagcagtattatatgcagcaaaaaaactaggtataaatgaaatttattatatgggaggagcgcaagccataggtagtttagcctatattcaaaaagtaaataaaattgttggccctggtaatatctttgttgctggtgctaaaaggcaggtttttggagatgtaggaattgaaggaatgattgctggtccatctgaaataacaatattagcagatggcaaaactaatttgaatgaagttacaacatcaatgattggtcaagcagagcatgatataaattcacaatgcatattaattacaaaagactcaaatttaattaaaaaattcaaaaaggatttgatctctaaattaaaaaaaataccacgacaaagtattgctacaaaaagcatcaaaaataatggacttattataaaagtaaataatgataagcagattataaatgtaattaatgaaatagctcctgaacatttagagttaaatgtaagtaactacaaaaaatataaagataaaatttttaatgcaggaagtatttgcataggtaagtactctcctatggcgttaagtgattatgctgttggcacaaaccacgtattacccacaaattcatctgctaaattttcttcaggattaagtcttagtgaattttataaaaaaatcagcctgataacactctcaaaaaaaggtgttgagaaaataggagaatacgctaaacatctcgctgagtatgaagaattaaaaggtcatgctttgagtataaaatctagaataaggagaaggtaa

SEQ ID NO: 206050 - DNA, 757 bp, Unknown
  Bacterial polypeptide expressing nucleotide sequence isolated from the Sargasso Sea
aatgaaaataataaaatttaacaaaaatttttataaccaacttcaaacaataattgaaaaaagaaattcattatcaagtaaatcaattcaagttgatgtaaaaaaaattattaatgatgtaaaaaaaaatggtgataaatctctaattaaatacgctgcaaaatttgataaagttaaaattagtaaaaatgatcttagtttagatttatctaaaataaaaatacaatctaaagttgatccacaaatatttaatagttttaaaaaagctataaaaaatatttcatcatttcataaacaacaattacctaaaaatattgtctttactaataatggtgcaacattgaaatctgtatggaagcctattgactcagttggtttgtacgtacctggaggaaaggctttttatccttcatctttaattatgaacgctgtaccagcaatcatagctggagtaaaaagagttgtttgtgtaactccacccactaaatcaattaatccttactttataaaattaataaaagaattaggtattaaagaaacatattttataggaggcgctcaagctattagcgcactaacattcggtactcaaacaattaaaccagttaacaaaatttttgggcctggtaatgcttatgttgcagaggctaaaaagcaattatatggaaaagtaggaatagatttacttgcaggtccatcagaaataattgttgttgctaataataaaaataatccagattgggtagcctctgactaa

SEQ ID NO: 206051 - DNA, 220 bp, Unknown
  Bacterial polypeptide expressing nucleotide sequence isolated from the Sargasso Sea
gggagattatctagcaggacctaaccatgtccttccaacatctggaacagcaaaattttcctcaggattatcagtttatgattttcaaaaaagacagtctgtaatcaagatgaccaaaacaggcattgaaagattaggtccatccgttataactttatcaaaatatgaaaatttacacggtcatgcaaactctgttaaatcaagaattaaaagaggttaa

SEQ ID NO: 206052 - DNA, 1303 bp, Unknown
  Bacterial polypeptide expressing nucleotide sequence isolated from the Sargasso Sea
tatgaagcttgaaatcataaaatggaatgacctgactgaagatgaaaagataacatccattcagaggcccactcttaacagtttaaagggccaagactcaactatcactcagatctttaaagatgtaagagcagatggcgacgaagctctgaaaaaattcacgagcatttatgacggagtcaagatagatgatttcttgatgagcgaaaaggagattgagtctgcatttagtagagtaccaagagatctcattcaatcgatcgaaaatgcaattgaaaacgtaaaaacattccatgaaaaaaacttcgaaaatgatttaaatccagtagaagtaaaatcgggtataaattgtcaaataataaaaagacccatcgaaaaggtaggcctttatatacctgcagggaataacccactgccttccactgcaatcatgcttggtgttccatcttcgctggctagaaataagcaatccgtggttgtttcaccacccaatgatttaggtgttgtcaatgatgcagttacggttgcagcaaagttaagcgggattggtaagattttcaaagtgggcggcgctcaatcgatcgctgccttggcattaggaactgaatcgattccccgggtagataaaatatttggcccaggaaacagttgggtaacgagagctaagcagatgatttcatctctgaatctccccgtttcaattgatatgccagcaggccccactgaggtaatgatcatttcagatggcaatacgaatccagaatttattgcttatgatttgctctcacaagcagagcatggaattgactcacaagtaatattaatctcacagaatgattcatttcttaaagatgttgcaatcgagattgatatagcaatgtcgaaaatcagcactcgtgaaattgcagaaatttcaatgaaaaattctatgctgatattgactgataatatagatgaagcattaagtatctcgaatgactatgcacctgagcacttaattattaactgtaagaatgcagaagaattgcttccaggaatacaatcagcaggttctatattcctcggtgaatggagtcccgaatcagcaggagactattgtagtgggacgaatcatgtcttacctacagcaggctttgccagatcctatagcggcttatctgtagatagcttttgtaaatcaatatctgtacaaagcttatctaaagaaggattggagtcaattggcgatgatataatcaacctagcaatggctgaaggactagaggcacatgcaagagctgtcgaagtgaggattaagaaatga

SEQ ID NO: 206053 - DNA, 1267 bp, Unknown
  Bacterial polypeptide expressing nucleotide sequence isolated from the Sargasso Sea
aatgataaaagtaattaactgtaataaaaaaaactacttaaataacttaactaaatttttagatttaaggagatctgaaaaaagaattgaaaataaaactatatctaacattttaaaagatataaaaaaaaataaaaataaaagtctttttaaatacgagaaaaaatttagcaaaaatagtcaaattaaaccaagtattaagcaaattaacaaagcaattaaatcattagatccaaaaattaaaagagctatagattttgcttacaaacgtatactcaaattccataatttacaaaaaactaaagatattttctataaagataatcttaataataaaattgaatataaatatgtaccaattcaatcggttggcatttatgttccagcaaacttaccatctacattattgatgaatgctatcccagcaaaaattgtaggtgttaaaagaattgtactagcaaatccaaaaaataatggaaaacttaatcctgcagttttatatgctgcaaaaaagttaggaataaaagaaatttattcaatgggaggtgcacaagctattggcagtttaacttatattcaaaaagtaaataaaattgttggacctggtaatatctttgttgctggtgctaaaagacaagtttttggagatgtaggtattgaaggaatgattgcaggtccttctgagattacagttttagcagatagtaaaactaatttaaatcaaattactacatctattattgggcaagcagaacatgacgcaaattctcaatgtatattaatcactaaaaattctaatttgatagaaaaatttaagaaagatttagaattaaaattaaaagatattccaagaaaaagtattgcatctaaaagcattaagaataacggactaattttaaaagtaaatagtgatagacaaattattgatgcaattaatgagatagctcctgaacacttagaaataaatgttagcaattataaaaagtataaagataaaatttttaatgcaggaagtatttgtataggaaaatattctcctatggcattaagcgattatgctgtagggacaaatcatgtattaccaactaattcgtcagctaaattttcatcagggttaagtttaagtgaattttataaaaaaattagccttataactctttcaaaaaaaggtgttgagaaaataggagaatacgctacacatctcgctgagtatgaagaattaaaaggtcatgctttgagtataaaatctagaataaataaggagtaa

SEQ ID NO: 206054 - DNA, 1285 bp, Unknown
  Bacterial polypeptide expressing nucleotide sequence isolated from the Sargasso Sea
aatgaaaatactaaatagcactaataagaattttagtaattctttaaataaattactttcactgcgaaaaaaaaaagttcaatctagttctatctcagtgaccagtattgttagagatgtgaaaaaaaatggtgataaagctttattgaaatatgaaaaaagatttaatcaaaacagaactattgttcctacgtcaaatcaaattaataattcaataaaatctttagatcaaaaagtaaaaaaagcaattgatattgcttatgatagaatttacaaatttcattctcttcaaaaattcaaaaatatttcttttatagataagtttaaaaataaacttgaatataaatatttaccaatagactcagttgcaatatatgtccctggttcttctgcatcttatccatcaagtgttttaatgaatgctgtaccggcaattgttgctggtgttaaaagattaataatgattaaccctggttttaaaggaaagcaaaatccagcagttttgtatgcagcaagaaaatgtaaaataaaagaaatttattctattggtggtccatctgcagttgctgctgctgcctacggaacaaaaaaaattaaaaaggttgataaaattgttggtcccggaaacgcttacgtggctgcagcaaaaaaagaggttttcggagatgtgggcattgaaggtatgacagctggtccttcggaggtaactattgtttgtgataaattttcaaatcctgaatgggttgcaagtgatctaattggtcaagcagaacacgataatcttgctcaatgtattttaatttcaaaagataaaaaattattagaaaaagtaaaaattgaattaattaaacaattaaaaaaaattccaagagtatctgtagctagaaagagtttaaatagtaatggaattttgatgtatgtaaattcagacaaaaaaattattgaaattgtaaataaaattgcaccggagcatttagagttaaatattcaaaactataaatcttatgtttctaaaattagaaatgctggatctatatgtttaggaaaatatgctgtaatggcaatgacagattataatgttggttctaatcacgttctcccaacaaatggatctgcaaaatattcgagcgggattagtgtgaatgaattttataaaagaatttcttacataaacctatcaaaaaagggtattgaaagtcttggaccatcagttataacacttgcaaattatgaagggcttgttggacatgctcaatcagtaataaaaagaattaggagaaaataa

SEQ ID NO: 206055 - DNA, 1163 bp, Unknown
  Bacterial polypeptide expressing nucleotide sequence isolated from the Sargasso Sea
aaaaaatggcgataaagctttattaaaatatgagaaaaaatttaataaaaattcagtaatcaagcctaactcaaatcaaattcaaaaatcaattcaatcattaaattctattgtaaaaaaatctatcgatactgcttacaacaggatttataaatttcattcattacaaaagtttaaaaatatttcttacactgataaatttaaaaataaacttgagtataaatatttaccattagactcggttgcagtttatgtacctggttcaactgcatcctatccatctagtgtgttgatgaatgcaattccagctattgttgctggtgtaaaaagaatagttatgatcaacccaggctataaaggaaaacaaaatcctgcagtattatatgctgctaaaaaatgtaaaattaaggaaatttattcaattggtggaccgtctgctattgctgcagtctcttatggaacaaaaaaaattaaaaaggttgataaaattgtagggcctggaaatgcttacgttgcagctgccaaaaaagaagtttttggagatgttggaattgagggtatgactgctggtccttctgaagttacaatagtttgtgacaagcattcaaatccagaatgggttgcaagtgacttaataggacaggcagaacatgatgatcttgcacagtgtatattaatttcaaaagataaaaacttattaaataaagttaaaactgaaataattaaacaattaaaagaaattccaagagagtctattgcaaagagaagtttgcaaaataatggaattttaatgcatgtaaattcagataaaaaaattatcaatattgttaacaaaatagctccagagcatttagagttaaatgttaaaaactttaaatctattgtttcaaaaataaaaaattcaggatcaatttgtttaggaaaatatgctgttatggctatgacggattataatgtgggttcaaaccatgttttaccaactaacggatcagcaaaatactcgagtggtataagtgtaaacgaattctacaaaagaatttcatacataaacctatcaaaaaagggtattgaaagtcttggaccatcagttataacacttgcaaattacgaaggcctggttgggcatgctcaatcagtattaaaaagaataaggagaaaataaa

SEQ ID NO: 206056 - DNA, 340 bp, Unknown
  Bacterial polypeptide expressing nucleotide sequence isolated from the Sargasso Sea
tctattgatttaataaattcaatcgctcccgaacatcttgaaatagcaataaataatccaaataagtttctaaaaagaattaaaaatgctggttcaatatttttagggaggtatacacctgaagcaataggggattatgttgctggtcctaatcatgttttacctacaggtggaactgccaaattttcaagtggtttaggggtggctgatttcatgaaaagaagtacatttatagagtgtaagaaaaataatttatttctattaagagagtatgcaagtattttagcttcattagaaggcttggaagctcacaagatttctatggatataagaaaataaa

SEQ ID NO: 206057 - DNA, 631 bp, Unknown
  Bacterial polypeptide expressing nucleotide sequence isolated from the Sargasso Sea
aaacaattgtatggaaaagttggtatagatttactagcaggaccatctgaaataatagttgttgcaaataacaataataatccagattgggtagcttcagatctaatagctcaagcggaacatgatgaaaatgcacaatcaattttaattacggatagtaaagattttgcaactaaagtcttaagttcaattaaaaaaattaaaaaagatttatcaaaaaataaaataattgaaaaaagtttaaataataatggaattattgctttggtcgataatatagaacttgctacagaaatcataaattttgttgcaccagaacatttacatattcacatttctaataataaaaaattattatcgaatataaataatgctggcggtatatttttaggtgaatactctgtcgaagcttttggtgattatattgtaggaactaaccatgtattgccgacatcaggagcggcaaaattttcatcaggtctaggtgttttagattttatgaaaagaacctctgttgttgagatgaataaaaaatcttttaatgctctttcagaagatacgcaaaaaatgtcaggacttgaaggtctagatggtcataaattatcagttaaaattagacaaaagaaataat

SEQ ID NO: 206058 - DNA, 949 bp, Unknown
  Bacterial polypeptide expressing nucleotide sequence isolated from the Sargasso Sea
aatgattaatatattatcttcaaaatcaaagagttttaaacaacagcttttaagatatctagactctcgaaaaccaaataatgagtctaaaataagggtcgttaaaaaaattatttctgaggttaaaaaggaaaaagatcaatctttattaaaatatgaaaaaaagtttagtaatttgaaaaaattgaataaaaaagatcttttttttaccaaatcagaaatggataaaataattaaaagattagatattaaaacaaaaaattcaattaatattgcttttaaaagaatttataaatttcacaaaaaccaaaagtttaaggattttaaagttttagataattataaaaattcactttcttataggtcaatgcccttagaaaaagttggagtttatgttccaggcggtgttgcaaattatccaagctctgtcttgatgaattgcattcctgcaattgttgcaggagtaaaaaaaatttatctaaccgctccgtgtataggaaaaaaaataaatccaggagtaatatatgctgcaaagaaatgtaaagttaaagaaatttataaattaggtggtgcacaagcaatcgctgcttttgcgtacggaacccaaacagtaaaaaaagtagataaaattgttgggcctggaaacgaatatgtcgctttagcaaaaaaagaagtttttggagaggtagggattgatatgtttgctggcccttctgaggtaactataatagctgacaaatattctaacccagactggattgcagctgatttattagctcaagcagaacacgacgagatgtcacaatcaattctcataactgataataaaaaaataataatcaaagtaaaaaaagctttaggatctcaaattaaatttttaccaaaaaaaagaatagctacaaaaagtttaaaaaaatttggaattgcagttttagctaaaaattctaat

SEQ ID NO: 206059 - DNA, 556 bp, Unknown
  Bacterial polypeptide expressing nucleotide sequence isolated from the Sargasso Sea
cttgtccgagagccgatctctggccttccctctgcgctgcgtccgggatccacagcaggctgaggctgagttgcaacggttgacgcgccggacccagaccagccaacaaagggatgttcaggaccgggtcgacgccatcctcaaggcggttcgtgaacggggcgatgctgccgtgtgcgacttcacggaacgcttcgacggattccggcccgatccagttgcggtccccaaacaccagctggaacaagcctggaaggccctgccggagaacctgcgcgatgcgctggaactggcccatcgccgcatcagcgagtttcaccagcggcagcgtccggaggacatccagatggaaggggcccacggcgagcagttgggacggcgctggcgaccggtgcagcgggcaggtctctacgtgcccggtggacgggctgcttaccccagcaccgttctgatgaatgcggtcccggccagggtggccggcgttgaacaggttgtgatctgctcccccgccgggtccgatggtcaggtgaatcccgtcgtgctggcggccgcgcat

SEQ ID NO: 206060 - DNA, 346 bp, Unknown
  Bacterial polypeptide expressing nucleotide sequence isolated from the Sargasso Sea
gtttgaaatagtaaatgagcttgctccggaacatctagaggtcctaaccaaagatccttttgatgatttacatcggattcgtaatgcaggggcaatttttcttggtccaaacacgcctgaaccagtaggggattattttgcaggaccaaatcatactttacccacttcgggatgtgctaaattttcttcgcctcttggtgttcaggactttgtgaaaaccagttctattatcagttattctgcagaacgtctaagaagtcagggagagcaaattattcgttttgcggaagaagaagaactattttcgcatgctgcagcaattaaagcacgtatggattttatttaa

SEQ ID NO: 206061 - DNA, 1030 bp, Unknown
  Bacterial polypeptide expressing nucleotide sequence isolated from the Sargasso Sea
aagctagccaatatcgtattgaagcatttcacaaacatcaattaccttgaagattcaatatacaaagataatgatgatgtaagcataaagactaaatggttaccattagatagtgctggaatttatattcctggtggaactgcttcatatccaagctctgtattaatgggcgtgataccagcgcaagtagctggggttaaaaaaatatatgccacagttccttgtccaaataatgagatagatccgcttgttttagctactttggatttatgtggaattgaagaaatttataaaattggaggcgctcaagcaatagctgccttaacatggggaactgaaactgttcaaaatgtagatataataattggccctggaaataaatgggtagctgaggcaaaaaaacaagctctttcaaatattaatatcgatatgctggcggggccaagcgagatattaattttagcagataaagataacagagcagattgggttgctgcggatcttttatctcaggcagaacatgatatttctgcgcaagctattttaattactgattgtgagaactttctcgaaagtgttaataaagaattattaatacaaacagaggcacttaaaagaaaggatatagtcaaaaaaagtattgctgataatggttatggaattcttgtaaaaaacattcaggatgcaattggcattattaacgatatagctccagaacatttatcacttttatgtaaagaaaatgaatatatcgaaaaaaagataactagtgcaggagttattttttcagatgaatggacgccagagtctatgggagattatataattggtccaagccatgttttacctactaacggtatggctaaaagacaatctggtctatctgtttttaattttttaaggcgccaatcaacgatatcaagcaccaaaaaaacaataaacaaacttggtccatcagcaattttattggctgaatgtgaagggcttgatgcccatgcaaattctataaaaattagaataaaagattaat

SEQ ID NO: 206062 - DNA, 1144 bp, Unknown
  Bacterial polypeptide expressing nucleotide sequence isolated from the Sargasso Sea
aatgaagatcataaatgataaaaaagaagctattgaagaattaaaaaggatttctactcgaactaattcagataataataataggataaataaaattgttgaagaaatacttcaagaggttaaattttatggagatatagcggtagaaaaatataccaaaaaatttgatggtttcgaccctttccctatgcaagtgaagagggatgaaataaaaaatgcatgggatgaactcgataagaatttgaagcactcacttgtggcagcgcataaaagaattcaaaaattccatgagaaagaaattcctcaatctttcactataaaaggtgaatatggtgataccgtccaaagaagatggagaccagtaaaaaatgcagggatttatattcctggtggtagagctgcttatccaagtactgtattaatgaatgctatacctgcaaaagtcgcaggagttaaagaaattacaatggtatctcctggaaatcgagaagggaaaataaacaaaactgttttagctgcagctcacttatcaggaatcaataaagtttttcgaattggaggtgcacaagcgattggggcattagcatttggcacaaatcaaattaataaagttgatgttattacaggtccaggtaatatctatgtaactactgctaaaaaactaatttatgggtctactggaattgattctttagctggtccaagcgaaatattaatcattgcagatgaaacggctcaaagctcccacatagcatctgatctacttgcacaagcagaacatgatcccttggcttcttcaatacttcttactacttcaaagaatcaagcaaaggaagttttagagaaagttcatctaaaaatagatcatcatccaagaaaagaaatttgcatgcaatcaataaaaaattggggattaattgttatttgcgagaattttgaatcatgtattgaactaagcaatacctttgctccagaacacttagagattttagctttagatacaaaaaagattttgaatggtatagataatgcaggagcaatttttttagggaaatggacccctgaagctgttggagattatcttgcgggaccaaatcatactttacctacatcaggaaattctagatttagtggttcactagga

SEQ ID NO: 206063 - DNA, 1384 bp, Unknown
  Bacterial polypeptide expressing nucleotide sequence isolated from the Sargasso Sea
atgactttggtagctgctcccgcccgtctgtccaccactgcggccacttttgaggctgattttgcagcccgcctgcattggtctgccgacaccgatgcggccatcgagcagcgcgtggctgacatcctggccgacgtgcaaaagcgcggcgacgcggcggtgctggagtacaccgcccgcttcgacggcctcagcgcccccaacatggccgcgctggagctgacccaggccgacttcaaggccgcgttcgacgccattccacaggctcagcgcgacgccctgcaggctgcagcgaagcgcgtgcgcagctaccacgaagcgcagaagaaggcctcgggcgagagctggagctaccgcgacgaagacggcacgctgctgggccagaaggtcacgccgctggaccgtgtgggcatctacgtgcccggcggcaaggccgcctacccgtcgagcctgctgatgaacgcaatcccggctcatgtggcgggcgtgcaggaaatcatcatggttgtgcccacgcccgtgcgcggcagcttggcaaccggtggaacgggcgagggcacctcgacgaagggcgagcgcaacgagctggtgctggcagccgcttacgtggccggtgtgacccgcgccttcaccatcggcggcgcccaggccgtggccgcgctggcgtatggaactgagaccgtgcccaaggtggacaagatcaccggccccggcaacgcctatgtggccagcgccaagaagcgcgtgttcggcaccgtgggcatcgacatgatcgcgggcccgagcgaaatcctggtgctggccgatggcaccacgccgcccgattgggtggcgatggatctcttcagccaggccgagcatgacgagctggcgcagagcatcctgctgtgccctgacgccgcctatctcgacgccgtgcagcgcgagatcgaccgcctgctgcccaccatgccgcgtgccgagatcatcgccaagagcctgactggccggggcgcactgatcctgacgaaggacatggaagaagcctgtgcgatcagcaaccgcattgcgccggaacacctggaagtgagcagcaccgacccgcaccgctgggagccgctgctgcgccacgcgggcgcgatcttcctgggggcctacacctccgaaagcctgggcgactactgcgcaggccccaaccacgtgctgcccaccagcggcacggcgcgcttctcgtcgccgctgggcgtgtacgacttccagaagcgcagcagcctcatcgaggtgagcgaggccggtgcccaggtgctgggtaccattgccgccgagctggcctatggcgagggcctgcaggcccacgcacaagccgctgagatgcggctgaccacgcccgtcaagccgcgctgat

SEQ ID NO: 206064 - DNA, 720 bp, Unknown
  Bacterial polypeptide expressing nucleotide sequence isolated from the Sargasso Sea
cagacagcgttcctcaagtagataagatttttggcccgggtaacagctttgtgactgaagctaaacagcaagtaagccaacgtgctgatggtgcagctattgatatgccggccggcccatcagaagtgttggtacttgctgatgagttcgcaaaccctgagtttgtagcggccgacctgctttcccaagccgagcacggtccagactcgcaggctattttggtgtctaacagcgctacacttattgaagaagcaaaagccgcggttgaacgtcaattagcaaccctatctcgcgctgagattgcccgccctgctatggaaaatgcgcgttatattttggctgattccattgagcaagccattgaagcaagtaacgcctacgctgctgagcacttaattgtacaaatagagaatgcccgtgattatttgccaaaaattaaatacgcaggctctatattcctaggcccgtggtcaccagaatctgcaggtgattacgcgtcgggcactaaccacgtactgccaacctatggctatgctaagaattactctagccttggattattagactttatgcgtcgctacactattcaagaactaagcgcagacggcatgcgtaatttaggccctgcgattatggcacttgcagctgccgagggcttggatgcacacgaacaggccgttgcacttcgcatgcaggcacttaagcaaggagacgcctaat

SEQ ID NO: 206065 - DNA, 427 bp, Unknown
  Bacterial polypeptide expressing nucleotide sequence isolated from the Sargasso Sea
gctggcagatcacccccgccgggagatctgcgaagcctctttgcgggactgggggctggtggtggtctgcgaagacctcgagagctgtgcccgcctcagcgacagcttcgcccccgaacacttggagctgctggtggagcggcccgagcccctggcggatcgcattcagaacgccggagccattttcctgggcccctggtctccagaagccgtgggggattacctggcaggcccgaaccacacactgcccacctgtggagccgcgcgcttcagcggggccctgagtgttgagaccttcatgcaccacacctcgctgatcggtttcaaccgggctgcactggaagcaacgggttcagctgtgcaggagctggccaccagtgaaggcctgcacagccacgctgaatcggtgcggcggcgcctcagctga

SEQ ID NO: 206066 - DNA, 1222 bp, Unknown
  Bacterial polypeptide expressing nucleotide sequence isolated from the Sargasso Sea
tttgtctttaagagaagaagaaacaagctctaaaatagacgatgatgtaaaatcaattattaaagacataaaacaatatggtgatgataaagttataaaatttgcaaaagattttgatcaaattattttaaaaaaaaatgaaataaaattaacaaatttaaaacaattttattctttagaaaaattaaataaagaaactgttgagagttttagattagctatacaaaatgtaagaaaatttcatgataaacaatatccaaacgattttgaaatttcaaatatggatgctaaattaaggtcagtttggaaaccaatggactcggtaggtctttatgtgccgggtggtaatgctgtttatccatcatcattaattatgagtgtagttccagcacaaatagcgggagtagagagaatagtttgtgtaacgcctccgtctaataatttaaatccttatattgcttttctgttagacgaattaagtatcacagaagtttatcaaattggtggtgctcaagcaattgcagctttaacatttggcactgaaacaattaagccagttagtaaaatttttggtccaggaaatgcctatgttgcctctgcaaaaaaacaggtttttgggaaagttggaatagacttagttgcaggcccttcagaaattattgttgttgcagatgaagaaaataatccagaatgggttgcaagtgatattatggctcaagcagagcatgatgaaaatgcacagtcaatattgattacaaatagcaacacttttgctaaaaaagtattggagcatattgaagatcttaaagaaactttgagcaaaaaaacaacagttgagattagtttgaaaaaaaatggcttaatagtgataatggataatttagaattatcatataaaattattaataaaatagctccagagcatttgcaccttcaatcaaaagaaaaagagattatttttaaaaatgttaacaatgctggaggaatatttatcggtgattattcaactgaggcatttggtgattatgtagtgggtacaaatcatatcttacctacttctggagcagctaaattttcatcgggtttaagcgtaattgatttcatgaaaaaaagctctgttgttgaaattaataagttaagttataaaaatttatcaaagcacgttgaaaatatatctgatgttgagaatttagatgctcataagttgtcagttacgattaga

SEQ ID NO: 206067 - DNA, 1282 bp, Unknown
  Bacterial polypeptide expressing nucleotide sequence isolated from the Sargasso Sea
atggaagtcaaactatttgaaaattatcaggattaccttgctcaacttccctccacagtcacagaggatacctcctcaaaagtgtcagagattcttgaagaagtgcgaaatcatggtgattctgcgcttaaaaagctgaccttccgatttgatggaatagatctcgattcaatccgggtccagcctgaagatctccaatcagctctccaggagttggatcccgaactgcgtaaggtcttggaacaagctacggaaaatataagaacattccatcaacgtcagaaaacggaaagccagctggaattcagtgacgatggtacgatgctcggttggaaaatcagtcctctcgacagtgtgggtatttatgttccaggaggacgggccatctatccctcgacgttgttgatgaatgtcatcccggctcaggtggcaggagtgtcaaggatcgcaatggtttcgcctcctgacacaacggggttgcctgcaagcctggttcgggcgtccgcagcattactcggagttgatgaactttattctctgggaggcgcccaggcggtagcagcattagcctgggggaccgagacggttcctgcagtggtcaagatcaccggaccgggcaatgcatttgttgctgaagcgaaacgtcaggttttcggtaaggttggtatcgattcctttgccggaccaagtgaaatcatgatcgtttgtgatcgtgaagaaacccctgtcgagtatcttgttagagatcttctttcccaggcagagcatgaccctgaagcaggagcgatcctggccactacgtcccgagatcaggctttaaatgttaagaatcggcttcaagaattggttcccactttaccaagaagagaaatcattgaagaatcctttgcctcacgttccgcactgattgtctgtgattcaaaggaggagtgttttgacgcggtgaatgaaatggctccggagcatttggaacttctaaccgaagatccatatcaggacctgcatcgtgttcgtaacgcgggtgcgatctttgtcggtcctaatacccctgaagccgtgggagattatttcgcagggccgaatcataccctgccaacatcaggatgtgccaagtttgcttcccccctgggagttcaggactttaccaaatcaagttctgtgcttgcttattctgaggaacgtctccaacgtgaaggttccgcaatcatacgatttgcagaggaggaaaaactttatgcccatgcggaatcgattcgcgtgaggatgaaaacaacggagtagg

SEQ ID NO: 206068 - DNA, 1300 bp, Unknown
  Bacterial polypeptide expressing nucleotide sequence isolated from the Sargasso Sea
atgaagctaataaatcgatcaaaatctaactcctctataaattggaaatcaaacattattgatagccaggatatagaacaaactgcgcttaggtataaagaattagttctaaaaaatggaactaaggcctttaatgagataaacgaagaattaaatcttcctaaaattaaatcatttaaagtacgaaaatcagaaattaataaagccgagaatttaattacagatgatttaaaacaagcaatattaaattctgccaacaacatcaaaataatttgtgaaaatgaaaaaaagagtttggtttcatcatctatagaaactacgaaaggaatatctatttggagagaatttagaccaatagaatcagttggaatatacgttcctggaggaacagctcctttaatttcatcattcttaatgcagctaattccagcttccattgctgggtgtaaaaatataatagtttgtactcccccatcttcatcaggatcgatagctccagaaatattatggatagcaaaaatatttggcatttcttctatatataaggttggtggttctcaagctatatttgcaatggcatatggaacaacaatcattccaaaggtagataagatatttggacctggaaatgcctatgtaaacgctgcaaaaaaaatgtgttctgaggatgtggctattgatttacctgctggaccaagcgaggtcatggttgtatcaaatgatatttctaaggttaatttgatagcagctgatgttctgtctcaacttgaacatgattcagcagctagggcttttgttctttcaaaaaatttaaacttattaagtaatgtaaaaaaagaaatcaaaaaacaacttgcctcgctctctagacaaaatattctcaaagaaagtttatctaacttaatgcttgttaaatataaatcatttaatgactgtattaatttaataaatgaatgtgctcctgaacacttaattttattggatgatgattacgcccttccattagcaagaattaataatgctggatctattttttgtggttccttgagtcctgaatcttttggtgattattcctctggaacaaatcacgttctaccaaccaatggtatggcaaaagtttattcaggtttaggtattagagactttggtaaacagataagtgttcaaactgcttcatctgaaggatttttaaatatcaaagatactgtaatttctatggcaaacgctgaaaatcttgatggtcatgcaaaagctgtaaaaattcgagaaaatcttgcaaaccaaaacactcgttcaagaa

SEQ ID NO: 206069 - DNA, 1081 bp, Unknown
  Bacterial polypeptide expressing nucleotide sequence isolated from the Sargasso Sea
atgttcaaaagtgagttagatatatctagtaaaagatttgaatcagacctatcaaatttcttgactttaaaacaatcagttgatgaggaggttgttgcttctgtaactaaaatactaaaagaagtttcatctagaggagattcagctcttatagaatttacaaaaaaatttgatgaccatatgttagaaaatttttttctttcacaagatgaaattaatgctagttttaaaaatataaataaagaagttataactgctttggaggttgctttcgagaatattattcaatttcattctaaatgcagagattcattaaacctagaacccatagactcagaaatctcaagaacatttagaccaattagaagtgctttactttatgtcccaggtggcaaggcttcatatccttcttctgttttaatggctgcaggacctgcaatagcgtctcaggttaaagatttatttctatctactccatctatagatggagtagttaatgatctgactgttgctgcagcaaaaatagctggaatcgagaaagttgctaagttgggtggtgcccaagctatagcagcattttcttatggaacagagtctattcctaaagtcgacaaaatagtaggacccgggaatgcttacgtagcagaagctaaaagacagttatttggcactgttggtatagattcaatagctggaccatctgaaattatagttttagcaaatgaaacttcttcaccagaaatagtggcttgggatcttatggctcaagctgagcatgatcaagacgcaagttcaatcctaatctgtaactcaaatgaagttatcgaagaaataaagcaaatcatagagaatgaattgccaaagcttgaaagagctaaaattataaagtcctcattcaccaataatggtcttattataaaagttgaatctcttgagcaatctatagaaattataaatagattctctccggagcacttacatttagcttttgatggtaatgagattgacgcagatgatttaatagcaggaatagtcttactaggcagtgactctgcagtttctttctcagactatgttttag

SEQ ID NO: 206070 - DNA, 1288 bp, Unknown
  Bacterial polypeptide expressing nucleotide sequence isolated from the Sargasso Sea
aatgattaagatattaaatattaaaaatagaaattttaaaaaaaaattagatgaatcattaagtaaaagaagaaataaaattcaaagtagtaatatctctgttaaaaaaattatccaagatgtaaaaaaaaatggtgataaatcaatattaaaatatgagaaaagatttaacaaaaataaatttattctaccaaataaaaaaactaataataaaaatatctcaggtcttgatagcaaaatcaaaaaagctattaacttagcgtatgagagaattttgaaatttcattctttacaaaaattcaataatatttcatatcaagataaattaaaaaataaattgaattataaatatcttcctattaactctgtagggatttatgttcctgggtcatctgtttcttatccatccacagtattgatgaatgcaatccccgcgatagtagcaggagttaaaagaatagttatgttaaatcctggaaaaaaagggatattagacccagcagttttgtatgcggcaaagaaatgtaatatctctgaaatttattcaataggaggacctgctgcaatagcaggattagcttttggtacaaaaaaaattaaaaaagttgataaaattgttgggcctggaaatatttacgttacctcagctaaaaaagaagtatttggtgaagttggcattgagggaatgatagctggaccctctgaagtaacagttgttgcagataaatattcaaaccccgaatgggttgcaagtgacttaataggacaagcggagcatgatgaactcgcacaatgtatattaattacaaaaagtgatgctttattgaataatgtgaatgaatgtcttactgcccaactaaaaaatttaccaaggtctaaaactgcaaaaaaaagcctatctacaaatggaatattaataaaagtaaatactgataaagatataataagtatcgtaaataaaatagctccagagcacctagagttaaatattaaaaatcataaaaaaatttctaataaaataataaatgctggatcagtttgtttgggtaaatactcggttatggcaatgacagattataatattggttcaaatcacattttaccgactaattcttcatcaagattctcaagtggagtatctgttaatgatttttataaaagaatttcatatataaatctatcaaaaaagggtattgaaactcttggcccttcagttataactcttgcaaattatgaaggtttagttgggcatgctgaatctgtgaaactaagaattaggagaaaataa

SEQ ID NO: 206071 - DNA, 913 bp, Unknown
  Bacterial polypeptide expressing nucleotide sequence isolated from the Sargasso Sea
agctgcttatccaagtactgtattaatgaatgctatacctgcaaaagtagcaggagtacaagaaatcataatggtatctcctggaaatactgaagggaaaataaataaaactgttttagctgcagctcacttatcaggaattaataaggtttttagaattggaggagcccaagcaattggtgctttggcatatggcacaaatcaaatcgataaagttgatgttatttcaggcccagggaatatatatgtaactacagctaaaaaactaatttatggctctacaggaatagattccttagctggtccaagcgaaatattaatcattgcagatgaaacagctcaaagtacacatatagcatctgatttactagcacaagcagagcatgaccctttagcttcttcaatacttctgactacatcaaaggaccaggccaaagaagttttagaagaaatttataaaaaaatagataatcatccaagaaaagaaatttgtatgcaatcaataaaaaattggggattaattgttatttgcgaaaatcatgaatcatgtattgaactaagcaataactttgctccagagcacttagaaattttggcttttaatccaaaaaagattcttggagatatagataatgcaggagcgatatttttagggaaatggacgccggaagctgtgggagattacctggctggaccaaatcatactttgcctacatcaggcaattccagatttagcggttctttaggagttgaaacttttatgaaaaacacttcaataatagaatttaatgaagaaagtttaaaagttaacagtcttgatattattaaccttgctaaaagtgaaggcttacatagccacgctaattcagtagaaataagatttaaagattacccaacttttgaaggagtgtaa

SEQ ID NO: 206072 - DNA, 742 bp, Unknown
  Bacterial polypeptide expressing nucleotide sequence isolated from the Sargasso Sea
tattgcgttggtggcgcgcaagccatcgccgcattggcctacggcactgagtccatcccagcggtggatgtgatcacaggaccgggcaatctttatgtgaccctcgccaaaaaaactgtgtatggccgagtgggcatcgattctctggccgggcctagcgaagttctcgtgattgctgatgaccgagcctcagccgagctggttgctgcagatttgttggcgcaagctgagcatgacccactggctgcagcgatcctgctcaccacaagtcccaggctggcgcaagaggtacctgaagcgatctcagcccaactcgaggaccaccctcggcgtgaagtgaccgaagcatcaattcgggactggggcttgatcgtgctctgcgattcacttgaacaagcagcccagctctctgacagctttgcgccagagcaccttgagttgctggtgcaggaacccgctgcgttggccgaacggattcaacaagctggggcgattttcttaggggagcacacccctgaagcagccggggactatctggccgggcccaatcacaccttgccgacatctggaacagcccgcttcgcaggagccctgagcgtggaaaccttcatgcgccacaccagcctgatcaacttcaacaagcaagcactggaggcaaccggggccgccatcatggaactggccgcccacgagggcctccatagtcaccgggagtcagtacggcgacgccttcagagctagg

SEQ ID NO: 206073 - DNA, 276 bp, Unknown
  Bacterial polypeptide expressing nucleotide sequence isolated from the Sargasso Sea
aaattaagcatgctggagcgatttttttggggtgttacacacccgaggctataggtgattatgtcgccggtcctaatcacgtgttgcccaccgataggacagcaaggttttcatctgggttgtctgtgttcgattttattaaaaggacaacttttgtgaaatgcgatctacagggcttgaagaaaattgggccaccggcaattactctggctcaggcggagggtcttccggctcacgcagaatctatcaaagttcgtcttaatagctcgggatgaa

SEQ ID NO: 206074 - DNA, 940 bp, Unknown
  Bacterial polypeptide expressing nucleotide sequence isolated from the Sargasso Sea
gatgacgaaaaagattaagagccgagaccctaacttctacgacgcttttaaaatacttttgggagcgagagcaactagtttaagtgatgctacacgggtttctgcagatattattaaaaaagttagaaaaaatggtgataaggcactcattaaacttactaaaaagtttgatgggcttgatcttacgacaaaagatttagttgtagatttaaatgaaattgacgaggcgaccagcaaaatttcgcccgatgaatatgactccttgagatttgctgctgataggataacgtcttttcatttgagacaaatgccagaaaaatttgagtatgtggatgatgcgggaataaaaatggggatgagttggagccctatagattctgtcggtttgtatgtgccaggaggtacggcatcttacccaagctcggtattaatgaatgctatacctgctcgagtggcaggcgtaccgcgacgagtaattgtagtgcctcaaacccgcaatgttataaacccgttagtccttgttgcggcaagattgtctggggtcgaagaaatttatagagtaggcggagctcaagccatagcagctttggcttacggtacagaaacaataacgtcggtggataagattgttggaccggggaattcttttgttgcggcagccaagaaattagtttacggagcagtcggtattgactcaatcgcgggcccatcagaaattttaattgttgcagactcaatgaacgatccgaaatggatagcgtacgatttattggcgcaagcagagcatgatcaacttgctcgttcaattttaattacagataatgaaaattttgctgagaaggtgctgacatctgtagagaacattttatcctcattgcaaagatcagaaattgcgcgggctagttggggaaatcagggcgctgtaattatagttgattct

SEQ ID NO: 206075 - DNA, 307 bp, Unknown
  Bacterial polypeptide expressing nucleotide sequence isolated from the Sargasso Sea
atgaaaaaatatattgttattggaaaccctatagaacactcgttatcaccaaaacttcataattattggattaaagaaaataatattgacgccgtctacgataaaaaaagaattgatcacagtgagctagaaaatattatttttgaagttaaagaaggtaaaataagtggaattaatgttacagtaccttttaaaaaagctgcaattccttttttagatgaattaagtaatgaagcaaataaaacacaatcagttaatacaatttatctaaacaatggaaaaataattggccataataccgatgtgc

SEQ ID NO: 206076 - DNA, 715 bp, Unknown
  Bacterial polypeptide expressing nucleotide sequence isolated from the Sargasso Sea
atgaaaaaatatttagtaataggaaacccaattaatcattctttatcccccgagttacataattactggataaagcaaaataaaatttctgctgtttatgaaaaaaggttaattgatattcaggatatagaaagcattcttgccgatctaaaaaatgataaaatctctggtataaatgtaactgttccttttaaaaaagctattataccttacttagacaaattatcatctacagcaaaagaaactgcctcggtgaatacaatttacaaaagtaataatcagctttgcggggataatactgacattgacggttttagatattctttggagagaatgaaatttaatgttaaaggaaaaaaagctttagttataggtgcaggtggtgttgccccctcgataatttctgctttaaatattatgggagcaacccaaattaatttaatcaataggactaaaaaaaaagcagaggatttaaaaaagcaatttccctttttagaaatatttgattggggcgaaaccatagtttcagatattattataaacgccacaagtataggtctccaaaatgatgataaaataaacttagattattcaaaaattggaactaacagactgtactatgatgttatttataacccaacaaagaccaattttttaaaacaaggcgaaaaatttgataaacaagttgaaaatggaaaatttatgtttatttacc

SEQ ID NO: 206077 - DNA, 229 bp, Unknown
  Bacterial polypeptide expressing nucleotide sequence isolated from the Sargasso Sea
aatgaaaaaatatcttgtaattggaaatcctatcgaacattcactttcacctaaattacacaactattggtttgaaaaaaataatattgatgcaaattatgatagaagaaaaacagataagagcgaaattcaagagattgtaaatgaaattaaggataataaattagatggaataaacgttactgttccttttaaagccgaatgtcattccttatttagatacgcttag

SEQ ID NO: 206078 - DNA, 352 bp, Unknown
  Bacterial polypeptide expressing nucleotide sequence isolated from the Sargasso Sea
atgaaaaaatacatagtaattggaaaccccatagatcactctctttcacctgagctccataattattggataaaaaaaaataatattagtgctgtttatgaaaaaaaaaggcttgaggaagataatttaaagaaaattatttctgaagttaaaacagaaaaaataagcggaattaatgttactgtaccgtttaaaaaaacagttattccatttttagatgaattaagtactgaggcaaacgaaacacagtcagttaatacaatttttttaaggaatggtaaaacaattggtcataacactgatgctgctggttttgaactatcaattaaatattccaaatatgattcttaaa

SEQ ID NO: 206079 - DNA, 607 bp, Unknown
  Bacterial polypeptide expressing nucleotide sequence isolated from the Sargasso Sea
atgaaaaattttttagtcataggaaatccaatagatcactcattatcaccaaaactacataattattggtttaaaaaaaataatatccaagctgtttatgaaaaaaaattaataaataaagaaaatataaaaaatatatttaataaaataaaaaaaagagaattaaatggaataaatgtaacagttccatttaaaaaatcagtgataccttttgttgaaaaattaacacctgaagctaataaatcaaattcagtaaatactatttatttagaagataataaaattataggacacaacactgatatagcaggatttgaattaagcataaggcatactaaatacgaaattaaaaataaaaaaatttttatattaggggcaggtggtgttgtttcttcaattattttaggtttaaaaaatatgggatgttctaagatttttataagcaacagaacaacacaaaaagcaaaagatttaaagaattatttcaatgatttagaaataattgaatggggcaaggttccagaatttgacatgatcataaatgccacaagcttaggcctaaaaaaaaatgatgagataaaattaaattacaaagaaattggatcca

SEQ ID NO: 206080 - DNA, 764 bp, Unknown
  Bacterial polypeptide expressing nucleotide sequence isolated from the Sargasso Sea
aatgaaaaaattttttgtaattggtaatcctataaatcactctctttctcctgagttacataatttttggattaaaaaaaataaaattaatgcggtgtatgataaaattaaactagaagagtcggaattgaaagattttatcaacaaattgagaaatgaggagatacatggaataaatgtaacagttccttttaaaaataaggtaataaaatatttagataaacttagtttagaggttgaaacaaccgattccgttaatactatttataaaagtggaaatgatataattgggcacaatactgatgtagctggatttgaattaggtttaagacactccaaaattaatgttttacataaatcaattttaattctgggagcgggtggggttgtgccttcaattatttattctttattaagtatgggatgtaaaaaaatatttttatcaaacagaaccattgagaaagctgaaaatattaaaaaaaaatttgaagaagtcgaagtgttaaaatggaaagaaatacctgatttcgatatagttattaatgctacaagcgtaggtctaaaaggagaaagtttagacttagattttaacacaaaagataaagttttctatgatgtaatatacaatccaaaagaaacccaatttttaaaaagagctagagaaaatggtaacagaattgaaaacggcaaactcatgtttatttatcaggccaaccaatcgttttctatatggaataatgtaatacctaaaattgacgaagaag

SEQ ID NO: 206081 - DNA, 793 bp, Unknown
  Bacterial polypeptide expressing nucleotide sequence isolated from the Sargasso Sea
aatgaaaaaatttcttgtcataggaaacccaattgaacattctttatctccaaaattgcataattattggataaaatctaataatttaaaagcagtttacgataaaaaaaaattagatatatcagaattagaaaatttaattaaagaagtaaaagaaaaaaaaattgatggaattaatgttactgttccatttaaaaattctgtaattccttttttagataaactatccaacgaggctcaaaaaacacaatcagtaaatacgatatatttgaaagatggaatggtaataggtcacaatacagacatagaaggatttgagttggccattaaacactcaaactatgatattgttgggaaaaatatacttatattgggtgcaggaggagtttcgccatcaataatagtggctttaaacaatatgaatgtaaaaaaaatatttataagcaatagaacacaaagcaaagctgaaaatttaaaaaaaacctttaatgaaattgaaactattagatggggtacaataccagattttgacatgattattaatgcaactagtttaggtttgaaaaatgatgaaaatattattttggattattcaaaaattagtccagaaaagtttttttatgatgtcatatataatcctgctgaaactaattttttaaaatcagcaaaaaaaaacggaaataaaatagaaaatggaaaaaaaatgtttattttccaggctcaagcctcatttaaaatatggaataacctcgagcccaaagtggatgataaagtaatggagcttttaaattga

SEQ ID NO: 206082 - DNA, 262 bp, Unknown
  Bacterial polypeptide expressing nucleotide sequence isolated from the Sargasso Sea
atgaaaaaatttttagtaataggtaatccaattgaacattctttatctccaaagttacataattattggataaaaaaaaatagtttagatgcaatctatgggaaactggaaacctatgacaatgatttgtctgaactatgtaaatctatcaaaaatggagatttggatggtttaaatgttactgtcccttttaaaaaatcaataatacctcacttagatattttaagtaggaatgcattaaggacacaatctgtaaatacta

SEQ ID NO: 206083 - DNA, 796 bp, Unknown
  Bacterial polypeptide expressing nucleotide sequence isolated from the Sargasso Sea
aatgaaaaaatatctagtaatcggaaatcctatcgaacattcactttcacctaaattacataattattggtttgagaaaaataatataaatgcaaactatggtaaaaaaaaaataaacaaaagtgagattcaagatgttatttcagaagttagagataataaattacatgggataaatgtaacagttccttttaaaaatgatgttattccttttttagatacattgactgaagaatcccaaattacgaaatccgttaacacaatatatatacatgataaaaaattggttggtcataacaccgatataataggttttgaactaagtttaagggagacacaatttagtttgaaaaataaaacaatatttatattgggagccggaggtgtagtgccctcaataatttatgcattagaaaaattagaagtctcgaaaattacagtaagtaacagaacaaaacaaaaagccttagatttaaagaaaattttttcaaatataaatgtagttgattggggagatcaaccagagtttgatatgataattaacgctaccagtttgggtctaaacaaagaagacgacataggcttaaattttaataatataaataaagaaaactttttttatgacgttatttataatccaaaaaaaactaattttttaaaaactggaaaaagcttgggatgtaaagtctctaatggtaaaatgatgtttatttatcaagcatttgaagcatttagattatggcataaggtaaagccagaaattaacgaagatttaaagatttttttagattcatga

SEQ ID NO: 206084 - DNA, 411 bp, Unknown
  Bacterial polypeptide expressing nucleotide sequence isolated from the Sargasso Sea
aatgaaaaaatttttagttataggaaatcccattgatcattcactttctccaaaattacataatcactggctaaaagagaacaatattgatgctgtttatgaaaaattactgctaacagaaagtgacatcaaagaaatagtttcagaaattagaaataataaaatacaaggagccaatgtaactgttccatttaagatttctgttaaaccatttatggacgaattatctccacttgctaaacaaacaggttcaataaatactatctataaaaaaaataacaaaatcattggtgataataccgacgtcggcggttttgagaatgcaataaaacatatagggtacaatgtatctggcaaaaaggcttttatattaggagctgggtggcgttgcaccttcaattatttctgctt

SEQ ID NO: 206085 - DNA, 753 bp, Unknown
  Bacterial polypeptide expressing nucleotide sequence isolated from the Sargasso Sea
attgaaatctacaactcatatttttggttgcattgctgatccgatagatcatgtaaaagccccaactctatattcaaaagtttttttagaaagaaaaataaatgctattatgatcccagttcatgttaatgaaaagaacttaggtgaagtaataaatagtttaaaaaaaataaaaaacttcagaggtcttacagttactatccctcataaagtcaatgtattaaaatattgtgatgaacttgaagatactgctgatcaaacaggagcggttaattggataaaatttaataataataaggtaattggaaataactttgatggaattggttttgttagaggtctattaaataaaaattatattataaatgataaaagagtttcaatttttggagctggtggagctggcatggctatttcatttgccttgcaatcatacaatttgaaggaattgaaaattattaatagggatcaaaataagttaaataaattgattaagaggttaaaaaatcatttcccaaaaacaacattaattggagaaaattttttgaactatgatatttcaaaaagtgatataattatcaatgctaccagtgttggtatgaaaagtgatacaacaataccttttaaagttttgaatactaaacaaaacagtttgatagctgaaataattatggaacctgaacttacttttttgctaaaagaagcaaaaaaattaaataaaaaaatacatttaggaaaatatatgttagaaag

SEQ ID NO: 206086 - DNA, 414 bp, Unknown
  Bacterial polypeptide expressing nucleotide sequence isolated from the Sargasso Sea
agagattattagaacaaaaaacaaaagagataattatagtaaaccgtacaatttcacgtgcaaaagatctagaaaaaaaatttggtaaaaaaaattgtgttagagcatattcttataatgatttacctaatcattctttcgatattattattaatggaacttcgttaagtttgtcagcagaaattcctcctatatctaagactaatattaatgaaaatactttctgttatgatttaatgtattcagataaggaaacagcatttacaaaatgggctatcgaaaatggcgctttaaaagctacagatggtctgggtatgttagttgagcaagcagctgagtcatttatgttttggcatggtactaagccagatacaatgccaataataaaagttttgagagactctaatacataat

SEQ ID NO: 206087 - DNA, 286 bp, Unknown
  Bacterial polypeptide expressing nucleotide sequence isolated from the Sargasso Sea
aatgaaaaaatattttgtaattggaaacccaataaatcattccctgtctccaaaactacataaccattggttagaacaaaataatattaatgcagtttatgaaaaaattaaacttgaagaaaatgaaattgaaaattttattcataaaattaaaaatcaagaaataaatggttgtaatgttaccgttccgtttaaaaaaacagtgattccttttttagacaagttaagtttagaagcagaacaggcacagtcagtaaatacaatctgttttaataatggcgacctc

SEQ ID NO: 206088 - DNA, 796 bp, Unknown
  Bacterial polypeptide expressing nucleotide sequence isolated from the Sargasso Sea
tatgaataaatatttagtcattggtaatccgatagatcactctttatctcctgcacttcataaccattggctaaaagaaaataatatcaatgccacatatgataaaattaaacttgaggatcatgaaattaaaaattttatccaaaatattaaagaacaaaaagtagctggttgtaacgtaactgtaccttttaaaaaaacagttattccttttttggataaattaagcccagaggcagaccaaactcaatcagtaaatacaattacatttgataatggtgttttagttggacataatacagacatagctggttttgatgctgcaataaaaaaattaaattttagtttaaagagaaagagagttttaattttaggtgctggcggtgtagtttcttcaataattcttgctttaaaaaatatgcaggttcaagagataacaataagcaataggacaagagagaaggcagagagtttgagagttttatttaataatcttaaagttttagaatggggaaaattaatcgattttgatatggtaatcaatgctacaagccttggtttaaataacgaaaaaattaatttagattttacaagtttaggaaaaaataaattattttatgacgtaatttataatcctcacgaaacccactttttgaaattgggtaaacaatcgggaaacatgacagaaaatggaaaaaccatgtttgtttatcaggccctagaggcatttaaattatggcacaaaatagaaccaaaaattaatcaagagacattaaagattttggataatgattaa

SEQ ID NO: 206089 - DNA, 796 bp, Unknown
  Bacterial polypeptide expressing nucleotide sequence isolated from the Sargasso Sea
atgaaaaaatattttgtaattggcaatccgataaatcattctttatcgcctaaacttcacaattattggctcaaagagaacaatattaatgcgatttatgataaaaaaaaaattgaggaaaaaaatcttcaaactataatttctgaagttaaagagaaaaaaatagatggcatcaatgttactgttccgtttaaaaaagcagtaattccctttttggataaattaagtatggaggcggaacaaacacagtcagtaaatacaataattttaaaagataacaatttggagggacacaatactgacatagctggttttgctaaagcaattaaaaacctaaattttaatttagaaggcaaaaaagtttttattttaggtgctggtggcgtagtcccttcaataatttttgctttaaataaaattaatgtctcgaaaataattattagcaatagaacaaaaaaaaaagctgaagatttaaagttacagtttcatagtttagagattttggattggggcgatataacagattttgatgtaattattaatgccactagtttaggattaaacaaagaaactattaatctagacttttcaaaatttggtaataacaaattgttctatgatgtaatttacaatcctatagaaacaaattttttaagcgaaggaaaaaaacttggtaacaaaactgagaatggtaaattaatgtttgtttatcaagcatttgaagcattcaaattatggcacggaatagaaccgataattagtagagaagtactagatattttaaaaaatgattaga

SEQ ID NO: 206090 - DNA, 568 bp, Unknown
  Bacterial polypeptide expressing nucleotide sequence isolated from the Sargasso Sea
atgaagaaatacttagttatcggaaacccaattgaacattcattatcaccaaaacttcataatcattggtttaagaaaaataaaattgacgctatttatgatagaaaaaaacttgatgaaaatgagataaaaaacgttatttcagaagttaaagaagaaaagttaagtggtattaatgttactgtgccatttaagaaagtagtcataccatttttagatgaattaagtcctgaagcaaatgaaacacaatctgttaatacaatttatttacaaagtggaaaactaattggtcataatactgatatagctggttttgaattagctataaaacattcgaaatatgacattaataacaaagaaattttcatattaggagcgggaggtgttgttccttcaattatttatgccttaagaaaaatgaaagtttcaaaaattacaataagcaacagaactaaagaaaaagcagaagacttgaaaaatttatttaaagatattgaaatagttggatggggtgaaataataaattttgatatgattataaatgcaacgagtgttggtttaaaaaacg

SEQ ID NO: 206091 - DNA, 683 bp, Unknown
  Bacterial polypeptide expressing nucleotide sequence isolated from the Sargasso Sea
tatggtaataggaaatccaatagagcattcgttatcaccacttctacataatttttggattaaaaagtacggcataagcgctatttatgaaaaaaaagtcttagaaaaaaatgatattgaaaaaactctaaatgatataagagaaaacaaaatagaaggtataaatgttacagtgccttttaaaaaagaggtaattccttttctagaccatttatctgatactgcacaaaagtctcaatcagtaaacaccattttcaaaagacaaaacaagttggttggtgacaacactgatgtttacggtttttcgcaagcaataaaattaaccaatttcaatctaaaaaataaaaaagcactaattttaggtgctgggggtgtagttccctcaatcatattagcattaaaaaatatgggaattttagaaatagttttatctaaccggacaaaagcaaaggcagaagatttagaaaaaagttttccctttttaaaagtgataaattggggagaaacaattaaatctgatttaataattaatgccacaagtataggcataaagaaaaacgagcagattaaattagattataccaaactagatggtcaactattttatgatgtaatttataatcctcctgaaacaaaattcttagaacaagcaaaaaaaatcggaaagaaaatagaaaatggta

SEQ ID NO: 206092 - DNA, 442 bp, Unknown
  Bacterial polypeptide expressing nucleotide sequence isolated from the Sargasso Sea
atgaaaaaatatttagttataggaaacccaattgagcattcgttgtcacccaaattacataatcattggattcaaaagaacaacattgatggagtttatgaaaaaaaacaaattaaagaatctgatatcagagaaataattttagaagtaaaaaatgatagaattaatggaataaatgtaactgtaccttttaaaaaatctgtcataccttttttggatgaattgacaccgctcgcaaatgaagctcaatcggtaaatacaatatataaacaaaataataaagttataggacacaacacagatgtaggtggttttgagcttgctttaagacatattaattatgatgtaaaaaacaaaaaagtttttattttgggcgccggaggagttgttccttcaattattctagctttgaaaaaaatgaatgtagaaaaaattatttaag

SEQ ID NO: 206093 - DNA, 646 bp, Unknown
  Bacterial polypeptide expressing nucleotide sequence isolated from the Sargasso Sea
atgagaaaatatttagtaataggaaacccaattgatcattctttgtctcctaaacttcaaaactggtggttaaaagaaaataagatcgacgccacgtatgataaaattaagcttgagaatcatgaaattaaaaattttcttcaagctattaaagagcaaaaaatagctggttgcaatgtgactgtccctttcaaaaaaacggtcattccttttttagataaattaagcccggaggcagaacagacacaatcagtaaacacaatcatttttgaaaatggtgatctagttggacataatacagatatagttggttttggtactgcaattaaaagattaaactttagtttaaagggcaagaaagttttaattttaggggctggtggtgtagttccctcaataatttttgcattaaaaaatatgcatgtagaagagataataattagcaataggacaagagagaaggcagaaaatttgagagttttattcaataatattaaaattttagaatggggaaacttgactgattttcatatggtaataaatgctacaagtcttggtttaaataatgaaaaaataaatttgaattttttaagttcaggaaatgataaattattttatgacgtaatttataatcctccaagaaact

SEQ ID NO: 206094 - DNA, 502 bp, Unknown
  Bacterial polypeptide expressing nucleotide sequence isolated from the Sargasso Sea
aatgaagaaatatttagtaataggaaacccaatagaacactctttatcaccaattctccacaattattggattaaaaaaaacaaaatagatgcagtttatgaaaagaagctgattttagaaaatgaattagaaaaaattatatttaaaataagatcaggcgaattaaatggtataaacgttactgttccatttaagaataaagtggtacgttttatggacgaccttacaaaagaggcaaaagaaagtatgtctgtaaatacaatttacttaaaagataaaaagattgttggccataacacggatatagcaggttttgaacttggtattagatcttatgggtatgacataaaaaaaaaaaatatcttcatatttggcgctggaggtgttgttccttcaataataatcgcattaaagagaatgcaagcttcaaaaatttttttatataacagaactcactataaatcagaaatgattaaaaagaattttaatgatattgaaatt

SEQ ID NO: 206095 - DNA, 808 bp, Unknown
  Bacterial polypeptide expressing nucleotide sequence isolated from the Sargasso Sea
atgacaactaaaataaaaaaatattttgttataggaaacccaatcgatcattctttgtcccccaaactacaaaactactggttaaaagagaataatattaacgctttttatgacaaaattaaacttaatgaagatgatttggagaactttattaaagatataaagcaccaaaaaattactggctgcaatgttacggttccatttaaacaagcagtaatacctttcttagacaaattaagcccagaggcactccaaacccgatcagtaaatacaataatatttaacgatggtagtttagtcggacacaacacggatatttctgggtttacaaaagcaattcaaagtgtgggttttaacttgagaggaaagaaagttttaattttaggtgcaggaggggtagttccatcaattattttttctttaaataaaatgggtgtttcggagataagtgttagtaatagaactaggcaaaaagcagaaaatttgaaaatgttatttaacaatttaaaaactatagaatggggaaatatagaatattttgatatgataattaacgctacaagcttagggctaaataatgaaaaaataaatttagatttttcaaaagctggaaaagataagttattttatgatgtaatttacaatcctgccgaaactaatttcttaaaaaatgcaaaaaaaaatggcaatcttgctgaaaatgggaaattaatgtttgtttatcaggccctagaagcattcaagttgtggcatgaagtagaaccaaaaattagtgatgagatttttaaacttttagaaaatgattaaa

SEQ ID NO: 206096 - DNA, 279 bp, Unknown
  Bacterial polypeptide expressing nucleotide sequence isolated from the Sargasso Sea
aatgaaaaaatattttgtaatcgggaatcctattgatcattcgttatcacccaaacttcataaccattggtttaaagaaaataaaattgatgccgtttatgaaaaaattaaaattgatgagaatgatctagaaactataattgctaagattaaagaaaaacaaataaacggcattaatgttactgttccatttaaaaaaacagtaattccatatttagataagttgagcttagaggcaaaacaaacccaatctgtaaatacaataattttagatcatgg

SEQ ID NO: 206097 - DNA, 748 bp, Unknown
  Bacterial polypeptide expressing nucleotide sequence isolated from the Sargasso Sea
agatacgagataaacgggttctatattcctattgatgtaagaccacaagatctcataaaaagtatcgaagctcttgtgttgttaggttttcgtggtgtaaatgtaacaataccccacaaagttgctatattgtcaatagcggacacagcgaccgatagagcatcgatgatcggagcagctaatacactatattttaataaagaaggcaaggtaacagctgataatactgacggttatggttttaaacaaaacatcaaaagctacgatccattgtgggaggcaagaactggtcccgcagttgtatttggcgcgggaggagcagcaaaagctgtaatacatgccttattgtctgagggggtaccgtcggtacgcatactcaatcgaaccagaataaaagcggaaatgattgctgaacaccttggaaaccgagtagaagtaattgactggtacgccataaaagaggctctaaatggtgccactacaataataaatacaacatcgttaggaatggttggccaaccatcattcaagcctgatttatcaaacgcatctccagaggcacgagtgatagatttggtgtacaaccctgtcgacacagaattcttaaaaggggcaagacaacagggtttgaaaacaatagatgggctaggtatgttattatatcaagcagaaccagggttcacaaattggtttaacgttactccgagtgtagatgagaaattaagggctatttttcttaatgactagg

SEQ ID NO: 206098 - DNA, 714 bp, Unknown
  Bacterial polypeptide expressing nucleotide sequence isolated from the Sargasso Sea
aatgaaaaaatttttagtaataggtaatccaattgaacattctttatctccaaagttacataattattggataaaaaaaaataatttagatgcaatttatggaaaattggaaacttatgacaatgatttgtctgaactatgtaaatctatcaaaaatggagatttggagggtttaaatgttactgtcccttttaaaaaatcaataatacctcacctagatattttaagtagtaatgcgttaaggacacaatctgtaaatactatctcgttaaataaaggtaatttaattggagataacaccgatattaatgggtttgaattaagtataagaaaattgaattatgatgtaagtgacaagacagttctgatattaggtgctggtggggttgtgtcgtcaataattttttcattgttaaggatgaaagcatcaaaaatatttttgagtaacagaactaaaaaaaaagctgaaaatttaaaaaatttattcaatgagattaatgttgtggaatggggtgatttaccagagtttgatatggtagtaaatgccactactttaggtttaagtaaagtagataaatttggcatagacttttctcaggctggtcaaaataagcttttttatgatgttatatacgcaccgtttcaaacagagttttcagaggcaggaaatgctgagggtaattcaattgaaaatggtttaaatatgtttttatt

SEQ ID NO: 206099 - DNA, 354 bp, Unknown
  Bacterial polypeptide expressing nucleotide sequence isolated from the Sargasso Sea
aatgaaaaaatttttagtaatagggaatccgattgaacattctttatctccaaagttacataattattggataaaaaaacatagtttagatgcaatctatgggaaactggaaacccatgacaatgatttgtctgaactatgcaaatctatcaaaaaaggagatttggatggtttaaatgttaccgtcccttttaaaaaatctataataccttacctagatattttaagtagtaatgcactaaggacacaatctgtaaatactatctctttaaataaaggtcatttaattggagataatactgatattaatgggtttgaattaagtataagaaaattgaattatgatgtaagtga

SEQ ID NO: 206100 - DNA, 597 bp, Unknown
  Bacterial polypeptide expressing nucleotide sequence isolated from the Sargasso Sea
gatgaaaaaatattttgtaattggaaatccgatcgatcattcattttccccaaaagttcataatttttggataaaacagaataatctcaaagctatttatgaaaaaatcaaacttgaggaaaatgaaattcaaagttttattagtgagataaaagaacaaaaaatagcaggttgcaatgttacagtgccgtttaaaaaaaaggtgattccctttttggatcaattaagtctagaggctgaaaaaacgcagtcagtaaatacaattgtttatgataatggtaatttaattggacataacaccgatattgttggttttgaaaaagcaattaaaaatttaaattttaacataaatttaaaaagagtcttaattttaggtgccggtggtgtagttccctcaatagtttttgctctgaacaatatgggagttaaagaaataactattaccaatagaaccaaagaaaaagcagaaaatttgaaaaaattatttgataatttaaaagttgaggattggggaaatttaccagactttgatgtaatcataaacgccacaagtcttggtttaaataatgaaattatgaatctagagttttcaaatga

SEQ ID NO: 206101 - DNA, 784 bp, Unknown
  Bacterial polypeptide expressing nucleotide sequence isolated from the Sargasso Sea
tatttagtaataggcaatcctattaaacactctttatcacctaaattacataactattggattaaaaaatataatattgatgcagtttatgaaaagaaaaaaattaatggtgatgatattgctgatttgatctcagaagtaaaaaaaaaaaatatacacggaataaatgttacggttccttttaaaaaagctgttatcccttatctggatctcctaagttttgagtcagaacaaactcaatctgttaatactatttatttagatgataataaagtaataggtcataatactgacatagagggttttaaattaagtattgaagatacaaaattagaaatggccaataaaaaagtcttcatattgggggcaggaggtgtagttccatcgataatttttgctttaaataaaatgaagatagctgaaattataataagcaatagaactaaagatagagcgaagaaattacaagaattatttaaaaatataagaatcattgattggggcaagattcctaattttgatgtaattattaacgcaacaagtttgggtttgaataatgatgatgaaataggtttagacacttctaaattaggtaaaaacaaatttttttatgatgtaatttataaacccaatgaaacaaattttctaaaaataggaaaaaagttaggcaacaaaatagaaaatgggaaattaatgttcgtatatcaggctctagcttcatttaaaatatggcacgaaattcaacctgagataaataataaagttattaaaattttagattgat

SEQ ID NO: 206102 - DNA, 769 bp, Unknown
  Bacterial polypeptide expressing nucleotide sequence isolated from the Sargasso Sea
atgaaaaaattttttgttataggaaacccaattgaacattctttatctccaaagttgcataattattggattaaatctaataatttaaaagcagtttacgataaaaaaaaattagaaatatcagaattagaaaatttaattaaagaagttaaagaaaaaaaaattgatggaattaacgtcacagttccttttaaaaattctgtaattccttttttagataaactatccaatgaggctcaaaaaacacaatcagtaaatactatacacttgaaggatggaatggtaataggtcacaatacagatatagagggatttgagctggccattaaacatacaaattacgatatcattggtaaaaatgtactaatattgggtgcgggtggagtttcgccatcaataatagtggctttaaacaacatgaatgtaaaaaaaatattaataagcaacagaacacatagcaaagctgaaaatttaaaaaaaatatttaatgaaattgaaattattaagtggggaacatttacagattttgacatgattgttaatgcaactagtttaggtttaaaaaaagacgaaaatattgatttggattattcaaaaattggttccaaaaaatttttttatgatgttatatacaatccctctgaaactaatttcttaagatctgcaaaaaaaaatggaaataaaatagaaaatggaaaaagaatgtttatttatcaggcccaagcatcttttaaaatttggaataatttagaaccaaaaagtagataat

SEQ ID NO: 206103 - DNA, 507 bp, Unknown
  Bacterial polypeptide expressing nucleotide sequence isolated from the Sargasso Sea
  misc_feature (492)..(492): n is a, c, g, or t
aatgaaaaaatatatagtcattggaaatcctattgagcactctctttcaccaaagttacataattattggatcaaaaaaaataatattaaagctacttatgaaaaaaagaaaattaatgaaaaagatatagaatttttagtttcatcaattaaaaaagaagaaatcactggagtcaatgtaacagttccttttaaaaaaaaaattattccttttatggacaaattaagccccgaagcaaatgaatcacagtctgtcaatacaatatattctcaaaatggaaaattgattggacacaatactgatatatcaggttttgaacttggaataaaatactcaaaatatgatgtgaagaataaaatagtttttatattaggagcaggtggtgttgtttcttcaataattatagctttgaaaaaaatgggagctgcaaaaattataataagcaacagaacaaaatccaaagcagaagatttaaaaagtttttttaatanattagaaattgttga

SEQ ID NO: 206104 - DNA, 499 bp, Unknown
  Bacterial polypeptide expressing nucleotide sequence isolated from the Sargasso Sea
aatgaaaaaaaataaagcaattgttattggacaaagcgtaagcaaaagcctttcgccaacaatttttaattattggttttcaaaatataaaataaaaggcaaatatgaatatttagaaatacaaaaaaacaaacttgaaaaaaaaatattcacaaaactaattaacatgaaaataaaagggtttaatgttaccataccacacaaagaaagcattatgccctatcttgattttgtcgacagccattcaaaaaaaataggcgctgttaattgtgttactattaaaagaaaaaaactacatggatcaaacactgattgggttggttattataaaacgattaataaaattacaaaaaaacaagaaagggtgagaaatcaagcaattgttgttggttatgggggcgcatcaaaagctattgtttatgctttattaaaactaaaatataaaaaaattcatatatttaatagaaccctaaacaaaatgaaaaatattaaaaacaaa

SEQ ID NO: 206105 - DNA, 217 bp, Unknown
  Bacterial polypeptide expressing nucleotide sequence isolated from the Sargasso Sea
aatgaaaaaatacttagtaataggaaatccaataaatcattcattgtcccccaaattgcataattattggatcaaacaaaataaaattaatgcaaattatgaaaaaaaaaaattaagcaacaatgagctaaaagaattaattctggatgttaaaaaaggaaaaataaatggtgttaatgttacagtgccattcaaaaatgaaattataccctacttg

SEQ ID NO: 206106 - DNA, 756 bp, Unknown
  Bacterial polypeptide expressing nucleotide sequence isolated from the Sargasso Sea
caccagatattcatatttcctttgcaagtcagtttcagcttgaacgttattcctacaagaaaatacaatctactgagaatgattttgagaaagatattaatgatttttttaaaacaggaggtgtaggtttaaacgttacagttccattcaaaggcttagcatataatttatgtgataaattagatcaatcagctgcgcagtgcaaaagtgtaaacacaatcatggttgactctggcaaacttataggttacagcactgatggacgaggcttaatagatgatttcttagataaaaaaattactctcaaagactctaaaatattaattataggtgcagggggatcagctgcaagtatcgtaagctcagtattattacatggcaatataaaagaaatttccatacataatagaactaaaagtaatgcacttaaactactcgatttgtttgagactaataggttattagtgcatgaagatggagatgaatacgatatcgtgataaataccacaccaatcagcatgaatgttgacgatattattttgccgccagaactaattataaataagccgatctgttacgacttattctatgataagaaaaaaaccctttttcagaaatgggcagagaaaaatgaacctaaagctaacttcgatggattaggcatgttaattcatcaagctaaacattcttttaaaatatggaataatctttcaccagatattgatggtctagaggagttattaagacgaaactaga

SEQ ID NO: 206107 - DNA, 253 bp, Unknown
  Bacterial polypeptide expressing nucleotide sequence isolated from the Sargasso Sea
atgaaaaagtatctagtcataggaaacccgattgaacattctctatctcctaaattacataattattggtttaaaaaaaaaaatataaatgcaatttatgataaaaagttattaaacgaatctgatatagaaaatataatttctaaagtcaaaaaagaagaaattcatggtttaaatgtaactgtaccttttaaaaaatcagttataccttttcttgatgaattaacttccgaagcaaatgagtctaaatctg

SEQ ID NO: 206108 - DNA, 622 bp, Unknown
  Bacterial polypeptide expressing nucleotide sequence isolated from the Sargasso Sea
atgaaaaaatatttagttataggaaatccaatagaacactcattgtccccagaaattcataattattggttaaagaagaacaatattaatgcggtatatgaaaaaagaaaattaaatggtgatgacattatagaattgattgatgagataaaaagtgacaaaataagtggtgttaatgttacagtaccattcaaaagagatgtaataccttttcttgatgatttaagtaaagaggcaaatattactcaatctgtaaataccatttttttcaagaataataaaataacaggccataatacagatatagctggttttcaaattagtctaaaagatacagagtttaatttaaataataaaaaagtgttaatacttggatcgggtggcgttgttccatcaattatttatgcacttgaaaaatctggtgtctcacaaataacaatttgcaacagaactaaaagtaaagcaattgagttaaaaaaaactttttcaaatttaaaaatcgtagaatggggaatggttcctgagtttgatatgataattaatgctacaagtctaggcttagataaaaatgataagatcgatctaaatttcacaaacataaataaaaacaaattcttttatg

SEQ ID NO: 206109 - DNA, 400 bp, Unknown
  Bacterial polypeptide expressing nucleotide sequence isolated from the Sargasso Sea
atgagaaaatatttagtaattggaaatcccatagaacattcattatcaccattattacataatttttggattaaaaagtacaatctaaatgctttttatgaaaaacaattgttagaaaaaaaagatatagaaaaaattcttagcgatattagaattagcaagattcaaggaataaatgttacagtaccttttaagaacacagtaattccatttttagatcaactatcggacactgcccaaaagacccagtcagtaaatacaattttcaagagacagaataagttggttggtgacaacaccgatgtttatggtttctcagaggcagtcaaattaactaattttaatccagcaaataagagtgcattaattttaggtgctggtggcgtagttccctctatcc

SEQ ID NO: 206110 - DNA, 428 bp, Unknown
  Bacterial polypeptide expressing nucleotide sequence isolated from the Sargasso Sea
aatgaaaagatttttagttataggaaatcccattgaacattctctgtcaccaaaaattcataaccactggctaaaagaaaataatattgaagccatctatgataaaaaaaagcttaatgaaaatgaattaaaaagcatcatttctcaagttaaagatgaaaaaataaatggtattaatgttacagtgccgtttaaaaaagtggttattccatttttagacaaattaagtcctgaaccaaaagatacacaatcagttaacacaatttatctgcaaaatggaaatgtaattggtcacaacacagacatagctgggtttgaattggcaattaagtatgccaaatttgatcttaataataaaaaaatatttgtattacgtgctgggggcgtggctccttcaataatttatgcacttaaaaaaatgaaagtct

SEQ ID NO: 206111 - DNA, 753 bp, Unknown
  Bacterial polypeptide expressing nucleotide sequence isolated from the Sargasso Sea
ggcttaaactacacaggatatctggaacttatgaaatacttgaagtggatgatgcaggtcttgatcgtttattttgtgataaggtacatctgtacagaggcttgaacgtgacaataccgcataaagtccgagtatttgattatatggacgaggtcagtgatagcgcgagggtaattggggccataaactgtatcactgtggagaataaaaagcttgttgggcataacacggacgctgatggatttatgaatggtcttgcatcattcaatagagatcttgatttcagtaatatgaatgttttggtaattggtgccggcggggcatcaagagctgtaatttattcttttttgatgaaatcaactggtcaggttacagtaacgaatagatcatcggatcgcctcgcatcactagaaaaggtttttaatgataagatccgctatatggactggcagaaattaaatgatagtgtctcacagtttaatcttattataaactgcacgagtcaaggaatgaagggcaaaaatgatttcacactggacttttcttcaatgcagcaaggcttatcggttattgatctggtctataatccattagaaacaaaactattaattgatgcgaagagttgcggatgtcaaattttaaatggcgtaccaatgttattgaatcaagcggcgctttcttggaaactttggttgaatataagtcctgatatttcggatgatataatccaatttgtcgaagataagatataaa

SEQ ID NO: 206112 - DNA, 730 bp, Unknown
  Bacterial polypeptide expressing nucleotide sequence isolated from the Sargasso Sea
atgaaaaaatatttagttataggaaacccgatagagcactctctttcccctatgttacacaattactggatcaaacaatccgatataaaggcggtatatgaaaaaaaacttttagaagaaaaagatttaaaaaatattgttaacgatataaagaacgataaaatttcaggcataaatgtaacggtgccttttaaaaaatccattataccctttttggacaaattaagtattgaggcaagaagaacacaatctgtaaacacggtgtctaaaattaataatgaaatatatggacacaatacggatgcaagaggttttgatcattcgcttaaccaactaaactataaagcaaaaggtaaaaaagcttttgtgcttggtgctggtggtgttacctcatctatcatttgggccctggaaggtttaggaatatcaaaaatatttataagcaatagaacaaaacaaaaagctgaagaaataaaaaaactatttcctaaaatagaaattttagattggggaaaaaaaccaaaagaatttgatatggttgtgaacaccacgagtgttggtttgaataataacgaagaaatagctatagactttagtgattgcaaagaaaagcttttttatgatgtgatatacaatccatcccaaaccaaatttcttttgaaagcaggcaaagactttagaaatgagacaaaaaaaagattaggaatgtttatttatcaagcaagatgag

SEQ ID NO: 206113 - DNA, 417 bp, Unknown
  Bacterial polypeptide expressing nucleotide sequence isolated from the Sargasso Sea
aatgaaaaaatatattgtaattggaaatcctatcgatcattcgttatcaccaaaacttcataattattggcttaaagaaaataacattaatgcaatttatgataaaaaaaaaattgatgagaaagatctacaaactataatttctcaggttaaagaaaaaaaaataaacggcattaatgttaccgttccattcaaaaaatcagtaattcagtatttagataaattgagcccagaggcagaacaaacacaatcagttaatacaataattttaagtaataatgatttggtaggatataatactgatatatctggttttactaaagcaattaaagatttaaattttaatatccagggtaaaaaaatttttattttaggtgctggcggtgttgttccttccataatttttgctttaaataa

SEQ ID NO: 206114 - DNA, 214 bp, Unknown
  Bacterial polypeptide expressing nucleotide sequence isolated from the Sargasso Sea
catgaatagctactttgtaattggaaatcctatagaccattcactttcgcctttacttcataattattggtttaaaaaatataaaattcaaagtgaatataaaaaaaaaaaattagaagaaaatgacttaaaagattttaccaacgatatcagaagcaatcattctatcaagggcgccaatgtaactgtaccttttaaaaagaagaataatacc

SEQ ID NO: 206115 - DNA, 670 bp, Unknown
  Bacterial polypeptide expressing nucleotide sequence isolated from the Sargasso Sea
atgaaaaaatacttagtaatagggaatccgataaatcactctttgtctcctgaattgcacaatcattggattaaacaaaatggtcttgatgcaatttatgaaaaaagaaaattagataataacgatttagaaaatttaattttagatatcaaaaagggaaaaataaaaggtgtaaatgttacagtaccttttaaaaatactataataccctttttagatgatttaagtactgaagctaaaaaaacacactcagttaacacaattcatttaaaaaacaaaaaagtagttggacacaacactgatattaccggttttgaaactgcaattcaaaatataaactttgactttaaaaaaaaaaaaatttttattttaggggcaggcggagttgtcccatcgattatttatgcttcagtaaaaatggggtcatctgaaattatgataagtaacagaaccgaaagaaaggcaatggagattaaaaatatttttaacaacattaaattagttaaatggggagaaataccggattttgatgttgtaataaatgcgacaagtttaggattaaatcaggatgataagataaatttagattttaccaaggtgggtaaaaataaattattttatgatgtaatttataatccaagtgaaacaaattttttgaacttaggaaaaa

SEQ ID NO: 206116 - DNA, 613 bp, Unknown
  Bacterial polypeptide expressing nucleotide sequence isolated from the Sargasso Sea
atgaaaaaatatttagttataggaaaccctattgaacattctttatctcctacattacataatcattggattaaggaaaataatattaatgctatttatgataagaaatgccttaaggaaaatgatattaaagaaataataaaagatgttaaaaatgaaaaaattaatggtgtaaatgtaactgtaccattcaaaaaagtcgttataccttttattgatgagctcactccaatggccaatgaagtaaaatcggttaatacaatttttaaaaaaaataataaagttataggagacaatacagatattgaagggtttgcaaatagtttaaaacacataaactacatcgttaaaaacaaaagagtatttattttaggtgcgggtggggtagcgccatctataattttagctttaaaaagattagaagcatcaaaaatagttttaagcaatagaacaaaagaaaaagctgacaatctaaaaaaaatatatacagatttagaaattgtagattgggggcaaatacctaagtttgatatgataattaatgctacaagcttagggttaaaaaaagatgatgagataaaattaaattatgctgatatcggacctcaataaa

SEQ ID NO: 206117 - DNA, 793 bp, Unknown
  Bacterial polypeptide expressing nucleotide sequence isolated from the Sargasso Sea
atgcacaaggaagcaaattatataagaatagcaggtgttattggtgatccgattaatcatacccgttcgccgttaattcataattattggattaaaaaaaataatattaattgtttctatattccgttgagagtagaaagttctgacttagaaaataagctaaaatatattagagagttaggttttagtggtctaaatgtgactataccacataaagaaaaaataataactttagctgatgaaatcatggaatctgctaaactaattggagcagctaatactatttattttaaaaatggaaaaactatagtagacaatacagatacatacggtttttatcaatcaatacttaagaacttcccaaaatacaattttaaaaaagaaaaagttttgatttttggttctggcggtgccgctcgggcagttacctcagtatttttaaaagaaaaagcgtttgaaatcagtattataaatcgaaaccgagaaaaagcagaaagagtaagagatgatttatcttccagaataaagatttatgattggaaagattattcaaaagcattacgtgatgtatcaactgttgtaaatacaaccagtttaggaaatcttggttctgagaagttttcaatcgatctcaaaggtgttcgagaaaatggcatcgcgattgatttagtttataaccctttaaaaacttcttttatgaaaaaagcagaaaaagaaaatttaaaagttattaatggtttagacatgttaatatatcaggcaaagaagggttttcaacaatggtttaaaaaaa

SEQ ID NO: 206118 - DNA, 287 bp, Unknown
  Bacterial polypeptide expressing nucleotide sequence isolated from the Sargasso Sea
aatgactaaaaaagcttttgcagttattggtaatccaatttcacattctctttctcctgttttacacaattattggtttaaaaaatataatattaatgcaaattatgtttcaatgaaccttgaagaaaaaaatatttttgaaataattaaaaagattaagaataaagagttaaacgggttaaacgtaactttgccttacaaacagaaggtcattcctcatttagacgaattagttaatgatgcgaagtcaactaattctgtaaatacaatttatctagacgagcaaa

SEQ ID NO: 206119 - DNA, 334 bp, Unknown
  Bacterial polypeptide expressing nucleotide sequence isolated from the Sargasso Sea
atgaagaaatatattgttattggtaatcccatcaatcattctttgtcaccaaaattacataattattggtttaaagaaaacaatattaaagctatttacgagaaatgcttactagatgaagcgaacataaaaagtgtaattgaacaaattaaaaaaaaaaaaatttttggtattaatgtaactgttccgtttaaaaagaaaattattccttgcctacaaaaacttactaaagaagcaagtatttctaattctgtaaacacagtctatctagaaaacgacctgatagttggacataatacagatatagctggttttgaacttgcaataaggcact

SEQ ID NO: 206120 - DNA, 774 bp, Unknown
  Bacterial polypeptide expressing nucleotide sequence isolated from the Sargasso Sea
aatgaaaaaatatttagttataggaaatccaatcaaacattctttatcacccagattgcataatcattggtttaaacaaaacaatattgacgctgtttatgaaaaaaaacagatcaaagaaagcgctatagaaggaataatttcacaaatgagaaacggagaaattgaaggcattaatgttactgttccattcaaaaaatcagttataccttttttagatgaattggagatttcaagaaaagttccgtcggttaacacaatttataaaaagaaagataaaataatagggaccaataccgatgttcatggatttaaattagcattactgcaaaccaaatataattttaaaggtagaaaaattttaattttaggggccggaggagtagctccttcaattatttttgctttagagcaactggaggtcgctgtaattatgttaagcaacagaacgaaagaaaaagctgaaaatttaaaaaaactatttcctcaattagagttggtaaaatggggagatataaaagattttgatgtgataataaatgctacaagcctaggtcttaaagaaagtgataaaataccaataaattatgatcaaatagacgcaggaaagtttttttatgatcttatttataatcctaaaaaaacaaattttctcttagaagccgaaaaacgcggccataaaattgaaaatgggaaaatgatgttcgtttatcaagctcaagaagcttttagattgtggacagtggcccccaatcagcgggttgggcttctgcc

SEQ ID NO: 206121 - DNA, 619 bp, Unknown
  Bacterial polypeptide expressing nucleotide sequence isolated from the Sargasso Sea
atgaagcaatttgcagtaatcggaagtccaatatcccatagcctaagtccaaatctccatgaagaaatttttagacaacttaatgtaaatgcctcatacagtagagtggatatattacctgagaacctaggaaatttcttcttgaacaatgagcttgatggttttaatgtaacaattcctcataaaatttcgataatgaaccatcttagagacttagatattactgcagaaaaaatttctgccgtgaattgtgttcataataatatcggatataatactgattggattgggtttttacatgctatgaatttgaataatgtcaaacttgaaaataagaactgtttgattattggtgctggtggagctgcatatgcaactgcatatgcacttatacattgtaaagtaagatcaataagtattacaaatagatcaaaagacagtagaactaatttaatgaattggatcaataaccagtttgataataaaaacgggtttaaaccaaatgtaattattaactgtacaccactagggatgtggcctaatctaaacgcaattccaacagatcaatacataaatgaaagtgatatcgctatcgaaacaatttataatccgaagaaac

SEQ ID NO: 206122 - DNA, 88 bp, Unknown
  Bacterial polypeptide expressing nucleotide sequence isolated from the Sargasso Sea
aatgaaaaaattttttgtaattggaaaccctataagtcattctctttcccctgagttacataatttttggataaaaaaaaataaaatt

SEQ ID NO: 206123 - DNA, 772 bp, Unknown
  Bacterial polypeptide expressing nucleotide sequence isolated from the Sargasso Sea
aatgaaaaaatacttagtaatcggaaaccctattgatcattccatgtccccattattgcacaattattggatagaaaaaaataaaataaaagctgtttatgataaaaaattaattaataaagatgatattcaaaaaataatcttagaattaagattggaaaaactgcatggagtaaatgtaactgttccttttaaaaatgaagttgtttcatttatggatactttgacaaaagaagctgaagagacaaagtcagtaaatactatttatttaaaaaataacagaatagttggccataatactgatattgctggcttcgaacttgctattcgatcttgtggttataacgttcaaaaaaaaaacatttttatattcggagctggaggagtagtcccttcaataatagttgctctgaaaagaatgggagcttcaagaatatttatttataataggacggtgacaaaatcggaaaatataaaaaaattttttaaaaatattgaaataatagagaaagataacatcccagaaaatgttgatatgttaataaatgcatcaagcttagggataaacaaaactgataaagtaaatttacaatatgataaaataggaaaaaataagttttattatgatgtaatatataatccgcctgagacaaattttttaaaatcggcaaaaaaattaggaaataagacagagaatggaaaaaagatgtttatttatcaggctcaccaagcttttgcgatttggcataacattttaccaaaaattgatgaa

SEQ ID NO: 206124 - DNA, 583 bp, Unknown
  Bacterial polypeptide expressing nucleotide sequence isolated from the Sargasso Sea
atgaaaaaatttttagtaataggtaatccaattgaacattctttatctccaaagttacataattattggataaaaaaaaataatttagatgcaatttatggaaaattggaaacttatgacaatgatttgtctgaactatgtaaatctatcaaaaatggagatttggagggtttaaatgttactgtcccttttaaaaaatcaataatacctcacctagatattttaagtagtaatgcgttaaggacacaatctgtaaatactatctcgttaaataaaggtaatttaattggagataacaccgatattaatgggtttgaattaagtataagaaaattgaattatgatgtaagtgacaagacagttctgatattaggtgctggtggggttgtgtcgtcaataattttttcattgttaaggatgaaagcatcaaaaatatttttgagtaacagaactaaaaaaaaagctgaaaatttaaaaaatttattcaatgagattaatgttgtggaatggggtgatttaccagagtttgatatggtagtaaatgccactactttaggtttaagtaaagtagataaatttggca

SEQ ID NO: 206125 - DNA, 271 bp, Unknown
  Bacterial polypeptide expressing nucleotide sequence isolated from the Sargasso Sea
gatgctcggaattatgcaaccctttatggcaattgagttttcaataggtggtgccgttagaggagctggagatactaaatctcctttgataataactttgataggactcgtcttagttagggttcctctagcttttattttctacggcttaggtcttccaattgagtggatttatgcaactctcattgctgactatttcttaaaggggatgctacttgcatatagatacaaatctagaagatggatgaaagttcttaagatggataactga

SEQ ID NO: 206126 - DNA, 373 bp, Unknown
  Bacterial polypeptide expressing nucleotide sequence isolated from the Sargasso Sea
gatgaaaaaatatttagttataggaaatcccatcgatcattctttgtctcccaaacttcacaattattggttaaaagaaaataatattgatgccatctatgataaaaaaaagcttgataaaaacgatttaaaaacaatcatttctgaagttaaagaagaaaaaataaatggtataaatgttacagtgccatttaaaaaagaagttattccattcttagataaattaagcctagaagcaaaagatacacaatcagtcaacactatttatttgcaaaatggaattacaattggtcataatacagatatagccggatttgatttggcaattaagtatgccaaatatgatcttgctaataaaaaaatatttatatta

SEQ ID NO: 206127 - DNA, 790 bp, Unknown
  Bacterial polypeptide expressing nucleotide sequence isolated from the Sargasso Sea
aatgaaaaaatatttagtaataggtaacccaatagatcattcattatcaccattgttacataacttttggatccggaagcacggtattgatgctatctatgaaaaaaaattgttaaaacaaaatgatattgaaacaattataagtgaaatgagaaaaaaaaagatacaaggaatcaatgttactgtaccttttaaaaaagatgtaataccattcctggataaattatcagagaccgctaaaagaactcaatcggtaaatacaatttttgaagaacaagataaattagttggtgacaacacagatgttttcggtttttcggaagcaattaaatcaactaatttcaacttaaaaaataagaaagcattaattttaggtgctggtggcgtggtaccctcactagtactagcattgaaaaatttaggaattttggaaataattttatctaatagaacaaaagcaaaggctgaagatttgaaaaaaaattttccttttttaaaagtgataaattggggtgaaaaaataaaatctgatttaattattaatgctacaagtataggcattaaacaaaacgaggaaattaaatttgattattctaatctaaatggtcaattattttatgatgtaatttataatccttctgaaacaaaattcttagaaaatgccaaaaaatctggaaaaaaaatcgagaatggaaaaaatatgttcatctatcaagcaatgaaagcattcgaaatctggcatggtgttagaccagaaataaatcaagaaattagtgagctaataaaatga

SEQ ID NO: 206128 - DNA, 517 bp, Unknown
  Bacterial polypeptide expressing nucleotide sequence isolated from the Sargasso Sea
aatgaaaaaatatttagttataggaaatcccattgaacattctttatcacccaaacttcataactactggttaaaagaaaacaacattgaagctatatatgataaaaaaaaacttgatgagaaagatctgcaaagcattatttctgaagttaaagaagaaaaaataaatggtattaatgttactgttccattcaaaaaagcagtaattccgtttttagatgaattaagcccggaagcaaaagatactcaatcggttaatacaatttattttcaaaatggtattacaatcggtcataacaccgatattgctggttttgaattggcaattaagcacgcaaaatttgatatttctggcaagaaaatatttgtattaggagcaggaggagtggccccgtcaattcttttttcacttaaaaaaatgaaagcttcaaaaattatattaagtaatagaactaaagaaaaagcagaaaatttaaaaaatttatttgaaggtcttgaaatagttgattggggagaa

SEQ ID NO: 206129 - DNA, 556 bp, Unknown
  Bacterial polypeptide expressing nucleotide sequence isolated from the Sargasso Sea
atgagaaaatatttagtaattggaaatccaatagagcattctttgtctccattattacataacttttggattaaaaaatacaatataaatgctttttacgaaaaacagttattagaaaaaaatgacgttgaaaaatttctcagtgacgttagggcaaataagtttcacggtataaatgttactgttccttttaagaatacggtaattccattcttagatcaattatcagatactgcccaaaagactcaatcagtaaatacaatttttaaaaagcaaaataagctggttggtgataacaccgatgtttatggtttctcagaggcaatcaaattaactaattttaatccaacaaacaaaaaagcattaattttaggtgctggcggcgtggtcccttccgttcttctggcgttaaaaaatatggggtttaatcaaataactttatcaaaccgaactaaagaaaaggcgattaatcttaaaaaaagtttcccttttatcaaggtgattaattggggtgaaacagtaaaatctgatttaataattaacgctacaagtgtag

SEQ ID NO: 206130 - DNA, 672 bp, Unknown
  Bacterial polypeptide expressing nucleotide sequence isolated from the Sargasso Sea
gatggatgaggcaaggccacgtttagcagctgttttaggtaatccaatatcccactcaaagtcgcctagaatgcacaactattggttaaagcaaaacaaagtaaatggttattatataccaataaaagttgaactagaagattttgaacaaactatacgcgcgttagtgaatatgggcttttctggagtaaatgttactataccacataaattatcagctctaaagatagcggataaaagctcaagcacagcccaatatattggcgcagctaacactttaacgttcaccaaagaaaataaaatatatgccgataatacagacgcttatggctttataaataacataaaatttaaatatccagactggactccaaaaaaaggaatatcagtagttttaggagcaggaggagcaagtagagcggttatagccgcgttattgtcagaaggctcagaaaaaataataattctaaacaggactattgaaaaagctgaagcacttaaaaaagattacgataataaaatcactgttgagccttggaaaaatataaatgaagtagtggcctcgagtagcaatataatcaacactacttcactgggcatgaatgatgaaacatttgttgctataaccccaaagctatacctgaaaaagctcttgtttcagacttggtttac

SEQ ID NO: 206131 - DNA, 412 bp, Unknown
  Bacterial polypeptide expressing nucleotide sequence isolated from the Sargasso Sea
aatgaaaaaatatttagttataggaaatcctattgatcattctttatctccaaaacttcacaatttttggtttaaaaaaaataatattaaagcaatatatgaaaaaaaacagatagacgaagatgaaattgaggaaataatagcagaattaaaaaaagaaaaaattaatggaataaatgttacggttccctttaagagatcagtaataccatttattgatgaattaagctcagaagctaaaaaaactcaatcagtaaataccatttataaaaaaaataataaaattttaggacataacactgatataagcggatttgagttagctataagaaaaaaaggttatattttaaatggtaaaactatttttattttaggagccgggggagttgtgccttctataattttatcttta

SEQ ID NO: 206132 - DNA, 679 bp, Unknown
  Bacterial polypeptide expressing nucleotide sequence isolated from the Sargasso Sea
atgaaaaaatacttagtaataggaaatccgatagagcattctttatcaccattattacataacttttggttaaaaaagcatggcataaaggccatctacgaaaaacaattggtagagaaaaatgatattgaaaaaattatcaatgatatgagagaaagcaagattcaaggtataaatgttacagtgccttttaaaaaagtagtaattccatttttagatcaattatcagacactgctaaaaagactcaatcagtaaatacaattttcaaaaaacaaaacaagttagttggtgataatactgacgttcacggtttctcagaggcaataaaattaaccaatttcaatctaacaaacaaaaaagcactaattttgggcgccgggggtgtagttccttcaatcatattggcattaaaaagtatgggaacttcagaaataattttatcaaacagaacaaaagaaaaagcagacgatctaaaaaaaagtttcccctttttaaaagttattagttggggggaaacaataaaatccgatttaataattaatgctacaagcataggtattaaacaaaatgaggaaatcaaactagaccattctaaactagatggtcagttgttttatgacgtaatttacaatccacccaaaacaaaatttttggaaaacgcaaaaaaatctggaaaaa

SEQ ID NO: 206133 - DNA, 688 bp, Unknown
  Bacterial polypeptide expressing nucleotide sequence isolated from the Sargasso Sea
aatgaaaaaatatattgtaattggaaatcctattgaacattcgctctcacctaaattacataattattggtttgaaaaaaataatataaatgcaaattacggtaaaaaaaaaatagacaaaagcgaaatccaaaagattatttctgaaattaaggataacagcttagatggagcaaatgttactgttccttttaaaagcgatgtaattccctttttggatatgctgagtgaagagtcggaaattacccaatctgttaatactatatacatgcacgacaaaaaactagtaggtcacaacactgacataaaaggttttgaattaagtttaaagggagctcaatttgaactaaaaaataaatcaatattcatattgggagccggaggtgtagtgccctcaataatttatgctttagaaaaattaggagtttcaaaaataacagttagcaatagaacaaaacaaaaggctgaaaacttaaaaaaaacttttttaaatgtaagtgtagttgattggggagatcaacctgaatttgatatgattattaacgctaccagtttgggtctaaacatagaagataaaatagatttgaattttaataaaatgaataaagaaaagctattctatgatgttatttacaatccaaaagaaactaattttttaagagctggaaaaaatttaggctgtcaggtt

SEQ ID NO: 206134 - DNA, 700 bp, Unknown
  Bacterial polypeptide expressing nucleotide sequence isolated from the Sargasso Sea
atgacactgtttgtaattggaaaaccaataaatcactcactttcaccacttatccataatttctggattaaaaaacaccagatagatctagaatataaaaaaatggaagttgataaagacactctcccttccttgatagaaaaagtaaggagcagagaaattactggtttaaacgtaacccttccttataaaaaggatataataatgtatattgatgagatttcatactcggcaaaagacataggagccgtaaatacaatctttttaaaaaaaaataaagtctatggtgataatacagatggaattggttttacaagatctctagaaaaacaaacagaatttaattttaaaaataaatcaatctatattctaggagcaggcggcgcatcatacggcatcatttctgaattaataaaaaaaaaaatacaaacaatttatatagctaatcgaacaaaacaaaaaacaatccaattaataaattattttaaaagtaaagatcaggatttgaatttaaaatttgctgactgggaagacctatcccccggctctgatgttgatttaataataaatacgacctccttcggaatgatggaaaatgaattcctagaaattaacattgataaccttaaagacacattaatactagttgatattatttataatccaaaaagagaccgaagttacttaaattttcaggaaa

SEQ ID NO: 206135 - DNA, 282 bp, Unknown
  Bacterial polypeptide expressing nucleotide sequence isolated from the Sargasso Sea
aatgaaaaaatacttagtaatagggaatccgataaatcattctttgtctcctgaattgcacaatcattggattaaacaaaatggtcttgatgcaatctatgaaaaaagaaaactagataataacgatttggaaaatttaattctagatatcaaaaaaggaaatataaaaggcgtaaatgttacagtaccttttaaaaatactataataccctttttagatgatttaagtattgaagccaaaaaaacacactcagttaacacaattcatttaaaaaacaaaaa

SEQ ID NO: 206136 - DNA, 244 bp, Unknown
  Bacterial polypeptide expressing nucleotide sequence isolated from the Sargasso Sea
aatgaagaaatatttagttataggaaatccaattgaacattcattatccccaattttgcataattattggattaaagagaatgaaattaatgcaatttatgagaaaaaaaaattggaagaacatgaattagatgatttaattttgaacataaagaataaaaaaatcgatggaataaatattacagttccattcaaaaaaaaaattataccttatctagataagctttctgatgaagcttcaaaa

SEQ ID NO: 206137 - DNA, 201 bp, Unknown
  Bacterial polypeptide expressing nucleotide sequence isolated from the Sargasso Sea
aatgaaaaaattttttgtaattggcaatcccatagatcactctctatcccctgagttacataatttttggattaaaaaaaataagattaatgcagtttacgataaaattaaattagaagaatcagacttaaaagattttatcaataaattaagaaatgatgaaatacacggaataaatgtaacagttccgtttaaaaacag

SEQ ID NO: 206138 - DNA, 786 bp, Unknown
  Bacterial polypeptide expressing nucleotide sequence isolated from the Sargasso Sea
tctctgtcgccgcaaatacatcagttttcgcgcaagaatctggtctagtaatttcttatggaaagcacttggtttcgccagagtcattcaatgaagcaatagattttttggtcgactctggccatgtcggttttaacgtaaccgtgccgtttaaagaggatgcttataaaagagtcgacacttcggacgacatagcgtcggaggcccaagctgttaatacaattagagtagattgcgagggccaattacatggcttcaataccgatggacttggtttgacaagagacttagtccatcggcatggaatatctgttggtaattccgatatcctaattttaggggcaggtggtgccactcgtggggtaatcggccccttgctcgacgaaaaaccaaattcattgaccgtaacaaacagatccagagaaaagggagaagatttaatgcgtcgtttttctaaacgctaccctcattccaatttgtattttagagatatgaaagagctagatggctcttatgatttagtgattaatgccacctcaattgggttgtcgggggcctttgatctcctgggagagaatgtcgtaatgggcaagatctgttacgacttgtcttatgggtcaggagcatcttttgcgacctgggctcgatccgtaggagctgctacctcggtcgatggcttgggtatgttggtcgaacaggcggcagagagtttcttaatttggcatggtcatcggcctgatacggaccatctttacgaacaactaagagccaaaattgatgactgat

SEQ ID NO: 206139 - DNA, 543 bp, Unknown
  Bacterial polypeptide expressing nucleotide sequence isolated from the Sargasso Sea
aatgaaaaaatacttagttataggaaacccaatcaaacattcattatcacctaaattacataattattggataaaggaaaataatatagatgctatttatgataagaaacagcttaacgaaagtgatattgaaagaataattaaagaagttaaaaatgaaaaaattagcggaataaatgtaactgtccctttcaaaaaatctgtaatatcttttcttgatgaattaactccacttgctaaagaagctcaatcggttaatacaattttcaaaaaaaataataaagttattggagacaacactgatattggtgggtttgagcaaagtttaaaaaatattaattatagtgttaaaaacaggaaggtatttattataggagcgggtggagtagctccttcaattattctagcattaaaaagattgggagcagcaaaaataaatttaactaatagaacaaaagaaaaagctgaagatttaaaaaaaaattaccctaatttggaaattgtgaattggggtaaaaatactgattttgatatgattattaa

SEQ ID NO: 206140 - DNA, 326 bp, Unknown
  Bacterial polypeptide expressing nucleotide sequence isolated from the Sargasso Sea
tatgaagaaatacttagttataggtaatccaatagaacattccttgtcgcctaaattacataattattggataaaagaaaataatattaatgctgtgtatgacaagaagaaattagaaaaaaatgatataaaggcaatcattaatgagttaaaaaacgaaaatataaacgggctaaatgtaacagttccatttaaaaaatatattataccttatctcgatgaattaacgccattagcaaaagaagcacattcggtaaatacgatatttaaaaataaaaataaaattattggtgataacactgatattgctggttttgttaagggtt

SEQ ID NO: 206141 - DNA, 277 bp, Unknown
  Bacterial polypeptide expressing nucleotide sequence isolated from the Sargasso Sea
atgaaaaaatattttgtaattggaaatcctattgatcactctttatcacctaaacttcataattattggtttaaagaaaataagattgatgccgtatatgataaaaaaaaaattgtcgagaatgatctaaaaataataatttcggagtttaaagaaaaaaaaataaatggcattaatgttactgttccattcaaaaaaaaaataattccttatttagataaattgagcccagaagcagagcaaacacagtcggtaaatacaataactttaaataatg

SEQ ID NO: 206142 - DNA, 562 bp, Unknown
  Bacterial polypeptide expressing nucleotide sequence isolated from the Sargasso Sea
atgaaaaaattttttgttataggaaacccaatagaacattctttatctccaaagttacataattactggataaaatctaataatttaaaagctgtttacgataaaaaaaaattagatatttcagaattagataatttaattaaagaagtaagagaaaaaaaaattgatggaattaatgttactgttccttttaaaaattctgtaattccttttttggataaactatccaatgaggctcaaaaaacacaatcagtaaatactatttatttgagagatggaatggtaataggtcacaatacagatattgaggggtttgagcttgctattaaacatacaaattatgacattgttgggaaaaaagttttaatattaggtgcaggaggtgtttcgccgtcaattatagtggctttaaacaatatgagtgccaaaaaaatatttataagcaatagaacacaaagcaaagctgaaaatttaaaaaaaacttttaatgaaattgaaattattaaatggggaataataccagattttgatatgatcgttaacgctactagtttaggttgaa

SEQ ID NO: 206143 - DNA, 370 bp, Unknown
  Bacterial polypeptide expressing nucleotide sequence isolated from the Sargasso Sea
aatgagaaaatatttagtaattggaaatccgatagagcattcattgtctccattattacataatttttggattaaaaaacacaatataaatgctttatataaaaaacagttattagaaaaaaaagatgttgaaaaaattctcagcgacgtcagggcaagtaagcttcacggtataaatgttacagtaccttttaagaatactgtaattccatttttagatcaattatcggatactgctcaaaagactcaatcagtaaatacgattttcaaaagtcaaaataagttggttggtgacaacactgatgtttatggtttctcagaggcaattaaattaactaattttaatccagtaaaaaaaaatgcattaatt

SEQ ID NO: 206144 - DNA, 262 bp, Unknown
  Bacterial polypeptide expressing nucleotide sequence isolated from the Sargasso Sea
atgaaaaaatacttagtaatagggaatcccataaatcactctttgtctcctgaattgcacaatcattggattaaacaaaatggtctcgatgcaatttatgaaaaaagaaaattagataataacgatttagaaaatttaattttagatatcaaaaagggaaaaataaaaggtgtaaatgttacagtaccttttaaaaatactataataccttttttagatgatttaagtactgaagctaaaaaaacacactcagttaacacaa

SEQ ID NO: 206145 - DNA, 940 bp, Unknown
  Bacterial polypeptide expressing nucleotide sequence isolated from the Sargasso Sea
tttattcggtcttgatgaagaatcaagaaaactttccataacgtacacacagatattagttggatttactccagtgtttgcaatttcaatggttcttggaacagctcaacgagctgcaggtgatgcaaaaacacccctatacatcggacttgtaacgaatgtcgtaaatattgtacttttgataggtttagttgagggccgttatggaatgcctgaaatgggcgtagtaggtgcagccctagcagcaggccttgcattcactttcaactcagttcttgtattaggattgtggtttggaaagaaacttgcagtttcagtaggtaaggcaggatcgatgacgtatgatcgtttaaaacaacttataaccataagttaccctgcaggattggaatcttttatttttcaatttggtatgctttcttttttctggatagttgctctttatggcactgatgcagttgctgcatacaatataggagtgaatgtcctaatgctgtcatttactgtaggtaatggctttgccatagcaggagctactttaacgggacaacatctaggtgcttctgatcctgacaaagcttatgattctggttttaaagcggctcgactaactatgctttcaatgggttcactaggtattcttttagcaatattttctagagaacttgcaggcttctttattaacgatattgacgtgatcaacaaaactgtcgtatttgtgtggatgctaggaatcatgcaaccctttatggcgatagaattttcaataggcggcgccgttagaggagctggagacactaaatctcctttgataataactttaataggacttgttttagtcagggttccccttgcatatcttttctataatctaggccttccaattgaatggattttatgcacgctcattgctgaatattttttaaaggaatgttgttag

SEQ ID NO: 206146 - DNA, 646 bp, Unknown
  Bacterial polypeptide expressing nucleotide sequence isolated from the Sargasso Sea
atgaaaaaatattttgttataggaaatccaatagatcattcattgtcacctaaattacataatcactggtttaagcaaaataatataaatgctttatatgataaaaaaaaggttagcgagactgatcttgaaagaataattgcagaagttaaaacgggtaaagtagatggaataaatgtaacggttccttttaaaaaatctgtaatcccttttctagatgaattaacgtctcttgccgataaaacacaatctgtaaatacaatttttaaaaaagaaaataaggtaattggagataatacagatgtagaaggatttgaacgtggtttaaaacatattaattatgatgttaaaaacaaaaaagtatttattctaggagcaggaggtgtggtcccctcaattattttagctttaaaaaaccaaggtacatcaaaaattattttgagtaataggacagaaacgaaagcaagagacctaaaaaaaatttatcctaatttagaaattataggttggggtgaaaatactaattttgacatgattattaatgcaacaagtttaggtttaaaaagtgatgatcaaattcaattagattttagcaaaacgggatcaaataaattattttatgatgtaatttataacccaccataga

SEQ ID NO: 206147 - DNA, 559 bp, Unknown
  Bacterial polypeptide expressing nucleotide sequence isolated from the Sargasso Sea
aatgaaaaaattcttagttattggaaatccaataaatcactcgctatctccaaaattgcataatttctggataaaaaaatacaatttagatgcaatttatggaaaattggaaacacacaaaagtgatctagaggaattatgtaaaaacttaaaacaaggtcagttgaatggtcttaatgtaactgtaccctttaaaaaggaaataattccttacatcaatgtcttaagtggtcatgctttgagaacaaaatccgtaaataccatttctgttgaaaatggaaatttaataggtcacaacactgatattgatggttttgaacttagcataaagaaattaaattacgatgtaaccaacaagactataattattctaggtgctggtggagtagttccatcaataatatatgcgttaaaaaggatgaacgcttcaaaaatatttgtgagcaacagaacgaaaagcaaggctgatgagttaaaagatttatttaatggcttaatgatattggattggggcgatttagtagattttgatatgataattaatgcaaccagtataggc

SEQ ID NO: 206148 - DNA, 326 bp, Unknown
  Bacterial polypeptide expressing nucleotide sequence isolated from the Sargasso Sea
gatggaccgttatgttgtgttcggcaaccccatcggccatagcaaatcgccgctgattcatcgtctgttcgctgcccagaccggcgaacaactgcactacagcacgatgctcgcgccgttggaggacttcaccgcctgtgcccgtgagttcttccaacacggccgtggcgccaacgtgaccgtgccgttcaaggaagaggcctatcgcttggccaataccctgaccgaacgggcgcagcgcgccggcgccgtaaacactttgagcaaattggctgacggcacgttgttgggcgacaacaccgacggcgcgggcctggtgcgcgact

SEQ ID NO: 206149 - DNA, 669 bp, Unknown
  Bacterial polypeptide expressing nucleotide sequence isolated from the Sargasso Sea
aatgaagaaatatgtagtcataggaaacccaatagagcattcaatgtctccaaaattacaaaattattggataaaaaaaaacaaattaaacgcccagtatgataagatgaaattagacgaaaatgaaatcgaaagtgtaattgaacaattaaaaaatggatctatttctggcataaatgttactgttccattcaaaaaatcagtaataccttttactgatgagctcacgtctgtatcgcaagaaactaactcagttaatattgtttataaaaaagatgaaaaaattattggagacaataccgatgtcttcggtttccagaaagcactaaagttaactaattttgatattagtgaaaaaaaagcttttattttaggagccggcggagtagctccttcaattatacacgctcttaaaagtatgggagtttctgatatagttgtaagtaatagaacgattgaaagagcagatattttaaaaaaaaaatatcccttcattaagattataaaatggggagatacaccaaatgccgatatagtgattaatgctacaagtttaggtcttagaaaaggtgaaaatctcaaaatagattatggaaaaattggcccccaaaagctattttacgatgtcatttataatcctgaaaaaaacaactttctttttaaagctga

SEQ ID NO: 206150 - DNA, 452 bp, Unknown
  Bacterial polypeptide expressing nucleotide sequence isolated from the Sargasso Sea
aatgaaaaaatattttgtaataggaaatccaattaatcattctttgtctcctaaacttcataattattggttaaaagaaaataatatagatgctgtttatgaaaaaatggagttaagcgaaaatgatatagaaggaattattagtgaaattaaaaatgaaaaaataaacggaataaatgtaaccgttccatttaaaaaatctgttataccatttttagatcaattgacacctcttgctagagaagctcaatcagtaaatacagttttaaaaaaagataataaaattatcggagacaacacagacataggtggatttgaacaaggtctaaaacatattaattatagtatcaaaaataaaaaagtgtttattttaggggcgggtggagttgcttcttcaattattattgctttaaaaagattaggagtttctaaaattattttgagtaacagaa

SEQ ID NO: 206151 - DNA, 503 bp, Unknown
  Bacterial polypeptide expressing nucleotide sequence isolated from the Sargasso Sea
tatgaaaaaatatttagtcataggaaacccaatagatcatacattatcaccgaaactacataattattggattaaaaaaaatagtatttcagcagtttacgataaagagaaatttaaccataataatttaaaaactttaatattaagaattaaagataaacaaattagtggagtgaatgtaacagttccttttaaaaaggaggtaataccttatttagatgaattgacaccagaagcaaaaggaacacaatcagtcaacacaatctatttaagtgataataaaattgttggtcataatacagatattgaaggatttgagcttgctattaaaaaaacaaattataaccttaaagaaaaagaaattctaattttaggtgctggcggagtcgtgtcatctattatttatgctttgatcaaaatgaaagcttccaaaattacactgtctaatagaactaaaaataaagcagaaaatatgaaaattttgtttaaaaattttatcatta

SEQ ID NO: 206152 - DNA, 850 bp, Unknown
  Bacterial polypeptide expressing nucleotide sequence isolated from the Sargasso Sea
atggttctatgcttcgaggtagcgttgaataaatatttggtattgggcaacccgatcgatcactctctgtcgccgcaaatacatcagtttttcgcgcaagaatctggtctagtgatttcttacggaaagcacttggttccgccagagtcattcaatgaagcaatagacttcttagtcgactctgggcatgtcggttttaatataaccgtgccgttcaaagaagatgcttataaaagagtcgacacttctgacgacatagcctcggaggcccaagctgttaatacaattagagtagatggcgagggccaattacatggcttcaataccgatggaattggtttgacaagagacttagtccatcggcatggaatatctgtttgtaattccgatatcctaattttaggggcaggtggtgccactcgtggtgtaatcggtcccttgctcgacgaaaaaccaaattcattggctgtaacaaacagatccaaagaaaagggagaagatttagtacatcgtttttctagacgctaccctcattccaatttgtattttagagatatgaaagagctagacggctcttatgatttagtgattaatgccacctcaatcgggttgtcgggggcctttgatctcctgggagagaatgtcgtaatgggcaagatctgttacgacttgtcctatggatcaggagcatcttttgcgacctgggctcgatccgtaggagctgctacctcggtcgatggcttgggtatgttggtcgaacaggcggcagagagtttcttaatttggcatggtcatcggccggatactgacgatctttacgaacaactaagagccaaaattgatgactgat

SEQ ID NO: 206153 - DNA, 796 bp, Unknown
  Bacterial polypeptide expressing nucleotide sequence isolated from the Sargasso Sea
gatgaaaaattattcagtaattggaaatcctatagatcattctttgtcacctaaattacataatacttggttaaaaaccaataatatcaatgctttttatgacaagcaaaagctagaagggaaagaaatagaaaactttattcaaaaaattaaacaacaagaaatagcaggcgcaaatgtgactgtgccttttaaaaaaaaagtaataccttttttagataagttgagttttgaagcagaaaaaactcaatccgtaaatacaatagtttttgaaaataataacttagtaggacacaatactgatgtaattggatttactagagctattacagatctaaattttaatataaagggtagtaaaatttttattttgggcgctggcggagtagtaccatcaattatttttgctttaaataaaatgggagtgtcacaaataacaatcagcaacagaacaaaagaaaaggcagaaaatttaaaaattaaatttaataatttaaaaattatagattggggaaccatacaagattttgatatgattataaatgctacaagtttaggcctgaataaagaagagataaatttagattttacaagaattggaaatggtaaattattttatgatgttatttataatccaagcgaaactaattttttaaaagagggaagaaaattaggaaacaaagtggagaacggaaaattgatgtttttatatcaggcttttgaagcatttaaattatggcatggtattgagccccagattaatgaaaatataatgagacttttagagaatgattag

SEQ ID NO: 206154 - DNA, 799 bp, Unknown
  Bacterial polypeptide expressing nucleotide sequence isolated from the Sargasso Sea
atgaaaaaatacttagtgataggaaatccaatagaacactcactttcccctaaactgcataattattggataaaagaaaataatttaaatgcaagttacgaaaaaaaattaattgaaaaatcagaaattaaaggaatcattgacgatcttaaaaataataaaatttcaggggttaatgtaacagtcccctttaaagcacaagttataccttttctaaataaacttactccggtttcacaagaaacaggatctgtaaacacaatatataaattgaacgatgaagtagtaggagacaatacggacgtcgacggtttttgtgccgctttaaaaaaaactcaatataattttaagagcaaaaaagcctttatacttggcgccggaggagttgccccctctattatttgtggcttaaaaaaaatgggtatttcaaacatatcattaagtaatagaacccgtaaaaaagcagaaattttgaaaaaaagattcactgatttgaaattagtaaattggggcgagacatcaaacgcagatataataataaatgctactagtttaggccttaaggaaaatgatgaaataaaacttgattattcaacaatagggtcaaataagttattctatgatgttatttacaatcctcctgaaacaaagtttcttttaaatgctaaaaaattaaacaataagattgaaaatggaaagttaatgtttatttatcaagctcaattggcctttaagatctggcacaatgttttaccaaagatcgatgataatacactaaatttaatggatcatgattaaa

SEQ ID NO: 206155 - DNA, 826 bp, Unknown
  Bacterial polypeptide expressing nucleotide sequence isolated from the Sargasso Sea
atgattaaaaaatatggtgtaatcggagatccaatagagcatagtctttcgccaataatacataaagagttttcaaatcattttggtattcaacttcaatatgaaaaatatttagtcaaagacaaccaattatctgatttcataaatcaatcaaaaagtagtttttgggcaggtttaaatctaacaattcctcataaaattaaagctatagattatgttgatgagttagatttgagtgcgatagaagccggtgccataaatacaattcatttttatgacggtaaatcaaaaggatataatacagacggaagtggcttaatttatgatttaaaaaataatttaaatattaagatacaaaacaaaaaaattttaataattggagcaggtggtgcggtaaaaggcattctttcaaagttaattcttgaatgcccagatgatatttacatatataatagaacaaaaaataaaattaaggaaattcaggagaattatttaaaaaaattcaaaataaatgaaatcaataatttatgtaattcagaaattaattttgatttaataattaatgccattccatcaagtttcattcaaggtttagataattttattgattattcggttcttaataaatcaactgtgttttacgatttatcatatggatctatttcaggtaactttaaagcctggtgtaaatcaaaaaatgttacctatcacgacggtcttggaatgctcatagaacaagctgcagactcttttttaatttgggaaggcaaaaggccacaaataactgatcgtataaagaaaataattactgacagctatctataga

SEQ ID NO: 206156 - DNA, 793 bp, Unknown
  Bacterial polypeptide expressing nucleotide sequence isolated from the Sargasso Sea
aatgaaaaaatacttagtaattggaaacccaattaaccactctttatcaccaaaattacacaatttttggattaaacaaaatcgaattgatgcaatttatgataaggcaaaattaaatcttgaccaagtggaaaatttaatttcacaagttaagagcaaaagaataaatggaattaatgttacagtaccatttaaaaatacaattataccttatgtagaccaattgagtactgaggcagaaaaaacaaaatctgtaaacacaatatatctaaacaacgataaggtaataggacataatactgatatagatggtttcgaaaaagcaataaataaaataaattttaaagtgtctgataaaagaatttttatattaggtgctgggggcgtagtgccctcaatcatctacgctttaaataaaatgggagctttcaacatttttataagcaacagaacaaaagccaaagctcagatggtaaaagatatctttaataatcttagtatactcgattggggagatgtaccagagtttgatgtaattataaatgctactagcttaggtctgaataaaaatgataatatagaattagatttatcttcgacaggaaagaataaattatttttcgatgtgatttataacccaaatgaaactaattttttaaaaaatggaaaaaagctagggaacaagtgtgaaaatggtaaattcatgtttatttatcaagctttttcagcatttaagttgtggcacaatatagagccaactattaacagtgaaacaattaaacttttagaataa

SEQ ID NO: 206157 - DNA, 793 bp, Unknown
  Bacterial polypeptide expressing nucleotide sequence isolated from the Sargasso Sea
aatgagaaaatatggcgtaattggagatccgatcaatcacagcctaagtcctttattgcatggagagatatatagtcaaataggaatgcctattagttataataaacaactcattaaaaattcagagctttcatcttttgtgcttgataacaaattgcaatcctacaacgtgacaatacctcataaagaatcaattttagattttttagacagtctagattcggttgcagttgagataggtgcggttaattgcgtaatgaataaaaaaggttttaatacagactggctaggctttataaaagctatggcatttaataaggtagaaattaaagataaaaattgcttaattattggagctggcggtgtgcaaaaagcaatttgctatgcgttaattaagtcaaaatctaaatcaattgatgtgattaatcgatcaaggagaagaaaaaaagaacttgttcgctggatcagttcatatggaataaagaataataaaaaagagatgccagatataatcattaactgtacgcctattggtatgtggccaaatacagaaaatctaccaattaatataaataagatacatactaatcaaataatcgttgatacaatctataatcccatagaaactgagtggataaaattatctagaaaaaaaggggcattcacaattggaggtctagatatgtttatttttcaaggaatagcctctgcagaaatatgggaaaataaaaatatcactaattcgcttaaactcaaccaaataaaaaaggttttaaaattagaactatgctaa

SEQ ID NO: 206158 - DNA, 805 bp, Unknown
  Bacterial polypeptide expressing nucleotide sequence isolated from the Sargasso Sea
atgagtaaatttttagttattggtaatccaattgaacattcattatctccaccaatacacaattattggtttaaaaaatataactttgtaaatcattcttatgaaaaaaagaaagttaatgaagaagatttggaaaaaattgtagatgcgttaagaaaaaatgaattaaaaggtataaatgttactgtgccttttaaacaaaaaataatcccatatttagatggcctagattataaagctaaaaaaactcaatcagtaaatactttgcttaaaaaagacaataaagtttttggatataatacagacagtgtagggttttgcgcaacactatccaaaaaatataatcatgaaactgctggtaattataaattttttataattggagctggtggagtaacatcatctataatcgatggcattggagaggcaaataaaatttatgttacaaatagaaccaaaggtagggctgaagagttaaaaaaaaaatttccccaaattgaaataattaattggggaacaaagcctcctatatgtgatgttattattaacactactagtgttggattaacaaaagatgaaaatttgaaaattgattttactaattacttaaataacaaacatgctcttttttatgatttaatttataatcccaaagaaaccaattttttgaaaaatgcaaaactaagaggaaataaaataatgaatggacaaatgatgtttttatatcaagctcaagcttcctttcaattatggacagatgtaaatccagaaataaatgatgaaattataaaaatactagaataat

SEQ ID NO: 206159 - DNA, 571 bp, Unknown
  Bacterial polypeptide expressing nucleotide sequence isolated from the Sargasso Sea
aatgaaaaaatatttagttataggaaatcccatagatcactctttatcaccgaaactccataattattggattaaaaaaaataaaattgatgctatttatgaaaaaaaattacttgttaaggatgatttggaaaaaataatatcaaaattaaaattaggtgaaattaatggaataaatgtaacagtaccatttaaaaatactgttatttcttatgttgatgaattaagtgtagaagcaaaaaaaacacaatctgttaatacaatttattgtgaaaataataaaaccattgggcataatactgatatagcaggttttgaattagggttaaggcatttcaaatataatgttataggaaaaaaagttcttattttaggtgcaggaggagttgttccttcaattatttttgctttaaaaaaaatgaaagtatctcatatagttttatccaatagaactaaatcaaaagcagaaaatataaaaaaaatttttccagaaattgaaattatagattggggaaaaacaggggaatttcaatatgattataaatgcaacaagtataggtttgaaaagtga

SEQ ID NO: 206160 - DNA, 796 bp, Unknown
  Bacterial polypeptide expressing nucleotide sequence isolated from the Sargasso Sea
aatgaaaaaatatctagtcattggaaatcctattgatcactctctttcacccaaattacataactattggtttgaaaaaaataatatagatgcaaattatgataaaagaaaaataattaaaagtgagatccaagaggttatttcagaaattaaagacaataaattagatggaataaatgttaccgttccttttaaaaatgaggtaattccttttctggatatgctgagcgaagagtcaaagattactcaatctgtcaacactataagtatacatgacaaaaagctggtaggtcacaacactgacataaaaggttttgaacttagtttaaatgaaactcaatttaatcctcaaaataaaacagtatttatattaggagctggaggggtggtaccttcaataatttatgcattagaaaaattaggtgtttcaaaaattatagtaagtaatagaactaagcataaagctgaaaatttaaaaaaaaatttttcaaacatcagtgtagttgactggggagatcaaccagaattcgatttgattattaatgctacaagtttaggtttgagcaaaggagataatatagaattgaattttaaaaatataaataacgaaaagcttttttacgatgtaatttacaatccaaaagaaactaattttttaaaaactggaaaaagtttaggctgtaaggtttcaaatggcaagatgatgtttatttatcaagcttttgaagcatttaaactatggcacaaagttcaaccagaaattaatgaagatttgaaaaattttttagacatatga

SEQ ID NO: 206161 - DNA, 706 bp, Unknown
  Bacterial polypeptide expressing nucleotide sequence isolated from the Sargasso Sea
atgaaaaaattttttgttataggaaacccaattgaacattctttatctccaaagttgcataattattggataaaatctaattatttaaaagcattctacgacaaaaaaaaaatagatatatcagaattagaaaatttaattaaagaagtaagagaaaaaaaaattgatggaattaatgttacggttccttttaaaaattctgtgattccttttttagataaacttactaatgaggcccaaaaaacacaatcagtaaatactatttacttaagagatggaatgacaataggtcataatacagatatagagggcttcgagctggctattaaagatacaaattatgatattgttgggaagaaagttttaatactaggtgcaggaggtgttgcgccatcaattatagtggctttaaataatatgaatgtcgaaaaaatatttataagtaacagaacacaaagcaaagtagaaaatttaaaaaaaacctttcataaaattgaaatagttaagtggggaacaatgccaaactttgacatgattgttaatgcaactagtttgggcttacaaaaagatgataatattcctattgattattccaaatttgattcagacaagtttttttatgatgttatttataatccttctgaaacaaatttcttaaaagctgcaaaaaaaaatggaaacaaaacagaaaatgggaaaaaaatgt

SEQ ID NO: 206162 - DNA, 796 bp, Unknown
  Bacterial polypeptide expressing nucleotide sequence isolated from the Sargasso Sea
aatgaaaaaatttttagtaatagggaatccaattgaacattctttatctccaaagttacataattattggataaaaaaacatagtttagatgcaatctatgggaaactggaaacctatgacaatgatttgtctgaattatgcaaatctatcaaaaaaggagatttggatggtttaaatgttactgtcccttttaaaaaatctataatacctcacctagatattttaagtagtaatgcattaaggacacaatctgtaaatactatctcgttaaataaagggcatttaattggagataacactgatattaatgggtttgaattaagtattagaaaattgaactatgatgttagtgacaagacagttctgatattaggtgctggtggtgttgtgccatcaattatttttaccctgttaaggatgaaagcttcaaaaatacttttgagtaatagaactaaagaaaaagctaataatttaaaagagttttttaaagagattaatattatagactggggtgatttaccaaagtttgacatgataataaatgccactactttaggtttaaataaggtggataaatttggcatagacttttccaaggttggacaaaataagcttttttatgatgttatatattctccatttcaaacagaattctctgaggcaggcaatgcaaaaggaaatgtaattgaaaacggtttaaatatgttcttatttcaaggccagcaagcctttaatatttggcataatgttgaaccagaaattaataaagaattaatagaatttctaaaaaattga

SEQ ID NO: 206163 - DNA, 481 bp, Unknown
  Bacterial polypeptide expressing nucleotide sequence isolated from the Sargasso Sea
tatgattaaaaaattctttgttataggtaatcccattgaacactctttctctcctaaattgcacaattattggattaaccaaaataatattaaagcaatttatgataaaaaaaaattagatatagataatttagagaacataattttagagatcaaagataaaaaaataagtggtataaatgtaactgttccatttaaaaaagcagttattccttatttagataaattaagtccagatgcagatcaaacacaatcggtgaatacaataattctagataataataatcttgttgggcataatacagacattgctggttttgctagggcaatcaaagatttaaattttaaaatggagggtaaaaaaattttaatcttgggtgcgggtggtgttgttccctcaataatttttgctttaagaaaaatgaatgctttagaaataataatttctaacagaaccaagcaaaaagcagaaaatttaaaa

SEQ ID NO: 206164 - DNA, 637 bp, Unknown
  Bacterial polypeptide expressing nucleotide sequence isolated from the Sargasso Sea
aatgaaaaaattttgtgtcataggaaatccaattgatcattctttatctccaaagcttcataacttttggtttaaaaaaaataagattgaagcaatttatgaaaagaaacttcttgaggaaaaagaaatcccaaaactaattgatagcattagaaaatcagaaattaatggagtcaacgttacagttccatttaaaaattcagtaattccttttttggacagcctcagttctgaggcaaaaaaaacgaactctgtaaatactatttgtatagaagaagataaaataataggccataatacagatattgctggatttgaactagctctaagatacatcaattatgacgtaaaaagaaaaaaggcgcttataataggagcgggtggagttagcacttccattatcctcgctttaaaaaacatgggatgcgaaaacatcaatttaactaatagaacatttgaaaaagcagaaaaaataaaagaaacatttaatgacattactgttcaaaagtggggcgatgtaccagagttcgatatagctattaatgcaacgagcgtcggcttgaataaagaaaatttcgatttggatttaaataagttcggaaataataaatttttttatgatgtaatttacaatcca

SEQ ID NO: 206165 - DNA, 692 bp, Unknown
  Bacterial polypeptide expressing nucleotide sequence isolated from the Sargasso Sea
aatgaaaaaatttttagtaatagggaatccaattgaacattctttatctccaaagttacataattattggataaaaaaaaataatttagacgcaatttatggaaaactggaagcttttgaaaatgatttgtctgaactatgtaaatctatcaaaaagggagatttggagggtttgaatgtaactgtcccttttaaaaaatctataataccccacctagatattttaagcagtgatgcattaagaacacaatctgtaaatactatctcgttaaataaaggtcatttagttggagataacactgatatttatggttttgaattaagtgtaagaaaattgaattatgatgttagtgataagacagttctgatattaggtgctggaggagtcgtgccgtcgataattctttcattgttaaggatgaaagtatcaaaaatatttttgagcaacagaactaaaaaaaaagctgataatttaaaaaatatattcgacgagattaatgttgtagaatggggtgaattaccaaattttgatatgataataaatgccactactttaggtttaaataaagtagataagtttggtatagacttttttcaggctggtcaaaataagctattttatgatgttatatatgcgccatttcaaacagagttttcagatgcaggaaatgcaaagggtaattcaattgaaa

SEQ ID NO: 206166 - DNA, 895 bp, Unknown
  Bacterial polypeptide expressing nucleotide sequence isolated from the Sargasso Sea
gatgattaaagctgcggtaataggaaatccaattaaacacagcagatcacccttaatacataaccattggttaagaaaatctggtatcaatgggtcatacgaagccttatttgcagagaatgaagtagaatttattaacctgataaaaaaactgagagtgtctggttacagtggttttaatataacagtaccatttaaaaaaattgccagtgaaattgtggatgaaagaatcaataatgaaactagttattgcaacaaagatttgccagcaattaatactatcaaaatagaaaacgataagcttgtaggttataatactgattattatggattctcatctgttttatttaacaattttaagtctatggaaagtgttaaaaacataattatattaggtgcaggtggagctgcgaaatcaattttgtatggtttaagcgagacctttaaggatagcaaagatactaaatctataaaagtgacgatactaaatagaacattatctaaagccgatgaattaagtcaggcgttaaaaaacatcgacagtcctttcaagttttatttaggttctttgggtgaattcgaagacaatattccaaactgcgatcttcttataaactcaacctcattaggtatggaaggtattaaagtaaacttagatattagtttagaaaattcaaaaaaggacttatttgtttacgacatagtttatactccgctacagactcaattattgctttccgctaaaaaatttaataggagtttcacaaatggacttggaatgctaattaaccaggcagcacctgcgttttgtttgttctataattataataatctggatagtctattaaaagatacagctttatatgaaaagctagaaaaggatataggtgtttga

SEQ ID NO: 206167 - DNA, 799 bp, Unknown
  Bacterial polypeptide expressing nucleotide sequence isolated from the Sargasso Sea
aatgaaaaattttttagttataggaaatccaatagatcactcattatcaccgaaactgcataattattggtttaaaaaaaataatatccaagctgtttatgaaaagaaattaataaataaagaaaatatagaaaatatatttaataaaataaaaaaaagagaattaaatggaataaatgtaacagttccatttaaaaaatcagtgataccttttgttgaaaaattaacacctgaagcaaataaatcaaattcagtaaatactatatatttagaagataataaaattataggacacaacaccgatatagcaggatttgaattaagtataaggcatattaaatacgaaattaaaaataaaaaaatttttatattaggggcaggcggtgttgtttcttcaattattttaggcttaaaaaatatgggatgttctaagatttttataagcaacagaacaacacaaaaagcaaaagatttaaaaaattatttcaatgatttagaaataattgaatggggtaaagttccagaatttgacatgatcataaatgccacaagcctaggtctcaaaaaaaatgatgagataaaattaaattacaaagaaattggatccaataaatttttttatgatgttatttataatcctatacaaacatcttttttaaaaaaagcaaaagaatttggaaataggactgagaatggaaaaatgatgttcatttatcaagcacaccaagcatttactatttggaataatgttatgcctaaaattgatgatgaagtaataaagttgttagaaaatgattaa

SEQ ID NO: 206168 - DNA, 796 bp, Unknown
  Bacterial polypeptide expressing nucleotide sequence isolated from the Sargasso Sea
atgaaaaaatacttagtaatagggaatccgataaatcattctttgtctcctgaattgcacaatcattggattaaacaaaatggtcttgatgcaatttatgaaaaaagaaaactagataataacgatttagaaaatttaattctagatatcaaaaaaggaaatataaaaggtgtaaatgttacagtaccttttaaaaatactataataccctttttagatgatttaagtattgaagccaaaaaaacacactcagttaacacaattcatttaaaaaacaaaaaagtagttggacacaacactgatattacaggttttgaaactgcaattcaaaatataaactttgactttaaaaaaaaaaaaatttttattttaggggcaggcggagttgtcccatctattatttatgcttcagtaaaaatggggtcatctgaaattatgataagtaacagaaccgaaagaaaggcaatagagattaaaaatatttttaacaacattaaattagttaaatggggagaaataccggattttgatgttgtaataaatgcgacaagcttaggattaaatcaggatgataagataaatttagattttactaaggtgggtaaaaataaattattttatgatgtaatttacaatcccagcgaaacaaattttttgagcttaggaaaaaaattgggtaacaaatatgaaaatggcaaattaatgtttatttatcaggcattttcagcatttaaattgtggcatggtatagagccctcaataaatgaagagacaatcaagattttagatcgatgat

SEQ ID NO: 206169 - DNA, 789 bp, Unknown
  Bacterial polypeptide expressing nucleotide sequence isolated from the Sargasso Sea
ggatgcctgagatgggtgttgtcggagcagcactagcagctggccttgcattcactttcaactcagttcttgtattaggattatggtttggaaagaaacttgcagtttcaattggtaaggcaggatcgatgacgtacgatcgtttaaaacaacttataaccataagttacccagcaggcttggaatcttttatttttcagtttggtatgctttcttttttctggatagttgctctttatggtactgatgcagttgctgcgtacaacataggtgtaaatgtccttatgctgtcatttactgtcggtaatggctttgcaatagcaggagctactttaacgggacaacaccttggtgcttctgatcctgacaaagcttatgattccggttttaaagcggctcgattaactatgctttcaatgggttcactaggtattctattagcaatattttctagagaacttgcaggcttctttattaacgatattgatgtgatcaataaaaccgttgtattcgtatggatgctaggaatcatgcaaccctttatggcgatagagttttcaataggtggtgccgttagaggagctggagacactaaatctcctttaataataactttaataggccttgttttagtcagagttcctcttgcatatcttttttataatttaggtcttccaattgaatggatttatgcaactctcatagctgattattttttaaaaggaatgctgctagcatatagatacaaatctagaagatggatgaaagttctaaagattgataactgat

SEQ ID NO: 206170 - DNA, 796 bp, Unknown
  Bacterial polypeptide expressing nucleotide sequence isolated from the Sargasso Sea
aatgaagcaatttgcagtaatcggaagtccaatatcccatagcctaagtccaaatctccatgaagaaatttttagacaacttaatgtaaatgcctcatacagtagagtggatatattacctgagaacctaggaaatttcttcttgaacaatgagcttgatggttttaatgtaacaattcctcataaaatttcgataatgaaacatcttagcaatttagataccactgcagaaaaaatttctgccgtgaattgtgttcataataatatcggatataatactgattggattgggtttttacatgctatgaatttgaataatgtcaaacttgagaataaggactgtttgattattggtgctggtggagctgcatatgcaactgcatatgcacttatacattgtaaagcaagatcaataagtattacaaatagatcggaagacagtagaactaatttaatgaattggatcaataaccagtttgataataaaaacgggtttaacccaaatgtaattattaactgtacaccgcttgggatgtggcctaatctaaacgcaattccaacagatcaatacataaatgaaagtgatatcgctatcgaaacaatttataaccctgaagaaacaacatggctaaagaattgcaaaaaaagaggagcaaaaaccataagtgggcttgatatgttcatcggtcaggctattgcttcaatagaaatttggttaaatattagtattgaaaaaaaaattaatataaaaatgattaaaaatattttaaaggctgaattatgcttacaagaataa

SEQ ID NO: 206171 - DNA, 793 bp, Unknown
  Bacterial polypeptide expressing nucleotide sequence isolated from the Sargasso Sea
tatgaaaaaatatttagtaataggcaatccaatcgatcactctttatccccacaattacacaaccactggataaaagttaataaaattgacgctgtttatgaaaaaaaaaagattaaccaaaatgaaattaaagacttaattcgtaatgttaaagacaaaaaaatttctggaataaatgttacagtgcctttcaaacaagaagtcattacatatttggatgagctaacagatcaagctcaaaaaacacagtcagttaacacaatatacctagggactaatggagtggttggacataatacggatgttgatggttttaaaagcagtcttaaagatgaatacgatccaaaaaataaaaatattttaatattaggtgctggtggagtagtaccatctataatttttgcacttaaaaatatgagagctcaaagtataacaataagtaatagaactcgagaaaaagcagaatatttaaaaaaaagttttgaaaacataaaaattgtggactggggacaaattcctaatttcgatatgattataaatgctactagtgttggattgaatgttgaggatgaaataaacttagatttttcaaaaactaacaataaatttttttatgatgtaatatataatccaacggaaactaattttttgaaggctggcaaaaagtttggtaacaaaattattaatggaaagttgatgtttatttatcaagcatattatgcgtttgaaatatggcacaagcttttaccaaaagttgatgaagaagttttaaagcttttagaaaatgattaa

SEQ ID NO: 206172 - DNA, 434 bp, Unknown
  Bacterial polypeptide expressing nucleotide sequence isolated from the Sargasso Sea
tatgaaaaaatacttagtaataggaaatcctattgaacactctttatcaccacaattgcacaatcattggataaaaattcaaaaaattaatgctatttatgaaaaaagaaaacttaataaaaatgaaataaaagatttaattggagatataaaaaatcaaaaaattaatggaattaatgtaacagttccatttaaacaagaggtaattccatatttagatgaactaacagaacaagcaaaaaaaacaaaatctgttaatacaatatatttaggaactaacggaattaccggacacaatactgatattgagggtttcgaggaaagtcttagatatgcgaaatataacgttaaagataaagatgttttgatattaggtggtggaggagtagtaccatcaataatttttgcacttaagaatatgaaagctcaaaata

SEQ ID NO: 206173 - DNA, 796 bp, Unknown
  Bacterial polypeptide expressing nucleotide sequence isolated from the Sargasso Sea
atgaaaaaatttttagtaataggtaatccaattgaacattctttatctccaaagttacataattattggataaaaaaaaataacttagatgcaatttatggaaaattggaaacttatgacaatgatttgtctgaactatgtaaatctatcaaaaatggagatttagaaggtttaaatgttactgtcccttttaaaaaatcaataatacctcacctagatattttaagtagcaatgcattaaggacacaatccgtaaatactatctccttaaataaaggccatttaatcggagataacaccgatattaatggatttgaactaagtataagaaaattgaattatgatgttagtgacaagacagttctgatattaggtgctggtggtgttgtaccatcaattattttttccctgttaaggatgaaagcatcaaaaatacttttgagtaatagaaccaaagaaaaagctaataatttaaataattttttcaaagagataaatatcatagactggggtgatttacctgagtttgatatgataattaatgcaactactttaggtttgaataaagatgataagtttggtttagacttctcacaaattagtaataataagcttttttatgatgttatatactctccatttcaaacagaattctctgaggcaggtaatgcaaaaggtaatgtaattgaaaacggtttaaatatgttcttatttcaaggccagcaagcctttaatatttggcataacgttgaaccagaaattaacaaagaattaattgaatttctaaaaaaatgaa

SEQ ID NO: 206174 - DNA, 787 bp, Unknown
  Bacterial polypeptide expressing nucleotide sequence isolated from the Sargasso Sea
atgaaaaaatattttgttataggaaatccaatagatcattcattgtcacctaaattacataatcactggtttaagcaaaataatataaatgctttatatgataaaaaaaaggttagcgagactgatcttgaaagaataattgcagaagttaaaacgggtaaagtagatggaataaatgtaacggttccttttaaaaaatctgtaatcccttttctggatgaattaacgtctcttgccgataaaacacaatctgtaaatacaatttttaaaaaagaaaataaggtaattggagataatacagatgtagaaggatttgaacgtggcttaaaacacattaattatgatgttaaaaataaaaaagtatttattctaggagcaggaggtgtggtcccctcaattattttagctttaaaaaaccaaggtacatcaaaaattattttgagtaataggacagaaacgaaagcaagagacctaaaaaaaatttatcctgatttagaaattataggttggggtgaaaatactaattttgacatgattattaatgcaacaagtttgggtttaaaaagtgatgatcaaattcaattagattttagcaaaacgggatcagataaattattttatgatgtaatttataacccatatagaactaattttcttttaaagggtgttgaacttggcaataaaattgaaaatggcaagatgatgtttatttatcaagcccaattagcttttaaaatttggcacaatattttgccaaaaattgataataaattgttagacgaatgat

SEQ ID NO: 206175 - DNA, 564 bp, Unknown
  Bacterial polypeptide expressing nucleotide sequence isolated from the Sargasso Sea
aatgaaaaaatttctagttataggcaatccaattgaacattcattatctcccaaactacataatcattggtttaaaaagagcaatattgatgcaacttatgaaaaaaaattaattgatggaaaggatattagtaaaattattttggaaatgagagaaaataaaattcaaggaattaatgtaactgtaccatttaaaaaaaaagttattgaatttttagatcaaatgactgcagaggctaaagaatctcaatctgtgaacatgatatatatgaacaaagataaagtaattggacacaacacagatatttcaggatttgaactaagtttaagacatataaagtatgacgttgataaaaaaaaagttcttatattaggtgctgggggtgttgtaagttcattaattatagctcttaaaaaaatgaacccatccaaaattattttaacaaacaggactcgcgcaaaagcagaaaaaataaaagaaacttttgaagatgtagaaatagaggaatggggaaagctcccagatttcgattttataattaacgcaacaagtttaggattaaa

SEQ ID NO: 206176 - DNA, 373 bp, Unknown
  Bacterial polypeptide expressing nucleotide sequence isolated from the Sargasso Sea
aatgaaaaaatttttagtaataggaaatccaattgaacattctttatctccaaagttacataattattggataaaagagaataatttagatgcaatttatgcaaaacttgaaacctatgacaatgatttacctgaactatgtaaatccatcaaaaagggagatttggggggtttaaatgttactgttccttttaaaaaatctataatacctcacctagatattttaagcagtaatgcattaagaacacaatctgtaaatactatctcgttaaataaaggtcatttaattggagataacactgatattaacgggtttgaattaagtattagaaaattaaattatgatgttagcgataagacagttctgatatta

SEQ ID NO: 206177 - DNA, 862 bp, Unknown
  Bacterial polypeptide expressing nucleotide sequence isolated from the Sargasso Sea
atgatttcaagcaagacatctttcatcgcattaattggcaatccagtaagccattctttgtctccaattatgcaaaatgctgcccttcaacatttaggcttagatttaatttatattgctgtaccctgtaaagatgaagatctagaattaattcttaattcttttaaaaagattaattgcataggtttaaacgttacaattccacacaaagaaaaagtatttaatctttgtagtgaaatctcccctattgctaacaaacttaaagcaattaataccctgaaattaaattctgaaaaagaatggagcgcaactaataccgatgtagagggatttatttatccattaaaaaacttaaacttagcaaagaaaaaatcaatagttcttggctccgggggtgcagcaagatctgttattcaaggtttaataaatttaaatctttcaacaatttcagtaatatcacgtaacaaatcatcactagatgaattaataaaaaactttgataatcaaattcaactacagggtctattgcatagtgatgatcaagctcaaaatttaattgaggaagcagatttagttgtaaatacaacaccagtaggaatgaagcaagccaaatatgaaatgaatgtattgccatatggagagtctttttggagatctcttcactcaaaaacaattgtttatgatttaatctacaatcctgctccaactcatcttttaaaatttagcgccaagaaaggatgcatgacaatcaatggtttgcaaatgcttgttgctcagggattgaaatcattatcattttggacaaatggcttagaagtgccttttaatgttatgaatgatgcactcaaaaatcatctttaaa

SEQ ID NO: 206178 - DNA, 790 bp, Unknown
  Bacterial polypeptide expressing nucleotide sequence isolated from the Sargasso Sea
aatgaaaaaatattttgttataggaaatccaattgatcattctctgtctccaaaacttcacaacttttggctcaaaaaaaataagatagaggcaatctatgagaaaaaacttcttgaagaaagagaaatcccaaaactaattgagaggattagaaaatcagaaataaatggcgtcaacgttacagttccatttaaaaattcagtaattccgtttttagacagcctcagttctgaggcaaaaaaaacgaactctgtaaatactatttgtacagaagaagataaaataataggccacaatactgatattgctggatttgaactagctttaagatacatcaattatgatgttaaaggaaaaaaggcgcttataataggggcgggtggggtaagtccttccattatcctcgctttaaaaaacatgggatgcgaaaacatctatttaactaatagaacatttgagaaagcagaaaaaataaaaaaaacttttaatgacattacggtccaaaaatggggtgatatccctgaatttgatatagctattaatgcgacgagcgttggcttgaataaagaaaattttgatttggatttaaataagttcggaactaataaatttttttatgatgtaatttacaatccaagtgaaacaaattttcttaaagaagcaaaggttaatggtaataaaacagaaaatggtagaatgatgtttatatatcaggcccaccaatcttttgctttgtggaataagttattaccaaaaattgatgaggaaacaatagatatcttaaaatga

SEQ ID NO: 206179 - DNA, 565 bp, Unknown
  Bacterial polypeptide expressing nucleotide sequence isolated from the Sargasso Sea
aatgaaaaaatatttagtaataggaaatccaattgatcattctttgtctcctaaactccaaaactggtggttaaaagaaaataatattgatgctacatatgacaaaattaaactcgaggttcatgaaatcaaaaatttcattcaagaaattaaggaacaaaaaatagccggttgtaatgtaactgtccctttcaaaaaaacagttattccttttttagatagattgagcccagaagcagaacaaacccaatcagtaaacaccattacttatcataatggtgatttagttgggcataatacagacatagctggttttgatagtgcgattaaaaacttagattttaatctagagggcaagaaagttttgattttgggggctggtggtgtagtgccatcaataatttttgcattacaaaagatgaatgttcaagagataactattagtaacaggaccaaagagaaggcagaaaatttgagaattttatttaataatattaaaattttagaatggggagatttaaatgattttcatatcgtaataaatgccacaagccttggtttaaat

SEQ ID NO: 206180 - DNA, 796 bp, Unknown
  Bacterial polypeptide expressing nucleotide sequence isolated from the Sargasso Sea
atgaaaaaatattttgtaattggaaatccaattgaccattctttgtctcctaaactccaaaactggtggttaaaagaaaataatattgatgccacgtatgacaaaattaaacttgaggctcatgaaattaaaaacttcattcaagaaattaaggaacaaagaatagccggttgcaatgtaactgtccctttcaaaaaaacagttattccttttttagataaattaagcccagaggcagaacagacacaatcagtaaacacaattacttttgataatggtgatttagttggacataatacagatatagctggttttgatagtgcgattagaaagttaaactttagtgtaaatggcaagaaagttttgattttgggagctggtggtgtagtgccatcaataatttttgcattaaaaaatatgaatgttcaagagataacaattagtaacaggaccaaagagaaggcagaaaatttgagggttttatttaaagatcttaaaattttagaatggggaaacttaactgattttcatatggtgataaatgcaacaagtcttggtttgaataatgaaaaaataaatctaaatttttcaagttcgggaaatgataaattgttttatgatgtaatttataatccacaagaaactcaatttctgaaaatgggaaaacaattaggatacaagaccgaaaatggaaggacaatgtttgtttatcaggctctggaggcatttaaattatggcacatgatagaaccaaaagttaataaagatacatttaagcttttagattatgattaga

SEQ ID NO: 206181 - DNA, 835 bp, Unknown
  Bacterial polypeptide expressing nucleotide sequence isolated from the Sargasso Sea
atgactgaccggtacgcggtgatcggcaacccgatcggccatacgaaatcccccctgatccacggtctcttcgcgcaggagacacagcaggacatgtcctatacggcaatcgaaggaccgttggagccgcatgacgcgttcgccgcgaccgtgcgcgcgttcatcgccgcgggcggcaaaggcatgaacgtgaccgcgccgttcaagctgaaggcgttcgcgatggccgacgaacgcagcgaacgcgcggcactggccggcgccgccaatgcgctgagcttcagcgacggcaggatcgtcgctgagaattttgacggtgtcggtctggtgcgcgacatcgaagtcaatctgaacctgccgatggccggcaggcgcgtgctgatcctcggcgccggtggggccgtgcgtggcgcattgctgccattccttgccgcgcaacctgctgaactggtcgtcgctaaccgggacattgccaaggttcgggcactggtcgagcaagtcgccagcagcggtccgcttgccgcgtgcgggtacgccgaccttgaggcgatgggacagttcgatctggtggtcaacgcgacgtcggccagccttaccggcgatctgccgcctgtcccaccgagcgttttcagtcctgcgggctcggcttacgaactcgcctatggcaagcgcttgacgcccttcctgagactcgcgcgcaacgcgggcgtactgggtatcgcggacggtgtcggcatgctggtggaacaggcggcggaagcattcgactggtggcgaggcgtgcggcctcagacccgtgcggtgatcgaccggctcacggtaccgcttgattgaa

SEQ ID NO: 206182 - DNA, 790 bp, Unknown
  Bacterial polypeptide expressing nucleotide sequence isolated from the Sargasso Sea
aatgaaaaaattttgtgttataggaaatccaattgatcactctttgtcaccaaagcttcataacttttggtttaaaaaaaataaaattaatgcgacctatgaaaaaaaacttttaaaagatgaagaaattcctaaattagtgaatagtttaagaaaaacagaaataaatggcgttaacgttacagttccattcaaaaattctataattccctttttagatgatttaagtccagaggcaaaaaaaactaactccgtaaacactttgttaaaagaaggagataaaataataggccataacactgatattgctggatttgagctagccatcagatacataaattatgatgtaaaaagaaaaaaggctttcatcataggagccgggggtgtcagtccttccattatctttgctttaaaaaatatgggatgtgaagatatttctttaactaatagaaatttggaaaaagccgaaaaaattaaagaaacttttaaagacattacaattgaaaactggggaaatatacctgaatttgatttagtaattaatgcaacaagcgtcggcttaaaaaatgaaaatcttaatttagattttaacaaaacaggaaataataaatttttttatgatgtaatttataatccaaacgaaactaattttttaaaaagtgcaaaacaaaggggaaataaaatagaaaatggcaggatgatgtttatatatcaagcccatcaatcttttgctttgtggaataaggtcttaccgaagattgatcaagaaacaatagaaattttaaaatga

SEQ ID NO: 206183 - DNA, 802 bp, Unknown
  Bacterial polypeptide expressing nucleotide sequence isolated from the Sargasso Sea
tatgaaaaaaaaatatttagttataggaaatcccattgaacactctttgtcgcccaaacttcataaccattggttaaaagaaaaaaatattgacgctgtgtatgataaaaaaaaactagatgagaaagatctgcaaagcattgtttctgaagttaaagaagaaaaaatagatggtattaatgttactgttccattcaaaaaagcagtaattccatttttagacgaattaagtctagaggcaagggaaactcaatcggttaatacaatttatttacaaaatggtattacaattggtcataatacagatattgctggttttgaattggcaatcaaatatgcaaaatacgaagttgctggcaagaaaatatttttattaggtgctggaggcgtgtctccatcaattatttattcacttaaaaaaatgaaagcctcaaaaattacattaacaaacagaaccaaagaaaaagcagaaaatttaaaaaaattattcaaagatattgaaatagttgattggggggaaagaatagattttgatatgattataaatgctacaagtattggattaaaaaaaaatgaagatggtttaaattttgattattcggctaacggcccaaataaatttttctacgatgttatttataatccaagagaaactctttttttaaaaagggcaaaattatttgggaacagagcagaaaatggaaaaatgatgttcatttatcaggcacatcaggcatttactatatggcataaattaatgcctgaaataaatgatgaaacaatcaaattattagatcaatga

SEQ ID NO: 206184 - DNA, 811 bp, Unknown
  Bacterial polypeptide expressing nucleotide sequence isolated from the Sargasso Sea
tatgttaaagacatttgcagtgattggagacccaatagatcattcactatcaccaacaatacataatgctgcatacagagaattgggaattgagtgtacctatattgcatacaaagtggataaaggagaattagcaacaggcatagaatcattaaaaaaaatcaaaattgcagggttcaatgttacaattcctcataaaatcgagatgatgagatatttagataatgtagatgaaacatgtaagaaaattggtgcagtgaatacagtcctaaatgatgatggaattctgagaggtttcaatacggatatggacggattcttagaaccaattaagagaaaagagattcagattaaaaattctaaaatatttttacttggtgcaggaggagcatcaagagcaatcattgcaggatttcaaaaagaaggtgcatataatatagtaattgcaaatagaacaaaagaaaacggagatgaactagccagattctcaaatgagattggattagatgccacatcagtacaactagatgccatgaatgaattgaattctaaatttgatttcatagttaatgcttcatcacttggattgaaaggtgaaaagaacatcataccaagtagtctaatggacgaacaaacaaccgtatacgatattgtttacaagccattaaaaacagatttgataaatacggctaaagaaaacaattgtgaaataatttatggttatgaaatgttacttgggcaagcaattcgttcatttgagatttggttagatcaaaaagcaccatatgaggcaatgaaacgctctatatta

SEQ ID NO: 206185 - DNA, 793 bp, Unknown
  Bacterial polypeptide expressing nucleotide sequence isolated from the Sargasso Sea
gatgaaaaaatatttagtaattggaaatccaataaaccattctttgtctcctgaattgcacaatcactggattaaagaaaacagtattgacgcaacatatagcaaaaaaaaaatgagtgaaaatgaatttgaaaatttaatttcagaagttagacaacacgtcataaacggtgttaacgttactgtaccatttaaaaatactattataccgtatatggataaactaactgatgaagcaaaaagaacacaatcagtgaacacaatttaccaaaaagacaatgaaataattgggcacaacactgatattgagggttttgagaattcaattaaaaagataaattttaattttaataataaaaaaatttttattttaggagctggcggtgttgtaccttcaatcgtttatgcatctatgaaaatggggtcttctgaaatattaattagcaatagaacaaaagaaaaaacacaaaaaattaaaaatacatttaacaacattaaacttgttaattggggtgaaatcccagattttgatgtgattataaatgcaacaagtttaggattaaatcaaaatgatgaaataaatctagattttgcgaacgtaggtaaaaacaaattattttatgatgtgatttataatccaagtgaaacaaaatttttaaaagtggggaaaaaattaggcaataaatgtgtaaatggtaaattaatgtttatctatcaggccttttcagcatttaagttgtggcatggtattgagcccttgataaacgaagagacaatgaaacttttagattaa

SEQ ID NO: 206186 - DNA, 754 bp, Unknown
  Bacterial polypeptide expressing nucleotide sequence isolated from the Sargasso Sea
tgctgtcgctcccgagcgactgcagcaagccatcgaaggccttgctgccatgggctgtcgcggcctcagcgtcaccatcccccacaaagagcaggtgcaaccactgctgagcagcgttgatgccgtggcccgtgaattgggcgccgtgaactgcctgatccccgatggccatggcggctggcgggggacgaacaccgactggagtggatttctgacgcccctggaaggacgcctgagccctagcggacaagccctgatcctgggtagcggtggtgtggtgcgggccgtgctgcggagctgctgcgagttaggtattcagcaggtggtgttgcgcgggcgcaaccgcagcaaattggaagccttggcccaggacgtgagcgcctgggcacctccattactgctcagcagcgccgatgaacccctcgaacccctactggaatcgagcaccttggtggtgaacggaacaccgctcggcatggcggagatgcgcgatcaaacgccactcaatcccgagcagctcgctcggctgcccgagtccgctgttgtgtacgacgtggtttacacgccaagaccaacgctgctgctgaagttagccgctgaacggggtctcagcgtcattgatggtttggagatgctggtgcagcagggagctgccgctctcaagctctggaccggcctagagcaggtccccgtagaagccatgcgccaggccgccgccctagccttggaaccaggcgcgatggaccatggctga

SEQ ID NO: 206187 - DNA, 796 bp, Unknown
  Bacterial polypeptide expressing nucleotide sequence isolated from the Sargasso Sea
aatgaaaaaatttttagtaatagggaacccaattaatcactctttgtcaccaaagttgcacaactattggattaatcaaaataatattgatgctgattatcaaaagagggaactagataataatgatttggaaaaccttatattaaaaattaaaaacaaagaaattagtggagttaatgttaccgttccttttaaaaaagatattatttcttacttagataaattaagtccagaagctgaaggcacacagtcagtcaacactatatgtttagaagataataatattgtcggttacaacacagatataagagggtttgaacttgccattaaggatgcaaagtttaatttaacagataagaatattttaattcttggagctggaggtgttgttccatctattatttttggtctaaataaaatgaaagtttctaaaattacattatgtaataggaccaaagaaaaagcagaaaatttaaaaaattttttcaaaaatttatcaatagttaattggggtgaagtaccagattttgatatggttattaacgctacaagtataggactaaataatgaagattttattaatttggatttttctaaaattgaaaaaggtaaatttttttatgatgttatttataatcctaaagaaacaaattttttaaaaattgctaaaaaattaggaaataaaacagaaaatggaatgaaaatgtttatccatcaagctgctgaaacttttaaaatctggcatggaattgtccccgaaattaataaagaagtgagcaattttttagacaaatga

SEQ ID NO: 206188 - DNA, 745 bp, Unknown
  Bacterial polypeptide expressing nucleotide sequence isolated from the Sargasso Sea
atgccctcagtaactacaccagcgcttgatcgatatgccgtgtttggtaatccgataggtcacagtaaatcgccttttattcatggacagtttgcgtctcttacacagcagactttgagttatgaagcgattttggcgcccatcgatggttttgaagcgagtttacgaacattttttcaggcgggaggaaagggcgcgaatgtgactgtgccctttaaagagcaagcctttgccctctgcgacagcttaagtgccgaagcgacattggcgggtgcggtcaatactctaagcttgttggccgatggcactatttacggtgataacaccgatggtttggggctggtggccgatcttgttcgccatctcggcagtttgcagcataagcgggtactcttggtgggggccggcggtgcggcgcgcggctgtatcttgccattgcttaaggccgaagtcgggcaattgattatcactaaccgaacccaaagtaaggcacaggccttagtggatatttttagccaagtacaagaggggcgctacagcgataaactccaggcgctgtcgatgccagagttgtcgggggagttcgatttagtgattaactcgacctcagcgagtctagcgggagagttaccgccactaccacagtctatcatcagcaacaaaacggcttgctacgatatgatgtatggcgctaaaccaacggcatttaatcaatgggctttgcaacagggcgcagcgcaggtta

SEQ ID NO: 206189 - DNA, 541 bp, Unknown
  Bacterial polypeptide expressing nucleotide sequence isolated from the Sargasso Sea
aatgaaaaaattttttgtaattggcaaccctattagtcactctctttctcctgagttgcataatttttggattaaaaaaaataaaattaatgcagtttacgataaaattaagctggaagagtctgagctaaaagattttatcaataaaataagaaatgaagagatacatggaataaacgtaacagttccttttaaaaataaggttataaagtatctagataaacttagtttagaggttgaaacaacggattctgttaacactatttataaaagtggaaatgaattaattggtcataatacggatgtagcggggttcgaattaggcttaagacactccaaaattaatgttttacataagtcaattttaattttgggagcgggtggtgttgttccttcaattatttattctttattaagtatgggatgtaaaaaaatatttttatcaaacagaaccattgagaaagctcaaaatattaaaaaaaaatttaatgaaatcgaagtggtaaaatggaaaaaaatacccgattttgatatagttata

SEQ ID NO: 206190 - DNA, 514 bp, Unknown
  Bacterial polypeptide expressing nucleotide sequence isolated from the Sargasso Sea
aatgaaaaaatatttggtaataggcaatcctatatctcattctttatctcccaaattacataaccattggtttaagataaataaaattgatgcaatttatgaaaaaaaacaaattaaagaatcagatattaaagaaattatttctaatttaagaaacgaaaaaatccatggggtaaacgttactgttcctttcaaacagtcagtaataccatttatggatgagttaagtttggaagcaaaagaagttaattcagttaatacgatctataaagaaaaaaacaagatcatagggcataataccgatatagttggatttgaacttgctataagagctaaaggatatgatataaaaaataaaaatatatttattttaggcgctggaggagttgttccatctattatttcatctttaaaaaaattgaaagttaaaaagataattttaagtaataggacaagaaaaagagctgaaaacctaaaaaaaatttttactactctagaagttgtcgattgggga

SEQ ID NO: 206191 - DNA, 490 bp, Unknown
  Bacterial polypeptide expressing nucleotide sequence isolated from the Sargasso Sea
catgaaaaaatattttgtaatcggaaatcctataagtcattctttatcacctaaattacataatttttggataaaaactaataatatcaacgctctttatagcaaactaaaattagaggaaaatgaaatagaaaactttataaaatatatcaaagaagagaaaatagctggtgcgaacgtgactgtcccatttaaaaaaaccgttattccatatttggacaaattaagtgaagaagcaaaacaaactcaatcagtaaacactataatacgccaagataatattttaataggacacaacaccgatattgttggttttactaaagcaattgaaagtttaaattttgatatgaaggataaaaaaatttttgtattaggagctggaggggtagtcccttcgataattttttctttgaataagctggaagtatctgaagtaattataagcaatagaacaaaaaaaaaagcagataatttaaaaaaatattttaat

SEQ ID NO: 206192 - DNA, 265 bp, Unknown
  Bacterial polypeptide expressing nucleotide sequence isolated from the Sargasso Sea
aatgaaaaaatattttgttattggcaatccaataagtcattctctttcaccaaagctgcataatttttggtttagaaaacataatttaaatgcgaaatatgaaaaattactcttagaaaaagacaacctaaacaaaatagttcaaaaagttaaaactggcgaaatatctggattgaatgtaacagttccattcaaaccagttgataatcccttttttagaaaaattaagtccagcagcacaaaatacacaatcagtcaatacagt

SEQ ID NO: 206193 - DNA, 610 bp, Unknown
  Bacterial polypeptide expressing nucleotide sequence isolated from the Sargasso Sea
aatgaccgacctctatgcagtagtcggcaatccgatctcgcacagcaagtcacctgatattcagaatgcctttgctgagcagaccggtgaggacttattttacaaaacgctgctggcaccattggatgacttcgagggtgaagtcagacgctttattgaacacggtggcagcggattaaacgtgacggttcccttcaaagagaatgcctaccgcttagcaaatgaattaaccgcccgtgctaaacgcgcagaggcggttaatacgttaaagaagatgcctgatggtacgttgctcgccgacaataccgacggtgctggtctggtcagagatctgatgattaaccactcggtggttctggagggaaaacgcatccttatcctcggcgccggaggtgctgttcggggagtactgcaaccacttctggagcaacagcccgcaggggtcgtcattgccaaccgtaccgaatcaaaagcgcagacgctggcaaaagattttgccgacctcggtcgtgtttcagcctgtggctttaccgatatcgacggcagttttgatctgattatcaacggcacatctgccagtctggctggcgaaatgccgccgatacctgta

SEQ ID NO: 206194 - DNA, 772 bp, Unknown
  Bacterial polypeptide expressing nucleotide sequence isolated from the Sargasso Sea
atgaaaaaatatttagttatcggaaatccaatcgatcattctttgtctcctaaattacacaattattggattaaaaaaaataatatagatgctatttatgaaaagaaaaaaatttatagtgaagaaataaaaaatattatctctgagcttaaagataatttaatacacggcattaatgtaactgtcccttttaaaaaaattgtaatcccttatatgaatcaacttagtccagaagcagaaagtacccaatcagttaatacaatttatctaaatgatggaaaaataataggacataatacagatattgctggatttgaattaagtattaaaaaaataaaatatgatgcggctggtaaaaaagttttaatattaggagctggtggagtagtgccctcaataattattgctctttatagaatgaaagtgtctaaaattactattagtaacagaactaaagaaaaggcagagaacttaaaaaatttatttaaaaacctagagattgttgattggggagatatcactgattttgatataattattaatgcaactagtattggtcttaataaaaatgaaaaaataaatttagatttttctaaaattgaaaataataaacttttttatgatgtaatttataatcctaatgaaactaattttttaaaaatgggtcagagtttaggaaataaaatagaaaatggaaaaatgatgtttatttatcaagcacatcaggcatttactgtttggcataaattaatgccagaaattaatgaagaag

SEQ ID NO: 206195 - DNA, 452 bp, Unknown
  Bacterial polypeptide expressing nucleotide sequence isolated from the Sargasso Sea
catgtataaagataaattagagttaaaaatagcaggtgtgatcggtgacccaattaaacatacaagatcaccattaattcaccaatattggataaataaaaatcgaattaattgtttttatattcctttaaaagtaaaaagttttgaattagaaaaaaaattattttatataaaagaattaaattttagtggtttgaacgttaccataccacataaagaaaatatcttgaattttgttgatgaaataaaagattctgtcaaagttattggtgcagcaaatactatatacttcaaaaatggaaaaattattgctgataatacagatacgtatggttttttccaatctttaataaaaaattttccaaactataattttaaaaaagaaaaggttcttataattggtgcaggtggagcgtctagggcagttacatctgtttttttaggacaaaata

SEQ ID NO: 206196 - DNA, 514 bp, Unknown
  Bacterial polypeptide expressing nucleotide sequence isolated from the Sargasso Sea
gctggcttttattaaaaatcgcgtcaaacaactttttcatggtgaacctgtggaccgttacgctgtatttggaaatcctgttgggcactcaaaatcgccgctgatccatagctggtttgccaaacaaactgcacaaactttgagttacgaagccattttagcaccggtcgacgcctttgccgacagctggtttagctttgtcgctgcgggtggccggggtggcaatgtcacagtgccttttaaagagcaggcctatcagttggctgaacagctcagtgaacgtgctttgcaggccggtgcggtcaacactctctatatagataaagcaggtgtgctttgtggtgataacaccgatggtttaggtttagtcgctgatttaacccgactgggagcgcagcttcaggatgcagctattttgatattgggtgctggtggagcttgtcgtggtgtagttgggccattattggcggctggtgcaaagcatatccatatcgccaacagaactgcagccaag

SEQ ID NO: 206197 - DNA, 565 bp, Unknown
  Bacterial polypeptide expressing nucleotide sequence isolated from the Sargasso Sea
atgaaaaaatttttagttattggaaatccaataagccactccttatcccccgaactacataattactggattaagcagaatagaattgatgcaatttatagaaaaaaaaaaataaatgattttgaattagaaagtataattttagatgttaaaaaacacataattactggtgttaatgtaactgtaccatttaaaaagacaattataccttatctagatgaattaagtgaagagtcaaaaataactcaatcagttaatacaatatatttacaaaataaaaaagtcattggacataacactgatattgaaggttttgagaatgctataaaaaaaataaactttaattttgaaaataaaaaagtttttattttaggagcagggggtgttgttccttcaattatttatgcttcaataaaaatgggatcatctgaaattataattagtaacagaaccgagaataaggctttagaaatcaaaaatatttttaataatataaaattggttaaatggggagaaatgccagattttgatgtaataataaatgcaacaagtttaggattgaacc

SEQ ID NO: 206198 - DNA, 871 bp, Unknown
  Bacterial polypeptide expressing nucleotide sequence isolated from the Sargasso Sea
atgccctcagtaactacgccagtacttgatcgatatgccgtgtttggcaatccgataggtcacagtaaatcaccctttatccatggacagtttgcggcccttacgcagcagtccctgagttatgaagcgattctggcacccattgatggttttgaggcgagtttacgagcattttttcaggcgggaggaaagggcgcgaatgtgacagtgccttttaaagagcaagcctttgccctctgcgatcgcttaagcgccgaagcgacactggcgggggcggtcaataccttaagtttgttggccgatggcacaatttatggtgataacaccgatggtttggggctggtggccgatcttattcgccatctcggcagtttgcagcataagcgggtactcttggtgggggccggcggcgcggcgcgcggctgtattttgccattgcttaaggctgaagtgggtcaactcgtcatcactaaccgcactcaaagtaaggcgcaggccttagtagagatttttagccaagtacaacaagggcgttaccgcgatacactcctgtcgatgccgatgccagagttgtcgggggagttcgatttagtgattaactcgacctcagcgagtctagcgggagagctaccgccactgccacagtccattatcggcagcaagacggcttgctacgatatgatgtatggcgcaaaaccaacggcatttaatcaatgggctgtgcaacagggcgctgcgcaagtgattgatggactgggtatgcttgtcggtcaggcggcaaagagttttgcgctctggcgtggcgtcgagccagatacctcaggagtgcttaaattgctcagggacaaactacaggccgacgcgcaataga

SEQ ID NO: 206199 - DNA, 865 bp, Unknown
  Bacterial polypeptide expressing nucleotide sequence isolated from the Sargasso Sea
ctggcttttattaaaaatcgcgtcaaacaactttttcatggtgaacctgtggaccgttacgctgtatttggaaatcctattgggcactcaaaatcgccgctgatccatagctggtttgccaaacaaaccgctcaagctttgagttacgaggccattttagcaccggtccacgcctttgccgacagctggtttagctttgtcgctgctggtggccggggcggcaatgtcactgtgccttttaaggagcaggcctatcagttggcagaacaactcagtgaacgtgcttttcaggcaggtgcggtgaatactctctatatagataaagcaggtgtgctctgtggtgataacaccgatggtttaggtttagtggcggacttaacccgactgggagcgctgcttcaggatgctgccattttagtattaggtgctggtggcgcttgtcgtggtgtagtggggcctttattggctgctggcgtaaagcatattcatatagccaacagaactgcagctaaagctgaagccatagcagggctctttgataacagagtcacagcatctggttatgacgaagttccagccgaaaaatggagcctggtgatcaacgcgacttcaagtgggcttgagcaacaaagacctgctttagcagaacaacatcttaagcactgcaccttggcctacgatatgttgtatggcaaagagccgacggcttttctgatctggtgtcagcaacaaggtgtgccgcactgtgctgatggtttaggtatgttagttagtcaggccgccgaaagttttgcgatatggcggggtgtaaaacctgatgtcactcctgtactgcagcaactgacggcaatggtgaaagcatgaa

SEQ ID NO: 206200 - DNA, 835 bp, Unknown
  Bacterial polypeptide expressing nucleotide sequence isolated from the Sargasso Sea
atggatgaggcaaggccacgtttagcagctgttttaggcaatccaatatcccactcaaaatcgcctagaatgcacaactattggttaaagaaaaacaaattaaatggttattatataccaataaaagttgaactagaagattttgagcaaactatacgcgcattagtgaatatgggcttttctggagttaatgttactataccacataaattatcagcgctaaagatagcagataaaagctcaagcacagcacaatatattggcgcagctaacactttaactttcaccaaagaaaataaaatatatgccgataatacagacgcttacggctttataaataacataaaatctaaatatccagactggaatccaaaaaaaggaacgtcagtagtgttaggagcaggaggagcaagtagagcggttatagcagcgttattatcagaaggctccgaaaaaataatagttctaaacaggactattgaaaaagctgaagcacttaaaaaagattatgacaataacattaccgttgagtcgtggaaaaatttaaatgaagtagcggcctcgagtagcaatataatcaacactacctcactgggtatgaatgatgaaacgtttattgccattaacccaaaggctatacctgaaacggctcttgtttcagacttggtttacacacctttagaaacaaacttattgaaaatagcaaaagatagaggatccagaacggttgacggtttaggcatgttaattcaccaaggaattccaggttttgaagcttggtttggtcaaaaacctttagttactgaagagctaagaaagatattaacaaaatgaa

SEQ ID NO: 206201 - DNA, 871 bp, Unknown
  Bacterial polypeptide expressing nucleotide sequence isolated from the Sargasso Sea
tatgccctcagtaactacgccagcgcttgatcgatatgccgtgtttggcaatccgataggtcacagtaaatcgccctttatccatggacagtttgcgtcccttacgcagcagcctttgagttatgaagcgattctggcgcccatggatggttttgaagcgagtttacgagcattttttcaggcgggaggaaagggcgtgaatgtgactgtgccctttaaggagcaagcctttgccctctgcgacagcttaagtgccgaagcgacattggcgggtgcggtcaatactctaagcttgttggccgatggcactatttacggtgataacaccgatggtttggggctggtggccgatcttgttcgccatctcggcagtttgcagcataagcgggtactcttggtgggggccggcggtgcggcgcgcggctgtatcttgccattgcttaaggccgaagtcgggcaattgattatcaccaaccgaacccaaagtaaggcacaggccttagtggatatttttagccaagtacaagaggggcgctacagcgataaacttcaggcgatgtcgatgtctgagttgtcgggggagttcgatttagtgattaactcgacctcagcgagtctagcgggagagttaccgccactgccacagtccattataggcaacaaaacggcttgctacgatatgatgtatggcgctaaaccaacggcatttaatcaatgggctttgcaacagggcgctgcgcaagtgattgatggactgggtatgcttgtcggtcaagcggcgaagagttttgcactctggcgtggcgtcgagccagatacctcaggagtgcttaaattactcagggacaaactacaggccgacgcgcaatag

SEQ ID NO: 206202 - DNA, 865 bp, Unknown
  Bacterial polypeptide expressing nucleotide sequence isolated from the Sargasso Sea
gatgagcgcggatcagttacatgaccgctacgccgtgatcggcaacccggtagggcatagcaagtcgccgttcattcatggccgttttgccgcgcagactggcgagccgatcgagtacggccccctgctggcaccggtcgatgccttcgtgccgcacgtgcgggcttttatcgaagcaggcggccgcggcatgaacgtgactgtgccgttcaagctcgacgcacatgccttcgccgataccttgtcgccgcgcgcggcggcagcgggtgcggtgaacacgctgaagttcgacgcgagcggtgtttacggcgacaacacggacggttttggcctcgtgcgcgatatcgaagtgaatctcggtgtgtcgttgaagggcgcgcggattttgctgctgggtgcggggggcgccgcgcgcggcgttgtgctgccgatgctggaacgtgcgccgcacacgttgaccattgtcaaccggacggcggcgaaggccgacgcgctcgtcgaccagtttgcgcaggccgcgcgcgacgccgcttgccatctgagcggcggcagtgcgcgggcgatcgaagcaggcgcatacgacgtgatcgtcaacgcgacggcgggcagcctggatgcttcgttgcccgaatgcgacgaccgcgcgttcggcagcggcacgcttgcttacgacatgatgtacggcgcgcatccgacggtgttcatggaacacgcgcggaagttcggcgcacgcgcagccgatggtctcggcatgctggtcgagcaggcggctgaatcgttttacgtgtggcgaggcgtgcggcctgacggcgcgccggtgctggctgaattgcgggcgttattgacggcgccgtcgcacgcttag

SEQ ID NO: 206203 - DNA, 871 bp, Unknown
  Bacterial polypeptide expressing nucleotide sequence isolated from the Sargasso Sea
catgaccgcggttgcgtcgtcgacgagcggcgccgaccgctatgtggtgttcggcaatccggtggcgcacagcaagtcgccgttcattcacgcgcaattcgccgcacaaacgggcgaaccggtcgaatacacgcaccggctcgcgccggtcgacggtttcgaggcggccgtgcgggcattcgtcgccgaaggcggtcgcggtgcgaatgtgacggtgccgttcaagctcgacgcgcatgcgctcgccgatacgttgtcgccgcgcgccgcggcggcgggtgccgtgaatacgctgcgcatcgacgccgacggccgcatccacggcgacaacaccgacggtgtcggcctcgtgcgcgacatcgaagcgaatctcggcgtgtcgctggcaggcgcacgcatcctgctgctcggcgcgggtggcgcggcacgcggtgtcgtgctgccgctgctcgaccgcgcgccgctgtcgatcacgatcgtgaatcgcaccgcgagcaaggccgaagcgctcgtcggccagttcatgcaggccgcgcacgacgcgggctgcacgctcgcgggcggcggccccgatgtcgtgcgcgcggaaccgtacgacgtggtgatcaatgcgacggccggcagcctcgatgccgcgctgccggagtgcgacgcggcggcattcggcgcgggcacgcttgcgtacgacatgatgtacggcgcgcagccgacggtgttcatgcagcatgcggcggcgctcggcgcgcgcacggccgacggcctcgggatgctcgtcgagcaggcggccgaatcgttcttcatctggcgcggcgtgcggccggacggcgcaccggtgctggccgcgctgcgccaggcgcttgcggcaagctga

SEQ ID NO: 206204 - DNA, 422 bp, Unknown
  Bacterial polypeptide expressing nucleotide sequence isolated from the Sargasso Sea
aatgaaaaaatatttagtaataggaaatccaattagccattccctatctcctcaactgcataattattggataaaaaaaaataatattcaagcaatatatgaaaaacgacttgtttcgcaaaatgatatagaaaaaatagtatccgaaataagatctaaaaaattacatggtataaatgttacagttccttttaaaactaaagctgtttcttttgtcgatactcttacaaaagaagcagatgagaccaagtctgtaaatacaatttatttaaaagaagataaaataattggccataatactgatattgatggctttgagcttggtattagatcctatggctatgatattaaaaaaaagaacatttttatattcggtgcggggggagtggtcccatcaattctagtggcattaagaatgatga

SEQ ID NO: 206205 - DNA, 823 bp, Unknown
  Bacterial polypeptide expressing nucleotide sequence isolated from the Sargasso Sea
atggatcgttatctggtttttggccacccggtgcgccacagcaaatctccctttattcataccctgtttgccaggcagacccagcaggagctggaatatggtctggccgagccggccgtcgaagagttcgccaccagtctgagagacttctttgcccagggtggcaagggatgcaatgtcaccgtccccttcaaggagcaggcattcgccctggtcgatcgattgagccctcgcgcccggcgggcgggggcagtcaataccatcaagctgaccgatgatggcgtactgctgggtgacaacacagatggtgccgggttggtggccgatctcaaggcgcatggtgtagcactggccggcagcaggatcctgctgctgggtgcgggtggcgcggcgcgcggtgcgctggctccgctgctggccgagcaacccgaggcattggttatcgccaaccgtactcacgccagggcggagcagctggctgccgagtttcgtgatctgggggcagtcagtgcccagacttatgaacagctgggcggccatttcgatctgatcatcaactccacctccgccagtctgcagggggagttgccgccgcttcctccggcgctgatccatgctgatattgccatctacgacatgatgtatggcgcgaccgataccccctttatcgcctgggccaaagggcagggggctcgccagaccgtagatggcctcggcatgctggtggaacaggcggcagaagcctttaccgtgtggcgaggaatccggccagggactaaacaggtattgagagaactgaaacgaaatctggggaccctatgaa

SEQ ID NO: 206206 - DNA, 817 bp, Unknown
  Bacterial polypeptide expressing nucleotide sequence isolated from the Sargasso Sea
aatgaaaaagtatgctgtttttggaaatccaattgaacatagtatgtcgcctttaatacatgaatattttgcggaaaatttaggcattaagttaacctatgatgctattttaggcactgtaggaaaatttgaattagaagcaaaaaattttttaaaaatgggtggcaaaggttttaatgtcacacttccatttaaacaagaagcttataatctagctgaaacaaagtcagaaattgctgaaattactggctctgtgaataccatttctctaaaagatgggcttatccatggtgataatacagatggatcaggctttataaaagatataaaaaataatattggttttgatatagaaaataaaaaaatacttttattaggtgcaggaggtgctgcaatgggcatccttccgaatattttgtatgaacgtccgttggagctaaaaatttacaacagaacccgagaaaaggcagaaaagctgtgtaacaaattcttagatatcgggaagctagattatgttgaaataagtgatttagagaaatataaatttgatattattataaattcaacatcagcaggcataagtaatgaagatttttacctacctaaaaaattttttaataatgattcaatttgttacgatttatcgtatggtgcagcatctaattcattcagaagctgggcaaaacaaaataaattaattttctacgatggaataggtatgttattggaacaagcagccgattccttttatatctgggagttaaaaagaccattaataactaatgaattaaaaagcattttattagaaaaattatga

SEQ ID NO: 206207 - DNA, 766 bp, Unknown
  Bacterial polypeptide expressing nucleotide sequence isolated from the Sargasso Sea
gccgcgggcgtggacgcgtgttacgtgccgttcctcgtcaaggatatcaagagtttcttgaagaatccgctcttcggccgagaggatttcgtcgggtttagcgtcaccattccgcacaaggaggacgcgctcgaggcgtgcgccgaggtggatccggtggcgaaacagatcggtgcggtgaacacgctcgtgcgtcaaccggacggaagtctgaaggggtacaacaccgattacgcggcggcgatcgatgcgatcgaagacgcgatggagagaaagacggggacgccggcgcgcgcatccctcgaaggtaaaaccgtcgttgtcatcggcgccggtggggccggtagagcgttagcgttcggcgccaagtttaagggtgcaaacgtcgtcatcgcgaatcggagcatcgaccgcgcgcgagcgctcgccgaggcgtgcggcggcgtcgcggtgacgctcgaggatttggcgaacggaggcgtgaagggcgacgttctcgctaatacgacgtccgtcggcatgcaaccaaatgtcgacgacacgccggcgcccgcgagcgcgctccaagggtactcggtggtgttcgacgccgtgtacacgcctctcgagacgcgtctcttgcgcgaagccaaggaggcggggtgcgaaatcgcgagcgggttggacatgttcgtcggtcaggcggcgcgacagttcgagctcttcaccggtaagcaggcgcaggtggagctcatgcgcgagacggtgctgtcgagcatcaagtgat

SEQ ID NO: 206208 - DNA, 709 bp, Unknown
  Bacterial polypeptide expressing nucleotide sequence isolated from the Sargasso Sea
ctgacggcgtttttcaatgcgggcggcaagggcgcgaatgtgacagtgccttttaaggagcaagcttttgcgctgtgtgacagtctcagcccagaggccaagcttgccggcgcggtaaacaccttaagtttattggccgatggcactattcgcggtgataacaccgatggtttagggctggtggctgatctcatcgctaacttaggcagcctgcaaggtaagcgcgtgttacttataggtgctggtggtgcggcgcgcggttgtattctgccattattaaatgcgggaattgcgcagctaacgattagcaatcgcactcacactaaggcacagcttctggtcgatatctttacttcggtggataacggtgctttcgcaaatagagtcaccgccgtagaaatgaatgagcttgtgggcgaattcgatatcattattaactcaacttcggctagccttgcgggcgagttgccacccgtgccagcgcatatcattacccctcaaactgtctgctatgacatgatgtatggtgcctcagttaccgcttttaaccaatgggcgctatcccaaggtgcagctaaggttattgatggactcggtatgttagtcggacaagccgctaaaagctttaccctatggcgaggtgttgagccagatactcaagtggtgttgactcttttgcgggacaaattaaaggctgagcctaagtagg

SEQ ID NO: 206209 - DNA, 508 bp, Unknown
  Bacterial polypeptide expressing nucleotide sequence isolated from the Sargasso Sea
cttgattgggaaattatctggtccaacagcagattacagtgaatatgcagcagcactttcagagatggctgcccaattagttgaagatggaattgataaagttgccagtggtagtgaagaaggagtaagattggtagttaaggcattgatatcaagtggagtagctatgtcaatagctggaacttctcgaccagcaagtggtggagaacataaattttcacattggttagatgctaactgtgattcaccagctttgcatggcgaacaatgtggtttaggatctatagttacaatgtatttgcatggaggcgattgggaaaaaataagagatactttggaggcagttaatgcaccaacaaatgcaaaaagtttgaatatagatgatgagatggtattatctgcattcacaaactcaaaagatataagaccacaaagagtcacaatacttgataaatcaacaaaagaacaaattcgagaagctgtgttagctactggtgttatcagttaa

SEQ ID NO: 206210 - DNA, 676 bp, Unknown
  Bacterial polypeptide expressing nucleotide sequence isolated from the Sargasso Sea
ggaattgcaagcccatttgtttcagtaagaggagataaaccacactcattagtagcaactgcaccacttggtgtgtttgtagatttagacataatcaaaaaggctcctagaaaattacttgcaagtggatgtggggatttaatggcaaaggtaactgcggttcatgattgggagttaggtcgtgacaaagtaggggaatattatggaagatattcagcaaatcttgcttcaatgagtgcagaaatactaattgaaagtgctgagaatttttcaaaaaagaacatagatgtcagagttattgttgaagcattaatcagtgcaggagttgcatcatgtattgctggaagtagcagaccttgttcaggtgcagagcatctattttcacatgcaattgatcatttagaatttggaattggattacatggagaaaaatgtggaattggttctataatgattgcaaaattacaaggacaaaattggaaagaaattgttaaaacactaaaaaaatctggtgcaccaacaacagcgaaggagattggattaaaaccaaaaatattagctaaagcaatggttatggcacaatcattacgacctgagaggtatacaatactaaaagaaatcaaaatgactgagaaagatgcattaaagcttgcaaaaagtacaggcgttttataat

SEQ ID NO: 206211 - DNA, 431 bp, Unknown
  Bacterial polypeptide expressing nucleotide sequence isolated from the Sargasso Sea
attaattgaaagtgctgaaaatttttctaaaaataaaatagatgttttagttattgttgaagcgttaatcagtgcaggagttgcatcatgtattgcgggaagtagtagaccttgttcaggtgcagaacatctattttcacatgcaattgatcatttagaatttggaattggattacacggagaaaaatgtggtataggttctataatgattgcaaagttacaaggacaaaattggaaggagattgttaaaacactgaaaaaatctggtgcaccaacaactgcaaaagagattggattaaaaccaacaatactagctaaagcacttgtcatggcacaatcattacgacctgagagatatacaatactaaaagaagttaaaatgactgaaaaagatgcgttaaagttagcaaaaagtacaggcgttctataat

SEQ ID NO: 206212 - DNA, 744 bp, Unknown
  Bacterial polypeptide expressing nucleotide sequence isolated from the Sargasso Sea
aatggagctaccaagacagatagttgtcggtgaaaaaaatatcgatcaggttggagattttctcaaatcattatcaaacccaaaaaaagtttcaataatttcaggaaaaaatgttaaaaaaataattggtaaacaaattgaccagtccttaaaagatgcaaaaattcgtgctatttggcatttggcaaaatcaaaccaggtcaaagaaactgaagagatccaaaagaaggtgaaagcagcaaaaagtgacataatcattgggttgggaggaggacgttcggtagatattgcaaaattatctgcatttaatctaaaaaaaccatttgtcagtatacctacctctgcatcacacgatggaattgcatcgccatttgtttctgtgagaagtgataaacctcattcattggttgcaactgctccattgggtgtttttgtggatttagatatcatcaaaaaggctccaaaaaaattacttgcaagtggatgtggagatttaatggcaaaagttaccgcagttcatgactgggaattaggacgtgacaaagtaggagaatattacggaagatattcagcaaatcttgcctcaatgagtgcagaaatattaattgaaagtgctgggaacttttcaaaaaaaggaatagacgttagagtaattgttgaagcattaatcagtgcaggagttgcatcttgtatagctggaagtagtagaccttgttctggtgcagaacatctttttcacatgca

SEQ ID NO: 206213 - DNA, 673 bp, Unknown
  Bacterial polypeptide expressing nucleotide sequence isolated from the Sargasso Sea
atgcaaagccccatttgtttcagtaagaggggataaaccacactcactagtagcaactgcaccacttggtgtgtttgtagatttagacataatcaaaaaggcgcctagaaaattacttgcaagtggatgtggagatttgatggcaaaggtaactgcggttcatgattgggagttaggtcgtgacaaagtaggtgaatattatggaagatattcagcaaatcttgcttcaatgagtgcagaaatactaattgaaagtgctgagaatttttcaaaaaagaacatagatgttagagttattgttgaagcgttaatcagtgcaggagttgcatcatgtattgctggaagcagtagaccttgttcaggtgcagagcatctattttcacatgcaattgatcatttagaatttggaattggattacatggagaaaaatgtggcattggttcaataatgattgcaaaattacaaggacaaaattggaaggagattgttaagacactaaaaaaatctggtgcaccaacgacagcaaaagaaattggattaaaaccaaaaacattagctaaagcaatggtcatggcacaatcattacgacctgagagatatacaatactaaaagaagttaaaatgactgaaaaagatgcattaaagcttgcaaaaagtacaggcgttttataa

SEQ ID NO: 206214 - DNA, 681 bp, Unknown
  Bacterial polypeptide expressing nucleotide sequence isolated from the Sargasso Sea
aaaaagtgatattatcataggtttaggaggaggacgttcagttgatattgcaaaattatgtgcatttaatctaaaaaaaccatttgtcagtatacctacctctgcctctcatgatggaattgcaagcccatttgtttcagtaagaggggataaaccacactcactagtagcaactgcaccacttggcgtgtttgtagatttagacataatcaaaaaggcgcctagaaaattacttgcaagtggatgtggagatttgatggcaaaggtaactgcggttcatgattgggagttaggtcgtgacaaagtaggggaatattatggaagatattcagcaaatcttgcttcaatgagtgcagaaatactaattgaaagtgctgagaatttttcaaaaaagaacatagatgttagagttattgttgaagcgttaatcagtgcaggagttgcatcatgtattgctggaagtagcagaccttgttcaggtgcagagcatctattttcacatgcaattgatcatttagaatttggaattggattacatggagaaaaatgtggcattggttcaataatgattgcaaaattacaaggacaaaattggaaggagattgttaagacactaaaaaaatctggtgcaccaacgacagcaaaagaaattggattaaaaccaaaaatattagctaaagc

SEQ ID NO: 206215 - DNA, 724 bp, Unknown
  Bacterial polypeptide expressing nucleotide sequence isolated from the Sargasso Sea
gggagattttctcaaatcattatcaaatccaaaaaaagtttcaataatttcaggaaaaaatgttaaaaaaataatcggtaaacagattgatcaatctttaaaagattcaaaaattcgtgcgatctggcatttagcaaaatcaaatcaggtcaaagaaactgaagagatccaaaaaaaggtgaaagcagcaaaaagtgacataatcattggattaggaggaggacgttcggtagatattgccaaactatctgcatttaatctaaaaaaaccatttgtcagtatacctacctctgcatcacacgatggaattgcatcgccatttgtttctgtgagaagtgataaacctcattcattggttgcaactgctccattgggtgtttttgtggatttagatataatcaaaaaggctccaaaaaaattactagcaagtggatgtggggatttaatggcaaaagttactgcagttcatgactgggaattaggacgtgacaaagtgggtgaatactatggaagatattcagcaaatcttgcttcaatgagtgcagaaatactaattgaaagtgccggaaacttttcaaaaaaaggcgtagatgtaagagtaattgttgaagcgttaatcagtgcaggagttgcatcttgtatagctggaagtagtagaccttgttctggtgcagaacatcttttttcacatgcagttgatcatttaaaatttggaacaggacta

SEQ ID NO: 206216 - DNA, 526 bp, Unknown
  Bacterial polypeptide expressing nucleotide sequence isolated from the Sargasso Sea
ttctactcactgtagtttgaaagatgccttaaaaaaagtaaaaaaaagacaaattgtggatgtaggtaaaattttttctaaatctttacaagctatgggttttgaaaatcctagaattgcagttgccgcattaaatccacattgtggggaaggtgggttgtttggttctgaagaaacaaaagagattattccagccattaaagaattgagttctcttggaatggatattactggtcctgtttccccggatgttgttttttctatgaatagagatgggatttttgatggagtgatagctatgtatcatgatcaaggtcatattgctggtaaaatgataggttttaattttagtaagaatggaacagtagttcgtgcagtgaatgtaaccctcggtttgccaataatccgaacatcagttgagcacggaactggttttgagattgcagggaagggtatagcaagcgaaatgagtatggtagatgctttagttctcgcctctaatatggtaaatgcaaaaaaatcttaa

SEQ ID NO: 206217 - DNA, 823 bp, Unknown
  Bacterial polypeptide expressing nucleotide sequence isolated from the Sargasso Sea
cctttaattctaatttgtaataaaaaaattttagaaaaagaaataaaaaaatacaaattttttaaaaaaattgaaccaattaatttaataaaaattttaaataaaaaaataagaaaaaaaaatatttatttaattgatattaaaaaatcaagttcaaaagattatattcataagtgtttcaaagttgctttttatattataaaactaggactaacgaataaattaattaatgggccaattaataaatctaaaactttaaagagaaaataccctggtatgactgaatatgtttctaaaagttttaaccaaaaaaaatttgcaatgttaatttacaataataaactctcagtttctcctgtaacaacccaccttcctttaaaaatggttgcaaaaaaaattactaaaaaattaattattgaaaaaattatgattataaatacgttttataatcaaaaattaggatttaaacctaaaattggtgttgttggtttaaaccctcattgcgaaagtttatcaaaatttaatgaagatactaagattatccttccagccattaattcacttaaaaagaaaaatattcaagttaatggtccttatccatccgatacaatatttttaaaaaataatagaaaaaaatttgatgttatagttggtatgtaccatgatcaagttcttacaccaataaaaactcttttcgaatatgatgcaataaatataacaatgggtttaccatttttgagagtaactcctgatcatgggcccaatgaaatgatggttggtaaaaataaatcaaatccaataagtttgatcaaagcattagttt

SEQ ID NO: 206218 - DNA, 747 bp, Unknown
  Bacterial polypeptide expressing nucleotide sequence isolated from the Sargasso Sea
agacccagctcggtaaaagaaattacagtaatgctggtgcaatattgcagtcaattgatatggctatagattttgcaaaacaaaaagtaatctctggaattgttacaaacccaatcaataaagaagttattgccaaaaaacttaggagatttaaagggcatacagaataccttgcaaaaaaagataaaaaatcaaatgaaatgatgtttttgctaaataagaaaatgaaagtaactccaattacaacacatgttgcgttaaaagatgttgcaaaaaaaataaataaaaaaaatattactaaatcgatcctcaatgttaaccaaacattaaaaaaagattttgaagttcgtaaacccaaaattgccgttagcggtcttaaccctcattcgggtgatgggggtattttaggaaaagaagagatcatagaaattattcctgcaataaatgcatgtaagaaaaaaggtataaatgtttctgggccttatcccgcggactcattgtttagagattcaaatattaagaaatttgactcattcatctgcatgtatcatgatcaggctttaataccgataaaggttattgattttcataacactattaattatacagctggactgtcctttgtaagaaccagtcctgaccatggaactggattggatatagcaaaaaagtttgtcgcttcatgtgatagtttattagcagccattggaatggcaacagcaatagccaaaaatagagggttatgac

SEQ ID NO: 206219 - DNA, 571 bp, Unknown
  Bacterial polypeptide expressing nucleotide sequence isolated from the Sargasso Sea
tctgggattaacagaatatatctcaaaaaaaactaaatctaaaaatcaggttatgctaatttataatgataaattatctgtttctcctctaactactcatcttccattaaaacttgttgctaaaaatataactaaaaaaaaaattattaataatattagtcaaattagaaaattttataataattttctttataaaaaaccaaaaattgcaatattagggcttaaccctcattgtgaaactgttgatagttttagtgaagaaaaaaaaataataattcctgcaattaattatttaaaaaaagataaaattaatgttgatggacctttttcagctgatactttttttttaaaaaaaaatattaataaatatgacgtagtagttggaatgtatcatgatcaagttttaactcctataaagactttatttaattttaatgcaattaacataactcttggacttccatttttaagaatttcacctgatcatggacccaataacaaaatgcttggtaaaaatcgttcagatccttcatctattttttgtgctatgagatttattaaaaaaatttaa

SEQ ID NO: 206220 - DNA, 572 bp, Unknown
  Bacterial polypeptide expressing nucleotide sequence isolated from the Sargasso Sea
tgaattggagcatgagggatattgctgtgaactgaacaccaacggtggactttggacttcaagggttacttctcacattcctttgaaggacgttgcttccctgattacagaagaaggtatcctcgatgcggtcaagatggcgcatcagacccttttggatgctggtattgctgtgcccaggattggtgtggcggcacttaatccccatgccggtgacggggggaatttcggcaccgaggaaggcgacatcatcgaacccgcggtaaaacaagttcaacagcttgggatcaaggcggatggaccgcatcctgccgatacgattttcgtcagggctcagcgcgatgagtttgatgcggtggtgacgatgtatcatgaccagggacagatcgcgataaaactgatgtggttcgatcatggcgtgaccgtgcttggagggcttcctgttccggttacgactccagctcacggaactgctttcgatattgccggaaagggcaaagccaaccctgatgccttgaaagcagcctggaaggttctgcaaaacatggtttcctccagacttgcttcctgat

SEQ ID NO: 206221 - DNA, 165 bp, Unknown
  Bacterial polypeptide expressing nucleotide sequence isolated from the Sargasso Sea
ttgatcgtgcagtaaacataactttaggattgcgtattataagaacttcccctgaccatgggactgctttccagcttgctccaaaaatggaggcaaatccaagttctatgatagagtcaatcaagatggctcttaagatgacctcatcatccagttttgtctaaa

SEQ ID NO: 206222 - DNA, 371 bp, Unknown
  Bacterial polypeptide expressing nucleotide sequence isolated from the Sargasso Sea
tggtgaaaacggaatgctgggaaatgaagaaattggcattatccacccggtaatcgaaggttttaaaaacaacggcgaccttgtcatgggtacattccctgcagatggtttttttgggagtggacaattcaagaattttgacgcagttttagcaatgtaccatgaccagggactgatcccatttaaaacgttatctggaggagagggtgtcaacttcaccgctggaatacccagaataagaacctctccggcacacggcactgcgtatagccttgcagggaaaaacatagcagatccgagtgcgatgcgaaatgcaatctacacagccgttgatctggctaagaataaactgcctgccacggaggagtaat

SEQ ID NO: 206223 - DNA, 634 bp, Unknown
  Bacterial polypeptide expressing nucleotide sequence isolated from the Sargasso Sea
aaaaacctaacaaataaacttgtaaatgggccaataaataaagctaaaactttaaaaaggaaatatcttggtgtgactgaatacatatctcattcttttaaacaaaaaaaatttgctatgttaatatacaatgagaatctttctgtttgtcctattactacacatctacccctaagtcagatttcaaaaaagattaatcaaaaactaattaaagaaaagatagttactgtgaataatttttataaaaaatttttgggttttaaaccaaaaataggggttacaggactaaatccacactgtgaaagtgtgctcaattttaatgaggatgaaaaaataattcttcccgcaattaaatcattaaaaaagaaaataaaagtgcaagggccatttccagctgatactatttttttaagtaataacagaaaaaaatttgatgtaataattggaatgtatcatgaccaagttttaacacctattaaaactctctttgaatatgacgcaataaatattactctcggtttaccttttttacgaattacccctgaccatggtcctaatgaaaaaatgattggaaaaaataaatcaaacccagttagcttaattaaagcaattaattttttagatagaagatgat

SEQ ID NO: 206224 - DNA, 527 bp, Unknown
  Bacterial polypeptide expressing nucleotide sequence isolated from the Sargasso Sea
tacatgtatgttgatatttaataaaaaattatccgtttgtcctgtcacaactcatctacctcttaaattggttgcaaaacaaataaatagaaaaaatatagaaaataaaattattttaattcaaaaattttataaagaaaatttaaaaaaaatacctagaataggaatactcggtctaaatcctcattgtgaaagtattctggattataatgaggacgaaaaaataattaagcctgttgtgttaaaaatgagaaaaattggttacaaaataaatggccctctttctgcagatactatctttttaaaaaataatcgaaaaaattatgatgtaattataggaatgtatcatgatcaagttctaacgcctataaagaccctttttgaatatgatgctataaatattactttaggtttaccttttttaagaatatcgccagatcatggtccaaatgaaaaaatgatggggaagaacttatcaaatccattaagcttaattaaagctatacaatttttagacaaacattgat

SEQ ID NO: 206225 - DNA, 605 bp, Unknown
  Bacterial polypeptide expressing nucleotide sequence isolated from the Sargasso Sea
ttcaaaaaaaacttttttaaataaaaaatattctggaatcactgaatacctttcacaaaaaacaaactcgagagatgaagtgatgctaatttacaataataaactttctgtttctccgttatctacccatataccgataaaaaatgttactaggcaggtgaaaaaagatagaattgtgaaaaatgtaataaacatagacaatttttataaaaatattttaaagaaagaaagtaaagttgctgtattaggactcaatcctcactgtgaaacaacagataaatttagtgaagaagacaagataataaaaccatctataaattatttaaaaaagagaggattaaatattagcggtcccttttctgctgacactttttttattaaaaaaaatttaagtaaatacaacgttgttctagggatgtaccacgatcaagtattaacaccaatgaaaaccttatttaactttgatgctataaatataactcttggtctcccatttataagaatatctccagaccatggtcctaactcagagatggccggaaaaaataaatcagacccttcttcttttttttgtgcaatggaatttgctgaaaaaattagatgag

SEQ ID NO: 206226 - DNA, 220 bp, Unknown
  Bacterial polypeptide expressing nucleotide sequence isolated from the Sargasso Sea
aaaattgaagcaaactgatgcataccttgcaatgtatcatgatctagctttgccagttttaaaagccttaagttttggtgaagctgtaaatattacgctaggaataccaattgtaagaacatctgtagatcatgggacagcattagatattgctggaaaaatgaaaccaagtcttggatcaattaaacaagcaattaaatcagcagaaattcagctttaa

SEQ ID NO: 206227 - DNA, 856 bp, Unknown
  Bacterial polypeptide expressing nucleotide sequence isolated from the Sargasso Sea
tatgaaaaataaaaacataattattgtagctggtgaaccctatagtgttttttttgaaattttttttaaaacttttaaaaaaaaaaaaattcaaaatattaaaaacccaattattttaatcggttctaaaaaaatacttttaaaacaaatgcttcgactaaattacaattttaaaattaatgaattactttttaaagatattaacaaaattaaaattaataataaaaaaataaatattttaaatgttaattttaattacaataaaacatttgataaaatttcttctaaatcaaatgtttatattaataattgttgtaatttagctatgaaaataattaaagaaaaagctgtaaaagttttaattaatggaccaatagaaaaaaaatttttcctaaaaaaaaagtatccaggtatgactgaatactttgctgctaaagtaaaaaaaacaaatgaagaagtaatgttaatttataataaaaatttagctgtaagccctataacaacacatttacctttaaaaaaaatatttaaaaaaatatcaaaaaaaagaattatcttacaagtaaaaaaaattaacgaattttataaaaaatatttaaaaaaagaggtaaatattgctttaactggattaaaccctcattgtgaaactttagataaatattcagaagaagaaaaaatattaagtcccgcaataaaaacattaaagaaaaataatattaaaatttctggccctttttctgctgacacaatttttctaaaaaaaaattacgaacagtacgatgtaattgtaggaatgtatcacgatcaagtgctggctcctttgaaaacattatatgggtttagtgctattaatata

SEQ ID NO: 206228 - DNA, 664 bp, Unknown
  Bacterial polypeptide expressing nucleotide sequence isolated from the Sargasso Sea
aaagtaatctctggaattgttacaaacccaatcaataaagaagttattgccaaaaaacttatgagatttaaagggcatacagaataccttgcaaaaaaagataaaaaatcaaatgaactgatgtttttgctaaataagaaaatgaaagttattcccgttacaacacatattgcgttaaaagatgttgcaaaaaaaataaataaaaaaaatattactaaatcgatcctcaatgttgaccaaacattaaaaaaagattttggagttcgtaaacccaaaattgcagttagtggtctcaatcctcattcgggtgatgggggtattttaggaaaagaagagatcttaaaaataattcctgctattaatgaatgtaggaaaaaaggtataaatgtttctgggccttatcctgcggactcattatttagaaattcaaatattaagaaatttgattcatttatctgcatgtatcatgaccaggctttaataccgataaaggttgttgactttgataataccgttaattacacagctgggctgtcctttgtaagaaccagtcctgatcatggaacaggattggatatagcaacaaagttcgttgcttcatgtgatagtttgttaacagctattggaatggccttaaacattgctaaaaacagagggttatgac

SEQ ID NO: 206229 - DNA, 424 bp, Unknown
  Bacterial polypeptide expressing nucleotide sequence isolated from the Sargasso Sea
aacaatgaacttaagtctaaatggaaaattaaaaatcttaaaatttgtgttttgggacttaatccacatgctggagaaaacggctttcttggaacagaagaaatggaaataattagtccgctaataaaaaaacttataaaagaaggattgaatttatctggaccagaatctgctgatactgcgtttgttcctaataacttaaaaaaattcgatgcttttctcgctatgtttcatgaccaaggacttccagttttaaaagctttagggttcggtgattccattaatataaccctgggcttaccatttacaagaatctccgttgatcatggtactgcatacgaaatagctgataagttttgtgcaaatgaagccagtgcaatggaaagtttaaaaactgccttagatattactcagtcaaagtgat

SEQ ID NO: 206230 - DNA, 748 bp, Unknown
  Bacterial polypeptide expressing nucleotide sequence isolated from the Sargasso Sea
ttgtttttatctcaattaaaaaaattaaatagaaaattaaattttaaaacaattgataagaactatttaaaatatgaaaagttagaaaaaaaaacttatttaattgatgttaagtataattttaaaaagccatttgaaaaaatttcaaaaaaatcaaaaaaatacatatcaaactgttttaaagaaagtattgatttattaaatattggactaagtaatattttaattaatggtccagtatcaaaaaaacattttttagaaaacaaataccctggagtaaccgagtatattttcaaaaaatcaaaaaagaaattatctaaatatccggtaatgttaatatttaataaaaaattatctgtttcgccattaactactcatatccctttaaaagatgtatataaaaaaattaatcaaaatattattattaataatgtaaaaacgataaatgatttttacagaagaaaacttaatgtaaaaccaaaaattgctttgattggtctaaatccacattgtgaaacaaattcaaaatttaatgaggaacttcttatacataaacctgccattagaaagttaaaaaaaataaaaatagacattaaaggaccttttccagctgatacttttttttttaagagtaatattaaaaattataattctgtaattggcatgtatcatgatcaaatactaacgccatttaaaacaatattcggatttaatgcctctaatattactttaggattaccttttataa

SEQ ID NO: 206231 - DNA, 769 bp, Unknown
  Bacterial polypeptide expressing nucleotide sequence isolated from the Sargasso Sea
ttgaaaaaaattatctattcgcccggtgagccaagtggtatcggtccagacttaatcattaaattatcctcttcaaagctatgggaagatcttaatatccctattgtttctattggtgattcaaagctttttatagacagagcagctttgcttaagaaaaaaataaaaattgttgaattggagtcgcttaatgaagtaagtaaaaacactaaaggacttctacaaattataaaagtgactaaatgctctaatatcagaccgggaaaactctctaaaagtaatgctcaatatgttcttgataatctaacttactctattaaacaaactatgcaaaatgaaggaacggcattagtaaccggtccattaagtaaagaaaatatcatttcaattgataaattatttactgggcatactgaatatataaaaaaaattaccaaaagtaaggatgtcttgatgatgcttgcatcagatcaattacgtgtcgccctatctacaactcatatacctcttaaaaatgtatctagaacaattacaaaagaattaattattaacaaggtaaaaatacttaatgaagatttaaaaaataaattcaatattaagaaaccaaatataaaagtgcttggtcttaatcctcatgcgggagagaacggtaaaataggcaaagaagaacaagatcatataaaaccagcaataagagaattaagaaagaaaaaaattaacgtatcaatgcctatttcagcagatactgcattttctagaaaatcataaa

SEQ ID NO: 206232 - DNA, 757 bp, Unknown
  Bacterial polypeptide expressing nucleotide sequence isolated from the Sargasso Sea
taataatcatattaatcttattaatattaaatataatccaaaaaaagcatttgaaaatatttctaataaatcaaattcatatattaaaaaatcatttgataaagctttagaaattataaagcttgatgtaagtaataaattaattaacggaccaatttcaaaaaaaaattttttaaacaaaaaataccttggtatttctgaatatctagcaaaaaaatcaaaatctaaaaaaattgctatgttaatttataataataacttatcagtttgtcctatcacaactcatcttcctttaaaaatggttcccaaaaaaattactaaaaaaacaatttatgaaaaaattattttaattaataacttttataaaaaatatagaggttttaaaccaaaaattgctattttaggccttaacccacactgcgagagtattagtaaatttaatgaagatgaaaaagttttgaaacctgcgattaaacatttggttaaattaaaatataaagtttctggtccgtttccagctgatacaatttttttaaaaaataatagaaaaaaatttaatgtaatagttggaatgtatcatgaccaagttctaacacctttaaaaacattatatgaatatgatgcaataaatattactttaggtttaccttttattagaatatctcctgatcatggacctaatattaaaatggttggaaaaaatatatctaatcctttaagcctaataaatgctattacattcatggataaaaattga

SEQ ID NO: 206233 - DNA, 712 bp, Unknown
  Bacterial polypeptide expressing nucleotide sequence isolated from the Sargasso Sea
ttgaaaaaaattatctattcgccgggtgagccaagtggtatcggtccagacttaatcattaaattatcctcttcaaagttatgggaagatcttaagattcctattgtttctattggtgaccaaaaactttttgtagacagagcagctttgctaaagaaaaaaataaaaattgttgaaatagagtcacttaatgagttaagtaaaaacactataggagttatacaaattataaaagttacaaaatgctctaatactagacccggaaaactctataaaagcaatgctcaatatgttcttgataatctaacttactctattaaacaaactatgcaaaatgaagaaacggcattagtaaccggcccattaagtaaagaaaatatcatttcaattgataaattatttactgggcatactgaatatataaaaaaaattaccaaaagtaaggatgtcttgatgatgctcgcatcggatcagttacgtgtcgccctgtcaacaactcatatacctcttaaaaatgtatctagaacaattacaaaagaattaattattaacaaggtaaaaatactcaatgaagatttaaaaaataaattcaatattaagaaaccaaatataaaagtgcttggccttaatcctcatgcaggagagaacggtaaaataggcaaagaagaacaagtccatataaaaccagcaataagagaattaagaaagaaaa

SEQ ID NO: 206234 - DNA, 284 bp, Unknown
  Bacterial polypeptide expressing nucleotide sequence isolated from the Sargasso Sea
aggccccgtgccaccggacacctgctggctcggcgcagcccaagcctggaatgactccgaacacttggaacaaggatgtgatggctacctggcgctgtatcacgaccaaggcctgatcccggtcaaagtgctggcctttgatcaggccgtgaacaccacgctggggttgccgttcctacgcacctcaccggatcacggcacggggtttgatcgggccggccaaggcagcgcccgcggcgccagcatgctggcggccattgatacggcgttggagctgggctagc

SEQ ID NO: 206235 - DNA, 825 bp, Unknown
  Bacterial polypeptide expressing nucleotide sequence isolated from the Sargasso Sea
tatgggggaccctgctggcattggtggcgatatccttctggctgcctggacgcaacggcgcgaagcaaccctaccgcctttctttgcaattgatgctccagaacggctcagtgctctcgccgatctcctgggccttgatatccctattcgaacgatctcgtcgcctgatgaaacaaagagcgtgtttccagatgcgttaccggttctcccccaacctcttgttatcccggccgagccaggcagcctcgatgggcggaacgcaccaagtgtgattgcatcgctcaagagggccttggcctacacgctgagcggcgacgcagcgggcattgtgaccaatcccatccacaaacagatgctctactcagaaggatttgagcacccgggacacaccgaatttctggcagaggcgactggcggcactccggtaatgatgctctcttgtcccggcctcagggtcgtgccagtgacgatccatattcccctggccgatgttccagatcagctgaccagcgagcttatcgtttcgaggggacgcacactggccgccgcgctggaacatgattttggattggctcacccccgcattgcggtcgcagcgcttaatccccacgctggtgaaaatggagcccttggtctggaagaggagcagatcattgcaccggctgtgcagatgcttcgtgatgttggcatcaatgcgactggacctttcccggcagatacgatgtttcatgcggaagcccggcgcgggtatgatgcggtactcgccatgtatcacgatcaggctcttattccgcttaaaccattgatttcgacaatggggtcaac

SEQ ID NO: 206236 - DNA, 530 bp, Unknown
  Bacterial polypeptide expressing nucleotide sequence isolated from the Sargasso Sea
taatacttgtatgttaatatataataaaaatttatcagtctgtcctgttactactcatcttcctttaaaattagttactaaaaaaataaacaaacaaaatattttaaataaagttctattaattcaaaagttttataaaaaatttctaaataaaaatcctaaaatagcaatacttggacttaatccacattgtgaaagtattttaaattataatgaagatgataaaataataaaaccaatcgttttaaaattaaataaaaaaggttacaaaattgtaggacctatctcagctgatacagcctttttgaaaaagaatagaaaaaaatatgatgtaattataggtatgtatcatgaccaagtattaacacctttaaaaaccctttttgaatatgatgctataaatataacgctaggtttgccctttttaagaatatctcccgatcatggaccgaatgaaaatatgcttggtaaaaataaatcaaaccctcttagtttaatgagagcaatctcatttttagataaaaattgat

SEQ ID NO: 206237 - DNA, 637 bp, Unknown
  Bacterial polypeptide expressing nucleotide sequence isolated from the Sargasso Sea
atgaaaccactaatcggtataacaatgggcgaccctgcaggagttgggccagaattaattgtaaagcttttaaaaaataaaagttttgattttagtaagtttataatttttggctcctctaaagttttggactacgaatttcgtaaatataacgttagaatacctataaaaaatttttcaaccattagttcagttgatactagcaaagaatttatactaaattttgaaccaaaaaaatctgaatttaattttgaaattggaaaaataaatccaaattgcggtaaatttgcttatgaggctattttaaatgcaattgaatttgctaatagagggctaataaaagctattgtaacttgcccaattaataaagaatcattgaaattagcctctgtagaattaattggtcatactgagatattatcgaaaaaatcaaaatctaatgatgtttttatgcttatggtaaatgatgagttaaaagttattctatgtactatccatgtgccattacttaaagcggtattatctcttgatgaaaagttaatattaaaaaccataattgcagcaaataaggcttgttataattttggtataaaaagtccaagaattggtgttgctggattaaatccacatgcaggga

SEQ ID NO: 206238 - DNA, 211 bp, Unknown
  Bacterial polypeptide expressing nucleotide sequence isolated from the Sargasso Sea
aagaactgatgcatatttaggcatgtatcatgatcaagttttacctgttctaaaagctcttagtttcggaagttctatcaacattactcttggagttcctataattaggacttctgtggatcatggagttgcattagatattgcaggtactaataaatcagatgcctcctctctaaaactagctataaaaactgccaaaaagttaatctaa

SEQ ID NO: 206239 - DNA, 796 bp, Unknown
  Bacterial polypeptide expressing nucleotide sequence isolated from the Sargasso Sea
aatttcaaattattaaaaaaccaaatgagctatttcaatgttgatttgcctttgaaagaagttagtcattttaataattatgatgaaaggtgcattaacgtacacccaattaataaaaaagaaatcaaactttcgtatggtaagctgacaacagaagggggtatatattccaaggattctttattcgcagctgttaaagctttaaaaaataaaaagatagatgctttagttactgggccaattaataaaaaaaacattcaatctgatgactttcgtttcaagggacatacagattttttagataatgaatttcaaggtgagagtttaatgtttatggtttcaaatgaaataaaagtagctcttttgacagaacacattcctttaagtcgtgttaaagatcatctaaataaaaatttaattgaattcagaattagagaagtttttaagtctttattcaatgattttggaataaaaagacctaaaattgctgttttatcgattgatccacatgttggtgatcaaggtgtgattgggaatgatgatcaaaaccttttaaaacccgttttagaaaaacttaaagcagaatcatataatgttaaaggtccttttgcaagtgatagtttttttggatctaaattatataagaattttgatgcaatagttgccacataccacgaccaaggattgattccatttaaaacattaacatttggtaaaggtgtaaattttacagcaggtttagatatagttagaacttcacctgatcacggcacagcttatgatatttctgggaaaa

SEQ ID NO: 206240 - DNA, 829 bp, Unknown
  Bacterial polypeptide expressing nucleotide sequence isolated from the Sargasso Sea
gatgaaaaaacttaaaattaaaagaaagattaaagttttgaatttaaagaatttaagaaaatacaaattaaacaacaacaatataaatataatagacataaattataatcaaagacaaccttttgaaaaaatttcatctaaatctaatcactatatcgaaaattcatttaaaactgcgttgtcaattttgaaaaataaaatatcaaataaattagttaatgggcctatttcaaaaaaacattttttaaaaaaaaattttttaggtgttaccgaatatttagcaaaaaaaactaagattaagagttttgcaatgttaatttacaataaaaaattatccgtttgtcctataacaactcacctaccaattaaattagtgcccaaaaatttaaatatcaaaactattaaaaataagataattttaataaataatttctataaagatttttttaagcgtaagcccaggatcgccgtaacgggccttaatccgcattgtgagagtgtacttaacaaaaatgaggattttacaataataaggccagcaattttagctcttaaatcaaaaagatatgatgtgaaaggaccattttcagctgacacgatttttttaaaaaaaaatagacgtgaatatgatgttatagtcggcatgtatcatgatcaagtgttgagtcctataaaaactctttatgaatatagtgctgtaaatattactttaggtttaccttttattaggatctcacctgaccatggcccaaacgaaaaaatggtaggaaaaaatttatcaaatcccttaagtcttatcgaagctataacttttttagataaaaagtga

SEQ ID NO: 206241 - DNA, 942 bp, Unknown
  Bacterial polypeptide expressing nucleotide sequence isolated from the Sargasso Sea
atttacgccggcatcattgttgtacccatgcctgataccttcaatactaaaaagattgatcgcctgcgggccgtgatggcgtccactgaggcaaaattgcttattatcaatgagcaacaggcttccagaattagtgacgcaaacacattcgaaggggatacagccacactggttgtggagtacgaaaagcaagcctgtaacagagcatcttgccgaatgaatccacaaactgttgcttatttgcaatttacttccggttcaaccagtacgcctaaaggggcggtaattacgcaccaaaatttgacacatcaaactcggctgcttgctgacagctttgctcaaacagaagattcggtgtttgttaactggcttccaatgtaccacgatcaagggctagtcagcgggttactgctacctgcctcattgggcgcaacttccattctcatgtctccgttggcatttgcgcaaaaacctattaggtggttgcaggcggtttcaaaatacaaagccactacaagcggtggaccaaatttcggattcgcccaactggctaatttgccattatcagcgaaagacaaatttgatctgtccaactggaccactgcgttttgtggggctgagccaattcgtatgcaaattgtcaacaagttcatcgataaatataaggcccaccacttccaaccttgttcatttgtaccagcttacggtatggctgaaagtactcttgttgtcaccagaaataagccgttgccaaaagaacgcgcgcacgcgctggatctcaagttgaccagtgctcactggcggatatccgaacccccggtgagttgtgggacagcgcaatcgggaatggacgtacaaatcgtcgatccagagactgaaaaagtgctgcctgaggggaaaattggcgagatatggctcagtgggcccagtatggctaagggc

SEQ ID NO: 206242 - DNA, 627 bp, Unknown
  Bacterial polypeptide expressing nucleotide sequence isolated from the Sargasso Sea
aagcgggaatgacatttgaagatgaactgggctacataagaaatttattgggtctctcgactcgagcaagcgagtttaatgtggtagataagatgtggaatgctcgagtaacctctcatgtccccttaaaagaagtgtctgatttgatagatatcaaaaaaattttagactctattattatgtcggacaaaactctaaaagaggcagggtttttaaggccaaggatagcagtggctgctcttaatcctcacgctggggatgggggagcaattggccgagaagaaatcgaggtaatcaaacctgcgatagaaaaggcgcaggcactgcaaatttcagtcaacggaccatttcctagcgacaccatgtatttgaaaattcgagacggcgaattcgattgtggtgtaagcatgtatcacgatcaaggccaaattgccataaagttacttggatttgacaaaggcgttactgtattgggagggcttcctataccaattacaactcccgcccatgggaccgcatttgatatagtttcaaccaacaaagctaacgttcagccaaccttaaatgctttcaaaatggtcgctgaaatggtaaggaaccgatggcaaactgattacaccaattaac

SEQ ID NO: 206243 - DNA, 234 bp, Unknown
  Bacterial polypeptide expressing nucleotide sequence isolated from the Sargasso Sea
cattctctagaaaatcattgaaagaggctgatgcctatttgggtatgtatcatgatcaagttttgccagtcttaaaaactttaagttttggaaactcaattaatattacacttggaattccaataattaggacttctgttgatcatgggattgctttggatattgctggaactaataaatcagatccatcatcattaatactagccgttaaaactgcaaagaaattaatttaat

SEQ ID NO: 206244 - DNA, 672 bp, Unknown
  Bacterial polypeptide expressing nucleotide sequence isolated from the Sargasso Sea
tttgattaagaaaccaatcgtagtctcattaggagacccttctggtataggtccagaagtatttttaaaagcaatctttgaaactcaattaaaagactaccgagatctaataaatatagtcagctcaaagaaagttatagaaaaaatatcttgcgaacttaagtacaacgagattgattccttgaatattacagatgttgatctaggttctgattttattcttggcaaaccagacaagaaaaatgcatcttatgttattgaatgtttaaataaagcagctgaatttgcttataaagagaaaatttcattagttactgggccaataaacaaaaaaatagtaagcagccagattgctaatttttctggacatacagagttcttaagagaaaaatttggctctgaagatgtccttatgttgcttgcaaataattcactaaaaattggagtagctacaacacatgtagctttaaaagaagtgcctcaaatgattacaaaagaactaattataagaaaatgtagattattgaaccaagggctaaagaacatatatgagttagatagccctaaaattgctatcttaggcttaaatccgcatgcaggagaagaaggctcatatggaaaagaagaaattgaatccataaaacctgcaattacagatttaaagagtgaggg

SEQ ID NO: 206245 - DNA, 670 bp, Unknown
  Bacterial polypeptide expressing nucleotide sequence isolated from the Sargasso Sea
tttagttttaggccacaaattatgtttacaaaaaaaaataggtggcataattaactgttctattaataaaaaaaatatatttaaaaaaaaaaattttggtgtcacagagtttttggctaaaaagaataatatttataattcagaagtaatgatgatttataataaaaaattatcagttgtcccactaacaacgcatattaaaatcaacgaaatttcaaaacttcttaaaaaaaaattaataataaataaaataaatacgcttaataaagtttattttaaatattttaaaaaaaaacctcgtatagcaattttaggtttaaatccgcataactacgagctcaaaaaaaattcagaagaggttaaaataatcttgcctgcaataaaaagtttgaaaaaaaaatttaaagtttcaggtccttacccttctgatacaattttttttaaagaaaacttaaaaaaattcgatgttatttttggaatgtaccatgaccaagttttagctccttttaaagcattatttggttttgatgctgtcaatataactttaggtttaccttatattagaatgtctcccgatcatggagtagccatggataagaagaagcttaatatttctaatccaaaaagtcttaataggtgtattgagataatttctaagcttagtaaatga

SEQ ID NO: 206246 - DNA, 637 bp, Unknown
  Bacterial polypeptide expressing nucleotide sequence isolated from the Sargasso Sea
tatgaaaaaaaatttagcaagaggaataattaatggaccaatctctaaaaaatactttttaaacaaaaaatatttgggaattactgaatatttagcaaaaaaaacaaatagtgaaacagtaatgttaatttataataataaattttctgtttctcctctaacaacacatcttccgcttaagaacgttgctaataatattaataaagagaaaatatataataacgtaaaaaaaataaatagtttttatattaaatatagaaaaaaaaaaccaacttttgcaattttaggacttaatcctcattgtgaaacaagtagtaaatttagtgaagagataaaaataattatacctgcaattaaaaaattaaaaaaaaataaaataaaaataaatggaccattttctgctgatacttttttttcaaaaaaaaatattaaaaaatttgatgttgttattggcatgtatcatgaccaagtacttactcctatgaaaactttatttaattttgatgcaatcaatctaactattggcctacccttttttagagtatctccagatcatggtcctaatgaatctatggttggcaaaaataagtctgattttttgtctttactaagatgtatcgaatttcttaaaaattga

SEQ ID NO: 206247 - DNA, 601 bp, Unknown
  Bacterial polypeptide expressing nucleotide sequence isolated from the Sargasso Sea
ctaaaaaatatttttctaaataaaaaatttccaggaattacagaatttatagcaaatgaattttcaagagaaaaagttggtatgctcatttataataagtctctatcagtttgcccattaactactcatcttccaataaaattaatcccaaaaaaaattactaaaaaattaataatagaaaagatcactttaattaatgctttttataaatcattatttaataaaaaacccaaaattggagtagttggtttaaatccacattgtgaaagtataagtaaaataaatgaagatgataaagttataagaccagcaataaaacaaatctataataaaagtataaaagtttcaggaccatatccggcagacactatttttttgaaaacaaacagaaaaaaatttgatgtaattgttggcatgtatcatgatcaagttttgacaccaataaaaacattatttgaatatgatgcagttaacataactatgggattaccttttttacgagtctcaccggatcacggacctaatgaaaaaatggtgggtaaaaaccagtctaatcctctcagtttaattaggtcaattaaatttttagacaataagtgat

SEQ ID NO: 206248 - DNA, 517 bp, Unknown
  Bacterial polypeptide expressing nucleotide sequence isolated from the Sargasso Sea
gcttatttacaataatcgtctgtctgtttgtcctgtaacaacacatttacctttaaaggtagtatccaaaaaaattaatcaaaagaacataatagaaaaaattaaattagttagcgacttttataagaataatttaaaactgaaacctaaaatagggatattgggtttaaatccacattgtgaaagtatagataaatttaatgaagatgaaaaaataataaaaccaattataaaaaaaatgaggaagaacagatatagtatttctggccctcatccagctgatacaatatttttaaaaaataataggaaaaattttgatgtaattataggcatgtatcacgaccaagtattaacccctattaagactttatatgaatatgatgcaattaatattactcttggtttaccttttataagaatatctccagatcatggacctaacgagagaatgatgggaaaaaatttatctaatcctcttagcttgatccaagcaattcgatttttggataaaaattga

SEQ ID NO: 206249 - DNA, 830 bp, Unknown
  Bacterial polypeptide expressing nucleotide sequence isolated from the Sargasso Sea
tcataaacaaatgaagaaattaaaatttaatttgaatttgaaagaaatatataatttaaaagaagcaaaaattgaaaaattaaatattttaaacgtgaattacaataataaaaaagttttttctaaaatctcttcagactcaaaaaaatatatatctgattgttttaaaatagcgttaaaattaattaaaaataataaaaaaattgcattaataaatggcccaatatcaaaaaaacattttttaaaaaaagagtatctaggaattacagaatacatttcaaaaaaagtaaaaacaaaaaatcaagttatgttaatctataatgatgaattatcagtctcacctgtcactactcacctgccgctaaaatttgtcacaaaaaatataactaaaaaaaaaataattaataatgtaaagcaaattaaaaaattttatttaacttttcttggtaagaaacccaaaattgcaatattaggccttaatcctcattgtgagactatagacaatataagtgaagaaaaaaaaataataataccttcaattatttcattaaaaaaaattgatataaatattgaaggaccattttctgcagatactttttttttaaaaaaaaatgttgataggtatgatgtggttattgggatgtatcatgatcaagttttaactccaataaaaactttatataattttaatgcaataaatattacccttggactgccttttataagaatttcacctgatcacggaccaaactacgaaatgcttggaaagaataaatcagatccatcctctattttttgcgctatgagatttattaataaaattagatgaa

SEQ ID NO: 206250 - DNA, 815 bp, Unknown
  Bacterial polypeptide expressing nucleotide sequence isolated from the Sargasso Sea
aaatggtattggcccagagataatattaaaaactttttctgatccaaaaattttaaatgattttataattattatttatactccaattgaaattatatctttttatattgaaaattataaattttcaataacccataagttaattaaatctatttctgaggctaaaaaggggagaattaatatattttcaataaatagtgcgccgtttaaagttagtcctggaaactctaattttcaaagtggggctgttgctttaaagtctttaactatagcaacaaatgatgtaataaaaaaacacacagattgcatagttacaggtcccattgataaaaaaacaattcaaagcaataactttacttttaaaggacacacagaatttcttacaagaatgtctaagagagaaatttccttaatgattatggttgattcaagtttaagaataggattagttactaatcatatagccataaataaaatttcaaatgccattaattcggatcagttattaattaaaataaaattaatttgtgatagtttacaaaatgactttaaaatctcaaaaccaagaattgccttattaggacttaatcctcactcaggagaccaagggctgataggtaaagaagaattaaaagttattattccaactttaaataaagcaaataataatgaatttaatatttttggccccttttcggcagatggttttttttcaagtagaaattataaaaattatgatggaatcttggcaatgtatcatgatcagggacttattccatttaaattattaagtaataataatggagttaatttta

SEQ ID NO: 206251 - DNA, 792 bp, Unknown
  Bacterial polypeptide expressing nucleotide sequence isolated from the Sargasso Sea
aatgaattataaaccaattctggttgttgctggagagccgaatagtatatttttagaaatttactttaaatcttttaataaataccgcctaagaaatcctttaattttaattgcttcttataaattattaaaattacaaatgaagaaattaaaagtagataaaaaagtaaatattatagatatatcaaatataaaaaattataaattgaataataaatcaataaatttaataaatgttaattttgatcaaaaaatagcgtttaaaaaaatttctagtaaatcaaataaatatattaaagattgttttgatatagcttttaaactaattaaagaaaaatactcttacaaattaattaatggaccaatttcaaaaaaatcctttttaaataataaagttttaggattgacagaatttatatctaataaattttcaattaaaaagaatgcaatgcttatatataataaaaaactttctgtgtgccctttaacaactcacttacctttaaaaatggtttccaaaaatgttaataaaaaaataattgaagagaaagtttatttaataaatcaattttataaaaaatatttaaatataaaacctagaattggtattttgggactaaatccacattgtgagagtattgattcttataatgaggacgaaaaaataactaaacccgctattaaatatttaaaaaagctgggctatagagcctctggtccatttcctgcagatacaatttttttaaaaaataacaggaggaattttgatgttataattggaatgtatcatga

SEQ ID NO: 206252 - DNA, 517 bp, Unknown
  Bacterial polypeptide expressing nucleotide sequence isolated from the Sargasso Sea
aatgttaatttataataaaaaattatcagtttgcccagtgacaacacacttacctttgaaactagttgcaaaaaaaatcacaaaaaaaaaaattagagaaaaaattgttattattaacgatttttataaaaaatttttgggatttaaaccaaggatcgctgttataggtttaaatcctcattgtgaaagtatcttaaaatttaatgaagatgttaagattatacatccagtaatcaaatctttaaaaaataagattaatgtaaaaggtcctttctcagcggatacaatatttttaaaaaataatagaaaaaaatttgatataattattggtatgtatcatgaccaagttttaacacccataaaaactatttttgaatatgatgctataaacataactattgggctaccttttttaagagtaactcctgatcacggaccaaatgaaaaaatgattggaaaaaatatctctaatccaattagtttaataagatctttagaatttttagataaaagatga

SEQ ID NO: 206253 - DNA, 403 bp, Unknown
  Bacterial polypeptide expressing nucleotide sequence isolated from the Sargasso Sea
agtaaagccaaagattgcagttctatcaatcaatcctcatattggagataacggtgtaattggaactgaagatcaaaaattattaaccccggctataaatgagttaaataaaaatgacaatataatttttggtcctttttcagccgatacttttttttgtaataattatgctaaatatgatgctattctggcgatatatcatgaccaaggattaatcccattcaagactatttcttttggtgaaggggtaaattacagtgcaggtctttctattattagaacttccccggatcatggtacaggttttgacattgcaggaaagagtattgcagatccatcctcttttgcacatgctttaaaattagcgttagatatatatgagttaagaaataagatactttga

SEQ ID NO: 206254 - DNA, 883 bp, Unknown
  Bacterial polypeptide expressing nucleotide sequence isolated from the Sargasso Sea
atggccatttcaaaaaaaattattctgatttcagcgggagaccctgcaagcattgctacggaaattactataaaagcaattttctcaagaaaacttaatgaaaatgtaataccaattataataactgaccctgatacagtaacatattataaatatagttgttatgatgaaaattttaggattaatataattacagataaacaaaaatttagtgactataaaaaagatttttttaatataatacctatcaagatttttgaaaaagttaaagcaggaagaccttctatagaaaatgtcccttttacaattaattctatcaaaacctgtttagaactagaaaaaaataccatagcctcagctattgtcactaatcctattaataaatatatcatgtataaacatgggtttaaatttagtggtcatacagattttttggcttcattttcagataaaagaaaaactcctgtaatgatgttagttggtaaaaatatcaaaacagtgcctctaacagttcatgttccaatttcaaaagtatctaatttaatttcaaaagaattaatattaaaaactttgacaatagttaataacgatttaaaatctttctttggaatacaaaaacctaaaattatgttaacgggacttaaccctcactcaggtgaaaatggcgagattgggttagaggaaaataaaattataatacccacaataaaagaagttcaagaaaacaaaggagttcttttaactggtcctatacctgctgatactgcctttacatttgagcaaagaaaaaaatatgatgttgtaatttgtatgtaccatgatcaagctctaatacctatcaaaactcttgatttttttagcagtgtcaatgttactttagggc

SEQ ID NO: 206255 - DNA, 760 bp, Unknown
  Bacterial polypeptide expressing nucleotide sequence isolated from the Sargasso Sea
ttgaaaaaaattatctattcgcctggtgagccaagtgggatcggtccagacttaatcattaaattatcctcttcaaatttatgggaagatcttaagatacccgttgtttctattggtgatccaaaactttttttagacagagcagctttgttgaagaaaaaaataagaattattggattggagtcgcttagtcaggtaagtaaaaatagcaaaggacttatacaaattataaaagtgactaaatgctctaatacaaggccaggaaaactatataaaagcaatgctcaatatgttcttgataatctaacttactctattaaacaaactatgcaaaatgaaggaacggcattagtaaccggtccattaagtaaagaaaatatcatttcaattgataaattatttactgggcatactgaatatataaaaaaaattaccaaaagtaaggatgttttaatgatgcttgcatcggatcagttacgagttgccctagctacaactcatatacctcttaagaatgtatcaagaacaattacgaaaaaattaattattaacaaggtaaaaattcttaatgaagatttaaaaaataaattcaatattaagaacccaaatataaaagtgcttggtcttaatcctcatgcaggagagaacggtaaaataggcaaagaagagcaagatcatataaaaccagcagtaagagaattaagaaagaaaaaaattaacgtatcaatgcccatttcagcagatactgcattttctagaa

SEQ ID NO: 206256 - DNA, 628 bp, Unknown
  Bacterial polypeptide expressing nucleotide sequence isolated from the Sargasso Sea
gtttacatataaattaattaatggtcctatcaacaaatctaaaactttaaaaaaaaaatatctaggaattacagaatatatttctaaaaaatttaatagaaaaaaatttgcaatgttaatttataatgaaaagttatcagttagtccaataaccactcatttaccattaaaattagtaaccaaagaaatttcaaaaagaacaatcaaagaaaaagtcaatatcataaatgacttttataaaaagtttttaaagtttaaaccaaaaattggtatagtaggtttaaaccctcattgtgaaagcatccataattttaatgaagatcaaaaaatactattacctgctatcaaatctttgagaaaaaaaataaatgttaaaggtccttttcctgcagatactatatttttaaataaaaataggaaaaattttgatgttattattggtatgtatcacgatcaagttttagcaccaataaaaacattattcgaatataatgcaattaatattactttgggtttacccttcattagaatatctccagatcatggaccaaataaaaatatgattggtaaaaacaaatcaagcccaataagtttaattaaagcactcagttttttagataaaagatga

SEQ ID NO: 206257 - DNA, 420 bp, Unknown
  Bacterial polypeptide expressing nucleotide sequence isolated from the Sargasso Sea
aaattaggtcattacataaaaactacattaaatacttcaaaaaaaaacctcgtatagctgttttagggttaaatccacataatttagaatttaaaaaaaattcggaagaagtaaaaactattttacctgtaattaatattttaaaaaaaaattacaagatttttggaccttattcatctgatacaatttttttaaaagaaaatttaaaaaattttgatgtaattgttggaatgtatcatgatcaagttttagcaccgtttaaagccttattcgaatttgatgcagtaaacataacacttggtttaccttatattagaatgtcaccagatcacggtgttgccaaagataaaattaaattaaaagtttcaaatccacaaagtctcaatagatgtattgatgaaatgtctagactaacttaat

SEQ ID NO: 206258 - DNA, 520 bp, Unknown
  Bacterial polypeptide expressing nucleotide sequence isolated from the Sargasso Sea
atgttgatttacaacaaatctttgtcagtaagcccaataacaacacatttaccattaaaattcgtaagtagaaaaataaataaaaaaaatataatttataaaattaaattaatttcaaatttttacaaaaatttttttaaatttaaacccagaattgcaattttaggtttgaatcctcattgcgaaagtattgataattttaatgaagatgaaaaaataattaaaccaactataaaaattttaaaaaaaaaaggttataaaatttccggccctttttcagcagatacaattttcattaaaaaaaatagattaaaattcgatgtaattgttgggatgtatcatgatcaagtattaacgcctttaaaaacattatacgaatacgatgctattaatattacacttggactaccatttattagaatatcacccgatcatggtcctaatgaacaatttttaggaaaaaatgtttcaaatccgttaagcttaataaaagctatttcatttttggataaaaattgat

SEQ ID NO: 206259 - DNA, 940 bp, Unknown
  Bacterial polypeptide expressing nucleotide sequence isolated from the Sargasso Sea
gttgacctgggttataaaactttgtagcctaaatttttggggaaacttaaaattaccaatagtatgtattgctgacagtaaattaatattagatagagcaaaagtgttgggaattaaaatcaatattgatgaacttaaagatataaataatgctaaaagaaataaaaagaacacacttcaaattttctttgtatcagtttgcaaagatactcaaccgggaaaactgaaaaaaataaatgcatcctatgttattgaaaatctagattttgcaataaattattcaaaaaataataaaagaactgctttggtaacagggcctattagtaaagaaaatgtaatacacaaatataaaaattttacagggcatactgaaagaattaaagaaaagactgatagcaaaagtgttcttatgatgttagcttcatcaaaacttaaagttgcactcgctacaacacatgttccattaaaagatgttcctaagaaaatcactaaaaagcttttaatgactaaaatacaaatccttcatgaggaactcaaaaataaatttaatataaaaaatcctaaaattaaaatgctcggtctcaatcctcattctggagaaaatggtaaaattggcaaagaagaaaagagtattctaattccgactgcaaaatatcttagaggtaaaaatattaacgtatccctcccaatatctgcagatactgctttcacaaaaaaaaacttaatgtcaacagacgcatattttggtatgtaccacgatcaagttttaccagttcttaaagctcttagctttgggaaatctttcaatataacccttggtacctcaattataagaacttcggtagatcatggtgtagccttagatatagctggatcaaaaaaaagtgatgaatcctctttgaaagaagctataaaaatggcagcaaagctaattaaatga

SEQ ID NO: 206260 - DNA, 722 bp, Unknown
  Bacterial polypeptide expressing nucleotide sequence isolated from the Sargasso Sea
aatgctagaaaaaccgatagcaataaccccaggagaaccagcaggcatcggcacggaaataacattaaaagcgtggaaagataagtcttgtcctcctttctttttaatcgatgatgcggaaagggttgccactcgtgcaaaaaaggcaaacttagacgtgcctattaaaataatcaattcgccagaacaaactctggaatgttttattaatgctctcccaatactatcgcacaaatttccagttcattgcaagcctggcaagccagaggagctaaatgccccggctgttattgaagcgatagaaattgccgtcaattatgctaaaacagacctagtcagtgccattgtcactaacccaatccagaaagaaatacttacgaaagaaaaatttcaatatcctggccatacggaatttttggcggctctgtgcgggaacgaagtagaaccagttatgcttctagcatcaaatgaactactcgtggtacccgtcacgatacacgaaccgcttgcaaacgtaacaaaaattttgaatgaaagccttcttaaacgaactatcttaatagcaaattctgctcttaaaactgatttttcaataaatagcccgcgtttgtgtgtctccggcttaaatcctcacgccggagagaatggtacaataggattagaagaggaacaaataataaaacctgttatagagtcccttaaaaattgcggtcttcggatta

SEQ ID NO: 206261 - DNA, 658 bp, Unknown
  Bacterial polypeptide expressing nucleotide sequence isolated from the Sargasso Sea
attgaaaaaaattatctattcgcccggtgagccaagtggtatcggtccagacttaatcattaaattatcatcttcaaagttatgggaagaccttaagatccctattgtttctattggtgacccaaagctttttatagacagagcagctttgcttaagaaaaaaataaaaattattgaattggagtcacttaatgaagtaagtaaaaacactaaaggacttatacaaattataaaagtaactaaatgctttaataccaggccgggaaaactctctaaaagcaatgctcaatatgttcttaataatctcacttactctattgaacaaactatgcaaaatgaaggaacggcattggtaacaggcccattaagtaaagaaaatatcatttcaattgataaattatttactgggcatactgaatatataaaaaaaattaccaatagtaaggatgttttaatgatgcttgcgtcggatcagttacgtgttgccctggctacaactcatatacctcttaagaatgtatcaagaacaattagaaaagaattaattattaacaaggtaaaaattcttaatgaagatttaaaaaataagttcaatattaaaaaacctaatataaaagtgcttggtcttaatcctcatgcaggagagaacggtaaaata

SEQ ID NO: 206262 - DNA, 1000 bp, Unknown
  Bacterial polypeptide expressing nucleotide sequence isolated from the Sargasso Sea
aatgtcatattccaaacttgggcttttactgggtgatcccagtggaatcggccctgaactctgcccgaagttgcttgaagaacggtccggaagggaatccaaccgggtggtcctgatcggagaaccgtccctttttgaaaatggaaagaagattgccggaatcgagcttgaagcaccgcttgtccaaaatatccgtgaaattcccgatggaggcatcggcatgcttcagggccccgaactgcagatggacggggtccgtgttggagaggcaagtgaaatttgcggccgttatgcactcgattctttccgcagggcttcggcactgtgtaaatcaggcgagttggacggtttttgtttcgcaccaatgaacaaggaatccctcaggcttggtggaaatactcatgaggatgatttgcgattcgtggccgatgaattggagcatgagggatattgctgtgaactgaacaccaccggaggactttggacttcaagggttacttctcatattcctttgaaggacgttgcttccctgattacagaagagggtatcctcgatgcggtcaagatggcgcatcagacccttttggatgccggtatttctgtgccccggattggtgtggcggcacttaatccccatgccggtgacggggggaatttcggcaccgaggaaggcgacatcatcgaacccgcggtaaaaaaagttcaacagcttgggatcaaggcggatggaccgcatcctgccgatacgattttcgtcagggctcagcggggtgagtttgatgcggtggtgacgatgtatcatgaccagggacagatcgcgatgaaactgatggggttcgatcatggcgtgaccgtgcttggagggcttcctgttccggttacgactccagctcacggaactgctttcgatattgccggaaagggcaaagccaaccctgatgccttgaaagcagcctggaaggttctgcaaaacatggtttcctccaggcttgcttcctga

SEQ ID NO: 206263 - DNA, 511 bp, Unknown
  Bacterial polypeptide expressing nucleotide sequence isolated from the Sargasso Sea
actgacggagcatatagcattaaaagatgttgtccataatattacagttgaaaaaacaactaaaaaattaaagattttatacaaagtcctaaatgaagactttgggatactaaagccaaagattgcagttctttcaattaatcctcatattggagataagggtctaatcggaactgaagatcaaaaattattaattccagctataaatgagttaaatcaaaaagaaaatataatttctggtcctttttcagctgacacttttttttgtaacaattatgttaaatatgatgctattctagcagtatatcatgaccaagggttaattccgtttaagactatttcttttggtgatggggtaaactatagtgccggccttcctattattcggacttctcccgatcatgggacaggttttgatattgcaggaaaaagtattgcagacccatcctcttttaaacaggctttaaaattagcattggatatatacaaggtaagaaataagttagtttaa

SEQ ID NO: 206264 - DNA, 967 bp, Unknown
  Bacterial polypeptide expressing nucleotide sequence isolated from the Sargasso Sea
atgaaaattaaaccaattcttttagtacctggagagcctaaaagtgtttttttagaaattttttttaaatctataaagaatataaaatataaaagtcctttaatattaatatgctcaaagaaagatttggaaaatcaaataaaaaaatttaaaattaatagaaaaataagagttttaaatattaaaaatatcaaaaatatcaaaattgataataaaaaaattaatcttattaatataaactttaaaaattcaaataatcaaaaaataaagattaaattacaaaataaatatattaatgaatgttttaatattgcgttcaaaattattaaaaatggatatacttacaaatttattaatgggccaattaataaaaaaacatttctaaaaaaaaaatttctgggcattacagaatatattgcgtctaaatttggcgtaaaagatactggaatgttaatatacaataataaaatatcagtatgtcctttaactactcatcttcctcttaaattagtttcaaaaaaaatttcaaaaaaattaattaaaaatagaatcaaaatgattgatgatttttttaaaaaagaattaaatatagttcctaaaataggtgttactggtttaaatccacattgcgaaagtatcaataaatttaatgaagatgaaaaaattgtagttccagcagttaaatcatttattaacaaaaaaataaaagtcaaaggacctttttcagctgatacaatctttttaaaagcaaatagaaataagtttaacatcatattaggcatgtatcatgatcaggtattagctcctttaaaaactttatttgaatacaatgcgattaatataactatggggttgccttttttaaggctttctccagatcatgggccaaatgaaaaaatgtttggacaaaataaatctaatcctcaaagtttaattcaagctttaaaatttttagataaaaagtgat

SEQ ID NO: 206265 - DNA, 1012 bp, Unknown
  Bacterial polypeptide expressing nucleotide sequence isolated from the Sargasso Sea
aatggttaatcctagaaaaattagatcagcaatttcaattggcgacccaaacggcatcggtattgaaataattttaaagtctctttctaaagaagaggttttagacaaaataattccaatagtttttggttcgtataatctaattatgaatcaagcacaggcacttggacaggacgtgtcaatgctccatccaatatcagaaataaacaatgcaaaggagaagagaattaacatattaaatgtttttgataattgtgattataagtttggagttttagataaggcagtttcagattttggaattctttctctagagctagcaattaatgccgttaaaaataaacaagccgatgtcttggtcaccgcgccaataaataaaaacgctgcctattctcaaagctttaaattttctggacaaacagactacttatcatccttttttaattcagaagcacttatgttaatggtttcaaatagtttaaaaatagctttaactactgatcatattcccttgaaagaagtgcatagtgttttaagtaaagatttaataaaaagaaaaatcgagattttaaataaagctttacaagaggattttaaaatacttaatccaaaaatagccgttttagctattaaccctcatgctggagataatggagtaataggaaatgatgataatagtttgacaatccctgttataaatgagttaaattcaaacaattattctatagaaggcccctttccatcagatacctttttcagtaatgaacgatataagaaatatgacgctgtccttgctgcctatcatgatcaaggactaatcccttttaaaactattaattttggaaaaggagttaatttttcagcaggcctccctataattagaacatcccctgatcatgggacagcatatgatatagcaggtaaaggtttggcagacccgacatcttttattaaggcgactgaaatagcatcaaatatttattttgcaagaaataatctgatatctaaataa

SEQ ID NO: 206266 - DNA, 304 bp, Unknown
  Bacterial polypeptide expressing nucleotide sequence isolated from the Sargasso Sea
acagttcaacagtttgggatcaaggcggatggaccgcatcctgccgatacggttttcgtcagggctcagcggggtgagtttgatgcggtggtgacgatgtatcatgaccagggacagatcgcgatgaaactgatggggttcgatcatggcgtgaccgtgcttggagggcttcctattccggttacaactccagctcatggaactgctttcgatattgccggaaagggcaaagccaaccctgatgccttgaaagcagcctggaaggttctgcaaaacatggtttcctccaggcttgcttcctgat

SEQ ID NO: 206267 - DNA, 517 bp, Unknown
  Bacterial polypeptide expressing nucleotide sequence isolated from the Sargasso Sea
gatgttaatttacaataaaaaattatcagtttgtcctgtgacaacacatttgcctttaaaattggtagcaaaaaaaatcactaaagataaaattaaagaaaaaattgttattgttgatagcttttataaaaaatttttaggaattaaaccaagaattgcagttttaggtttaaatcctcattgtgaaagtatcttaaaatttaacgaagacaatgaaattatacatccagtgattagatcttttaatgataaaattaatgtgaagggtcctttcccagcagatacaatatttttaaaaaataatagaaaaaaatttgatgtaattgttggaatgtatcatgaccaagttttaacacccataaaaactatttttgaatacgatgctataaacataactattgggctaccatttttaagagtaactcccgatcatggaccaaatcaaaaaatgataggaaaaaatatctctaatccaattagtttaatgagatcattaaaatttttagataaaagatga

SEQ ID NO: 206268 - DNA, 667 bp, Unknown
  Bacterial polypeptide expressing nucleotide sequence isolated from the Sargasso Sea
atgaacaacaattatcaaccgatagtaattacgtgcggagatcctgctggggtcgggcccgaggtggccgtttctgcttggaaagccttaagagacgaaattcccctatgcattcttattgatcccagttttgtcccacaaaatattaatatcaaaactcttgatcattcaccgcgcgcttcggacattgaaagaaattcccttacagtcattcggcacaaatttgttgaacatcgagtcccgggtgaaccaaacccaaaaaacgctggagcgacaattaaagtaatagaacgtggagttcaatttgtaaaaaatggagaatgttccgctatttgcacgatgccgattagtaaatcaatcctcaaaaatggagcaaattttccttttccagggcatacggaatacttagctcacctggatggaacagatagctatgggatgatgctaattaacaaatatttaagagtagttcccgccactattcacattccggtcaaagatataaccaagtatttgaatgcagaattaattgagaaaacaattaaaactacacaccgggaacttaccagtagattttcaattcctaatccaagcatttggatttcaggactaaatcctcatgctggagaggaaggaacattggagatgaagagcaaaatttataata

SEQ ID NO: 206269 - DNA, 1003 bp, Unknown
  Bacterial polypeptide expressing nucleotide sequence isolated from the Sargasso Sea
gatgtcaaaaaacttttacccattaataggtttttcatcgggtgatccaaatggaattggccttgaggtattgctgaaatcactttccgatagtactctttgtaatgaattcaaaccagttgtatttgtaaatcataaattgattgaaagtcaaaatgaatttttcaaaaccaattgccaaataattcaaataaataatattgaagaggcaagcccaggggtaataaatgttttgagtattaatgataaaaaatttgaccaaaagtttggggaatctaatcaacttggtggagaattttcaagagattcattattctgtgcagctaagtatttgagtgaaaaaaaaatagatgctttggtaacagctccaataaataaaaataatattcaaagtgaagattttaattttaaaggtcatacagattttttagacagctgttttcaaggagattctcttatgtttatggtttcagatgatataaaagttgcactattgactgaacatatcccaattaataatattgtagaaaaaattacacctgcattaattgaaaaaagaacaaaaattattgaacattctctaaagaaagactttaatattaaaaacccgaaaattgcggttctttcaataaacccacatgtcggtgataatggagtaattggagatgaagatgacaatattttaattccatctatcaaaaaaatttataaatctggtgttgatattgaaggtccatttgcgagtgatagtttttttggttcggatgcatataaaaaatatgacgcaattattgccagttatcatgatcaagggcttataccttttaaaaccttaacttttgggaaaggtgttaactatactgctggtttaaatgtagttcgtacatctcccgaccatggcactgcttataatatttctggaaaaaataaagcaaatgagagctcatttaaatctgcaatagttacagctttaaatattcttaaaaacagaggaaaaatttag

SEQ ID NO: 206270 - DNA, 229 bp, Unknown
  Bacterial polypeptide expressing nucleotide sequence isolated from the Sargasso Sea
cctgaaagttttaaaagaaactgatgcatatcttggtatgtatcatgatcaagttcttccagtcctaaaagctctgagttttggtgactcaataaatattactttaggagttccaattatcaggacttctgtagatcatggtattgcgcttgatatcgcaggttcaaataagtcgaatacgtcttcactagaattagcaataaaaacagcgaaaaagttaattaaatga

SEQ ID NO: 206271 - DNA, 640 bp, Unknown
  Bacterial polypeptide expressing nucleotide sequence isolated from the Sargasso Sea
catgagtacaccaattaaaatagcaataacgccgggagaaccggcaggtatcgggccagatttgatcataaaactggcccaggaagcatggcaagcgcagcttgtcgtgtttgccgatggcgaaatgctcaaagcacgagcaagcgccttggggctgccattaacgctaatcgattacgatgccactaacccgcaaattcaagatgcgggttcgttgtttataaagcaaatagataaatccgttgacgttacgccaggcgagcttgatagcgaaaacgggttatacgtagtagaaactctgcgccaggcgtgtcaggcaaatatggatggcgacttcgacgccgtcgttaccggccccgtacacaaaggcattatcaacaaagcaggggtatcattcagcggtcatactgagttttttgcgtatcagtccaataccattgatgtggttatgcttctggcaactgaaggtcttaatgtagcgcttgccaccacgcatattccccttgagtatgtagcgaaagctatcacccgagagcgtcttcataaggtcattcatatcatcaacaccgaccttaaattgaagtttggcgttaaagaacctcacattttatgtgtgtggcttgaaccctcacgcgggtga

SEQ ID NO: 206272 - DNA, 421 bp, Unknown
  Bacterial polypeptide expressing nucleotide sequence isolated from the Sargasso Sea
atgagtaaaccaattaaaatagcaattacaccgggagagccggcaggtatcgggccagatttaatcatcaaactggcccaagaagcatggcaagctcagcttgtcgtgttcgccgacggtgacatgctcaaagaccgagccgccacgttaggccttcctcttacacttatcgattacgatgaaaataacccgcaggtacaagctgcgggttcgttgtttataaagcaaatagataaatcagtgaaagtgactgcgggtgagcttgatagtgaaaatggcttgtatgtagtagaaacgctgcgccaggcgtgtcaggcaaatatggatggcgacttcgacgccgtcgttaccggccccgtacacaaaggcattatcaacaaagcaggggtatcattcagcggtcatactgagttttttgcgt

SEQ ID NO: 206273 - DNA, 727 bp, Unknown
  Bacterial polypeptide expressing nucleotide sequence isolated from the Sargasso Sea
aaatattaataaaactattagttcaattgatcatgttgttaattttgcaaaaaaaaaaataatatcatgcattgtcaccaacccagttgaaaaaaatattataaaaaaaaaaaaaaaaaaatttgatgggcatactttctatattgcaaaattattaaatgtaaaaaaaccagtgatgcttttaacatcgcctaaaattagcgttgtcccaataacgcaacatttatcattaaaaaaagctattaaagctattaataaaaatctaattataacaacaacaaaaataaccaataaatatataaaaaaaatttttgataaaaaaaaaccaaaaattgcaatttctagtttaaacccacactctggggatggtggtatatttggagacgaggaaaaaaaaataatcattcctgcaataaaaaaaataaaagaaaaaaaaatagatattaacggaccattcccagcaaataccatttttaaccctaaattctcaaaaaattttgatgttataatttgcatgtatcatgatcaagcgacaataccgataaaaacaatagatttcgataacggggttaatgtgactttaggtattccaatagtaagaacttctcctgatcatggaactgctttagatatagctggtaaaggaatagcttctgaaaaaagtttgtatagttctattaaaaaagctcaatatatagcaaaaaaaaggaagctgtggatacaataa

SEQ ID NO: 206274 - DNA, 970 bp, Unknown
  Bacterial polypeptide expressing nucleotide sequence isolated from the Sargasso Sea
attacaataggagatattaatggtattggaatagaaatacttataaaaacctggcaagaaaaaaaaataaaaaactttattctccttactaatattaatattttaaataaattacttaaaagaagaaaaataaaattaaaattaaatttagttaattataaaaaaaataaatttatatataataaagagaaatttaatattttttcctattcagcaaattcattagaagataatacatataagtctcttaaatatggatacaatttatgtaaaagcaagaaatgtattggggtcattactttacccttaagaaaagatctaattaaaaataaaataaataaaaattttatagggcatactgaatattttcaaaaaaaagataaaaaaaataatgtaaatatgatcttatttcacaaaaaaatcattatatcaccattaactacacatatagaggttaaaaaaatttcaaaagttatttcaaaaaaaacctatttatttaatcaaatttataacttaaacaaaactttaaaacttgatttcaatattaaaaaaccaaaacttgttatttctggtttaaatccacatgccggagaaaatggtgagataggaactgaagaaattcaaataattcatccagttattaaaaaattacaaaaaaaagatgttaatattaatggcacattttccgctgatagtcttttaattaaggaaaatatagataaatttgattgtttcatttttatttaccatgaccaagcattaataccctttaagtttattagtcaattttctggagtaaattatactggaaatttaaatattataagaacatcaccagatcatggtacagcttacaatttacttggaagtaataaaatttcaaataaatcttttataaatagttataaattaataaataaaatttataataacagaataattaatggcaaaaccaaaaaaatcattaagt

SEQ ID NO: 206275 - DNA, 881 bp, Unknown
  Bacterial polypeptide expressing nucleotide sequence isolated from the Sargasso Sea
aatgtcagaactatacgctgtaacatcgggtgacccagccggtatcggtccagatatctctctcaagattgcccttagagaagacagccatcaatttgtagttttcggcaacatggatcttctcagagaaagagctgagatgcatgcaatggatattaaatttattgaattcgatgaagcaacctcggattcgcaaatccagaaaaacaccttattggttaaaaacttcaatttgaaccaatctgttcagccgggagtaatggattcgaaaaatggttcttatacgctttccatgatcgatgatgcggttaagggttgcatggatggccggtttactggatgcattaccggacctgtgaacaaagaatcaattgcaaaaagtggttacgaattctctggtcacacagaatacattggtaagctttgcaatcaaacgccagtgatgacatttatttcagatcacatgaaaattgcgttgcttacaacacacctaccaatcaaagatgtgcccggtcaaattacattgcaaggaatcatggacgttgtaaaaatcatccatgctgaccttgtcaattattttggcatcaaaaacccaaaaattggtataacggggctcaatcctcatgctggtgaaaatggacatataggtaaagaggaagaggaaatctttttaccagcactgaagtcattgaatgattcaggaattcatgtcgatgggccttacgcagcagatacaattctcttgaacgataccggacatgatctaataattagcatttttcatgatcaactattgcctttgtttaagcatgcaaatcctcacctctcaacaaacgttactatgggcctaaaaattataagaacatctgtggatcatggtg

SEQ ID NO: 206276 - DNA, 259 bp, Unknown
  Bacterial polypeptide expressing nucleotide sequence isolated from the Sargasso Sea
tatgctatatcagcagatacagcgttttaatagcaatcagttaaaagaaactgatgcgtatcttgccatgtaccacgatcaagctttgccagtattaaaagctttaagctttggaaaggcagttaatattacacttggtacgcctttagtaagaacttctgttgatcatggcacagccctggatattgctggcaaaattaaaccaaacctaggatcaattaaagaagctattatgcttgctgagatgcagcttcaatga

SEQ ID NO: 206277 - DNA, 876 bp, Unknown
  Bacterial polypeptide expressing nucleotide sequence isolated from the Sargasso Sea
agatataaaactaacctcatgaccaaaattgctgtctcttctggagatccagctggtataggtcccgatatctgcattaaagcttttggtcaaaagaaatccctagcctataaaccagtaatttttggaaatatagatctcttgaaagaaagagctgacgaaatcaagattaaggttgatgtaaaggaatacagcggtgaagattcaaactctctaactcatgaatctttatgggtagtagatagacctatgagctcggaagtaaaatcaggtagtcctgaaccaagcacagctaaatacataatgtctattttcaaagagtcagttaaaaaaactatatcaaaggaattcaatgcggtagtaacgtgtccaataaataaagaattaatgaatgaaggaggcgtatcatttactggccacactgaagaactagcaagtcttggtaataccaaggacgttgtaatgatgttagctaatgagaaaatcaagatagcattagctacaactcatctacctctcagtgaagttccctctcatataaatgaagatcttcttatcaactcgatatctataattaatcagtctctgaaaaatcactggaaattggaaaatccaattatcaaagtgctcggtttgaatcctcatgccggagatggaggttatttaggtagggaagaaaaagatattattggcccaactttggacaaattaagagagcaaggtctagaaataataggcccagtttctgcagatacagccttcgttaagttagataaaactgaaaaggcagatgcttttcttgcaatgttccatgatcaaggacttccagtaattaaaactatgggtttcggtgagactgttaatatcactttagga

SEQ ID NO: 206278 - DNA, 688 bp, Unknown
  Bacterial polypeptide expressing nucleotide sequence isolated from the Sargasso Sea
atgagcgcagccaagaccacagccccggtggccatgacctgcggtgaaccggcaggtgtcgggccggaattggctgtggccgcctggcaaagcctcggcgcgatattgccgtttttctggatcggtgatcctcggcatctgcccgcaggcacggccctaagtttgatggatgatccatccgaaactcctgccgcggccgcgcatggtctaccggttctgccccatgaattttccggtgatgcacggcgcggcagcgcagatccggccaatgcccaaggtgtgattgacgtgattgcccgcgctgtggatcttaccaggtccggcgcggcctcggcgatttgcaccgcgccgatccacaaaaaggcgctcaaagacggggccggtttcgcctaccccggccataccgaataccttgctgcgctggccgaccgcgaccgtgtggtgatgatgctggcctcgccgcaattgcgcgtggtgccggtgacgatccacatcgcgatcgaggacgtgccggtggccctgaacccggcgttgctcaccgatacgatattgatcacccatgcggccttgcgccgtgatttcggcattgcgcgcccgcgccttgccgtggccggattaaacccccatgcgggcgaaggcggcgcgatggggatggaagaaatcgagatgatcaccccgacgctagacg

SEQ ID NO: 206279 - DNA, 664 bp, Unknown
  Bacterial polypeptide expressing nucleotide sequence isolated from the Sargasso Sea
tatgaactttcagaatagaaacaagaaattgaaggtagtaataagcgttggagatgagtcaggcattggacccgaaataattttaaaagcactttgttcctatgaaataccagacaatattgactttacattggtaggttctaaaaaaaatctattcaatacatataatcatctcaagtctcttggtttagaaaaactagctaatccaaattctctaaaaatttatgatctcgaaatttcttcatcggataatgaccctaaatcaagttacggtaattcaagtttctattacttaacaaaagcaattgaaattgtaaaacaatatcccaattcagcacttgtaactggaccaatatgcaagaaatcttggtcactagctggtcataacttctctggacaaacggaagttctagcaaaatcgtgtggagttaaaaatgttggaatgttattcactgcaaaatcaccaattacaggttggagatttaatactttactagctacaacccacatatccctttctgaggttcccaagaaattaaatacagatttgatccattctaaattagacctttttaagaaattttgtagtacctatattcataaacctactttaaaagtcgcaggattaaaccctcatgccggcgaagaaggtcttttaggtcat

SEQ ID NO: 206280 - DNA, 451 bp, Unknown
  Bacterial polypeptide expressing nucleotide sequence isolated from the Sargasso Sea
aaggcagcttattattgataaagtaaaaattcttaacaaagatcttaaagaaaaatttaatataaataatcctaatataaaaattcttggtttaaatcctcatgctggtgaaaatggaaagattggactagaagaaataaatgagattggacctgctataaaaatattaaaaaataataacataaatgtttccggccctatttctgcagatactgctttttctatgaaagttttaaaagaaactgatgcatatcttggtatgtatcatgatcaagttcttccagtcttaaaagctcttagttttggtgactcaataaatattactttagggattccaattatcaggacttctgtagatcatggtgttgcgcttgatatcgcaggttcaaataagtcgaatacgtcttcactagaattagcaataaaaacagctaaaaaattaattaaatga

SEQ ID NO: 206281 - DNA, 520 bp, Unknown
  Bacterial polypeptide expressing nucleotide sequence isolated from the Sargasso Sea
gatgtctaaaaatgctagttctcgtcttcttgtaacatctggagaacctgcaggtattggcccagacctcattatcaagttacaacaaatggatcataattataatctaacggtaattggtgatcctgatcttctaaaaaaacgtgccgaattattatcaataccaatagatatcgagattatctctgaaaaaaatacttctaatgaaataattgataataaatctttaaaagttctgccagtaaaattaaatactgatagcaagccaggtgtgctagatgtaagaaatgtagattacgttataaaaatgataaaaatgtcttgtcaatattgtctggaaaataattttgatgcactcattacaacgccagtacaaaaatctattattaacgatgccggaataaaatttagtggtcatacagaatatatggcaaaagaatataacgttgacttacccgttatgttacttgactgtgaaggatttagagtcgcacttgtcacgacacatatgcctctaact

SEQ ID NO: 206282 - DNA, 349 bp, Unknown
  Bacterial polypeptide expressing nucleotide sequence isolated from the Sargasso Sea
ggcgggtcatctgggccaggaagaacaggacgtcatcatcccggtaattgccaggttaagcgatgaaggtcttgtgctgaagggccctttgccggcggatacggcgtttactcagcagaacctgcagacactagacgtcgtcgtcgccatgtttcatgaccagggcctgccggtcatcaaacacgcagggttcggggatgtcgttaacatcacgctgggcctgccttttgtgcgcacgtctgtcgatcatggcacggcgctggatctagcgggcaccggtaaggcgcaggtcgccagtttgagtcaggccctgaacgtggcgacccagttgagcagtggctttttctga

SEQ ID NO: 206283 - DNA, 763 bp, Unknown
  Bacterial polypeptide expressing nucleotide sequence isolated from the Sargasso Sea
tatgaattttcaaaatacacataataaattgaaaatcgtaattagtgtcggagatgagtcaggaatagggcctgaaataattttaaaagctctaagttctagcgaaattccaaaaaatattgatttaaaattagttggatcaaaagaaaatctgcaaaaaacatataaacatcttaaatctttgggattgcaaaatattgcaaatcctgatgatttacaaattcatgatataaaaatttcttcgattgataataattctaaatcgagttttggtaattcaagtttctattatttagtaaaagcaattgaaattgtaaaaaacaatcctaatacagcacttgtaactggtccaatttgtaagaaatcatggtcactagcgggtcatcatttttctgggcagacggaagtactagcaaatgcatgtggaataaaaaattttggaatgttatttactgctaaatcaccaattacgggttggaggttcaatactttattaactacaacccatatagctctttccgaagttcccaaaaggcttaatgtagaattaatccactctaaattagatcttttcaaagctttttgtagtaagtatattgaaaaacctactttaaaagttgccggattaaaccctcatgctggcgaagagggattattaggtaatgaagaaaaagattggcttaataatgcgttaattacttggcacgaaaagaataaagatattaaattattaggtcctttgcccccagatagttgttggaat

SEQ ID NO: 206284 - DNA, 256 bp, Unknown
  Bacterial polypeptide expressing nucleotide sequence isolated from the Sargasso Sea
tatgcccctatctgcagatacagcattcaataaaaatcttcttgatgaaactgatgcatattttgctatgtatcatgaccaaggacttccagtgctaaaagctttaagttttggagattcaattaatataactttaggtgtgccaattgtaagaacttcagttgatcatggggttgccttagacattgctggaaagggtattgcgaataattcctctttgaagaatgctttctatgcagctgataacctaatctaa

SEQ ID NO: 206285 - DNA, 276 bp, Unknown
  Bacterial polypeptide expressing nucleotide sequence isolated from the Sargasso Sea
cttctaatgttgatatctctatgcccctatctgcagatacagcattcaataaaaatcttcttgatgaaactgatgcatattttgctatgtatcatgaccaaggacttccagtgctaaaagctttaagttttggagattcgattaatataactttaggtgtgccaattataagaacttcagttgatcatggggttgccttagacattgctggaaagggtattgcaaataattcctctttgaagaatgctttctatgcagctgataacctaatctaat

SEQ ID NO: 206286 - DNA, 320 bp, Unknown
  Bacterial polypeptide expressing nucleotide sequence isolated from the Sargasso Sea
tcaaattattcccgctataaatttacttaaaaaaataggttatagcatttctggtcctatttcaggagacatcatatttagaaatgctcatttgggtatgtacgacctagttattgctaattatcatgaccaaggacatattccagtaaaattgttatattttgatcagtcagttaatgttactttaggagtaccatttataagaacatcggtagatcatggcactgcatttgatattgcctataaaaacaaagcaaaggctataaatctattagtttctattttctatgcacacagaatgagtaataaaaattcttagc

SEQ ID NO: 206287 - DNA, 742 bp, Unknown
  Bacterial polypeptide expressing nucleotide sequence isolated from the Sargasso Sea
atgaattttaaaaatacaaataataccttcaaaataatattaagcgtcggagatgagtcaggcatagggcctgaaataattttaaaagctctttgttctgatgagattccagaaaatattgaatttttattagttggttcaagaaaaaatctacaaaatacatatacgcaccttagatctttaggattggaaaacctagcaaatcctgataatttacaaattcatgatctcaaaattccatcatctgataatgaatctaaattaagttatggcaattcaagtttctattacttaacgaaagcaattgaaatagtaaaacaatatcctaattcagcacttgtgactggtccaatttgcaagaaatcatggtcacttgcaggtcattatttctctggacagactgaagtattagcaaaatcgtgtggagtaaaaaatgttggaatgttattcacagctaaatcaccaattacaggttggagattcaataccttactagccacaacccatatagcactttgtgaggtgccaaataggctaaataaacaattgatccattcaaaattagatcttttcaaagagttttgtagtacatatactgaaaagcctaatttaagagttgctggattaaaccctcatgctggtgaagaaggtattttgggtcatgaagaaaaagattggcttaataatgcattgattgcttggcagaaaaagaatagagatattaaattaatgggacctttat

SEQ ID NO: 206288 - DNA, 797 bp, Unknown
  Bacterial polypeptide expressing nucleotide sequence isolated from the Sargasso Sea
tgttttacccgttaaattgaaagtcaaaaataagcctggattcatgaatcctaaaaacgcatcatttgtgatagaatcaataagagcagcagctaatggctgtttatcaggtgatttctctgcaatggtcacaggaccaatatcaaaatcaatccttaataagggtgggtttaaaatatcaggacacacagagtttttagcagaaatttgtaagtctaaatccattatgatgttgatgaatgacagactcaaagttactcttcaaactatccatgtaccactagctaaagttcctaaagagataacaaaaaacaaaatcatcgaaaaaataaaaattattaatagagatcttatgtgtaaattcggttataaaaaaccaaagatattattatgtggtcttaatccacatgcgggtgaggatggtctgctaggaaatgaagaaataaaggtattgaagccagcggttgtatcattgagaaagatgggcataaaaattgatggcccagttccagcagatacggcatttataaaaaaattaatttcacaatatgatgtcgttcatacgatgtatcatgatcaaggtttgcctgtgattaaatatgacaatttcagtagaactacaaatgtgacgcttggtcttcctataacaagagtgtctgtagatcatggtaccgcaactgatcttgttgggacaggtaatgtggatatttcaagctttgtacaagcattaaaagtcgccagagatatttcaaataagtgcatcataaaaaaagatatggtcagcatttcattataga

SEQ ID NO: 206289 - DNA, 808 bp, Unknown
  Bacterial polypeptide expressing nucleotide sequence isolated from the Sargasso Sea
atgaattataaaaattctaataatgcatttaagattgtattaagtgttggagatgagtctggtgtcggacctgaaataattttaaaagctcttagttctaatgaaataaaaggaaatattgaatttattttagttggttcaaaaaaaaatctacaaaatacatatatgcaccttaaatcattaggtttggaaaatcttgcaaatcctaaaactttacaaattcatgatctcaaaatttcttcgtccgatagtgaatccaaatcaagctatggtgattcaagtttccattacttaaagaaggcaattgaaattgtaaaacaatatcctaattcggcacttgttacgggaccaatttgcaagaaatcatggtccctagcaggacataactattctggacagactgaagtaatagcagaatcctgtggagtaaaaaattttggaatgttattcactgcaaaatcaccaattactggttggagattcaacactttacttgctacaacccacattgcgctttgtgaagtaccaaaaaggctaaatacaaaattaattcattctaaattagatcttttcaaaaagttttgtattacgtattctgaaaaacctactttaaaagttgcgggattaaatcctcacgcaggtgaagaaggaattttgggtaatgaagaaagagattggcttaatgattcattgaccgcttggtatgaaaagaatagagatataagattattaggcccactatcgccagatagctgctggcattcttcggctaaagcttggactaacaaagatgctgaaaagcatgatg

SEQ ID NO: 206290 - DNA, 715 bp, Unknown
  Bacterial polypeptide expressing nucleotide sequence isolated from the Sargasso Sea
atgagctctcatgtttttataagtcctggcgatcctgcaggcattggtccagaaataactcttaaatctcttaaaaatttaaacgaaacacataaatttgttattgctggagatattcaatattttgaaaatttatcagcatctttgaaattaggttttaaattcatcccgtatggaggctcaaaaacgacatcaagctcaaaactaattgaagtaattaatattccacttcaagaaaacccggttcttggatcttcctctgtaaacaatgctaaatatattttagaagtattgtccacctgcgcagaacattgcatggataacactaaaaatatattagttactggtcctattaataaagaaacaatatctgcttccgggactgattttactggtcacactgaatttttggctgaacatgcaaaaattgtttcgcctttaatgttgatggcgaatgaaaaaataaaaataggtttagccactactcacgtaccgattaaaaaagttagcgagagcattactgaagacttaatttacaacaaattaaaagttttatgtttgggtctaaagagacttctgaaaaaggaaaacttgaaaatatgtgtgttgggattaaatcctcatgcaggagaaggtggctatataggaaccgaagaatcaacaaccataataaaaggaataaaaaaatttgatcaaagggaggtaactgttgatg

SEQ ID NO: 206291 - DNA, 484 bp, Unknown
  Bacterial polypeptide expressing nucleotide sequence isolated from the Sargasso Sea
atcaaatgctatcactgaaaatattgttgagcaaaaaatcaaagcacttgaaacctgcttaataaatgactttcagataaaaaaacctaaaattgctgttttagcagttaatcctcattcaggagataatggtgtaataggcaatgaagaccaatcaataattacacctgtagttaataactttaagggatccttgagttctgtgtatggtccattttcagcagatacttttttcgctaatgagaattataaaaaatatgatggtattatcgcttcataccatgatcaagggctaataccattcaaaactatttcttttggaaaaggagtaaattttactgcagggttaccaattgtaagaacatcaccagatcatggtactggctttgatatagcaggaaaaggaatagcagattatacctcatttacaaatgcaataaaattaggtattcaagtgtttaaattaagaaacaacttagattga

SEQ ID NO: 206292 - DNA, 670 bp, Unknown
  Bacterial polypeptide expressing nucleotide sequence isolated from the Sargasso Sea
ttcattatgttttaaagtagcatttaaacttattaagaaaggtttatcaaaaaaattaattaatggtccaattaataaatctaaaactttcaaaggaaaatatttaggagttactgaatatgttgctaaaaattttaaacaaaagaattgcgcaatgttaatatataatgaaaaactatctgtatgcccagtaactactcatttaccacttaaaagtgtaactaaaaaaataacaaaaaaattaattagagaaaaaatcgaaattattgatcatttttttaaaaaatttttaaatttcaaaccaaaaattgggatagttggtttaaaccctcattgtgaaagtatttttcaattcaatgaagacactaaaattatatctccagttgttaattcaatgaaaaaaaaatattgggttagaggtcctatacctgcagatacaatatttttaaagaataataggaagaaatttaatgtaattattggaatgtatcacgatcaagttttaacaccaattaaaactatttatgagtatgatgcaataaacattacaattggattaccctttttgagagttacaccagatcacggtccaaatgagagtatggtaggaaaaaatatatctgatcctagaagtttaatcaaagctatcagttttttagataaaaaatga

SEQ ID NO: 206293 - DNA, 699 bp, Unknown
  Bacterial polypeptide expressing nucleotide sequence isolated from the Sargasso Sea
aatgccaaaggaatcagaaataaaaattggtttcacgatgggtgatccaaacgggattgggccggaagttttgatacgcgccctgaattaccttcatccctttaatgaatgggaacctttaatttttggtgatctagaaattataaaagaaataaacaaagcagttggaacttctttctcatataagccaattcccaataaccatgatcagaattttaaagatcttaatgattctttttgcattcctgtgatcgatttaccagtaagaaaaaatagaaattggaaactaggtttgtgttcttcatgggggggggaatcagcatttaattttttccgccatgccttactatgggcaaacaaaaatacaattgatgctattgtaacagccccgctttcaaaggaggcactgttttcagcagggtataattttccgggacacacagaaatcatatctcacttctgcaacggggcacgctctgtaatgatgctgtcagtagataatctaaaagcttcaatggtaacgcttcacatgtcattacgtcaagctctggattcacttacacccaaattgatacttgaagtaatcgaaataactgattccggactcaaaaaaatggggattcagaagccgaagcttggtattgcagggcttaatccgcatgcaggagaaaatggactatttggtgatgaagaaaataa

SEQ ID NO: 206294 - DNA, 493 bp, Unknown
  Bacterial polypeptide expressing nucleotide sequence isolated from the Sargasso Sea
ctttatcgaagcggcgcgatatgtcactaaggacaacatctcatcgaaaattgctctgattcataacaccctgagcggatggggaatgatagctcctaaaattgcggtcgcggcattgaatcctcatggtggtgaaggtggtttgcttggaagggaagaaattgaagagattgggccggcgattatggagtcccgagatgaagggtatgatgtgactggtccgataccctccgattccgtcttctatagaagcattgatggagaatttgatgtggttttagccctctatcacgatcagggtcatatcgcgatcaaggtccataattttcatgaatcaattactgctactttgggcattcccttcgtaagaacttctgtagatcatggcacggcctttgatatcgccggcactggcaaagccaaagaagaaggtttggaaagcgctatccgggccgcaaatttgattatcgatgggaagctagaccagttttaa

SEQ ID NO: 206295 - DNA, 401 bp, Unknown
  Bacterial polypeptide expressing nucleotide sequence isolated from the Sargasso Sea
actcaagaatccgaaaatacttgtctgcggcctaaacccccatgccggtgaggatggtattttaggaaatgaagaaatagatataataagacctgccatacaatctttaaaaaaaatgggtattaatatagatgggcctgttccagctgacacagctttcatttctaagtacaaaaataaatacgatgtcatacatacgatgtatcatgaccaaggcttgcctgtcattaaatatgataatttcagtaagactacaaatgttactttaggtcttccaataattagagtatcggttgaccatggaacagcaacagaccttgttggaacaggtaatgtcgatatatcaagttttattcaggctctaaaaatagcaagagatatttctaaaagtgcatcttaaa

SEQ ID NO: 206296 - DNA, 490 bp, Unknown
  Bacterial polypeptide expressing nucleotide sequence isolated from the Sargasso Sea
aaaattatttctaataaaaattttttatttaatcaaatatataatttaaacaaatccttacaacttgatttcaaaataaaaaaacccaaacttattatatcaggtttaaatccacatgcaggagaaaatggtaaattaggaattgaagaaaaaaaatttataaatccagttattgaaaatttaaaaaaaaaaggtgtcaatataattggaccattttctgcagatagtcttttgataaaacaaaatatagataaatttgattgttttatttttatttatcatgatcaagcattaataccttttaagtttatcagtcaattttcaggtgtaaactatactggaaatttgaatattataagaacctcacctgatcatggtactgcttataatttagttgggactaataaagtttcaaataaatcttttattaatagttataaattaataaataaaatttataataatagaatgataaatggtaaaacctaaa

SEQ ID NO: 206297 - DNA, 703 bp, Unknown
  Bacterial polypeptide expressing nucleotide sequence isolated from the Sargasso Sea
gaaaaaatattcgaaaaaatcaaatacatttataaagaagtcttttgaattagcatttaagattattaaagaaaataatattagcaattttattaatggacctatttctaaacaatattttttaaaaaaagaatttttaggaattactgagtatatttctgaaaaattttttacaaacaacacgtgtatgttaatttttaacaaaagactttccgtatgtccgattacaactcatttgccattaaaacttgtttcaaaaaaaatatctaaagacaatattataaaaaaagtatctttaattaataatttttatgaaaaaagatttaaatttaaaccacgtattgctattttgggtttaaatcctcactgtgaaactattcataactataatgaagataaaaaaataattaaaccttcaataaaaactttaaaaaaaaaatttaatgtgtctggaccatatccagctgatactatttttttaaaaaataatagaaaaaactttgacgtagttgttggaatgtatcatgatcaagttttaacacctcttaaaactctctatgagtacgatgcaattaatataacattgggtttaccttttatcagaatatcacctgatcatgggcccaatgaaactatgctgggtaaaaatctatctaatcctctgagtttattaaaagctattaaatttttggataaaaattga

SEQ ID NO: 206298 - DNA, 751 bp, Unknown
  Bacterial polypeptide expressing nucleotide sequence isolated from the Sargasso Sea
ttttaaaaaatcatatgatcaaaatgtcccagctattattgaatcattaaatctatccattaagttagctaaacaaaaaaaagtagccggtattgttacccttccgattatgaaaaaaacattaataattaacggttttaaatatcctggacatactgaatatcttggaaaagtatcaaacaaaagacctttaatgataatgttaaataaaaaattaaaagttgcaactttaactactcacatacctatttcccaagtgccaaaaaaaattactaaaagcaatttagaaaaaaccataaaagtttatattaaatctttgaaattagattttggcttaagtgatccaaaagtggtagtaagctctttaaatcctcataatggtgaagcaggtaaaattggaaatgaagaaattaaaattattaaacctacaatagataaattcataaagctgggaaataaagttaatgggccaaaatcggctgacacaatgtttcataaagaggcacttaaaaatattgatgcaaatttatgtatgtttcatgatcaagctttgataccaattaaatcttcagatttttatggctcaattaattttacagcaggtcttccttttataagaacttccccagatcatggaacagcttttgacattgcgggtgaaaataaggccaatagctctagcctaactaatgccattaagtatataaatttgatttataatcaaagaattaaaaatgaaaaaaaaatatga

SEQ ID NO: 206299 - DNA, 164 bp, Unknown
  Bacterial polypeptide expressing nucleotide sequence isolated from the Sargasso Sea
tagtagtgttaatttaacaattgggctgagtttcataaggacttcacctgatcatggaacagctttcgatatagctggcaaaaatttagctaatcctacttcgactatagaagccataaaattggcttggcatttgtcaaaaaaggaaaaaaagaatcaataaa

SEQ ID NO: 206300 - DNA, 193 bp, Unknown
  Bacterial polypeptide expressing nucleotide sequence isolated from the Sargasso Sea
ccaatgaaagtgatagctcttaattactcagtaaataccacaatcggtttaccttttataagaacatctccagatcatggaacgggatttgatattgctggcaaaggaattgctcaatctcaaagcatgattgaagctattaaggctgcagtagaaatgactaacaattcaagactgcttaacgcgcattaaa

SEQ ID NO: 206301 - DNA, 670 bp, Unknown
  Bacterial polypeptide expressing nucleotide sequence isolated from the Sargasso Sea
gatgcaaaatgaatcagaaataaaaattggtttcactataggtgatccaaacgggattggaccagaagttttgatacgtgcccttcattacctttatccatttaataaatggcaacctttaatttttggtgatctggaaattattaaagaaattaacaaagcagttgggacttctttttcatataagccaattcccaataaccatgatatacctttagaagaaattaatgattcttcgtgcattcctgtgatcgatatcccagtaaaaaaaaatcgagagtggaaactgggtttatgttcctcttggggtggggaatcagcatttaaattttttcacaatgccatactatgggcaaacaaaaaatcaattgatgctatagtcacatccccactttccaaggaagcacttttttcagcagggtataatttcacgggtcacacagaaatcatttctcactacagtaacggggcaagatctgtgatgatgctttcagtagatgatctaagggcttcaatggtaacgcttcacatgtctttacgtcaagctctggattctattacatctgaattgatacttgaagtaattgaaataactaatcatggacttaaaagaatgggtattcagaatccgaagcttggtatcgcagggcttaatccgcacgcaggagaa

SEQ ID NO: 206302 - DNA, 586 bp, Unknown
  Bacterial polypeptide expressing nucleotide sequence isolated from the Sargasso Sea
gaaattatttctcactacagcaacaaagctcgatcagtgatgatgcttttagtagataatctaagagcttcaatggtaacgcttcacatgcctttacgacaagccctggattcacttacacctgaattgatacttgaagtaattgaaataactgattcaggacttaaaaaaatgggtattaatagtcctaaacttgctattccaggtattaatccacatgcaggagaaaatgggttatttggtgatgaagaaaaaaaaattattcttcctgcattggatcttgccagaaaaaaaagcctgcattgtgaaggaccttttcccccggatactattttcttggaacatcagaagggaaagtttgatgctgtagttgctctttatcacgaccaagcattgattccactgaaattgtatggatttgaccgtgcagtcaacataacgttaggattacctattataagaacatcccctgaccatgggactgccttcaagcttgccccaaaaatgcaggctaatccaaattctatgatagaatcaatcaaaatggctattaagatggcctcttcatcctgcagttttgtataga

SEQ ID NO: 206303 - DNA, 697 bp, Unknown
  Bacterial polypeptide expressing nucleotide sequence isolated from the Sargasso Sea
atgcctagctcgccctcccaacccatcgccatcacttacggcgaccccgcaggagtcgggccggacctagtgctatctctgctggataccttcagtgatgccccaatggtcatcatcggtgaccgccaggtactcagcgaacgagcgcaacaattaggcctgacggtggcgttaagcgactggcagccgggcgatctactaccagtaggctccctgcccgtatggcacaccccagccggcgcccctgtcatcgctgggcaaccggacccggccaccgccgccggcaccgtgaccatgctcactcgtgccgctcagggctgcctcaaaggcaccttctcagctatggtcaccgccccggtggcgaaaaacgtcatttgcaacggagccgacccagcgttcaccggccatactgaatttctcgccgaacaggccggggtaaatcaggtagtgatgatgctcaccgcttctcccggcgggcagccgcttagagtagccttggccaccacccacctgcccctaagccaggtaccggcagccattactccagatagcctgatgcgcaccctgaccattctgcgcgacgacctgatcagcaagtaccgcattaccgaaccgcgcattatggtactggggctcaatcctcacgccggcgaagagggccacctgggccgtgaagaattggatgtaatcattccca

SEQ ID NO: 206304 - DNA, 786 bp, Unknown
  Bacterial polypeptide expressing nucleotide sequence isolated from the Sargasso Sea
ccggaggtgtgcttgcatttgctgcagaacaccgacctagccaggcggtgtgtgccgattgtgttcggggaccgggcagtgctggagcaggcggccgagcagtgtggcttgacgaagccgacggcgtacattgacggcttggccgaggcggaggggccgtgcgtgttggatctgagcgccatcgcgctgagtgattttgaaacgggcacgatcaatgccgccacggggcgtgcggggtacacgtatgtggaggacgccatcaatgccgcgctcagtggacaggtggcggcggtgaccacggcgccgctcaacaaggaagccctgcgcgcggcgggcgttccgttcccggggcacacggagatttttgccgaactcacccacgcccaacgcgcgtgcatgctgcagtattccaacgaggtgcgttgtgtgtttgtcaccacgcacgtgccctacgcggaggtgccgcgattgctcacgaaggaacgcattctcgacacgctcgaactcggcgcgcaggcgatgcggcgcattggctgcatcgatggcaacgaaccgaagatcggcgtgctggggctcaacccgcatgccggcgagcacggattgtttggcaacgaggaggaaacaatcattagcccggccatcgaactggcgcgcgaacgcggcttcgatgtcgaagggcccatcccgcccgacaccgcattcctccccgccaaacgccgcgccaccgatgtgtttgtgtgcctgtaccacgatcagggccacatcccgctaaaggcgctgtgcttt

SEQ ID NO: 206305 - DNA, 706 bp, Unknown
  Bacterial polypeptide expressing nucleotide sequence isolated from the Sargasso Sea
ttcaatttgaaccaatctattcagccgggagtaatggattcaaaaaatggtttttatacgctttccatgatcgacgatgcagttaagggttgcatggatggccggtttactggatgcattaccggacctgtgaacaaagaatcaattgcaaaaagcggttacgaattctctggtcacacagaatacattggcaagctttgcaatcaaacaccagtaatgacatttatttcagatcacatgaaaattgcgttgcttacaacacacctaccaatcaaagatgtgcccagtcaaattacattgcaaggaatcatagacattgtaaaaatcatccatgctgaccttgtcaattattttggcatcaaaaacccaaaaattggtataacggggctgaatcctcatgctggtgaaaatggacatataggtagagaggaagaggaaatctttttaccagcactgaagtcattgaatgattcaggaattcatgtcgatgggccttatgcagcagatacaattctcttgaacgataccggacatgatctaataattagcatttttcatgatcaactattgcctttgtttaagcatgcgaatcctcacctctcaacaaacgttactatgggcctaaaaattataagaacatctgtggatcatggtgttgcatttgataaagttggcactccagatatcaatcatcagagtctttatc

SEQ ID NO: 206306 - DNA, 151 bp, Unknown
  Bacterial polypeptide expressing nucleotide sequence isolated from the Sargasso Sea
aggtcttccttttataagaacttcgcccgatcatggaacagcttttgacattgcaggtgagaataaggcaaatagcacaagtttagctaatgctattaagtatataaatttgatttatagtcaaagaattaaaaatgaaaaaaaaatatga

SEQ ID NO: 206307 - DNA, 367 bp, Unknown
  Bacterial polypeptide expressing nucleotide sequence isolated from the Sargasso Sea
cctcaaccctcacgccggagagcacggcctttttggagccgaagaagaagcggtcattattccggcgatcaatgcagcacgcgcaaaaggattcgatgtcgaaggacctattccacctgacactgccttcctaccaaacaaaagaaaggaaactgatttatttgtatgcatgtatcacgatcagggccatattccacttaaagctctttgctttgataaggcagttaacactaccttaggcttacctatcgtgcgcacctcagtagaccacggtaccgcactggatatcgctggacagggaagagcaaaccccaacagtctttttgaagccgtaaaactcgccttaaaatttattaagaacaaatga

SEQ ID NO: 206308 - DNA, 787 bp, Unknown
  Bacterial polypeptide expressing nucleotide sequence isolated from the Sargasso Sea
aatgtcagaactatacgctgtaacatcgggtgacccagccggtattggtccagatatctctctcaagattgcccttagagaagacagccatcaatttgtagttttcggcaacatgaatcttctcagagaaagagctgagatgcatgcaatggatattaaatttattgaattcgatgaagtaacctcggattcgcaaatccagaaaaacaccttattggttaaaaacttcaatttgaacgaatctattcagccgggagtaatggattcaaaaaatggttcttatacgctttccatgatcgacgatgcggttaagggttgcatggatggccggtttactggatgcattaccggacctgtgaacaaagaatcaattgcaaaaagcggttacgaattctctggtcatacagaatacattggcaagctttgcaatcaaacaccagtgatgacatttatttcagatcacatgaaaattgcgttgcttacaacacacctaccaatcaaagatgtgcccggtcaaattacattgcaaggaatcatggacgttgtaaaaatcatccatgctgaccttgtcaattattttggcatcaaaaatccaaaaattgctataacggggctcaatcctcatgctggtgaaaatggacatataggtagagaggaagaggaaatctttttaccagcactgaagtcattgaatgattcaggaattcatgtcgatgggccttatgcagcagatacaattctcttgaacgataccggacatgatctaataattagcatttttcatgat

SEQ ID NO: 206309 - DNA, 626 bp, Unknown
  Bacterial polypeptide expressing nucleotide sequence isolated from the Sargasso Sea
aatgcctccgctggtattgacgaccggcgaacccgctggcgtgggtcccgaactcaccgtccagctgctgcagcgccccctgccctcacccctggtgattgcgggtgatcctgatctgctgcttgaacgcgctgctttgctgagcctgcccttggcgcgcaaaggcgatgccctggtggcgcccggcggcgaggcagtgttgttgcccgtcgcgctcggtgcgacctcgattcccgggagtctcgatgtcgccaacgcagcttatgtcatcgagatgctggctggggcaaccgacggctgcctcaacggcgagttttcaggcatggtgaccgcgccggtgcaaaagagcaccctgattgaggcgggtaacgattttgtcggccacaccgaatttctcgcccagcgggctggcgtgacaactccggtgatgatgctcgccacggatgcgttgcgtgtggcgctggtcacgattcatctgccgttgagcgaggtgccccgggctgtgacgcaagacggtctggaagccgtcttgcgggtggttgattccgatcttcgcgcccgctttggcattgccgcgccggtgatcggcgtttgtggattaaatccgcatgcaggcgaggcaggcc

SEQ ID NO: 206310 - DNA, 556 bp, Unknown
  Bacterial polypeptide expressing nucleotide sequence isolated from the Sargasso Sea
tatatttcaaaagaattcaaagtagtgaatagtgcgatgttaatttataataaagaattagcagtttgcccgataactacgcatttgcctttgaaatcagtcgccaaaacgataaataaaaagttaataatcgataaaatcaaagttataaataaattttataaaatcaaattatataaaaaacctaaaattggtgtattaggtcttaatccccattgtgaaagtattgataaatttaacgaagacgaaaaaatcatcaaaccagctatcaaatttttaaaaaataaaaagtatgatatttctggcccatacccagcagatacaatttttatgaaaaagaatagaaaaaaatttgatgtgattattggaatgtaccacgatcaagttttaacaccacttaaatccttatatgaatatgatgctatcaatataactgttggtctaccttttataagaatatcacctgaccatggtcctaacgaaacaatgatgggtaaaaatatttcaaatccactcagtttaattaaagcaataaaatttttagataaaaattgat

SEQ ID NO: 206311 - DNA, 250 bp, Unknown
  Bacterial polypeptide expressing nucleotide sequence isolated from the Sargasso Sea
gccctccggatacgatttttcttcaggcctatgaagtggcaatacgatatggtggtcgccatgtaccacgatcagggacatattccattgaaattattaggtttctatgatggcgttaatattactgccggcctgccgtttatccggacgtcagccgatcacgggaccgcttttgatatcgcctggacgggaaaagcaaaatctgagagcatggctatatcgataaaactggcaatgcaactggcgtaat

SEQ ID NO: 206312 - DNA, 664 bp, Unknown
  Bacterial polypeptide expressing nucleotide sequence isolated from the Sargasso Sea
catgatcaaaatagcagtctcttctggagaccccgcaggaataggtcctgatatttgcattaaggcctttggtcaaaaaaaaccctatgatttctttcctgtcatttttggggataaggagatacttaagtcaagggctgaaaatttaggaattaatgtcgatattaaaacttatgaaggaaaagagaagctttcaaatgattcgctttggattgcaaaccagccttgtgatatcaatgtaaacccaggaaaacctgaccctgattgcgccaatttcattatttctatctttaaacaggctgttaaaagaactctttctaaggaatttaaagcaattgttacttgccctatcaataaagaagtaattaataaaggaggaataaaatttactggacatactgaagagttggctaaactctctaatacagatagtgtggttatgttgctagtgaatgaaaacctaaaagttgctcttgcaaccactcatctgcccctaaaagaagtaccatctaagataactaaagaccttataaataagacactattaatcattgacagagatttgaagaacaaatggaaaataaaaaacccttcaattaaggttctaggattaaaccctcatgcaggtgatggaggttttattggcttggaggatcaaggaaat

SEQ ID NO: 206313 - DNA, 943 bp, Unknown
  Bacterial polypeptide expressing nucleotide sequence isolated from the Sargasso Sea
gaatgttgtttccctattgtcattggtgatttgaaagtgttgaaattacatgcacaaaagatgggaatacgtaatcgattgagagcaatagactcatcagaaattcttaaactacgaaatgaaaaattaaatttttctcctgtgattgatcttaagaatgtaaaaatgagtgaaaaaatgtttgggaaagtgcgttcttctttcggaaaagcctctgcggagtatattgaggtaggagtagagttagtaaaagcaagatcctgcgatgcaatagttacaggaccaattcacaaagaggcttttaattctgctggatatatgtttcctggacatacagaatttataacttctttggttggaggggaaaaacctgtgatgatgttttgtcatcctaaattgaaaattgcacacgtttctacccactgtagtttgaaagatgctttgaaaaaagtaaaaaaaagacaaattatacatgtaggaaaagttttttctgattctttgcaatacatgggttttaaaaatcctagaataggagttgctgcattaaatccacattgtggagaaggtggattatttggttctgaagagattaaagaaattgttcccgcagttaatcaattaaaaactcttggaatagacattactggtcctatttcacctgatgtagtcttttcaatgaatagagacagtgtttttgatggtgtgatagcgatgtatcatgaccaagggcatatcccaggcaaaatgataggttttaattttaaaaagaaaggtgcagtggttcatgcagtgaatgttactcttggtttgccgataatccgcacatcagttgagcacggaactggttttgagattgcagggaagggtatagcaagtgaaatgagtatggtagatgcattattactggcatctaaaatggtaagagcaaaaaagaattcttaat

SEQ ID NO: 206314 - DNA, 868 bp, Unknown
  Bacterial polypeptide expressing nucleotide sequence isolated from the Sargasso Sea
tggcgaatcgaacattacgcgtaatcatatattcattacagacccaaaactattgttagatagctcaaaaaaactaaagattagaattaaaattaatctattaaaggcagttacatcaaaaacactcagtgggttaggaataattaatgtgtatcctctaaaactcagagcggaaaataagccaggacacatgagtcctaagaatgcttcatttgtaatagatactatacaaacagcagctgaaggctgtatgcgtggagattttgacgcaatggtcacggggccgatatctaaatccatacttaatgccggtggttataaaatttctgggcacactgaatttctcgcaaaactttgcaaatctaaatcaataatgatgttaatgaataataggcttaaggtaactcttcaaacaattcatatcccactaaaaaaaattacaatggaaataacaaaaaataaaattatagaaactgtacgtatagtaaatgaggaccttaagactaaatttggttataccaaaccaaaaatacttatatgcggaattaacccacatgctggagaagatggactacttgggcgagaggaaattgatatcatcatacctgccgtaaaatctctcaaaaaaatggggatagaaattgatgggccagttccagcagatactgcattcatcaaaaagttcgtgaacaagtacgatgtgatacattcgatgtatcacgatcagggcttacctgtcataaaatttgatgactttagtaaaactacaaatgtaacactcgggctacctataattcgagtatctgtagatcatggaacagctgtagaactggtaggcactggtaaagctgacatctcaagttttatt

SEQ ID NO: 206315 - DNA, 724 bp, Unknown
  Bacterial polypeptide expressing nucleotide sequence isolated from the Sargasso Sea
catgaatcctagtaatgcatcttttgtaatcaacactataaagactgcagcaaagggttgtcttaaccataattttcattcaatggtgactggtccaatttctaaatcaattctaaatcgtggtggctttaagatatctggtcatacagagctacttgcaaaactatgcaaatcaaaatcaattatgatgcttatgaatgataaattaaaagtaacacttcaaactattcatatacctcttaacaaagtatctaaacaaatcacaaagaaaaatattatagaaaaaattaaaataattaatcatgatttgataaataaatttggactcataaaaccgagaatacttgtgtgtggtctaaatcctcatgccggtgaagagggtattttaggaagtgaagaaataaatataatcaaacctgccattgaagctctaaagaaacaaggtgtcaatatagatggaccagttccagctgacacagctttcatttctaaatacataagcaagtatgacgtcatacataccatgtatcatgatcaaggtttacctgtcatcaaatatgatgatttcagtaagactacaaatgttactctaggtcttccaataatcagagtatcagtcgatcatggaacagcaacagatcttgttggaacagggaatgttgatatatcaagttttattcaagccctaaaagtagcaagagacatttctaaaagtgcatcttaa

SEQ ID NO: 206316 - DNA, 523 bp, Unknown
  Bacterial polypeptide expressing nucleotide sequence isolated from the Sargasso Sea
gaaggtagtgcacttgtcgactcataaatcgttgattgaggctgctcgttatgtcaaaaaagacgttctcatagagaaattgttgatggttcataaaacactagagtattggggcctgtaccgacccgtaatcggtgtcgcggcgctaaaccctcacgggggcgaaggtggtcttttgggaagggaagagttagacgaaataggtccagcaataatggagctaaacaagatgggcgtcgattctcggggaccttacccagcggactccattttttatcgagcaatcgacggcgaatttgatgtagtgctagcgctctatcacgatcagggacacatagcgataaaggtgcataactttcatgagtcaacgactgcgacgctgggtataccctttatcaggacctccgttgatcacgggaccgcctttgatattgcgggcaaaggcgtcgctgactcgagtggtttattagctgcaatagccagcgctgaagccttgattaaccgagacttacgatctctataa

SEQ ID NO: 206317 - DNA, 648 bp, Unknown
  Bacterial polypeptide expressing nucleotide sequence isolated from the Sargasso Sea
tatgaactttaactataaaaataatacatttaaagttgtaataagtattggagatgagtctggtattggacctgaaataattttaaaagcgctattttctaaagaaataccagaagatattgaatatttattagttggttccaagaaaaatttacaaaatacgtatacacatcttagatccttaggattaaaaaatatagccaatccaaataatttagaaattcatgatctcgaaatttctgaatctactaatacttctaaatcaagttatggtcatacaagtttcaaatacctaatagaagcaattgaaattgttaaacaatatcctaattcagcacttgtaactggaccaatttgcaaaaaatcatggtcattggcgggtcatgatttctcgggacagactgaagtattagcaaaatcgtgtgaagtaaaaaatgttggaatgttatttactgctaagtcaccaattacaggttggagatttaatactttactcgcgacaactcacgttgctctttgtgaggtacccaaactattaacaaaggaattaatccattctaaattagatcttttaaaaaagttttgtagtacatatattaataatcccactttaaaagttgctggattaaaccctcatgctggcgaaga

SEQ ID NO: 206318 - DNA, 176 bp, Unknown
  Bacterial polypeptide expressing nucleotide sequence isolated from the Sargasso Sea
ttttacttactcagttaataccacaataggtttaccttttataagaacatctccggatcatggaactggatttgatatcgctggaaaaggtattgctgaatcacacagcatgattgaggctataaagactgctatagaaatgaccaataattcaagactgctttacacgcattaga

SEQ ID NO: 206319 - DNA, 546 bp, Unknown
  Bacterial polypeptide expressing nucleotide sequence isolated from the Sargasso Sea
taatgatatcagaagaaattaagatagccttattaacagatcatattcctttaaaagacgtttcaaatgctattaataaagatattgttgagcaaaaaatcaaagcactagaaacaagtttaatagaggactttcagataaaaaaacctaaaattgctgtgatggcagttaatccacatgcaggagataatggtctaattggcaatgaagataaatcaataattacgccagcaattaatagttttagtatagctcaaagttctgtttctggtccattttcagcagatactttttttgctaatgaaaattataaaaaatatgatggaattattgcttcatatcatgatcaaggactaataccatttaaaactatttcttttggaaaaggagtaaattttacagcaggtttaccaattgtaagaacctcaccagatcatggaactgggtttgatatagctggtaaaggaatagcagatcatacttcatttacaaatgcaataaaactaggtcttcaagtgtttaagctaagaaacaaattagattgac

SEQ ID NO: 206320 - DNA, 301 bp, Unknown
  Bacterial polypeptide expressing nucleotide sequence isolated from the Sargasso Sea
taatacctgctgtaaagaattaattgcttctaatgttgatgtctctatgcccctatctgcagatacagcattcaataaaaatcttcttgatgaaactgatgcatattttgctatgtatcatgaccaaggacttccagtgctaaaagctttaagttttggagattcaattaatataactttaggtgtgccaattgtaagaacttcagttgatcatggggttgccttagacattgctggaaagggtattgcgaataattcctctttgaagaatgctttctatgcagctgataacctaatctaa

SEQ ID NO: 206321 - DNA, 745 bp, Unknown
  Bacterial polypeptide expressing nucleotide sequence isolated from the Sargasso Sea
ttgaaaactattatttattctcccggtgacccagcaggcattggaccagacctatttttaagccttctaaatgaagatttctttagatttataaaagcaaatgttgtttgtataggcgaccaaaaactttttgcttcaagagcaaaagaattgggatatagcttcgaaataagcacttttactgatatcaatgatgtaaatgaaaaagttgggtgtcttgagattatgaagtgtccagacatctcaagcggcaggcttaattctattaactctgagtatgtaattaagaatcttgattttggaattgacgcgtgtatgaaaagcaaaggtttagggttagtgactgggccaataagcaaagagaatattgttgaaggaggatattccttctctggtcatactgagagaataatggaaaatactaacagtgatgatgtgctgatgctgctagcttcagaaagattaaaggtagctttagcaacaacacatatgccattaaataaggtttcagaatcgattacgacagatctaataattaataaagtaaagattttaaatcaagagctgaaatcaaagttcaatattgaaaagcctaagatttctcttctagggcttaatccacatgcaggagaaggaggaaaattaggaaaggaagaaattgaaataataatacctgctgtaaaagaattaattgcttctaatgttgatgtatctatgcccctatcagcagatacagcattcaata

SEQ ID NO: 206322 - DNA, 778 bp, Unknown
  Bacterial polypeptide expressing nucleotide sequence isolated from the Sargasso Sea
aaatatttacccattttcccaattgaaatagataaaaaaactgtgcttggcagtccaaatataaaaaattcaaaaaaaattcttgaatctatagataaagcagttcgatttgttaaaaatggggaagcttcttctatggtaactaaccctgtttcaaaagaagtcattaataagattaacaaaagttttaagggacatactgaatatcttgcaaaaaaagataaacaaaaaatattttgcatgatgatgattaataataaaataaaaaatgttcctttgactactcaccttcccttaaggaaagtttctaaacatatttcagagaaattaattatacaaacgagccaactaatcaataggactttaaaaaaagactttggaatagctaatccaaaaattgtaattactggactcaatcctcattgtggtgataagggtttacttggcaatgaggaaaataaaattattattcccgcaattaaaaagtgtaaggcaaaaaaaattagaatacacggaccaatttctgctgactcagcttttataaaaagtaatttgcagctatatgatgcatttctttgtatgtatcatgatcaggctttaatagcagctaaagttatagactttgaaaatactgtaaattttaccgctggtttgtcttatgtaagaaccagtccagatcatggaacaggatacgaaattgcaagaaaatttattgcaaatgagacaagtttaatttctgcaattaatacatcaatattaatagcaagtaataaataga

SEQ ID NO: 206323 - DNA, 853 bp, Unknown
  Bacterial polypeptide expressing nucleotide sequence isolated from the Sargasso Sea
ctatctaactttagtctatttcatgaatgtaattttattatttattcatctattgacttaattaaaaaacaaaaaaaacattttcaaattgacactccttcaataataaagatagatagtgaagaagacgtgctggatactcatatcaacataaaagaggtgttctcgaattctcaatttaattttggagaatctgataaagaattatctgaacttggaattctttctttgaaagaagccacaaaagctataaaagacaaaaacatagatattttggtcacagctcctataaacaaggatttatcattttcggagtcatttaaatatacaggtcatacagattttttaaagagttattttagaacaagccccttaatgttaatgatatcgaaagaacttaaaatagccttattgacagaccatattccgataaaagatgtatcaaatgctataaataaggatcttgttgagcaaaaaatcaaagcactagaaacaagtttaataaaggactttcaaataaaaaaacctaaaattgcagtattagcagttaacccccatgctggcgataatggtgtgataggcaatgaagaccactcaataattacaccagcaatcaatagttttaagggaactacgagttctattaatggtccattttcagcagacactttttttgttaatgaaaattataaaaaatatgatggtgttattgcctcataccatgatcaaggacttataccatttaaaactatttcctttggaaaaggagtaaattttacagcaggtttaccagttgtaagaacctcaccagatcatggtactggctttgatatagctggaaaaggaataggca

SEQ ID NO: 206324 - DNA, 754 bp, Unknown
  Bacterial polypeptide expressing nucleotide sequence isolated from the Sargasso Sea
atgacaaaaattgctgtctcttctggagatccagctggtataggtcccgatatctgcattaaagcttttggtcaaaagaaattattagcctacaaaccggtaatttttggaaatatagatctcttgaaagagagagctgaagaaatcaagattaaagttgatataaaggaatatagtggtgaagattcaaactctctaactaatgaatctctatgggtagtaaatagacctattggatcggaagtgaagtcaggcaaccctgaaccaaacactgctaaatacataatgtctattttcaaagattcagttaaaaaaaccatctcaaaggaattcaatgcagtggtaacgtgtccaataaataaagaattaatgaacaaaggaggcgtatcatttactggccacactgaagaacttgcaagtcttggcaatactaaggacgttgtgatgatgttagctaatgagaaaattaagatagcattagctacaactcatctacctctcagtgaagttccctctcatataaatgaaaatcttctcatcaatacgatatctataattaatcagtctctgaagaatcactggaaattgaaaaatccaattatcaaagtgctcggtttgaatcctcatgccggagatggaggttatttaggtagagaagaaaaaaacattatttgccctactttggacaaattaagagagcaaggtctggaaataataggcccagtttctgcagatacagccttcgtgagttaga

SEQ ID NO: 206325 - DNA, 595 bp, Unknown
  Bacterial polypeptide expressing nucleotide sequence isolated from the Sargasso Sea
tataatttcccaggacacacagaaattatttctcactacagcaacaaggctcgatcagtgatgatgctatcagtagatgatctaagagcttcaatagtaacgcttcacatgcctttacgtcaagcccttgattcacttacacctgaattgatacttgaagtaattgaaataactaattcaggacttaaaaaaatgggtattaatagtcctaaacttgctattccaggtattaatccacatgcaggagaaaatgggttatttggtgatgaagaaaaaaaaattattcttcctgccttggatcttgcaagaaaaaaaagtctgcattgtgaaggaccttttcccccggatactattttcttggaacatcagaagggaaattttgatgctgtagttgctctttatcacgaccaagcattgattccactgaaattgtatggatttgaccgtgcagtcaacataacattaggattacctattataagaacatcccctgaccatgggactgccttcaagcttgccccaaaaatgcaggctaatccaaattctatgatagaatcaatcaaaatggctcttaagatggcctcatcatcctgaa

SEQ ID NO: 206326 - DNA, 934 bp, Unknown
  Bacterial polypeptide expressing nucleotide sequence isolated from the Sargasso Sea
tatgggagatccatcaggaattggaactgagatcaccattaagagttggaaaagtaaaaaaattaagacacctttttttgttattcatgatcccttatatgttgagaaaataatcaaaaaaatgggagttaaagtaaagataaaaattattgatcatcctaaagatgctttaaaatgctttaagaattatttgccagtattcgcaattaaaattgataagaaaacaaagcttggtttcccaaacaaaaaaaattcaaggagtatattagaatctatcaacaaggcagtttattttgtaaaaaatggcgatgctacttctatggtaactaatcctatttcaaaagagattattaataaaattcaaaaaaattttaaaggtcacacagagtacctagcaaaaaaagacaagcaaaaatcattttgcatgatgatgattaacagtaagataaaagctgttcctctaactacacatttacctttaaaaaaagtttctcaaaatatttcagagaaattgatcttggaaactagtcaattgattcataagactttaaaaaaagattttaaaaaaggtaatcctaaaatcgcaattactggacttaatccacattcaggagacaaaggtgtaattggtgacgaagagaaaaagattattattccagcaattaaaaaatgtaaaaaaaggaaaatcagattaaatggtcctatctctgcagattcagcgtttatatcgagtaatttaaaaacatatgatgcatttctctgcatgtaccatgatcaagctttaattgctgccaaggttattgattttgaaaacacagtaaattatacagcaggattatcttatgtaagaacaagtcctgatcatggaacaggatatgatatttctaaaaaatttatttgcaatgagtcgagtttgatttctgccattaacgct

SEQ ID NO: 206327 - DNA, 822 bp, Unknown
  Bacterial polypeptide expressing nucleotide sequence isolated from the Sargasso Sea
tcaaaatacacaaacaagattcaactgacaatgttaaaaaaaatcatgcaggtgtaattcaattaattacagtctctagatgccaaaacactaatgctggaaaacttgatactaataatgctaaatatgttttaaataatctaaacttttcaattaaacaaacattatttgacaaagaagcagctcttgtaactggtcccattagtaaagaaaatatcatttcaatagataaatcttttatgggacacactgaatatataaaaaaaataactaaatctaaggacgttctgatgatgctagcttcagatcaactaaaagttgccttagcaacaactcatattcctcttagagatgttactaaagcaatcacgaaagatttaattattaataaagtaaaaatacttcatcaagaattaaaaaataaatttaatatcaagaatcctaatataaaagtccttggcttaaatccacatgctggtgaaagtggtaaaataggaagtgaagaagaaaatcatattaagcctgcaataaatcttttaaaaaaaagaaaaatcaatgtatcaatgccaatatcagctgatactgcattttctcaaaagttaatgaaagaaactgatgcttatttaggaatgtatcatgatcaagtcttgcctgttttaaaaacattaagctttggaaactcaataaatgtcactttaggagtaccaattataagaacttcagttgatcatggagtagcattagatattgctggaacaaataaatctgactcgtcatctttattgctagctatcaagactgcaaaaagattaattaaatgaa

SEQ ID NO: 206328 - DNA, 814 bp, Unknown
  Bacterial polypeptide expressing nucleotide sequence isolated from the Sargasso Sea
attgaagaaaataatctattcacctggtgagcctgctggcattggtccagatttaataattaagattgcattcgataaagaatgggaaaacctaagaatacctattcttgttataggtgacccagaactatttatacataggtcaaaattattaaagaaaaaaataaaaattataagtattaaatctattaaggagcttcaaagtaataaaaagggcatccttcaagtcataaaaataagagaatgcaagaataaatcaatagggaaaatttctaaatcaaatgctaaatatgttctagataatcttgattttgcaatagaaaaagcagttttaaataaggacactgcactagttacgggacctttaagtaaagaaaatattatctcaattaaaaaagatttttctggtcacacagaatatattcagaaagtaaccaagagcagtgatgtattgatgatgcttgtttcagagaagcttaaggtagctttagcaacaacacatataccgattaaagatgtttcaaaaaaaattactaaaaaactaataatgaataagattaatattttaaataatgatctaaaagataaatttcatataaataatcctactataaaggttcttggtttaaatcctcacgcaggcgaaaatggaaaaattggtgatgaagaactaaaaataattactccagcaataaaagaaatgaggaaaaaaaatattaatgtatccttccctatttcagcagatactgctttttcctcaaaatcattaaaagaaactgatgcttatttaggtatgtatcatgatcaaagttta

SEQ ID NO: 206329 - DNA, 982 bp, Unknown
  Bacterial polypeptide expressing nucleotide sequence isolated from the Sargasso Sea
ttgaaaaaaattatctattcgcctggtgagccaagtggaatcggtccagacttaatcattaaattatcctcttcaaatttatgggaagatcttaagatacccattgtttctattggtgatccaaagctttttatagacagagcagctttgcttaagaaaaaaataaaaattattgaattggagtcgcttaatcaggtaagtaaaaattgcaaagggcttatacaaattataaaagtgactaaatgctctaatacaaagccgggaaaactatataaaagcaatgctcaatatgttcttgataatctaacttactctattaaacaaactatgcaaaatgaaggaacggcattagtaaccggtccattaagtaaagaaaatatcatttcaattgataaattatttactgggcatactgaatatataaaaaaaattaccaaaagtaaggatgtcttgatgatgcttgcatcggatcagttacgtgtcgccctagctacaacacatatacctcttaagaatgtatctagaacaattacaaaagagttaattattaacaaggtaaaaatacttaatgaagatttaaaaaataaattcaatgttaagaaaccgaatataaaagtgcttggccttaatcctcatgcaggagagaacggtaaaataggcaaagaagaacaagatcatataaaaccagcaacaagagaattaagaaagaaaaaaattaacgtatcaatgcccatttcggcagatactgcattctctagaaaatcattgaaagaggctgatgcgtatttgggtatgtatcatgatcaggttttgccagtattaaaaactttaagttttggaaactcaattaatattacacttgggattccaataattaggacttctgttgatcacgggattgctttggatattgctggaactaataaatcagatccctcatcattaatactagccgttaaaactgcaaagaaattaatttaat

SEQ ID NO: 206330 - DNA, 901 bp, Unknown
  Bacterial polypeptide expressing nucleotide sequence isolated from the Sargasso Sea
gatgagttataaagttcctattctaacaattggagataaaaagctatttgagcaaagggcaaaagtcctaaagaaaaaaataaaaataatagaaattaaagatcctagcaaaatagctcctaataaagccaaaacattacaggtatacaaagtcatagattgtgttgatgttaagccaggtaaattaaataatgcaaacgctgaatatgttattagaaatttaaattttgccattaaggaatgcttaaaatctgataagtctgctcttgttacagggcctattagtaaagagaatgttatgactttaaacaaaagatttgttggtcatacagaacatataaaaaaagtaacaaaaagcaatgatgttttaatgatgttggcctccgataagcttcgtgttgctcttgcgacaactcatattcctctaaaaaaagttcctgaatttataaatcaaaacttaatcattaataaaacacagattcttaatgatgatttaaaaagtaaatttaaaatcaaaaaaccaaaaattaaaattttaggattaaatcctcatgctggtgaaaatggaaaaattggctctgaagaaaaaaatatattaataccagctattaaaaaactacgaaagaaaaagatcgatgtttcttatcctatttcagctgatacagctttctctaaaaaatcacttaaagaaactgacgcatatcttggcatgtaccacgatcaggttctacctgttctaaaagctttaagctttggtaattcaattaatatatcgcttggcatcccaattataagaacctcagtagatcatggagttgcattagacgttgctggaacaaataattcagatatctcttcactaaaactagcaataaaaaccgcaaagaccctcattaaatga

SEQ ID NO: 206331 - DNA, 937 bp, Unknown
  Bacterial polypeptide expressing nucleotide sequence isolated from the Sargasso Sea
tttgattaagaaccaaatagttgtctcattaggagaaccatcaggcataggtccagaagtattcttaaaagcaatctttgaaactagtctaaaagaacagttagaacttataaccgtagttgcttcaaaaaaagttatacaaaatgtatctcaagaacttaattaccataaaatcaattctttaaaaataatagaagtaaatctagattcagagttcattctgggtaagccaaatacaaagaatgctccttatgttattgagtgtttaaataaagcaacagaccttgcccataaagaaaagatttcgcttgttactgggcctataaataaaaaggtaatagctaatacaatatctggattctcaggtcatacagaattcttaaaagaaaaatttgattgtgaagatgttcttatgcttcttgcaaataattcgctgaaagttggagtggctacaacacatgtagctttaaaagatgttcctaaaatgatttcaaaagatctaatcataagaaaatgtaagttattaaaaaaaggcctgaaagacatctatggtttagaagcgcctaaaattgctgtcttaggattaaatccacatgcaggagaagatggttcatttggcatagaagaaattgattctataaatcctgcaattgctgatctaaagaaagaaggtttagatatagttggcccactagctgcagatactgcatttatcaatgggaattatgatgcttatctgtcgatgtatcacgatcaagcacttccagttttaaaaactttagattttcatcattcagtaaatattacgcttggattaccatttcatagaatatctgtagatcatggaacagcagaagatatagcccctaaatttattgctgactatacaagcatgtttgaagctttaaaattggcaggtaatggcaatatcacataa

SEQ ID NO: 206332 - DNA, 946 bp, Unknown
  Bacterial polypeptide expressing nucleotide sequence isolated from the Sargasso Sea
aatgtctattaaaccattagtaataggtgtcacaatgggtgatccagctgggattggacctgaaatcactacagcgcttctagctgaacgggtttatgaaaaagaagttcgggcggtcctaattggatgcgcaaagatggttgaagaagctgcaaggcgaaaaggtctcgatgtttcagtccggcgtcatgaagtccttaaacgtaatgaacttagatcaggggccattgatgtttatgatcctgaggtctttgatgctgccttggttcagcctggtggtatcagtaaggaggctggagaggcatcaatgctttacaatcggcaaggtgctgaattagctatggctgaagaaatagatggtcttgtaacttcgccagtgacaaaagctagtgccaagatggcaggctacgattatcccggacaagctgagtattttgctgagctggctggcggagtaccattttctaccattttgatctggcaaaacttcaaggcggcactttttactactcacactccattaatcgatgcttgcagagcggtaacaaaagataatctcttgaaaaaaattcgttatctgcaccaaaaccgttttgcgcttggtcttcccaatcttcgtttagctgtcgctgcacttaatccccacgctggagagtttgggactatgggtcgggaggaaaaagatgaaatagagccagctatttcaatagcgcaaagtgaaggtatttctgtcgatggacctttcccagttaatgcactgatttctccaccttacaacggtagagattatgatttaactttggcgctttatcatgatcaggtggtttcgcgcatgaatatgaatgagacgacaacacttacttttggtcttccatttatccgaacatcagtagggcatggttcagcattagatattgctggaaatgatgtgctgatcatggtgcgc

SEQ ID NO: 206333 - DNA, 192 bp, Unknown
  Bacterial polypeptide expressing nucleotide sequence isolated from the Sargasso Sea
cattgataccccttaaattgtacggatttgatcgtgcagtaaacataacattaggattacctattattagaacatcccctgaccatggaactgctttccaacttgctccaaaaatggaggctaatccaagttctatgatagaatcaatcaagatggctctaaaaatggcatcatcgtctggttctctctaat

SEQ ID NO: 206334 - DNA, 697 bp, Unknown
  Bacterial polypeptide expressing nucleotide sequence isolated from the Sargasso Sea
atgaatcttcctcaatccaaaaagaatcttcctgttctggccctgaccatgggggatcccaatggaattggtgcggaagtgatgttgaaagcactggatcaactatctccgatcagaaattggaagccgctgatatttggtgatttcaaagttctggaaaaagtccgggataaactcgggcttgacctggatttattgaagaaggatccggaaattgctcatgagattcagcaggaaatggaaaaccagattccggttttggatttaggagaacattcaaacgaatggcagcctggaatatgcagtcgttggggaggggaatccgcgttccgatttttaaacacggccattcaatggacacagcaaggcagtaccgatgcgattgtaactgccccgcttaacaaggaagctttgaaaaaatctggccatgattaccctggccacaccgatattttggcagaggttactggtcatcccagggcatggatgatgctcgaatgcgagaaactacgggcggtgatggtcacccttcacatgagcatgaaaaatgttctggaacagctttcaccctcaatgattcacgaaacgattgaagtcacggatcaggctttgaaaaggatgggttttgatcgcccaagaatcggagtcgccggactcaacccccacgcaggggaaaacgggatgtttggagacgagg

SEQ ID NO: 206335 - DNA, 679 bp, Unknown
  Bacterial polypeptide expressing nucleotide sequence isolated from the Sargasso Sea
attgaaaaaaataatctactcacctggcgagcctgctggcattggcccagatttaattattaaacttgcatcaaataaagcattggaaaattttaaaataccacttcttgttgtgggtgacccaaatctatttttggctagatcaaagttattaaaaaagaaaataaaaataatcaatatcgattctattacagaattaaaaaataataaaaaaggcgccctacaagttatttcagtatgtaaatgcaaaaatacatctcccggaaagatacataggtctaacgcaaaatatgtcttagataatctaaattatgcgataaaagaaacgatctctgatagagacactgcattagttactgggccattaagtaaagagagtattatttcaattaaaaaagatttctctggtcatactgaacacattcaaaaattaacaaaaagtaatgatgtgctaatgatgcttgcttcagataagctaaaagtagctttagcaacaacccatattcctattaaggatgtatcaaataaaattactaaaaaattaataatcaacaaaattaaaatattaaacgaagaacttaaagataaattcaagataaacaagccaaatattaaggtgcttggtttaaacccgcatgctggagaaaatggcaaaatcggaaatgaagaattaaaataa

SEQ ID NO: 206336 - DNA, 627 bp, Unknown
  Bacterial polypeptide expressing nucleotide sequence isolated from the Sargasso Sea
ttattaatagtggtcatgccttctcagggcatactgaatacattggcaatctttgtaatcaaactccagtgatgtcttttgtttcagaccaaatgagaatcgcattactgacaacgcatcttccactaaaagacgttccgtctcaaataacatctaagaggattattgatattgtaaataccattcattccgaccttaagaattattttggtataaaaaaaccaaaaattggtattgttggtctgaatccacatgccggtgaaaatggacacataggaaaagaggaagaagaagtatttcgtcctgctttgaatgcattaaatgaatcaggcattgatattaatgggcctttcgcggcagacacaattcttctaaatgaaactgggcatgacctaataatcagtatttttcatgatcagcttctacctttgttcaaatatgcaaaacctcatctaacaacaaacgttaccatggggttaaagataataagaacgtctgtagatcatggtgttgcgttcgacaaagtcggaatgccagatatcaatcaccaaagcctttatcatgcattagatactgcaaaatcaatggctaattcttatgaaaaaaccaagtcatataagagctaaa

SEQ ID NO: 206337 - DNA, 937 bp, Unknown
  Bacterial polypeptide expressing nucleotide sequence isolated from the Sargasso Sea
tttgattaagaacccaattgtagtctcattaggagacccttctggtataggtccagaagtatttttaaaagcaatctttaaaactgaactaaaaaactgtctagatctcataaatatagtcagctcaaagaaagttatagaaaaaatatctcatgaacttcaatataacgagattgattccttgaatattataaatattgatctagattctgattttattcttggtaaaccagacaagaaaaatgcgtcttatgttattgaatgcctagataaggcagctgactttgcctataaagaaaaaatttcattagttactgggcccataaataaaaaaatagtaagcagccagattgctggtttttctgggcatacagaattcttaaaagaaaaatttgactctaaagatgttcttatgttgcttgcaaataattcactgaaaattggagtggctacaacacatgtagctttaaaagaagtgcctcaaatgattacaaaagaactaattataaagaaatgtagattattgaaccaaggattaaaaagcatatatgaaatagataaccctaaaattgctgtcttaggtttaaatccacatgcaggagaagaaggctcatatggaaaagaagaaattgaatccataaaacctgcaattgcagatttaaaaagtgagggattagatctaattggcccgatatcagcagatactgcttttatcagcagaggctttgatgcttatctttctatgtatcatgatcaagcactcccagtattaaaaactttagattttcatcattcagtaaatattactcttggattgccattcaatagagtgtctgttgatcatgggacagcagaagatatagctccgaaatttattgctgactatacaagcatgcttgaagctataaaattagcaggtaatggcaatattgcataa

SEQ ID NO: 206338 - DNA, 997 bp, Unknown
  Bacterial polypeptide expressing nucleotide sequence isolated from the Sargasso Sea
aatgtcagaactatacgctgtaacatcgggtgacccagccggtattggtccagatatctctctcaagattgcccttagagaagacagccatcaatttgtagttttcggcaacatgaatcttctcagagaaagagctgagatgcatgcaatggatattaaatttattgaattcgatgaagcaacctcggattcgcaaatccagaaaaacaccttattggttaaaaacttcaatttgaacgaatctattcagccgggagtaattgattcaaaaaatggttcttatacgctttccatgatcgacgatgcggttaagggttgcatggatggccggtttactggatgcattaccggacctgtgaacaaagaatcaattgcaaaaagcggttacgaattctctggtcacacagaatacattggcaggctttgcaatcaaacaccagtaatgacatttatttcagatcacatgaaaattgcgttgcttacaacacacctaccaatcaaagatgtgcccggtcaaattacattgcaaggaatcatggacgttgtaaaaatcatccgtgctgaccttgtcaattattttggcatcaaaaacccaaaaattgctataacgggactcaatcctcatgctggtgaaaatggacatataggtagagaggaagaggaaatctttttaccagcactgaagtcattgaatgattcaggaattcatgtcgatgggccttatgcagcagatacaattctcttgaacgataccggacatgatctaataattagcatttttcatgatcaactattgcctctgtttaagcatgcaaatcctcacctctcaacaaacgttactatgggcctaaaaattataagaacatctgtggatcatggtgttgcatttgataaagtcggcactccagatataaatcatcagagtctttatcatgccttggatacagcaaaatcaatggctaactcttatgaaaaaaccaagtcaaatcagagctaa

SEQ ID NO: 206339 - DNA, 643 bp, Unknown
  Bacterial polypeptide expressing nucleotide sequence isolated from the Sargasso Sea
atgaaaaaaacattaataattaatggctttaattatcccggacatactgaataccttggtaaagtttcaaacaaaagacctctaatgataatgttaaataaaaaattgaaggttgcaactttgactactcatatacctattactcaagtgccaaaaaaaatcaccaaaagtaatctagaaaaaactataaagatttatattgaatctctgaaattagattttggtttaactgatccaaaagtagcagtaagctctttaaatcctcataatggtgaagaggggaaaattggaaatgaagagattaaagtcattaagcctacaatagataaatttaaaaaacagggaaataagattaatggaccaaaatcggctgatactatgtttcataaagaggcacttaagaatattgatgcaaatttatgcatgtttcatgatcaagctttgataccaattaaatcttcagatttttatggttcaattaattttactgccggccttccttttataagaacttcgccagatcatggaacagcttttgatattgcaggagaaaataaggccaataactccagtttaactaatgctattaggtatgtaaatttgatttacaatcaaagaattaacaatgaaaaaaaattatgaa

SEQ ID NO: 206340 - DNA, 178 bp, Unknown
  Bacterial polypeptide expressing nucleotide sequence isolated from the Sargasso Sea
ccccgttctaaagtcacagggatttggcaaatcggtaaacattaccttaggtttaccttatatccgtacctcggttgaccatggtacggcgctcgatcttgcgggaactggcaaagccgatattggcagttttgtctgcgccttgaataaagccattgagttatcctcaaaaaactaa

SEQ ID NO: 206341 - DNA, 733 bp, Unknown
  Bacterial polypeptide expressing nucleotide sequence isolated from the Sargasso Sea
ttcaaaaatggttcttatacgctttccatgatcgacgatgcggttaagggttgcatggatggccggtttactggatgcattaccggacctgtgaacaaagaatcaattgcaaaaagcggttacgaattctctggtcacacagaatacattggcaagctttgcaatcaaacaccagtaatgacatttatttcagatcacatgaaaattgcgttgcttacaacacacctaccaatcaaagatgtgcccggtcaaattacattgcaaggaatcatggacgttgtaaaaatcatccatgctgaccttgtcaattattttggcatcaaaaacccaaaaattggtataacggggctcaatcctcatgctggtgaaaatggacatataggtagagaggaagaggaaatctttttaccagcactgaagtcattgaatgattcaggaattcatgtcgatgggccttatgcagcagatacaattctcttgaacgataccggacatgatctaataattagcatttttcatgatcaactattgcctttgtttaagcatgcaaatcctcacctctcaacaaacgttactatgggcctaaaaattataagaacatctgtggatcatggtgttgcatttgataaagttggcactccagatatcaatcatcagagtctttatcatgccttggatacagcaaaatcaatggctaactcttatgaaaaaaccaagtcaaatcagagctaaa

SEQ ID NO: 206342 - DNA, 982 bp, Unknown
  Bacterial polypeptide expressing nucleotide sequence isolated from the Sargasso Sea
ttgaaaaaaattatctattcgccgggtgagccaagtggtatcggtccagacttaatcattaaattatcctcttcaaagttatgggaaaatcttaagatccctattgtttctattggtgacccaaagctttttatagacagagcagctttgctaaagaaaaaaataaaaattattgaattggattcgcttaataaggtaagtaaaaatagcaaagggcttatacaaattataaaagtgactaaatgctctaataccagcccgggaaaactctctaaaagcaatgctcaatatgttcttgataacctaacctactctattaaacaaactatgcaaaatgaaggaacggcattagtaaccggtccattaagtaaagaaaatatcatttcaattgataaattatttacagggcatactgaatatataaaaaaaattaccaaaagtaacgatgttttaatgatgcttgcatcggatcagttacgtgtagccctagctacaactcatatacctcttaagaatgtatctagaacaattacgaaaaaattaattattaacaaggtaaaaattcttaatgaagatttaataaatatgttcaagattaaaaaaccaaatataaaagtccttggtcttaatcctcatgcaggagagaacggtaaaataggcaaggaagaacaagatcatataaaaccagcaataaaagaattaagaaagaaaaatattaacgtatcaatgcccatttcagcagatactgcattttcaaaaaaatcattgaaagaggctgacgcatatttgggtatgtatcatgatcaagttttaccagtcttaaaaactttaagttttggaaactcaattaatattactcttggaattccaataattaggacttctgttgatcatgggattgctttggatattgctggaactaataaatcagatccctcatcattaatactagccgttaaaactgcaaaaaaattgatttaat

SEQ ID NO: 206343 - DNA, 463 bp, Unknown
  Bacterial polypeptide expressing nucleotide sequence isolated from the Sargasso Sea
tcaagaacaatttcgaaaaaattaattattaacaaggtaaaaattcttaatgaagatttaaaaaataaattcaatattaagaacccaaatataaaagtgcttggtcttaatcctcatgcaggagagaacggtaaaataggcaaagaagagcaagatcatataaaaccagcagtaagagaattaagaaagaaaaaaattaacgtatcaatgcccatttcagcagatactgcattttctagaaaatcattaaaagaggctgatgcctatttgggtatgtatcatgatcaagttttgccagtcttaaaaactttaagttttggaaactcaattaatattacacttggaattccaataattaggacctctgttgatcatgggattgctttggatattgctggaactaataaatcagatccctcatcactaatactagccattaaaactgcaaagaaattgatttaat

SEQ ID NO: 206344 - DNA, 1000 bp, Unknown
  Bacterial polypeptide expressing nucleotide sequence isolated from the Sargasso Sea
aatgcccctgagaaagaaacctcccatagcagtgtcaatgggcgaacctggtggaataaatattgaaattatttcacagtgcgtcaaaaaaaaattacctgatttttttctaatttcagacccaaaatgggttgaaaaatgtctaaaacaactcaatttaaatatcaaagtcaatattctagataatatcgatagctgtataaagggacatctaaatattttacccataaaatgtaaggtaaaatatggctttaaaaaatcatatgaacaaaattttcctgctattattgagtcattagatttagctataaaattagctcaacgaaagaaagtgtcaggtattgttacccttccgatattaaagaaaactctaacaattaatggaaatcattatcctggtcatactgaatacttaggtaaaaaatcaaataaaaagcctttgatgataatgttaaataaagctctaaaagttgcaactttgacaactcatataccaatctctcaagttccaaataagattacaaaaagtaatcttgaaaaaactataagggtgtacatcaagtctttaaatagagattttggattaactgacccaatattagcaattagcgccttaaaccctcataatggtgaagatggaaaaattggaaatgaagaaattaaaataattacaccggtaattgaaaaactaaaaaaacaaggaaataaaatatatggacctaaatccgctgatacaatgtttcacaaagatgcgctaaagaatgttgatgcaaatttatgtatgtttcacgatcaagccttgataccagttaaatcttttgatttttatggatcaattaattatacagcaggtctctcttttgtaaggacatctcctgatcatggaactgcttttgatattgctggagaaaataaagccaataactcaagcttaataaatgcaataaattatgcacaaatgatttataatcaaagaagtgaatatgataaaaaattatga

SEQ ID NO: 206345 - DNA, 943 bp, Unknown
  Bacterial polypeptide expressing nucleotide sequence isolated from the Sargasso Sea
atgaaaaaacctaatgttggaataacaatcggggactataacggtatcggaccagaagttacattgaaggccctaaaaaataataaaattctcagaagttgtaatatttttttgattaccgataaagaaattatagattccctaaagataccaattgatacaaaggtaaacctacacctccgtaaaaataaaattatactaaaacacgggaatccaacaatacattctggcagagcttctttagattatatatctcagggcatcgatttaattaaaaataataaaatagattgtttagttactgcacctataagtaagactgctatttcattggcaggctcaaagttcaaaggtcatacggatttattacaaaaagcttttaaaaggaatgaagtagttatgacttttttttctaagaaatttaatgtttcactcgctactattcatataccagtgaaaagaatttctaactctttaactaaagaattgataataaatcaagttaaaataattaatgattttcttaaagttttcttaaaaagtaagaaccccagaattggaatttgtggtttaaatcctcatgcatcagaagatggaaatataggagatgaagatttaactattattaggcctgcagttaagtttttgcaagattctaaaattgatataaaaggcccacttcctgccgatactatcttcgtaaaaagtaccagaaataaatttgatataattcatgcaatatatcatgatcaaggcctggttccatttaaaatgattgcctttgatacaggagtgaatgttactttaaatttaccatttgttagaacatctcctgaccacgggactggatatgatattgcagggatgaataaagcatcctcatcaagtatggaggaggctatattgttagcagtcaagatttataaatcatttcagttataga

SEQ ID NO: 206346 - DNA, 997 bp, Unknown
  Bacterial polypeptide expressing nucleotide sequence isolated from the Sargasso Sea
atgtcagaactatatgctgtaacatcaggtgatccagccggtatcgggccggatatctccctaaaaatagctctcagggatgacagccatcaatttgttgtattaggcaatattaaactgcttagagaaagagctgagatgcatgccatggatgttaaatttattgagtttgatgaatcaatcctagactctcaaatccagaaaaatacgctcttggtcaaagacttcaaactgaatcatactgttcaaccaggtgtaatggattcaaaaaatggttcttatgttctctctatgatcgactatgctgttaaaggatgccttgatggtcggttttctggatgcataacggggccagtaaataaagaagccattatcaatagtggttatgccttcactggtcatactgaatacatagggcaactttgtaaccaaactccagtgatgtcatttgtatcagatcaaatgaaaattgcattactcacaacacaccttccatttaaagaggtttcgactcatatcacatctaacgggataatcgatgttgtcagtatcattcattctgatcttgtgaattattttggtatagaaaatccgaatattggtattgttggtctgaatccacatgcaggagaaaatggacacataggcaaagaggaagaggatatttttcttcctgccttgagcacattaaatgaatcaggcattgatattaatgggccttttgcggcagacacaattctcttgggtgacattgaatatgatctgatacttagtatttttcatgatcaacttctgccattatttaagtatgcaaaccctcacctctcaacaaacgttaccatgggtctaaaaataataagaacatccgtagatcacggtgttgcatatgacaaagtaggaatgccagatattaatcaccagagtctttatcatgccttagatactgcaaaatcaatggctaactcttatgaaaaaaccaagtcagctcaaagctaag

SEQ ID NO: 206347 - DNA, 982 bp, Unknown
  Bacterial polypeptide expressing nucleotide sequence isolated from the Sargasso Sea
catgagctctcatgtttttataagtcctggtgatcctgcaggcattggtccagaaataactcttaaatctcttaaaaatttaaacgaaacacaaaaatttgttatcgctggagatattcaatatcttgaaaatttatcaacatctttgaaattaggatttgagttcatcccgtatggagtctcaaaaacgacatcaagctcaaaactaattgaagtaattaatattccacttcaagaaaagccggttcttggatcctcctctgtaaataatgctaaatatattttagaagtattgtccacctgcgcagaacattgcatggataacactaacaatatattagttactggtcctattaataaagaaacaatatctgcttccgggactgatttttctggtcacactgaatttttggctgaacatgcgaaaattgtgtcacctttaatgttgatggcgaatgaaaaaataaaaataggtttagctaccactcacataccgattaaaaaagttagcgagagtattactgaagacttaatttacaaaaaattaaaagttttatgttttggtctaaagagacttctaaaaaaggaaaacttaaaaatatgtgtgttgggattgaacccccatgcaggagaaggtggctatataggaaccgaagaatcaacaacgatattagaaggaataaaaaaatttgatcaaagggaggtaactgttgatgggccgatatctgctgacacagcattttcagaaaaaaacctatctcattatgatgcctttctagccatgtttcatgatcaaggaatgatacctgcaaaaattcttgggttcgggcaaacattaaacataacttttggattaccctatctcagaatttctgttgatcacggtacagctcttgatatcgcagatgatatgaatgcagatttttcaagcatgaaacttgctcttaaaacagctttagcttcattggatgaaaaaaaataa

SEQ ID NO: 206348 - DNA, 967 bp, Unknown
  Bacterial polypeptide expressing nucleotide sequence isolated from the Sargasso Sea
ttgaaaactattctatattctccaggtgatcctgctggtattggtaccgatttatttctggagctggtaaataataagttttttgacaccctgcaggcacgtattgtttgtttggctgatccccatcttcttcaagcaagagcatcaatgcttggttttgataatgattttcagaaattgtgcgcgtggcatatgcttccagagagtcaagattgtattgaatcatgtcctgataccactgcgggtaaactgaatccacaaaatgctagctacattatgcaagtcttaaattttggaattcaacagtgtatggaacattctgattttgctttggttacaggtccgatcagtaaagaaaatatcattgaaggtggtatcagtttttcaggtcataccgaatacattcaagaacaaacaaaaagtgccgacgtattgatgttgcttgcttcagagaggataagggtagctttagctacaacgcatatacctctaagaaaagttgctgatcacatttcgcaagaacttattgtttcaaaagttactattctttttgaggaattgcagcagaaatttggtattgttaatccccaaattacagtgttgggacttaatccgcatgctggtgaaggagggaaattaggaaccgaagaacaagacattattattcctgccatccaaacactccaacaacaaggaatcaccgtgaagggccccctatcagcagatacagctttcagtaaagatctattggacagtaccgatgcctatcttgccatgtttcatgatcaaggattacccgtcttaaaaacattgagttttggtgattccatcaatattaccttgggagttcctattattcgaacctctgttgatcatggagttgctttggatattgttggacaacgagtggctaatccctcttcattgaaaaatgcttttattatagctaacgaattattaggatgat

SEQ ID NO: 206349 - DNA, 640 bp, Unknown
  Bacterial polypeptide expressing nucleotide sequence isolated from the Sargasso Sea
taccggccccgtacacaaaggcattatcaacaaagcaggggtatcattcagcggtcatactgagttttttgcgtatcagtccaataccattgatgtggttatgcttctggcaactgaaggtcttaatgtagcgcttgccaccacgcatattccccttgagtatgtagcgaaagctatcacccgagagcgtcttcataaggtcattcatatcatcaacaccgaccttaaattgaagtttggcgttaaagaacctcatatttatgtgtgtggcttgaaccctcacgcgggtgaagatggtcacattggcactgaagaaattcataccatcattccggcgcttaacgaactaagagaagaaggcttaaagatcacaggccctctacctgcagacaccatatttcaacccaaatatctggaaaatgctgacgtagtgctggctatgtatcacgaccaaggcttacccgtgctaaaatataagggttttggggcgtcagtgaatatcacgctagggttacctttcgttcgtacatcggtagatcacggtactgcattagacttggcaggaacaggtgaagccgacgccggtagtttcagaaaagcattggaaaaagccatcgagcttgcacatcatcaacaatga

SEQ ID NO: 206350 - DNA, 328 bp, Unknown
  Bacterial polypeptide expressing nucleotide sequence isolated from the Sargasso Sea
aggtaaagaagaacaagaagttataatacccgttatcgagaaattaaaaatgaagggtctcgatttaaagggaccggtccctgcggacacagccttcaacaaaaatactttgcaaggaatagacgcagttttagctatgtatcatgatcaaggccttccggtagtcaagtacgctggttttggaagtgcagtaaatattactctcgggttaccaataattcgaacatcagtggatcacggcacagcttatgaactagctgggaccggaatgtccgattacagcagcatgatttcagcagtagagtgcgccctaaaaatggctgattaa

SEQ ID NO: 206351 - DNA, 718 bp, Unknown
  Bacterial polypeptide expressing nucleotide sequence isolated from the Sargasso Sea
ggtggggaatcagcatttaaatattttcaaaacgccatactggtgggctaacaaaaaaaaaattgatgctattgtcacagcccctctttcaaaagaggcacttttttcagcagggtataatttcgagggacatacagaaatcatttctcacttcagtaacggggcacgctctgtgatgatgctttcagtagataatctaagagcctcaatggtaacgcttcacatgtctttacgtcaagctcttgattcacttacatcggaattgatacttgaagtaattgaaataactgattacggacttaaaagaatgggtattcagaatccgaagcttggtattgcagggcttaatccgcatgcaggagaaaatggcttatttggtgatgaagaaaataaaattattattcctgcacttgatcttgcccgcaaaaaaaatctgctctgtgaagggccctttcctccggatactatattcctagaacatcagaaaggaatgtttgacgcagtagttgctctttaccacgaccaggcattgataccccttaaattgtacggatttgatcgtgcagtaaacataacattagggttaccaattataaggacatcccctgaccatggcactgctttccagcttgctccaaaaatggtggctaatccaagttctatgatagaatcaataaagatggctcttaagatggtctcatcatccagttctgtctaa

SEQ ID NO: 206352 - DNA, 541 bp, Unknown
  Bacterial polypeptide expressing nucleotide sequence isolated from the Sargasso Sea
agttaataaatacttaagagtagttcccgctaccattcatattcctatcaaagatataactaagtatttgaccgcagaattaattgagaaaacaattaaaaccacccatcaagaacttaatagtagattttcaatttcaaatccgagcatttggatttcaggactgaatcctcatgctggagaggccggaacaattggagatgaagagcaaaagattataataccagttataagaaaacttcaatcagagggatataatttgataggtccaatctccgcagataccatgttttatgggaaaaaaagacgtagatttgatgctgcgatctgcatgtaccatgatcaagcactaataccaataaaaacactagattttcatagtagtgttaacttaacaattgggctgagtttcataaggacttcacctgatcatggaacagccttcgatatagctggcaaaaatttggctaatcctacttcgactatagaagctataaaattggcttggaatttatcaaaaaaggaacgaaaagatcaataa

SEQ ID NO: 206353 - DNA, 548 bp, Unknown
  Bacterial polypeptide expressing nucleotide sequence isolated from the Sargasso Sea
atctacatctgttatgatgctaatgaactcatatatgaaagtagcacttcacacaacgcatgtaccattacaaaatgtcactaaacatattacatttgagtcgcttaagaagaccattaatataatcaatagcgatcttaagaaaaaatttaggataaaaaaaccaaaaattctagttactggactaaatcctcatgcgggtgaagatgggatgcttggaaaacaagactctgaagtgattgctcctgcaattgccgatatgaaaaaaaataagatattagttgatggacccgtcccagcagacacagcatttttaaaaaagtatatagaaaattatgatattattttgactatgtaccatgaccaagggttaccagttataaaatttaataactttaagaaaactgtcaatgttacgttaggtctgcctataacaagggtctctgttgatcatggaacagctctagatcttgttggcactggaaatatagatatatcaagttttattcaagctatcagagttgcaaaattcataagtaatgcataat

SEQ ID NO: 206354 - DNA, 211 bp, Unknown
  Bacterial polypeptide expressing nucleotide sequence isolated from the Sargasso Sea
aatgtaccatgatcagggacatattccctttaagttaatcggattttacgatggcatcaatatctcggccggtttgccatttatcagaacttcggttgatcatgggacggcatttgatattgcctggaaaggagttgccaaagaagagagtttagttaaagccattttattagcatcagagttatctacaaaacaaatggaattaacctga

SEQ ID NO: 206355 - DNA, 340 bp, Unknown
  Bacterial polypeptide expressing nucleotide sequence isolated from the Sargasso Sea
aatacaatagctcctgcgattgaagatgcgaaacaacagggtattctaacttcgggaccctattctccggacacgatcttcctccgtcaccaggccggggagttcgatgcagtagttgccatgtaccatgatcaggccttagttcccttaaaattgatgggatttggaaaatccgtaaacatcaccctcggactccccttgatcaggacctcggtggatcacggaacggcattcgacagagccgctacttttcattcggattcttcatcaatggaggcagccatccaatcagcccttaggctttgcagaaactcaatcgttgcgggtgattcgaattgat

SEQ ID NO: 206356 - DNA, 526 bp, Unknown
  Bacterial polypeptide expressing nucleotide sequence isolated from the Sargasso Sea
tcttggctatgtcgaggtggcccagcacctgaccaccgaacgaatagtcgccgttcttcgactcacaaataccgcattgcgtactatccgtgggaccgttccccggcttctcgtctgcgggctgaatccacacgccggtgagcatggactttttggaaatgctgaagaagagaaaattattacaccagcggttgagcaagcgagacagcaagggcttgatgtgaacggaccggtgccggcagatacggctttcacaccacagtcccgagaacgctttgatgcaatggtgtgcatgtatcatgatcagggtcatattccaatcaaaatgatcgcctttgaccgtgcagtaaatattacgctcggtctttcgacgatacgcacaagtgttgatcatggcactgcatttgacattgcgtggaaggggactgccgaccctggcagcctcttccaggcagttcaccttgcaacacaacttgcaaaaaagaagctatcagaagctaaaaacaggcagacagagcaaacctga

SEQ ID NO: 206357 - DNA, 265 bp, Unknown
  Bacterial polypeptide expressing nucleotide sequence isolated from the Sargasso Sea
tctggacctcattctgcagacacggcttttataaataataatcaaattaaacctgacatcgtattggctatgtatcatgatcaaggtttacctgtaataaaaacaataggatttggaaaaataaccaatgtaactctgggactcccattcataagaacttcagtagaccatggaactgcctatgatatggctggttcaattcaagctgatgagtcaagtttaatagaggctgctaaaattgcagcgtcaatagctataaattaaa

SEQ ID NO: 206358 - DNA, 973 bp, Unknown
  Bacterial polypeptide expressing nucleotide sequence isolated from the Sargasso Sea
atgacaaagcttcgctgggtattgacgaccggcgaacccgctggcgtgggtcccgaactcaccgtccagctgctgcagcgccccctgccctcacccctggtgattgcgggcgatcctgatctgctgcttgaacgcgctgcgttactgagcctgcccttggcgcgcaaaggcgatgccctggtggcgcccggcggcgaggcagtgttgttgcccgtcgcgctcggtgcgccttcgattccggggagtctcgatgtcgccaacgcggcttatgtcatcgagatgctggctggggcaaccgacggctgcctcaacggcgagttttcaggcatggtgaccgcgccggtgcaaaagagcaccctgattgaggcgggtaacgattttgtcggccacactgaatttctcgcccagcgcgctggcgtggcaaccccggtgatgatgctcgccacggatgcgttgcgcgtggcgctggtcacgattcatctgccgttgggtgaggtgccccgcgccgtgacgcaagacagtctggaagccgtcttgcgggtggtagattccgatcttcgcgcccgctttggtattgccgcgccggtgatcggcgtttgtggattaaatccgcatgcaggcgaggcgggccatctgggccaggaagaacaggacgtcatcatcccggtaatggccaagttaagcgatgaaggccttgtgctgaagggtcctttgccggcggatacggcattcactcagcagaacctgcaaacattagacgtggttgttgccatgtttcatgaccagggtctgccggtcattaaacacgcagggtttggggatgtggtcaacatcacactgggcctgccttttgtgcgcacgtctgtcgatcatggcacggcacttgatctagcaggcacgggcaaggcagaggtcgccagtttaagtcgggccctggacgtggcaatccagttgagcagtgaccatttctgaa

SEQ ID NO: 206359 - DNA, 662 bp, Unknown
  Bacterial polypeptide expressing nucleotide sequence isolated from the Sargasso Sea
taaaaaaattcatgctttatgtacagcacctattagtaaaatttctcttcataaggcaggatattcttatccaggtcatactgaaattttagctgacttaacaagttctgaagaagtatcattaatgttgatgactcctaaattaaatgttgcccatgtaactacacatataggtcttattgacgcaatagaaaaaatagatgagggattagtatttagaaccattaaacgtggaaggcaagtaatacaaaaaataataggtaaagaacctaaaataggagtctgtgcaataaaccctcatgctggagaaaatgaggcttttggaagaggagaagaaaaaaataaaataatacctgctataaaaaaatgtcttgcattggattggtatgttgaaggtcctttagcagcagattcattattttatactgcttcaagaggagattttgatttagttgttgccatgtatcatgaccaaggtcatggtcctgtaaaagttttgggaattgagcatggtgtcaatgttacaataggattgcccataattaggacatctgtagatcatggaacggcatttgatattgcaggaaaaggaattgctaatgaaaaaaatttgctaaatgcaataaaaaaagctgttttattaattgataagggcaattgat

SEQ ID NO: 206360 - DNA, 798 bp, Unknown
  Bacterial polypeptide expressing nucleotide sequence isolated from the Sargasso Sea
ggcttcaggttatttcgcgtatcgcacccttacccgacacaattgcatcgggccaaatcagtgccgatgccgggcgcggcgcctacgagtatctgtgtcacgcaattgatgacgcgctgtcgggcaaccttcgggccattgtgacggcccccttacacaaagaagccatgcaactgggcggagcaaacttccccggacatacggaaattctggcacaacgcacaagaaccgagcactacgccatgatgctggccaacaatgagttaaaagtcattttggtcaccattcatatcccgttgtcgcaggttagtacaagcattaccctggcccgagagctgcaaactattcgtttggcgcatcaagcctgtctgcacgctggcgtcgaacacccccgcgttgcagttgcaggcgttaacccgcatgcaggcgaaaacgggcgttttggcaaggaagaaaacgaagttcttacacccgcaattgaacaggcgcagcgcgaaggtattaacgtctcgggcccctaccctggcgacacaatttttatgcgtgcgcggcgcggtgagtttgatattgtggtggcacaataccacgaccaagggcttatacccgtgaagtatctgggagtagacgaaggcgtgaatgtgacagtgggtttgcctttcattcgcaccagcgtcgatcacggcaccgcatttgacattgccggtaaaggtgtggccgaccccaactcactgcgcgcagcgttcagcctggccattagtatgacaccccccggcgcaagcgaacgcaaaccccaataaa

SEQ ID NO: 206361 - DNA, 280 bp, Unknown
  Bacterial polypeptide expressing nucleotide sequence isolated from the Sargasso Sea
ctggattcttccgcaaaagcttggaatgacaaaaatgctgaaacgcatgatggcattcttgctatgtatcatgatcaaggtttaataccaatgaaagtgatagctcttaattactcagttaataccacaatcggtttaccttttataagaacatccccggatcatggaacaggatttgatattgctggtaaaggaattgctcaatctcaaagcatgattgaagctataaagactgctgtagaaatgactaacaattcaagactgcttaacacgcattaaa

SEQ ID NO: 206362 - DNA, 598 bp, Unknown
  Bacterial polypeptide expressing nucleotide sequence isolated from the Sargasso Sea
catactgattttttaggatcactttccttgaaaaaaaagaacccagttatgatgttagtggccaatgaacttaaaactctgcctttaacagttcatgttcctctaaaaaaggtaactcaattgattacaaaagaacttataaaaaccaaaataaaaattgcagttgatgatctaaaaactttctttgatataaaaaaaccttctattatcgttacaggcttaaatccacatgcaggtgaaaatggtaatttaggtgatgaagagataaaaataatcaaaccagctatagacgaattaaagaaacttactgatatatctattaaaggaccaatatcagcagatattgctttctcctctgaaaaaaggtgtcattatgatctagcagtttgtatgtaccatgatcaagcacttataccaatcaaaaccttggattttcataatggagttaacgtcacattaggcttggattttataagaacatctccagatcatggaactgcatttgacatagctggcaaaaatttggctagcccggaaagtttaatttcagcaattaatcttgcttatgaaatgagtaccaataaaaacaatgcataat

SEQ ID NO: 206363 - DNA, 793 bp, Unknown
  Bacterial polypeptide expressing nucleotide sequence isolated from the Sargasso Sea
tctgggtttttgggatttcggagagcaatcaaacgaatggcagcctggaacatgtagtcgttggggaggggaatccgcgttccgatttttaaacacggccattcaatggacacggcaaggccgtgccgatgcgattgtgactgcccctctgaacaaggaagccttgaaaaaagccggtcatgattaccctggccacaccgatattttggcagaggtcactggtcatcctagggcttggatgatgctcaaatgtgaaaaactacgtgcggtgatggtcacccttcacatgagcatgaaaagtgtcctggaacagctatctccctcaatgattctggaaacgattgaagtcacggatcaggctttgaaaaggatgggctttggtcgtccaagaatcggggttgccggactcaacccccatgcaggggaaaacgggatgttcggagacgaggaaacgaaaacaatagctcctgcaattgaagatgcgaaactacagggtattctagctttgggaccttattctccggacacgatcttcctccgtcaccaggccggggagttcgatgcagtggttgccatgtaccatgatcaggccttagttcccttaaaattgatgggatttggaaaatccgtgaacatcaccctcggactccccttgatcaggacctcggtagatcatggaacggcattcgacagagccgccaattttaattcggattcttcatcaatggaggcagccatccaatcagcccttaggctttgcagaaactcaatcgttgcgggtgatgcgaattga

SEQ ID NO: 206364 - DNA, 829 bp, Unknown
  Bacterial polypeptide expressing nucleotide sequence isolated from the Sargasso Sea
tcttatattcagataaatgaaatcaaagactttaaaaagatcaaaccaaataaaaaaaagtctatacaagtatttaatgcttttaagtgtttagacacaactccatcaaaactaaatcctaaaaattctaaatatgttctagaaatacttgatcaaagtattaaatggtgtttacagaatcaaagttttggtttagtaactggaccaattaataaagcaaacatcattgatgggggacattctttttctggccatacagaaaggcttatgaaaaagacaaaaagtaaagatgttttaatgatgttggcaagctctaagatgagagtatgccttgtgacgacccacatacctatcaaccaagttgcccaaaacattaataagaaattactgatgagaaaaattataattcttaatgacgagcttaaaaacaaatttaaaattaaaaatcctaaaatatttactttaggtctcaatcctcatgctggcgaaaatggtcatattggggatgaagaaactagaattattaatccttgcatcaaagaagcacagagtatgggaattaacataagtgctccaatggcagctgatactgccttttcaaaaaagaatttgaaaacctatgatgcattcctcgctatgtatcatgatcaagcgcttccagtaataaaatcaatgagttttggaaaaatagttaatgtttcgcttggtttaccaatcgttcgaacttcagtagatcatgggactgcattggaattatcgggtacaggcaatattaaattagattcccttaaagaggcatttacagtcgcaagtaaaatgattggatgat

SEQ ID NO: 206365 - DNA, 364 bp, Unknown
  Bacterial polypeptide expressing nucleotide sequence isolated from the Sargasso Sea
ggattattgggtgacgaggaatatgttcatatcgcgccagctgttgaagatgcccggtctttagggattgatgcaactggtccggttccggcggacacggtgttcaatcagaatattgatggcatgtatgacgtatgcatagctatgtatcatgatcagggtcatattccgattaaagtgcatgattggaagagaagtgtaagcgtcaacctaggattgccattcataaggacttctgttgatcatggtacggcgttcgatatagcgggaaaaggcatagccgaccatattagtatgatggaatctattaacactgctgtctccctagtaagtgatagcaaactgcccggaatatcgggttaaa

SEQ ID NO: 206366 - DNA, 682 bp, Unknown
  Bacterial polypeptide expressing nucleotide sequence isolated from the Sargasso Sea
ttgcagaaatcatgggctctagcaggtcattacttttccggacaaactgaagtgttagcaaaatcatgtggagtaaaaaatgttggaatgttattcacagctaaatcaccattaactggctggagattcaataccttacttgctacaacccatatagcgctttgtgaggtcccaaagatgctaaatacaaaacttatacacgctaaattagatcttttaaaagagttttgcattacatataataaaaaacctacctttaaagtcgcgggattaaatcctcatgctggcgaagagggtattttaggtaatgaagagaaagattggcttgttaatgcattgatttcttggaatgaaaagaataaagagattaaattattaggccctttatcaccagatagttgctggaactcttccgccaaagcttggagacagaaagatgttgaaaagcatgatggaattcttgctatgtatcatgatcaaggtttaataccaatgaaggttatagctcttaattactcagtaaatactacaataggtttaccttttataagaacatctcctgatcatggaaccggatttgatattgctggaaaaggaatagcgcaatcacaaagcatgattgaggctataaaagctgccatagaacttacaaaaaattcaagactgcttaacgcgcattaaa

SEQ ID NO: 206367 - DNA, 556 bp, Unknown
  Bacterial polypeptide expressing nucleotide sequence isolated from the Sargasso Sea
attcaatactttattagctacaacacacatagccctctctgaagttcccaagaaattaactacagaattaatccattctaaattggatcttttcaaagatttttgtaatacctatactgataaacctaatttaaaagtagcaggattaaaccctcacgccggcgaggagggtattttaggttgtgaagaaaaagattggctcagtgatgcattacttacttggaatgaaaaaaatagagatattgaattattaggcccgttatcaccagatagttgctggaattcttctgtaaaagcttggaatgacaaaaatgctgaaaagcatgatggcatccttgctatgtatcatgatcaaggtttaatcccaatgaaagtgatagctctgaattactcagtcaatacaacaatcggtttacctttcgtaagaacatctcctgatcatggaacgggatttgatattgctggcaaaggaattgctcaatctcagagcatgattgaggctattaaggctgccgttgaaatgactaacaattcaagactgcttaacacgcattaa

SEQ ID NO: 206368 - DNA, 806 bp, Unknown
  Bacterial polypeptide expressing nucleotide sequence isolated from the Sargasso Sea
gactggcgagcccgccggcatcggtcccgacattaccgtggcagcgctgctgcatctggcacggcagacatcgtcgcgctatgccgatgtgcagtggcatgtgatcggggatgccgccctgctgcaagcgcgtgccgatgccattggccagggggatttctggcgcgtggcgtccacggcgctgaccatcgtggagcgcccgctcggcgcaccggtgcgtgcgggcgtgctcgacgcggccaatgggcgctacgtgctcgacctgcttgatgttgccatcgacggttgcctgcgcgatgcggcagacggtgcacgctacgacgcgatggtcacggcgccggtgcagaagagcaccatcaacgatgccggggtgcccttcactggccataccgaatacctggccgaacgcagccacacgccgcgcgtggtgatgatgctggccggcccgcagcccgcgcacaacaacgccatgctgcgcgtggccctggcgaccacgcatctgccgttgcgcgaggtgccggatgccatcacgcctgccgtgctcgacgagacactggacatcgtgcagcgtgacctgcgcgcccgcttcggactgagtgcgccgcgcattctcgtgacggggctgaacccgcatgccggtgagtccggccacctcggccgcgaggaaatcgaggtgatcgagcccgccattgcccgcgcgctggaccgcggcatcaacgcccgcggcccgtatccggccgacacgttgtttcagccgcgcctgctggccgatgccgattgcgtgctcgcgatgtatcacgatcagg

SEQ ID NO: 206369 - DNA, 592 bp, Unknown
  Bacterial polypeptide expressing nucleotide sequence isolated from the Sargasso Sea
taaatcttttcagggtcataccgaatggattaaaaagtatactcattcaaaagaagtagtcatgctgcttgcagcaaaaaatataaaagtagcccttgcaacaactcatattcctctttcagaagtatcaaaaaatattcaaaagtttaaacttgttgaagtaattaaaatattaaattttgggcttaaaagtaatttcaaaatcaaaaatccatccataaaagttcttggtttaaatcctcatgctggagaaaatggcaaaattggtaaagaagaattattaaaaattaatcctgcagtaaaaatatgtagggaaatggggattaatgtttcgtatgctaggtctgcagatactgccttcaatagtgatcaattaaaagaaactgatgcgtatcttgctatgtatcatgatcaagcgttgccagtgttaaaagctttaagctttggaaaagcagttaatattacacttggtacgcctattgtaagaacttctgttgatcacggaacagccctagaaatagctggcaaaattaaaccaaacctaggatcaattaaagaagctataaagcttgctgagatgcagcttcaatga

SEQ ID NO: 206370 - DNA, 481 bp, Unknown
  Bacterial polypeptide expressing nucleotide sequence isolated from the Sargasso Sea
ctttcaccctcaatgattctggaaacgattgaagtcaccgatcaagctttgaaaaggatgggctttgatcttccaaaaatcggggttgccggactcaacccccatgcaggggaaaacgggatgtttggagacgaggaaatgaatacaatttctcctgcgattgaagaagcgaaacaacaggatattctagcttcgggaccctattctcctgacacgattttcctccgtcaccaggccggtgagttcgatgcagtggttgccatgtaccatgatcaggccttagttcccttaaaattgatgggatttggaaaatccgtgaacatcaccctcggactccccttgatcaggacctcggtggatcacggaacggcattcgacagagccgctatttttagttcggattcctcatcgatggaggcagccatccaatcagcccttaggctttgcagaaactcaatcgttgcgggtgattcgaattgat

SEQ ID NO: 206371 - DNA, 645 bp, Unknown
  Bacterial polypeptide expressing nucleotide sequence isolated from the Sargasso Sea
ctattaacaagtacacaatgcacaaatctggatttaattttgaagggcatactgattttcttgcatcactttcagtacaaaagaaagatcccgttatgatgttagttactaatgggctaaggactgtacctttaacaattcatgtccctcttaaaaaagtttataaattaataactaaagaacttattcaaaccaaaataaaaattgctgttaatgatcttaagactttttttaatattaaagaacctcgtataatagttacagggttgaatccccatgcaggtgaaaatggtgattttggtgatgaagaaatagaggtgatcaaacctgctatagatgagttaaaaaaaatcaataacattaatatcataggacctatatcagcagatacagcattctcattggacaaaagaaaacaatatgatttagctgtttgtatgtatcatgaccaagctcttattccaatcaaaactctaaatttttataacggggtgaatgttacattaggtctcgactttataagaacatcacctgaccatggtactggatttgatatagctggcaaaaatatagctaatccagaaagtttaatttcagcaataaatcttgcttatgagatgagtattaataaaaaacatgcatgac

SEQ ID NO: 206372 - DNA, 522 bp, Unknown
  Bacterial polypeptide expressing nucleotide sequence isolated from the Sargasso Sea
gcctgcgtgtggcgctggtgaccacccacttgccgctgcgtgaaatagccgatgccatcactgccgagcgtgtggagcgtgtcacgcgcatcctgcacagcgacctgcaacacaaattcggcattgcccaaccgcgcatcctggtctgcgggctcaacccccacgccggtgaaggcggccacttgggccatgaagaaatcgacatcattgaaccaacactagagcgcctgcgccaagaaggcatggacctacgcggcccattgcctgcagacactctgttcacccccaaatatctggagcactgcgatgcagtgctggcgatgtaccatgaccaggggctgcccgtgctgaaatacaaaggcttcggcgccgcagtcaacgtgacactgggcctgccgatcatccgcacctccgtcgaccatggcaccgccctggacctcgcaggcagcggcaagatcgataccggcagcctgcacgtggccctggaaaccgcctatcagatggccgagacccgtatatgac

SEQ ID NO: 206373 - DNA, 840 bp, Unknown
  Bacterial polypeptide expressing nucleotide sequence isolated from the Sargasso Sea
ttgcaaatccaaaaaatttcaagatacatgatgtcgaaatttcttcattagataatgatcctaaatcaagttacggtaattcaagtttccaatatttaacaaaagcaatagaaattgtaaaacaatatcccaattcagcacttgtaactggaccaatttgcaagaaatcttggtctctagcaggtcattacttctctggtcaaactgaagtattagcaaaagcatgtggagtaaaaaacgttggaatgttatttaccgcaaaatctccaattacgggttggagatttaatactttactagctacaacccacatatccctttctgaggttcccaagaaattaactacagaattaatccactctaaattggatcttttcaaagatttttgtaatacctatactgataaaactactttaaaagtcgcaggattaaaccctcatgccggcgaagaaggtcttttaggtcatgaagaaaaggattggctcaatgatgcattaattacgtggaatgagaagaataaagatattagattatttggccctttatcaccagatagttgctggaattcttcggtaaaagcatggaatgacaaaaatgctgaaaaacatgatggcattcttgctatgtatcatgatcaaggtttaataccaatgaaagtaatagctcttaattactcagtaaataccacaataggtttaccttttataagaacatctccagatcatggaacgggatttgatattgctggtaaaggaattgctcaatctcaaagcatgattgaggctattaaggctgcagtagaaatgactaacaattcaagactgcttaacacgcattaaa

SEQ ID NO: 206374 - DNA, 379 bp, Unknown
  Bacterial polypeptide expressing nucleotide sequence isolated from the Sargasso Sea
catgcaggggaaaacgggatgtttggagacgaggaaatgaatacgatttttcctgcgattgaagaagcgaaacaacagggtgttctaacttcgggaccctattctcctgacacgatcttcctccgtcaccaggctggggagttcgatgcagtggttgccatgtaccatgatcaggccttagttcctttaaaactgataggatttggaaaatccgtgaacatcaccctcggtctccccttgatcagaacctcagtggatcatggaacggcattcgacagagccgctacttttaattcggattcctcatcgatggaggcagccatccaatcggcccttaggcttagcagaaactcaatcgttgcgggagatgcgaattgat

SEQ ID NO: 206375 - DNA, 358 bp, Unknown
  Bacterial polypeptide expressing nucleotide sequence isolated from the Sargasso Sea
aggtgatggaggttatattggcagagaagataaagaagtaataactcctgtgattgaacatctcagagctaaaggaatgaaccttgtggggccaatttctgcagatacggcttatctaaaaaatgaagatgaacaagtggatgcctatttagctatgtatcatgatcaaggtcttccagtaataaagagttccgagtttggtaattcagttaatgttactcttggcttgccctttataagaacttcagttgatcatggcactgcttatgacatggcaggaaaaaaagaagtagatgaaaccagtttactagaagcctcgtatttggcctttaaattggccaaccaaaaaacagtgtga

SEQ ID NO: 206376 - DNA, 900 bp, Unknown
  Bacterial polypeptide expressing nucleotide sequence isolated from the Sargasso Sea
ttctaaaaaaaaatctattaaatacatatagtcacctcaaaactcttggtttagaaaaactagctaatccaaattcgctaaaaatttatgatcttgaaatttctttatcagataatgaccctaaatcaagttacggtaattcaagtttctattatttaacaaaagcaatcgaacttgtaaaacaatatcgtaattcagcacttgtaactggtccaatctgtaagaaatcatggtcactagccggtcattacttctctggacaaactgaagttttagcaaaatcgtgtggagttaaaaatgttggaatgttattcacagcaaaatcacccatcacaggttggagattcaataccctactagctacaactcacatagctctttgtgaggttcccaagcaattaaatacaaagttgatacattctaaattagaccttctcaaagatttttgtagtacctacattgataaacctactttaaaagtagcgggattaaaccctcatgctggcgaagaggggattttgggtagtgaagaaaaagattggctcaatgctgcattgattgcatggaatgaaaagaacaaagatattaaattattaggccccttatcaccagatagttgctggaattcttccataaaggcttggaatgacaaaaatgctgaaaagcataatggcattcttgctatgtatcatgatcaaggtttaataccaatgaaagttatagctcttaattattcagtaaataccacaataggtttaccttttataagaacatctccagatcatggaacgggatttgatattgcggggaaaggaatagctgaatctcacagcatgattgaagctataaaagctgcagcagaaatgaccaataattcaagactgcttaacgcgcattaga

SEQ ID NO: 206377 - DNA, 186 bp, Unknown
  Bacterial polypeptide expressing nucleotide sequence isolated from the Sargasso Sea
tctccttcggaaccggggtcaatgtgacactcgggttaccgttcataagaacatcaccagaccatggaacggcattcgatattgcgggctctgatgaagctgaccctacctcaatgatcaaagccctcacacttgctcatcgccttgcaaagaatcgctttgacaccccacccgctgatgtctaag

SEQ ID NO: 206378 - DNA, 841 bp, Unknown
  Bacterial polypeptide expressing nucleotide sequence isolated from the Sargasso Sea
gcaggggctcacatcgatcgccgatcccagtcagctgagcattgacgaccatccactggagacgtctgttgtgcccggagaaccgacaacggccggtgcggcggcgggttttcgctggctgacccgcgccgttgagcgggtgcagcaaggtcagggccgagccctgattaccgcaccgatcgccaagcacctctggcatgccgcaggccatcactaccccggtcagacggaacggctggccgaacttgccggttcaaggcactgctcgatgcttttcacagccatcgcaccccatggaacctggcggctgaacacacttctggccaccacacaccttcccttcagtcagatcaccgcagcgctgacaccggacctggtggaacacaagctgaacgtgctgctggagttctgccggcgcttccggtccgacccccatctggtggtcgcagggttgaacccccatgccggagaggccggtcggctgggggaggaggaaaccacctggctgaccccattgctggaacgctggcgccaacagcacccctccgtgcatctggagggccctgtccctcccgacacctgttggctcaacgcagctcgagcatggaaccaaccggaggcctcgggcccggatggctacctggctctgtaccacgatcagggcctgatcccggtgaagctgctggcttttgacgccgccgtcaacaccacccttgaactgccatttctgcgcacctcaccggatcacggcaccggatttgacatcgctggccggggcaccgcccggccagacagcatgatcgctgcccttcaggcggcttggaatctcacagggttttag

SEQ ID NO: 206379 - DNA, 382 bp, Unknown
  Bacterial polypeptide expressing nucleotide sequence isolated from the Sargasso Sea
ttaggtaatgaagagaaagattggcttaatgattcattgattacttggaatgaaaagaatagagatattaaattattgggaccaatatcaccagatagttgttggaactcttccgcaaaggcttggagacaaaaagatgctgaaaaacatgatgggatccttgctatgtatcatgatcaaggtttaataccaattaaggttatagctcttaatttctcagtaaatacgacaataggtttgccttttataagaacatctccagatcatggcacgggctttgatattgctggcaaaggaatagctcaatcgcaaagcatgattgaggctataaagactgctatagaaatgaataaaaattcaagactgcttaacacgcattaaa

SEQ ID NO: 206380 - DNA, 853 bp, Unknown
  Bacterial polypeptide expressing nucleotide sequence isolated from the Sargasso Sea
ttccaagtaagatcaaagcttataaataaaaggattaagatcagggaacttaagtctctcgatgcttctgttaaaaataaaaagggagtattgcaattatataaagtttcaaactgtgtggatttatctccaaaaaaattaaatgctcgtaatgcaaaatatgtaatagatcatttggattttggaatcaaatactgcaatgcaaataaaaaagttggcctggttactggaccaattcagaaaagtaacattattgatgctggatataaatttagtggacataccgaatggatcaaaaaaaagactggcagttcagacgttttaatgatgctggcatctgaaaagttaagggttgcactaactactacacatttacccctaaaagaagtttataaagaaattaaaaaatctaaagtacttaaaaaaatcatgattctcgattcctcactaaaatcacaattaaaaataaaaaaaccacacatcacggttctagggcttaatccgcatgcgggtgaaagcggtcatttgggtactgaggaaattaaatatattcaaccagcaatcaaggaagcaaagaaaaaaggtattaacgtgaatgggccactcgctgcggatactgcatttaataaagaaacacttaaactaaccgatgcatatttgtcgatgtaccatgatcaaggtttacccgttctcaaagccttaagttttggtgatgccgttaacattactcttggaactccaattataagaacctcggttgatcatggaacggctctggaattggctggcacaaataatgttagtacaaaatctttagttgttgctctcaaacaagccgatcacatgctttgat

SEQ ID NO: 206381 - DNA, 772 bp, Unknown
  Bacterial polypeptide expressing nucleotide sequence isolated from the Sargasso Sea
tttggataataataaatattcaaatgaaaattttataaaagggaaaaactctgttgaggcgggaaaagcttcacatgaatgggttgaaatagctacagatttagcgatagaaaataaagttgatgctatatgtacagctcctataaataaagaaagttggcaaatggcaagtttcaaggatataggacaccaagagatattcaagagaaaaagtaaatctaattatgtagctacaatgttagtttcaggaaaattaagatgtatgcatttatcaacacacctttctctatctaaagcgtgtgaatatgtaacaacagaaaatgtagagcgagcaattaggcttactcaaaaacatttcttagaatggggtttttcgaatcctaaaattggagttgcagcattaaacccccatgcctctgacggaggacttattggtgatactgaagaaaaagaaatcttgccagcaataattaattgtaaaaatgatggaattaatgcatctggtcctcatcctgcagattctattttctatgatgcaataaatgacaaacatgatgttgttgtggtcatgtatcacgatcaagggcatattccaatcaaggtctatggattcgagcaatcaatttctgtaaacttaggcttgccttttattaggacatcggtagaccacggtacagcttttgatattgctggtgaaaatattgccgatccaacaagtatgatagaggcaataactctagcaaataacttagcttataaatctaaactatga

SEQ ID NO: 206382 - DNA, 349 bp, Unknown
  Bacterial polypeptide expressing nucleotide sequence isolated from the Sargasso Sea
tgcattaattacgtggaatgagaaaaataaagatattagattatttggccctttatcaccagatagttgctggaattcttcggtaagagcatggaatgacaaaaatgctgaaaaacatgatggcattcttgctatgtatcatgatcaaggtttaataccaatgaaagtaatagctcttaattactcagtaaataccacaatcggtttaccttttataagaacatctccagatcatggaacaggatttgatattgctggcaaaggaattgctcaatctcaaagcatgattgaggctattaaggctgccgtagagatgactaacaattcaagactgcttaacacgcattaa

SEQ ID NO: 206383 - DNA, 821 bp, Unknown
  Bacterial polypeptide expressing nucleotide sequence isolated from the Sargasso Sea
aaagattcatgatctcgaaatttcttcattagataatgatcctaaatcaagtaacggtaattcaagttaccaatatttaacgaaagcaatagaacttgtaaaacaatatcctaattcagcacttgtaactggaccaatttgcaagaaatcttggtctctagcaggtcattacttctctggtcaaactgaagtattagcgaaagcatgtggagtgaaaaacgttggaatgttatttacagcaaaatcaccaattacaggttggagatttaatactttactagctacaacccacatatccctttctgaagttcccaagaaattaactacagaattaattcactctaaattggatcttttcaaagatttttgtcatacctattctgataaacctactttaaaagtcgcaggattaaaccctcatgccggcgaagaaggtcttttaggtcatgaagaaaaggattggctcaatgatgcattaattacgtggaatgagaaaaataaagatattagattatttggccctttatcaccagatagttgctggaattcttcggtaagagcatggaatgacaaaaatgctgaaaaacatgatggcattcttgctatgtatcatgatcaaggtttaataccaatgaaagtaatagcacttaattactcagtaaataccacaatcggtttaccttttataagaacatctccagatcatggtacgggatttgatattgctggcaaaggaattgctcaatctcaaagcatgattgaggctattaaggctgccgtagagatgactaacaattcaagactgcttaacacgcattaaa

SEQ ID NO: 206384 - DNA, 590 bp, Unknown
  Bacterial polypeptide expressing nucleotide sequence isolated from the Sargasso Sea
cacagaagagcttgcccaactctcaaatacacaacaagtggtaatgatgctagtaaatgaaaaaatcaaagtagctcttgcatcaactcatttgcctatcaaggaagttccttcgttccttaatgaagagttattgaaagagatcattttgattactaatgaatcgctgaaaaaaaattggggaatagctgatcctttgatcaaggtcctgggacttaaccctcatgccggagatggaggacatataggtaaagaggagcaagaatttatcactccagcaataaataacctaaaaaataaagggctcaatattactggtccactttcagcagataccgcatttgttgaaaaaaattcagaaaaagccgatgtatttattgccatgttccatgatcaagggcttcctgtaatcaaagctctaggatttggtgaaacagtaaatataactctcggattacctttcatcagaacatctgtagaccacggaacagcatatgatatttctggtacgggcgcggcagatgaatcaagtctgcttgctgccatagaagttgccaagacaatgagtaaaaaaagaaacaatgcctaga

SEQ ID NO: 206385 - DNA, 814 bp, Unknown
  Bacterial polypeptide expressing nucleotide sequence isolated from the Sargasso Sea
ccacatggctggccaagccaaccggcgtcggccaactgtctgtatgtctgggatactcccttggatgcaccggtgatcgcaggccagctcgacgcgcgcaacggccactacgtactggaaacgctgacccgagctggaaacgggtgtctcgacggcagcttcgccggcatgatcaccgcgccagtgcacaagggtgtgatcaatgaggccggcatccccttttcaggccataccgagtttctcgccgagctgacccgcaccgagcaggtggtcatgatgctggccacgcacggattgcgtgtcgcgctggtcaccacccacctgccgctcaaggatgtcgccgcagcgattaccgcggagcgcctggagcgggttacgcgaatcctgcaccacgatctggtcagcaagttcggcattacccaaccacgtattcttgtctgcgggctgaacccgcatgcgggtgagggcggccacctgggccgcgaagaaatcgagatcatcgagcccgtgctgaccaggctgcgtgacgaggggcttgatctgatcggcccgctgccagccgacacgctgttcacccccaaaaatctcgagttctgcgatgcagtgctggcgatgtaccacgaccagggcctgccggtactcaagtacaagggtttcggtgccgcggtcaacgtgaccctgggcctgccgatcgttcgcacgtcggtagatcatggcaccgcgctggatctggccggcagcggcaagatcgacactggcagcctgcgggtcgcactggaaacggcctaccagatggtcggcagccagagctagc

SEQ ID NO: 206386 - DNA, 785 bp, Unknown
  Bacterial polypeptide expressing nucleotide sequence isolated from the Sargasso Sea
tatcaatgatataaatgaaaaagttgggtgtctgaaaattatgaagtgtccagacatctcaagcggcaggctaaattctattaactctgaatatgtaatcaagaatcttgattttggaattgatgcgtgtctgaaaagcaaagatataggattagtgactgggccaataagtaaagagaatattgttgaaggaggatattccttctctggtcatactgagagaataatggaaaagactaacagtgatgatgtgctaatgctgcttgcttcagaaagattaaaggtagctttggcaacaacacatatgccattaaataaggtttcagaatcgattacgacagccctaataatcaataaagtaaagattttaaatcaagagctgaaatcaaagttcaatattgaaaagcctaagatttctcttctagggcttaatccacatgcaggagaaggaggaaaattaggaaaggaagaaattgaaataataatacctgctgtaaaagagttaaaagcttctaatgttgatgtctctatgcccctatctgcagatacagcattcaataaaaatcttcttgatgaaactgatgcatattttgctatgtatcatgaccaaggacttccagtgctaaaagctttaagttttggagattcaattaatataactttaggtgtgccaattataagaacttcagttgatcatggggttgccttagacatcgctgggaatggtattgcaaataattcctcattgaagaatgctttctatgcagctgataacctaatctaat

SEQ ID NO: 206387 - DNA, 982 bp, Unknown
  Bacterial polypeptide expressing nucleotide sequence isolated from the Sargasso Sea
atggataattatgataaagtaattgccgttactgctggtgatccagctggcataggtccggatatttgtcttgagctatctagtcacgtctggagcaataaaattattgttctcacagatccatccgttctgaaagaaagagcaaaaaatttaaaaaaaaacataaacatcactgagtgggacccaaaaaaaattaatactggcaggttaagcgaagactctctctttgtatggccccattattttaaatcagaagtattatgtggtcatcctaattcggaaaattctgagacagtgctatcatctttgaatagtgccattgatggatgcaaaaaaaaaatattcaaaggaatggtgacggcaccagttaacaaagcagtgattaaccaagctggttatcaatttactggtcatacagagttcattgcaaataatactgataccaaaacacctgtaatgatgcttgctactggtaaatttagagttgcactggctactacgcacataccactcaatcaagtaagcacatcaataaataaagaaaaaataataaacatagttgaaataattcataatgatttaaaaaaatattttaatattcaaaatccaaaaatatttgtttgtggcttgaatcctcatgcaggagaaaatggctatcttggcaatgaagagaaattaataattgaaccagcaattaaatatctaaaagaaaaaggattctccgttgaagggcctgcttcggcggatacaatttttctgaacgataaaaaagctgatatttttcttgccatgtaccatgatcagggtttgccaattttaaaatacaagggctttggtaatgctgtgaatgttacccttggactccctttcgtaagaacatctgttgatcatggaactgcttatgacattgctggcacaggtaaggccgatgcaagaagtttaatcagtgcaattgaaatggcttttcaaatggttgattgat

SEQ ID NO: 206388 - DNA, 988 bp, Unknown
  Bacterial polypeptide expressing nucleotide sequence isolated from the Sargasso Sea
attgaagagactcctctactctcacggtgaaccagcaggaataggcattgacttaattctacatctatcaaaatcaaagttttgggaacaaatgaagtttcctttagtctgcattgttgataaagccctccttaaatcaaggtctaagattttaaacttgaaaataaattttgttgaaattgaaagcttagataaagcaaaaagaaacaaacttgccgcagtacagtttattcaaatttctaaatgtaaggatttatctccaggatctctgaatcccaaaaatgcaaaatatgtattagacaatttaaattttggaattgcggaaagccttaaaaataaaaaagttggcttagtgactggacccattcaaaaaagtaatattatcaatggtggctttaaaaattttcaaggccatactgaatggatcaaaaagaaaacaaaatcgaaagatgttgttatgctgttatcttcaaaaaaaattaaagttgcccttgccacaacacatattccactaatagaagtttccaaaaatattcaaaaatcaaaattggttaatacaattaaaatcttgcatgctagtttaaagtcaaagtttcaaattaaacatccatcaattacggtacttggattaaatcctcacgctggagaaaatggaaagatgggagaagaagaaattaagaaaattaatccagcagtacaaatttgcaaggatattggcatagatgcttcatatgcaatttctgctgatacagctttcactgcttcaaaattaaagcatactgatgcataccttggcatgtatcatgatcaggtccttccagtcctaaagaccttaagttttggtgaagcgataaatataacccttgggactccaattataagaacatctgttgatcacggcacagcattagatcttgctggaaacagcaagcctaacctaggatcaatcaaagaagctatttcagtagcagcaattcagcttaaatga

SEQ ID NO: 206389 - DNA, 613 bp, Unknown
  Bacterial polypeptide expressing nucleotide sequence isolated from the Sargasso Sea
aatcataaatgacgccggaatcgattttagtggacatactgaatatttggccggactttgcaaggtaaaacgatcggtgatgatgcttgccacggacgatctgagggttgcgcttgcaacaacccatataccgttatcagaggtgccaaatgccataactaaaagtttgctgcgagatgtcataaggatacttcatggcgacttgcagaaaagattttatatcacaaagcctacgatactaatcagcggtctaaaccctcatgcaggtgaaagtggccaccttggcagagaagaaattgaggtaatccagccagttttaacagagtttcaaaaacaaggaatgaacttaatcggcccgctcccggccgacacgctgttcagctcaagttccttcggcaaagcagacgctgtcctttcaatgtatcacgatcaaggcctcccagtgcttaaattcaagggcttcggtaaagctacgaatataacacttgggttacccatcatccgaacatccgtcgaccacgggaccgcactcgataaagcaggcacaggtgaagtggatatcgggagtctgtatcaagcaattgcagccgccaaggcgatgattaagaaataa

SEQ ID NO: 206390 - DNA, 970 bp, Unknown
  Bacterial polypeptide expressing nucleotide sequence isolated from the Sargasso Sea
ttgataaataaaaaaattatcgtttctttaggtgatcctgcaggcattggacctgaaatttttttaaaagctctatctaaaataaattcgaaagaaatttttgaaagaattattgttgtaagttcattaagtgttttagattttgttaatagccacctcaagttaggttttagattcaatgagctattcaatatcaaagatactaaaccgaataagattaattttattaatgttcagaattgcccaaactataaagtgggaaaatcagatgaaaataatgcagattatgttatcgactgcattaatattgcatcagatttggcatttgataacaaattaaatcttgttacaggtcctattaataaaagtgttatttcttctaaagttaaaaattttcaaggacacactgaatacttaaagaataaattttcttgtaatgatgttttgatgttgctagcgaatgatcagctaaaaattggtgttgcaactacccacatacctcttaatgaagtttcaaatagtgttactgaaaaactattaattaataaaataacccttttagaaaaaggattaagagaactttttaacatacaaaatcctttgatcggtgttttaggattaaatccacatgcaggtgaaaagggcgaatatggtcaagaagacaaaaatattattcagcctaccgttcgtaagctaagtaataaatttaatctgatcggaccattgcctgcggataccgcttttgtttcatcaaaatgtgatggatatctttctatgtatcacgatcaagctttgccagtaattaaaacactagattttcatggcactgtaaatattactgttggactaccttttatgcgtgtctctgttgatcatgggacagctgaagatatagcatcagattttaaagcggaccccagcagcatgataaaatcgataaaaattgctttgaatgaaaataaagcctaaa

SEQ ID NO: 206391 - DNA, 499 bp, Unknown
  Bacterial polypeptide expressing nucleotide sequence isolated from the Sargasso Sea
atctacacacctaattcatacaaaattagatttgttcgcaaaattttgcaaaacctatgtcaataaacccattctaaaagttgctggattaaaccctcatgctggtgaagaaggcatactaggaagtgaagaaaaagattggatcacaaatgcggttactagctggggtaatcaaaataaaggagttcaagtatcaggtcctatttctcctgatacttgttggaattcatcttcaaaagcttggagagataaagcagctccatcacatgatggaattcttgctatgtatcatgatcaaggattaattccaataaaagttatagctcttaattactcagttaatacaactattggtttaccttttatcagaacatctcctgatcatggaactggatttgatattgcaggaaagggtttagctcaatctcaaagtatggttgaagcaataaaagcagcttttgatttaactaaagattcaagactgtttaacgcgcattaa

SEQ ID NO: 206392 - DNA, 973 bp, Unknown
  Bacterial polypeptide expressing nucleotide sequence isolated from the Sargasso Sea
attgaaaaaaattgtagtgacattaggagagccagcaggtattggaccagatcttggagtacttctttctcaaaagaaactctctaaaaatattattttcattgctgaccctttactcatatatcaaagtgcagatagattaaacaaaaaaattgacataaacgtgatgcacaacagctcatcgaagacttattctaataagaatttaataaacttacttcctgtaaaacttaatgtgaaaaataaacctggtatgatgaattataaaaactcagagtatgttatcaactccattagactagctgcaaatttatgtcttgagaaagaagcttcagctatggttactggtcctattagtaaatctatccttaataaagcaggatataaaatctcaggtcacacagaatttcttgctgacatatgcaagaaaaaatcgctgatgcttctgatgaataagaaaataaaagttgcactgcatacaacacatcttccaattcaaagcgttaccaaagaaataactaagacaaaattgaagaaaactatttctcttcttaatgaggaaatgaaaacaaagtttgctatttcgaaacctaaaatactagtcactggacttaatcctcatgctggtgaagatggcttattgggactgcaagatagtaaaattattgcacctgtgataaaagactttcaaaaaaaaaatgtctgtgttgatggaccggtggcagcagatacagcctttttgagaaaaaatatcgctaagtatgatgtaatcttgacgatgtatcatgatcaagggctcccggttattaaatttgataattttaaaacaaccgtaaatgttacgcttggacttcctattgtgagagtttcggttgatcatggtactgcactagatcttgttggaacaggaaaaattgatacatcaagttttgagcaagccattaaagttgcaaaaaaactctgccatgcataa

SEQ ID NO: 206393 - DNA, 514 bp, Unknown
  Bacterial polypeptide expressing nucleotide sequence isolated from the Sargasso Sea
tacagaccatattcctttaaataacgtagcaagtaatgtttcagtcaaaaatttaaatttaaaaattcaaaaagttctaaaaagcctgagagaggattttagggttcaaaaaccaaaagtagctattctgagtttaaatccacattcaggagatggaggtataattggtgatgaggatgacttattcataaaacccgtaataaacgaattaaagaaaaaaaacatatccattacaggtccatttgcagctgatagtttttttggttcaaaaaaatataaaacatttgatgctattttggcaatatatcatgatcaaggactaattccttttaagacattatcatttggaagtggtgtaaattttactgctgggataaatatcgtcaggacctcacctgatcatggcactgcatttgatattgcaggtaaaggtattgcaaactcaaattcatttagaaaagcaatattagaatcagtaaaaattttaaaatctagacataattattcaagttag

SEQ ID NO: 206394 - DNA, 970 bp, Unknown
  Bacterial polypeptide expressing nucleotide sequence isolated from the Sargasso Sea
attgaaaaccattatttattctcccggtgacccagcaggcattggaccagacctatttttaagtcttttagatgaagatttctttagatttataaaagcaaatgtggtttgtgtaggtgacaaaaacctttttgcttcaagagcaaaagaattgggatatagcttcgaaataagcacatttacagatatcaatgatgtaaatgaaaaagttgggtgtcttgaaattatgaagtgtccagacatctcaagcggcaggctaaattctattaactctgagtatgtaatcaagaatcttgattttggaattgacgcgtgtatgaaaagcaaaggtttagggttagtgactgggccaataagtaaagagaatattgttgaaggaggatatcccttctctggtcacactgagagaataatggaaaagactaacagtgatgatgtgctgatgctgctagcttcagaaagattaaaggtagctttggcaacaacacatatgccattaaataaggtttcagaatcgattacgacagatctaataatcaataaagtaaagattttaaatcaagagcttaaaacaaagttcaatattaaaaagcctaagatttctcttctagggcttaatccacacgcaggagaaggaggaaaattaggaaaggaagaaattgaaataataatacctgctgtaaaaaaattaattgcttctaatgttgatgtctctatgcccctatctgcagatacagcattcaataaaaatcttcttgacaaaactgatgcatattttgctatgtatcatgaccaaggacttccagtgctaaaagctttaagttttggagattcaattaatataactttaggtgtgccaattgtaagaacttcagttgatcatggagttgccttagacattgctggaaagggtattgcgaataattcctctttgaaaaatgctttctatgcagctgataacctaatctaa

SEQ ID NO: 206395 - DNA, 991 bp, Unknown
  Bacterial polypeptide expressing nucleotide sequence isolated from the Sargasso Sea
gatgaccaaacccgcgctgcagatcgcgatcacgactggcgaacccgcgggggtcggcccggagttgaccgtgcaggcgctgcgtgatgccgcgcagcgctggcccgatgcgcatttcaccgtgctcggcgatgcggcgctgctcgacgcgcgtgcggcggccgtcggcgccgaccgggccacgctggccggcagcgggccggtgtcggtcgcgcatcacgcgctcgccgtgcccgtgcaggcgggcaagctggacgccgtgaacggcccgtacgtgctcgggttgcttgacgccgcaatcgacggagcgctggcaggccggtacgacgcgatcgtcaccgcgccgctgcagaagagcaccatcaacgatgcgggcgtgccgttcaccggccataccgaatacctggcggagcgcacgcacacgccgcgtgtcgtgatgatgctggccggtaccggccacaagccgctgcgcgtcgcgctcgcgaccacgcacctgccgctgaaggacgtatcggccgcactcacgatcgacgggctcgtcgagacactcgcgatcatcgatcgcgacctgcggcgcgacttcggtctggccgcgccgcgcattctcgtgacgggcctgaacccgcacgcaggcgagaacggttatctcggccgcgaggagatcgacgtgatcgcgccggcgctggcccgcgcgaacgcgcagggcatcgacgcgcgcggcccgtatccggccgacacgctgttccagccgcgccatctcgcggacgccgattgcgtgctcgcgatgttccatgaccaggggctgcccgtgctgaagtatgcgacgttcggcgagggcatcaacgtgacgctcgggctgccgatcatccgcacgtcggtcgatcatggcacggcactcgatctggccggcacgggccgcgcggatccgggcagcatgatcgccgcactcgacacggccgtcacgatggcgcgccatcgccgtacggcctga

SEQ ID NO: 206396 - DNA, 967 bp, Unknown
  Bacterial polypeptide expressing nucleotide sequence isolated from the Sargasso Sea
aatgcctccgctgatactgacgaccggcgaacccgctggcgtgggtcccgagctcaccgtgcagctgttgcagcgccccctgccctcaccactggtgattgcgggtgatcctgatctgctgcttgaacgcgctgcgttactgagcctgcccttggcgcgtaaaggcaacgccctggtggcgcccggtggcgagacagcgttgttgcccgtcgcgcttggtgcgccctcgattccgggaaatctcgacgtcgccaatgcggcatatgtcatcgagatactggctgcggccaccgacggctgtcttaacggcacgttctcgggcatggtgacggcgccggtgcagaagagcaccctgattgatgccggcaacgattttgtcggccacactgaatttcttgcccagcgggctggcgtgacaacccccgtcatgatgctggtcacggatgagatgcgggtggcactcgtcacaatccatctggcgttgagtgaggtaccccgcgccgtcacgcaagacagtctggaggccgtcttgcgggtggttgattccgatcttcgcatgcggtttggcatttccgcgccggtgatcggcgtttgcggattaaatccgcatgctggcgaggcgggccatctgggccgggaggagcgagacgtcatcatcccagtaatagccaagttatgtgatgaaggtcttgtgttgaagggtcctttgcccgctgatacggcattcactcagcagaacctgcaaacactagacgtggtcgtcgccatgtttcatgaccagggcctgccggtcattaaacacgcagggtttggtgatgtcgtcaacatcacattgggactgccttttgtgcgcacgtctgtcgatcacggtactgcgcttgatctagcgggcacgggcaaggcggaggtcgtcagtttgagtcgggccctggacatggcgatccggttgagcggtgaccatttctga

SEQ ID NO: 206397 - DNA, 1003 bp, Unknown
  Bacterial polypeptide expressing nucleotide sequence isolated from the Sargasso Sea
atgaaaaattttgaaacaccattggcaattactatgggcgatccatcagggatagggcctgagattattttaaaatctgttgttgagacaaaattaaataattttcttatttttggtgatagtttagtttttgatagtttgattaaaagtcttggattgcctttgacaataaataagatttctgaattatctgaagctgtttttgaagaagactatattaatttatttgaaacaagtaagctaaaccatcttcctcattatggtaaaatttctaaagagtgtggcaaggttagctttgacgcaattatgaaatctatagagcttgcaaagcaaggtaaagtttcaggaattgtaactgctccaataagtaaaaaagctctaaacttagctcatattaactatcctggacatacagaaattcttgcgggttatagcaataataaagcagtctcaatgatgctgcttaataaacatattaaaacggttctggtaactttacattgctcgatgaaacaagctttagatagaataactattcaaaatgaacttgacgctataattaatgctaatcttggatgcaaactatttggtattgaaaagccagttattgcagtagctgctcttaatccacatgcgggtgaaaatggactatttggcaatgaagaaaaaaatataattgagcctgcaataaaattagctcaagacatggggattaatgcaatagggccctttccaggtgatactgtatttatgaatgccaaaaatggaaaatacgatatcgtagtatctcagtatcatgaccaagggttgataccaataaaatatgaaggcattgacgaaggagttaatgtaacaattggaatagattttttgagaacaagcccagatcatggtactgcatttgacatcgcagggaaaaacattgcttctgcaaaaagttttatcaactctatatatactattaaagctatgcaaaaagtgggcaaaagcccactaaaataag

SEQ ID NO: 206398 - DNA, 988 bp, Unknown
  Bacterial polypeptide expressing nucleotide sequence isolated from the Sargasso Sea
ttgaccactaaacgtattgccgttacccccggagaacctgcgggtatcggccccgatttagtcgtgcaactggctcagcaggcttggcctgctgagttagtcgtttgtgcggatcctgaattattagccagccgggctaaacgacttggccttcatgttacctttcgcccctatttgcctgatcaagccccaaaacctcaagcagcaggtacgctgacaatcgcccccttcaagctcgtcactgaagccgtctgtgggcaacttgatgagcaaaatagtacctatgtggttgagactctgcgttacgcaggtgaaaaaaacatgagtggcgagtttgatgccgttgtcaccggcccagtgcataaggggatcatcaatcaagcagggatttcctttagtggtcacaccgagttttttgcccatcaggctaactgccccgatgtagtgatgatgttagcaactcaaggtttacaagtggcactggtgaccactcatattccactggcttatgttgctaaagccattacacgccaacgcttacatcatataatcaagattttacacgctgaccttatcagcaagtttgccattgcttcgcctaagatttatgtctgtggcttaaatccccatgcgggtgaagacggccatcttggccgggaagaaatcgatgtgattattccggcactgaatgaactgcgtgaagaatatcaaatgaacattgtcggccctctacccgccgataccctgttccaacctaaatatttacaggacgcggatgtcgtcttggccatgtaccatgaccaaggcttacccgttctaaagtcacaaggatttggcaaatcggtaaacattaccttaggtttaccttatatccgtacctcggttgaccatggtacggcgctcgatcttgcgggaactggcaaagccgatatcggcagttttgtctgcgccttgaataaagccattgagttatcctcaaaaaactaaa

SEQ ID NO: 206399 - DNA, 1720 bp, Unknown
  Bacterial polypeptide expressing nucleotide sequence isolated from the Sargasso Sea
cgaaacggcggacgacctgcaccgggtcgcccgcgcgtcggctacgttgcgcggcgtgttctgggtcggctcggcagggctcgcaggcgatctgatgtgcgcattgaatctggccgatgcggtgcagctcgccacaccggcgcagcacacgccgggtcagccggtactgaccgtggtcggcagcatgtcgagcatgtcccacgcgcagatcgagcggctgaaaacagaagcgggcagcgcgctggttgcgttcgaagtcgacacgcggacgctgcttgccgagccgcccacggaagcgaatgcgaatcttccgcgcaaggtgagcgcagcgctgcaacagggacgccacgtggtcgtttcgctgagccagtccgatcgcagcagcgtcgccgacggcctgctgttcgcccggcgtctcgcagcattgcttgcgcccacgctgccgttcgccggcagcgtaatcgctaccggcggcgagaccgcgcgcgcgttgctgtccgctgccggcatcggccagttgcggattgtcgaagaaatcgaaagcggtgtgccgctgctgcacgcggatcacaacgggcgccgcttttacgtcgttaccaaagccggcggtttcggccatcccggcacgcttcatgttgcctggcgaaaactcgccggcgttcaacgccttgccctgcctatcgaggccaccctcaaaggacttaccaccatgacctatcgtccagttatcggcatcaccatgggcgatgctgccggcgtcggccccgaaatcgtcatgaaggcgctggcccatgcctccgtctacgaacagtgccgaccgctcgtgatcggcgacgccgcgcgtttgcgcgatgcgggccagcgcgcgggcgtcgcgctcgaagtgcgctcgatcgagagtcccgcggacgccggcttcgagtgcggtgtggtcgattgcatcgatctcgacctgattccggcggatctgccatacggcaagctctcggccatcgcgggcgatgcggcgtatcagtacatcgcgcgcacggtcaaactgacctcggccggcgaactggacgcgatctgcacggcgccgctgaacaaggaagcgctgcacgcaggcggccacattttccccgggcatacggagatgctcgcgcatctgacgggtatcgacgaagtgtctatgatgctcgtcgcgccgaagctgcgtgtgattcacgtgacgacgcacatcggcctgctcgatgcgattcggcgcattgaaccgggactcgtgcaacggaccatcgagcgcgcgcatgaaacgctggtgcgcgccgggatcgacaacccgcgcatcggcgtctgcgggatcaatccgcatgcgggcgagaacggcttgttcggctacggcgaggaagaggaaaagatcattccggcggtgcaggtgctgcaggcgcgcggctgggacgtcgaaggcccgttgcccgccgacacgctgtttttccgcgccggccgcggtgacttcgatgtggtggtcgcgatgtatcacgaccagggccacggtccggtcaaggtgatgggcctcgaggctggcgtcaacgtgactgtcggtctgccggtgatccgcacctcggttgatcacgggacggccttcgacatcgccggcaaggggatcgccgacgaacgcagcatgctcgaggcgctgaagcaggcactcgatctcgcgacgcggcactccgagcaggaagcctga

SEQ ID NO: 206400 - DNA, 944 bp, Unknown
  Bacterial polypeptide expressing nucleotide sequence isolated from the Sargasso Sea
agctctaattcactcggaaatatacgagtggtgtaatcctgtaattatcggaaatgccgcttctttgagagagactgtgaagatgctggacattgatatgtcaatcaatcacattagtgagaccgatatagaaatgtctagagtaaatccaaatgcagcaagtgtaattgatataggcaatttgaattatgaagatgtaactattggtgaaataaacccaggatgtgggaaagcggcaatggaatgggtgagtcatgcaggcagattagcaatgaggggagcaatcggaggaatcgcgactgctcctctgaataaagaggctgctagtttggcggggtacgaagcgatagggcacatggagctgttacaagaactaacaggttctaaaactgtagctactatgttaatagcaaaaaaccttagagtggttcatttaaccactcataggtctttaagggtagcatgtgattatgtcaaaaaagataggatcttggattatttgcgtataacggatgaaaatttcaaaaagtggggatttgaaaaccccagaataggggtcgctgcattaaatcctcacggcagtgacggtggtctattgggtgatgaggaaaatgatgagattttgccagctgtaacacaagctaaagctgagggaatgacagtagaaggcccgattcccgctgacataatatttcaccaagctataaatgatcaatatgatgcagtattgtgtatgtaccacgatcaagggcatattccggtaaaggtttatggttttgaagagagcatcacagctaacttaggattgccttttgtgagaacatcagttgatcacgggacagcatttgacattgctgggaaaggaattgctgaccctctaagtatgatcgaggcgattaagctagcttctactttaatttcaggatctagattatccagttagt

SEQ ID NO: 206401 - DNA, 994 bp, Unknown
  Bacterial polypeptide expressing nucleotide sequence isolated from the Sargasso Sea
agcgtcggagatgagtctggtgtaggaccagaaataattttaaaagctcttggttctcatgagatgccaaaaaatattgattttatattagttggctcaaaaaaaaatttacaaagtacatatattcatcttaaatccttaggattaaaaaatctggcaaatcctaataatttagaaattcatgatctcaaaatttcttcatctgataatgaatccaaagtaagttatggcaattcaagtttctattacttaacaaaagcaattgaaattgtaaaaaaatatcctaattcagcacttgtaactggcccaatttgcaagaaatcatggtcactagcaggtcattacttcgcaggacagactgaagtattagcaaaattgtgtagagcaaaaaatattggaatgctattcacagctaaatcaccaattactggttggagattcaataccttacttgctacaacccacatagcactttgtgaggtaccaaagaggctaaatacaaaattaattcactctaaattagatcttttcaaagagttttgtaataactatagtgaaaaaccaactttaaaagttgcaggcttaaaccctcatgctggcgaagaaggtattttgggtaatgaagaaagagattggcttaatgatgcattgattgcttggaatgaaaagaataaagatattagattaataggccctttatcaccagatagttgttggaattcttcagccaaagcttggagacacaaagatgctgaaaagcatgatggcattcttgctatgtatcatgatcaaggtttaataccaatgaaggttatagctcttaattactcagtaaacactacaataggtttaccttttatcagaacatctccagatcatggaacaggatttgatattgctggcaaaggaatagcgcaatctcaaagcatgattgaggctataaagactgcaatcgaaatgactaaaaattcaagactgcttaacacgcattaga

SEQ ID NO: 206402 - DNA, 985 bp, Unknown
  Bacterial polypeptide expressing nucleotide sequence isolated from the Sargasso Sea
attgaaaaaaataatttattctcctggtgaacctgccggtattggtcctgacataataattaaattatgttgctctaactcatgggaaaaatataaatcatcaatagtctcaattggagatcctgaattatttattagaagagctaaattattaaaaaagaaactaaaaatagttgaagctaattcgttagaagatttaaaaaaaaataaaaaaaatattcttcaaataatcaaagtatccgaatgtaaaaattatcaagcaggtgaactatcagctaacaatgcaaaatatgtaatagataacttagactatgcaattgatcaaacactaaatatagataaagtagcacttgttaccggccctattagtaaagaaaatattacctcaatcattaagaatttttcaggtcatactgaatatattatgaaaaatactaaaagcaaagatgtacttatgatgcttgcgtctccaaaattgaaagtggcactagcaactacccatgttcctttaaaaaaagtatctaaaatgataaaaaaagaattaattgttaataaaattaagatacttaataacgaactgaaaaataaatttaatattaaaaaaccaaaaataagaatacttggccttaatcctcatgctggtgaaaacggaaaaataggcacagaggaattagatcatattaaacctgctgtgaggatcctcaagaaaaataatatagatgtttcttatccaatttctgctgatactgcattttctattggcctattaaaagatacagacgcatatcttggtatgtatcatgatcaagtgcttccagtattaaaagctttaagtttcggcaactcaattaatattactctcggtattccaattattagaacatctgtagatcatggtgtagcccttgatgttgctggaacatcaaagtcaaatacatcctctttagatcttgcaattaaaacggcaataagattgactaaatga

SEQ ID NO: 206403 - DNA, 999 bp, Unknown
  Bacterial polypeptide expressing nucleotide sequence isolated from the Sargasso Sea
gatgccaaagaaaccattaatagctgtgacacttggtgacccgtcgggtgtaggtccagaggttgtcgtcaaagctctggcaaatgctgaggtacatgagtctgctaatgtgtttgtcattggtgcggtcgaacctgtgagacaggcaattgagcaggttggacttgatgtggctacatgttcggtaaccaatattccggaagacgaaagcgatccggggtgcatttcagttcttgagagtacgccgtccactgatatgaatttccctatgggcatgatctcggaggaatcggctcgtgcatcacacgaatgggttgagacagctactcagttagccctagctggacgagtggacgcaatttctacggccccagtgaataaagaagcttggcggctggctgggtttgcggacaagggtcatcaggaagtattccagagaatcactcaggccgagtacgtggcaacgatgctggtgagcggtgatttacgctgtatgcatttgtctactcatttatccgtctcgcaggcggctgactacgttacagaggcgaatgttctacgcgcgctagaactgacacagcaatattttctgaagtggggttttacatctccgcggataggtgtggctgctttgaaccctcatgcaagtgatggaggactgataggtacgactgaagacgacgagatcactccagccatcgaccgtgccaaaacactaggaattaacgctattggcccagtaccagcagatacagtgtttaatcaggcaatcgatggtctctatgacgtagtgttggttatgtatcacgatcaagggcacatacctattaaagtgtatggttttgaaaacagtatcacggtaaatctaggtattccgtttatccggacatcggttgatcatgggacagcgttcgacatagccggtaagaacaaggctcaggctgtgagcatggtcgaggctatttcattggcaacatcactcagtttagggagttggac

SEQ ID NO: 206404 - DNA, 754 bp, Unknown
  Bacterial polypeptide expressing nucleotide sequence isolated from the Sargasso Sea
ttgttttacacagttatagctgaaaagtgtgataaatatactttaggaaacccatcgtcagataacgctagttacattctttcaaatttagaggctgcatcaaaatttgcaaatgataacaatgcaaaccttgtgacaggaccgataaataagagtgtaatttcttcagttttgtcaaatttttctggccatactgattttctaaaaaaacaatttctatgtgaagaggttttaatggtcttaagcaactcaaaattaagagttggtcttgtaactacacacataccacatgcaaaagtacatgaatcaatctctgtagacaaaatagttaaaaaaggtattctttttgcaaatggattaaaacaaaacttcggtatctctcatccaaaaatttgtgttctaagcttaaatcctcattctggagagcaaggtttaattggtgatgaagaaattgaaataatatcaccagcagtggatatgctttgtaataaaaatgttaatgcttttggccctctaccagctgatacagcatttcttagaaatgaatttgatggatttctttcaatgtatcatgatcaaggacttccagtagtaaaaacagttgatttccataggacaatcaactcaacattaggtctgccttttcttcgaacatctgttgatcatggtacagcagaggatattgcagataaactgattgcaaatcatcaaagtatgttggaagctattaaagtagctggaaatgtacactaat

SEQ ID NO: 206405 - DNA, 976 bp, Unknown
  Bacterial polypeptide expressing nucleotide sequence isolated from the Sargasso Sea
atgataaaaattgctgtctcttctggagacccagccggagtaggtcctgatatttgcataaaagcctttggtcaaaaaaaatcttataatttcgtacctgtaatttttggcgatcaagatatcttaaaatctagagcaaacagattaggtatcaaagcaaatatccagacttacaaagagaatgcagaactctctaatgaagcgctttgggttgttgatcagccgtgtgggacatctataacaccaggaaaacctgatccagattgcgctaattttacaatttctattttcgagcaggcggtagagaaaacgatttctagtgaatttgatgctgttgttacatgccccatcaataaggagataattaataaaggaggcatacaatttaccggacatacagatgaattagctaaaatagctaacattgacaatgtggtcatgatgcttgcaaatgaagaattaaaagttgccctagctactacacacctacccctgagagaagtaccgaatagaattactcaagatcatattgaaaagactttgttgatcatcaataaagatctgaaagagaagtggaatataaaaaatccttttatcaaaatccttggactaaatcctcacgctggtgatggaggatttataggttcagaagataaaaccatattaatgcctgtcattgaaaaactgaattctgaaggaatgaatttatcgggacctcattctgcagacactgcttttattaataaaaaagaacaagataaagtagacgttatattggctatgtatcatgaccaaggattgcctgtaattaaaacgattggatttggcaccgtaaccaacatatcacttggtttgccattcataagaacttctgttgaccatgggacagcatatgacttagctggctcaattgaagtagatgaatcaagtttaattgaagccactaaagtagctgctaagctatctagaagttgag

SEQ ID NO: 206406 - DNA, 988 bp, Unknown
  Bacterial polypeptide expressing nucleotide sequence isolated from the Sargasso Sea
ttgaccactaaacgtattgccgttacccccggagaacctgcgggtatcggccccgatttagtcgtgcaactcgctcagcaggcttggcctgctgagttagtcgtttgtgcggatcccgaattattagccagccgagcaaaacgactcggcctgtctgttacttttcgcccttacctgcccgagcaaccgcctaaaccgcaggaagcaggcacgctcaccattgcgcctttcaaactggtgaccgacgccgtttgcggccagctcgatgagcagaacagtgcctacgtagttgaaaccctgcgttatgcgggtgagaaaaacatgagcggcgagtttgatgccgtagttactggcccagtccataaagggatcatcaatcaagcggggatttcctttagcggccataccgagttttttgcccatcaggccaactgccccgatgtggtcatgatgttagcgactcaaggcttacaggtggcactggtgaccacccatattccactggcctatgtggcaaaagccattacgcgccagcgtttgcatcatataatcaagattttacacgctgaccttatcagcaagtttgccattgcttcccctaaaatttatgtctgtggcttaaacccacacgcgggtgaagacggccatcttggccgggaagaaatcgatgtgattattccggctctgaatgaactgcgtgaagaatatcaaatgaacattgtcggccctctgcccgccgataccctgttccaacctaaatatttacaggacgcggatgtcgtgttggccatgtaccatgaccaaggcttacccgttctaaagtcacagggatttggcaaatcggtaaacattaccttaggtttaccttatatccgtacctcggttgaccatggtacggcgctcgatcttgcgggaactggcaaagccgatattggcagttttgtctgcgccttgaataaagccattgagttatcctcaaaaaactaaa

SEQ ID NO: 206407 - DNA, 1036 bp, Unknown
  Bacterial polypeptide expressing nucleotide sequence isolated from the Sargasso Sea
atgaattttcaaaatacaaataaaccgtcaaaagtcgtattaagcgtaggagatgaatcaggtattggacccgaaataatcttaaaagcactctattctaatgagataccagaaaatattgaatatatattggttggatcaaaaaaaaatctacaaaatacgtatgaaaaccttagatccttaggattagaaaatcttgcaaatcccaaaaatttaaaaatacaggatatcgaaatttgtccatcaaataatgaccctaaatcaagttacggtgattcaagtttccaatatttaaaaaaggcaatagaaattgtaaaacaatatcctaatgcagcattagtaacaggaccaatatgtaaaaaatcatggtctctagcagggcattacttctctggtcaaaccgaagtactagcaaaatcatgtagtgtaaaaaacgttggcatgttattcacagctaaatcaccaattacaggttggagatttaatactttattagctacaacccacatagccctttctgaggttcctaagaaattaactaaagaattaatccactctaaattggatcttttcaaagatttttgtattacctatactgataaacctactttaaaagtagcaggattaaaccctcacgccggtgaagagggtattttaggtcatgaagagaaagattggctcaatgatgcattaattacctggaatgaaaagaatagagatattgaattattaggccctttatcaccggatagttgctggaatacttctgtaaaagcttggaatgacaaaaattctgaaaagcatgatggcattcttgctatgtatcatgatcaaggtttaataccaatgaaagtgatagctcttaattactcagtgaataccacaatcggtttaccttttataagaacatctcctgatcatggaacgggatttgatattgccggcaaaggagttgctcaatctcaaagcatgattgaggctattaagtcagccgtagaaatgactaacaattcaagactgcttaacacgcattaaa

SEQ ID NO: 206408 - DNA, 985 bp, Unknown
  Bacterial polypeptide expressing nucleotide sequence isolated from the Sargasso Sea
ttgaaaaaaattatctactcgcctggagagccggctggtattggaccagatttaataattaagttagcagcttcaaaaaaatggattgatttcaaggttccaattgttagtattggagatccaaaactttttctggatagagctgatcttcttggcaaaaaaataaaaattaatgaagttgattccatagacgaagttaaaactaatcaaagaaactctatgcaggttattaatattacaaaatgcaataaaactgctgctggaaagatttataaaagtaatgctcactatgtattaaataatctcgactatgcaattaaacaaacattgcataataaaaaaactggcttagtaacaggccctcttaataaagaaatgattatctcaattgataaaaaatttactggtcatacagagtacatccaaaaaattactaaaagcgatggtgttctaatgatgttagcttcagaacagctaagagtagcccttgcaaccactcacattccaataaaaaatgttgcaaaaactatcaccaaagaattaattattaataaagtgaaaatattaaataatgatttaaagactaaatttaatattaaagatccaaatattaaaatcttaggtctaaatcctcatgcgggtgaaaatggaaagataggtaccgaagagctacttcacatcaaacctgcccttaaagacttaagaaagaaaaaaattaatgtgtctatgccattatcagcagatacagcattttcaaaaaaaaacttaaaagaaactgatgcatttttaggaatgtatcatgatcaagtcttgccagttcttaaagctcttagttttggcaactcaattaatataactctcggggttccaatcataaggacttcagttgatcatggagtagctcttgatatcgctggaacaaaaaactcagatacctcttcgctggaacttgcaataaagactgcaaaaaaacttatcaaatgaa

SEQ ID NO: 206409 - DNA, 1009 bp, Unknown
  Bacterial polypeptide expressing nucleotide sequence isolated from the Sargasso Sea
ttgaataataataacaaaactaaaatagctatgactttaggtgatccttcagggatagggcctgaagttgtggcgaagtcgattcaacatctttctaataagggagacgaattaccttttatcataggtgatactaatactgtaaatgatgcttttagcaatttggatactgatattcaagtaaaaaagataaaaaatgtttctgaaattggaagtgaatcaaaatctatatttgttctagataatgaaaagtattctgataagaactttattaaaggggagaattctgtggatgcgggaattgcgtctcatgaatgggttgaaatagccactgatttagcaatacaaaataaagttgatgctatttgtactgcccctattaataaggaaagttggcaattggcaaaatttaaggatattggccaccaagaaattttcaagagaaaaagtaattcgaactatgtagctacaatgttagtatcaggtaaattaagatgtatgcacttatcaactcatctttctctatcaaaagcttgtgattatgttacaacagaaaatgttgaaagagcaataaggctaactcaaaagcactttgtagagtggggctttcctaaaccaagaattggtgttgcagcattaaaccctcatgcttctgatggaggacttataggaaatacagaacaagaagagattttaccagcaataataaactgtaaaaaagatggttttaatgtaactggtcctcaccctgctgattctgttttttatgatgcaataaatgataaatatgatgttgttgttgtaatgtaccatgaccaaggtcacattcccattaaggtatatggttttgaacaatctatttcagttaatttaggaattccatttatacgaacatccgttgatcatggtacagcctttgatattgcaggtaaaaatattgctgatcctactagtatgatagaagcaattactttagctaatagtttggcatatgattcagaattatgat

SEQ ID NO: 206410 - DNA, 690 bp, Unknown
  Bacterial polypeptide expressing nucleotide sequence isolated from the Sargasso Sea
tgcgccaggcgtgtcaggctaatatggatggcgacttcgacgctgtcgtcaccggccccgtacataaaggcattattaacaaagcgggcgtgtcatttagcggccacactgaattttttgcctatcagtccaacaccattgatgtggttatgttattggcaactgaaggccttaatgtggcacttgccaccacacatattccccttgaatatgtagcgaaggctatcactcgagaacgtcttcataaggtcattcatatcatcaacaccgaccttaaattgaagtttggcgttaaagaacctcatatctacgtatgtggtctgaaccctcacgcgggtgaggacggtcatattggtactgaagaaatccacactatcattcccgcgcttgacgagcttagagaagaaggcttaaagatcacaggtcctctgcctgctgacacaatatttcagcccaaatacttagaaaacgctgatgtggtactcgctatgtatcacgaccaaggcttacccgtgctaaaatataagggttttggggcgtcagtgaatatcacgctagggttacccttcgttcgtacctcggtagatcacggtactgcgttagatttagcaggaactggtgaagccgacgccggtagtttcagaaaagcattggaaaaagccatcgagcttgcacatcatcaacaatgag

SEQ ID NO: 206411 - DNA, 1003 bp, Unknown
  Bacterial polypeptide expressing nucleotide sequence isolated from the Sargasso Sea
atgaccaaaattgctgtctcttccggagacccggcaggaataggtccagacatatgtatcaaagctttcgggaataaaaaaattctaagctataagccaatcgtgtttggcaatatagatctttttatcgaaagagctaaacaaataaatcaagagatagacataagagagtataaaggcgaggaagaagactctatctctaatgacttcctgtggatggtcgatatgcccataggagtagatatttcttcgagcaaaccaaacccgaaatctgcagagtacataatcaatatttttgaagagtcagtaaacaaaactatttcaaaagagtttgatgcaatagtaacttgtcccatcaataaagaaataataaatgaaggaggcattcctttcacagggcatacggaagagttagcaaaattaggaaaaactaataaggttgtcatgatgttggctaaccaaaaaatcaaggttgctttggcatcaacacacataccattaaatgaagtatctgattttattaataagggtcatattgaagaggtagtagaaattattcatacatcattgagagattattggaatgcaaatgatccactaattaaagttctagggataaatccacatgcgggtgatggcggttatattggtaaagaggaaaaagaagtcatatcacctgccctgcagaatttaaaagaaaagggaatttataccattggtccaatatcagcagatactgcttttatagaaaaagatggaaccaaaaaggcagatgcatttctagcgatgttccatgatcaaggtcttccagtaatcaagactatgggtttcggagagacagttaatataactttaggacttcctttcataagaacgtctgtagatcatggaacggcatacgataaggctggtctaggcagtgctgacgaatctagtttgatagcggcaatggaaatggccttttcaatgagcaaaaaaaatctaaaagatgccacgagctaaa

SEQ ID NO: 206412 - DNA, 988 bp, Unknown
  Bacterial polypeptide expressing nucleotide sequence isolated from the Sargasso Sea
atgagcaacaaaaatcgaccagttgtaattacgtgtggcgatccagctggcgttgggcctgaggtggccgtttcggcttggaaagccttgaaggatgaaattcccctatgcattattattgaccctgatttcctaccagaaaatattaatataaaaattcttgatcgagcgccgctcttatcggacgttgagaaaaatgtcctaacagtcattagacacaagtttgcagaacctagagttccaggcaaaccaaacccaaaaaatgctgaggcgattattagagcagtagaacgcgcagtccattttataaaaaatggacaatgttctgctatttgcacaatgccgataagtaaatcaattctaaagaatggaacagatttcccctttccaggacacacggaatacttagctcacttggacggaaaaaatacatatgggatgatgctagttaataaatatttaagagtagttcccgcaaccattcatattcccgtcaaagatataactaagtatttgactgcagaattaattgagaaaacaattaagactacgcatcaagaacttaccagtaaattttcaattttaaatccatgcatttggatctcaggactgaatcctcatgctggagaggccggaacaattggagatgaggaacaaaaattcataataccagttatcaaaaaacttcaatcagagggatataatttgagaggcccaatctccgcagatactatgttttacggaaaaaaaagacgtagatttgatgctgcagtctgcatgtatcacgatcaagcactaatacctataaaaacactagattttcatactagtgttaacttaacaattgggctgagtttcataagaacttcacctgatcatgggacagctttcgatatagctggtaaaaatttggccaaccctacttcgactatagaagctataaaattggcttggaatttgtcaaaaaaggagcaaagggatcgataaa

SEQ ID NO: 206413 - DNA, 970 bp, Unknown
  Bacterial polypeptide expressing nucleotide sequence isolated from the Sargasso Sea
ttgaaaactattatttattctcccggtgacccagcaggcattggaccagacctatttttaagccttttaaatgaagatttctttagatttataaaagcaaatgttgtttgtataggcgaccaaaaactttttgcttcaagagcaaaagaattgggatatagcttcgaagtaagcacttttactgatatcaatgatgtaaatgaaaaagttgggtgtcttgaaattatgaggtgtccagacatctcaagcggcaggctaaattctattaactctgagtatgtaattaagaatcttgattttggaattgacgcgtgtatgaaaagcaaaggtatagggttggtgactgggccaataagtaaagagaatattgttgaaggaggatattccttctctggtcacactgagagaataatggaaaagactaacagtgatgatgtgctaatgctgctagcttcagaaagattaaaggtagctttggcaacaacacatatgccattaaataaggtttcagaatctattacgacagatctaataatcaataaagtaaagattttaaatcaagaactgaaatcaaagttcaatattgaaaagcctaagatttctcttctagggcttaatccacatgcaggagaaggaggaaaattaggaaaggaagaaattgaaataataatacctgctgtaaaagaattaaaagcttctaatgttgatgtctctatgcccctatctgcagatacagcattcaataaaaatcttcttgatgaaactgatgcatattttgctatgtatcatgaccaaggacttccagtgctaaaagctttaagttttggagattcaattaatataactttaggtgtgccaattattagaacttcagttgatcatggggttgccttagatattgctggaaagggtattgcgaataattcctctttgaagaatgctttctatgcagctgacaacctaatctaat

SEQ ID NO: 206414 - DNA, 970 bp, Unknown
  Bacterial polypeptide expressing nucleotide sequence isolated from the Sargasso Sea
attgaaaacaattatttattctcccggtgacccagcaggcattggaccagacctatttttaagccttttgaatgaagatttctttagatttataaaagcaaatgtggtctgtatcggtgatcaaaaactttttgcttcaagagcaaaagaattaggatacagcttcaaaataaatacattttctgatatcaatgatataaatgaaaaagttggatatcttgaaattattgagtgtcctgacatttcaagcggtaacctaaatccaatcaactctgagtatgtaataaagaatcttgattttggaattgatgcatgtacgaaaagtaaatatacaggattagtaactgggccaataagtaaagagaatgttgttgaaggaggatattccttctctggtcatactgagagaataatggaaaggactggtagtgatgatgtgctaatgttgcttgcttcagagagattaaaggtagctttggcaacaacacatatgccattaaataaggtttcagaatcgattacgaaagaacttataattaataaagtaaagattttaaatcaagagttaaaatcaaagttcaatattgaaaaacctaagatttctcttctagggcttaatccgcatgcaggtgaaggaggaaaactaggtaaggaagaaattgaaataataattcctgctgtaaaagagttgaaagcttctaatattgatgtctctatgccactctctgcagacacggcattcaataaaaaccttcttgatgaaacagatgcatattttgctatgtaccatgatcaagggcttccagtgctaaaagctttaagttttggagattcaattaatataactttaggtgtgccaattgtaagaacttcagttgatcatggggttgccttagatattgctggaaagggtattgcgaataattcctctttgaagaatgctttctatgcagctgataacctaatctaa

SEQ ID NO: 206415 - DNA, 985 bp, Unknown
  Bacterial polypeptide expressing nucleotide sequence isolated from the Sargasso Sea
ttgaaaaaaataatatattcaccaggagagccagctggtattggccctgatttaattattcaattagccgcatcaaaagcttgggaaaattttaaaatacctatcataacaattggagatccagttctatttatagaaagggctaaaaaattgaaaaaaaaggttaaagttcttgaattagattcacttaataatatacaaaaaaataatcgttctttaattcaagttttaaaggtttcaaaatgtataaatacatctgcagggaagctttcaaaaatcaatgctaaatatgttttagatgttttggactattctattaaggaaacaattaaagataaaaagtctgctctcgttacaggaccattaaataaagaaacaattatttcaattaataaaaaattcactggtcacacagagtatattcataaaataaccaaaagtgatgacgtgttaatgatgcttgcgtcgaacaaattaagagttgccctagcaacaactcatatacctcttaaaaatgttccaagaaaaattacaaaaagtttaattgtgaaaaaagttaaaatccttgataaggatttgaggaataaatttaaaattaagaatcctaaaataaagattttaggattaaatccacatgcgggtgagaatggtaagattggaaaagaagaactagaacatataaaacctgctgttaaggaattaaaaaaacaaaacattaatgtttcaatgcccatttcggctgatacagccttttcacaaaaagttttaaatgagactgatgcctatcttggcatgtatcatgatcaagtcttgccagttttaaaggcactaagctttggaaattcaattaacataactcttggtgtcccgattataagaacctccgttgatcatggtgttgctctagatattgctggtacaaataaatcaaatacatcttcactttcgcttgcaataaaaactgcaaaaaaattgattaaatgag

SEQ ID NO: 206416 - DNA, 460 bp, Unknown
  Bacterial polypeptide expressing nucleotide sequence isolated from the Sargasso Sea
aaaaaatataaggaaatcaaaatttgttgagataatcaaaatcttgcatttgggcttaaaaacaaaatttaaaattaagcacccagcaataactgtacttggattaaaccctcatgctggtgaggatggaaaaatggggtcagaagagatcaaaataattaatccagcagttcaaatttgcagagatatgggtataaatgcgtcatatgcaatttcagctgatacagcctttaataataaaaaattaaatacaactgatgcataccttgcaatgtatcatgaccaagccctaccagttttaaaagccttaagttttggcgaagcggtaaatatcacactaggaacatcaattgtaagaacatctgtagaccacggaacagcattagatattgctggaaaaataaagccaaatcttggatcaatcaaagaggcaattaaatcagcagaaattcaactttaa

SEQ ID NO: 206417 - DNA, 988 bp, Unknown
  Bacterial polypeptide expressing nucleotide sequence isolated from the Sargasso Sea
ttgaaacaactactttactctcccggtgaacctgcaggtattggtgtggattcaatcttgcgcttatcaaaactgaaattctggaaagaaatgaatgcaagtttggtttgcattgctgacttagaattgctgagatcaagagcaaaagtactaaatttaaaacttagatttaaagaaattaaatcattgaataaggctgagcagaataaaaaaggcactattcaattctttcagatagctaaatgtatagattgtactccgggtagattaaatcccgaaaacgcgcaatatattattcaaaatcttaactttggtattgatcaagccttaaaaaacaaaaatataggcttggttactggcccaatacaaaaaagcaatattattgaaggtggatttaaatcttttcaaggtcacactgaatggattaaaaagcatactaaatcaaaagaggtagtcatgctgcttgcagcaaaaaatataaaagtagcccttgcaacaactcacattcctcttgcagaagtatcgaaaaatattcaaaagttaaaacttgtggaaataattaaaataataaattctggccttaaaagtaatttcaaaatcaaaaacccctctataaaagtgcttggtttaaatccccatgctggagaaaatggcaaaattggtaaagaagaattattaaaaattaatccagcagtaaaaatatgtagagaaactgggattaatgtttcgtatgcaaggtctgcagatacagccttcaatagtgatcaattaaaagaaactgatgcatatcttgctatgtatcatgatcaagctttgccagtgctgaaagctttaagctttggaaaagctgtcaatattacacttggtacccctttagtaagaacttctgttgatcatggaacagccctagagattgctggcaaaattaaaccaaacctaggatcaattaaagaagctataaagctggctgagattcagcttcaatgag

SEQ ID NO: 206418 - DNA, 952 bp, Unknown
  Bacterial polypeptide expressing nucleotide sequence isolated from the Sargasso Sea
tggaggtcacgctcaaggcactgggcgagcagcaggcttcctgcgtcactccaaccggttctggtcggctgccgtcgcagcctgatggccacccacgcccgcctcctgcagcagggcatcacagctgtcgccgatcccgatcagctgatcattgacgaccaacccctggaggtatccgttcaacccggacaaccgacaacagccggtgccgcagcgtgcttccgctggctgacccactccgttgcgtgtgtgcagcaagggcacggtcgtgccctggtcaccgcaccgatcgccaagcacctctggcatgctgcaggccatcactatcccgggcagacggaacggctggctgaactcgccggttcacagcagtcctcaatgctgttcacggccgtcgcaccccatgggacctggcgactcaacacgttgctgaccaccacgcaccttcccttcagccagatcaccgcagcgctgaccccggaattggtggagcacaaattgaatgtgctgctgaacttctgccagcggttccggcccgaccctcatctggtggtggcaggtctgaacccccatgccggtgaagcgggtcgactcggacaggaggaggacacctggctgtctccactgctcaagcgctggcgccaggagcatccttccgtgcggctggatggccccatcccgcctgatacctgttggttgagcgcagctcaggcctggaaacaaccggacggctcaggcccggatggatatctcgcgctttaccacgatcagggcctgattccggtgaagttgctggcgtttgacgccgccgtcaacaccaccctggaactgcccttcctccgcacatcaccagatcacggcaccggattcgacatcgccggccagggtttggcccgaccggacagcatgatcgcggccctgcaggcggcttgggatctcacagcggcctagg

SEQ ID NO: 206419 - DNA, 1012 bp, Unknown
  Bacterial polypeptide expressing nucleotide sequence isolated from the Sargasso Sea
catgacaagcgccgcgcagcctaccagccttccgttgcagatcgcgatcacgaccggcgagcccgccggcgtcggccccgagctgaccgcgcaggcgctggcgggtgcggcggcgcactggcctcacgcacagttcaccgtgctgggcgatgcggatttgctggccgaccgcgcgcgcgcggtcggggtcgattgggctgcgttgctggcgcaaggcaagcgcgtgcgggtgcagcataggccgctcggcgcgccctcgctggccggcaagctggacgccgccaacggccgctacgtgctcgatctgctcgactgcgcgatcgacggcgccgtggccggcacgttcgacgcgatcgtcaccgcgccgctgcagaagagcaccatcaacgacgccggcgtcccgttcaccggccacacggaatatctggccgagcgcacgcacacgccgcgcgtggtgatgatgctggccggcacgggcaagcgcccattgcgcgtcgcgctggctaccacgcatctgccgctcaaagacgtctccgccgcgctaacggtcgacgggatcgtcgagacgctgcgcatcgtcgatcacgatttgcgccatcattttggtttgcccgcgccgcgcatcctcgtgacggggttgaacccgcatgcgggcgaaaacggttatctgggccgcgaggaaatcgaggtgatttccccggcactgaagctcgcgaacgagcaaggcatcgacgctcctggcccctatccggcggacaccttgttccagccgcgttacctggagcaggccgactgcgtgctggcgatgttccacgatcagggtctgccggtgctgaagtacgcgacctttggcgaaggcatcaacatcacgctcggcttgccgatcattcgcacctcggtcgatcacggcaccgcgctcgatctggccggcaccggccgagccgacgcgggcagtctgatcgccgcgatcgatgcggcggtttcgatggcgcagcaccgccgcgcgggctga

SEQ ID NO: 206420 - DNA, 991 bp, Unknown
  Bacterial polypeptide expressing nucleotide sequence isolated from the Sargasso Sea
aatgactatagcagttacgagtggtgatccctccggtattggcccagagatagtacaaaagtcatggatttatttaaaaaacaacccgtctaatgagtttttctggataggagatcctcttcatttgccagataaaagcataccatggcaacctatagtgcatccaaatgaagtctcacaaaattttagttcggcgctaccagttctagttcataagttcgctcatccacttaaaattggatgtcaccagcctgaaaatgcaaatgatattatcaaagtgattaaaaaagcagtgcgcttggtaaaagacaatgaagcggcagctttatgtacgagcccaatcaataaagatgttttaaattctggaacacaatttccatttttggggcatactgagtttttagcatatttggataatatcgaacatccagttatgatgttggcttctccaaaattaaaggttgtgccagcaacaatccatatcccaatcaaagaggtctcaaaccgtctatcaattgagggcttaacaaaaaccatcaaaataacaaacgacgctatgaaagataaattcggccttgcccagcctgttatagctgtttcaggactaaatccgcacgccggagaaaatggaaagttgggattagaagaaaaagaaataataatccctgcaatacgtaatttaaaagactcgataaatataattggaccactatcggctgatactttgttccactcgactgctcgggcaaaatatgacgtcgccatcacaatgtatcatgatcaggcccttataccattgaaaacaattgggtttgaggaaggggtcaatataactttaggcatatcttttgttcgcacttcgcccgatcatggaactgcttttgatcttgcaggacaaaatttggcagatgaaacatcgattataaatgcaataaaaatggcagcttcactatctcgaaagcaacagaatggaaaaacttcccccgcttaa

SEQ ID NO: 206421 - DNA, 749 bp, Unknown
  Bacterial polypeptide expressing nucleotide sequence isolated from the Sargasso Sea
ttatttaaagaaagcaattgaaatcgtaaaacaatatcctaattctgcattggtaactggaccaatttgtaagaaatcatggtcactagcaggtcatcatttctctggtcaaactgaagtattagcaaaatcatgtggagtaaaaaattttggaatgttatttacagcaaaatcaccaattacaggctggagattcaatacgttactagctacaactcacatagcacttcgtgaggtgcccaagaaattgactacacaattggttcactctaagttagatcttttaaaaaatttttgtaatacctatattgataaacctattttaaaagttgctggattaaatcctcatgctggcgaagaagggattttgggtaatgaagagaaagattggctcaatagtgcattgattgcttggaataaaaaaaatagagatattcaattatttggccctttgtcaccagatagttgctggaattcttcggcaaaagcttggctaaacaaagatgctgaaagacatgacggcatccttgctatgtatcatgatcagggattaataccaatgaaagttatagcccttaattactcagtaaatacaacaataggtttgccttttataagaacatctccagatcatggaacgggttttgatattgctggacgaggaatagctcaatgccaaagcatgattgaggctataaaagctgccatagaaatgaataaaaattcaagactgcttaacacgcattaaa

SEQ ID NO: 206422 - DNA, 280 bp, Unknown
  Bacterial polypeptide expressing nucleotide sequence isolated from the Sargasso Sea
gacgggcctttacccgcagacacactttttgcgggcttctcctctgaatcagcagatgcaatttttgtgatgtaccatgatcagggtctgcccgtcctaaaatatgcatcttttggtgaagcggtcaatgtcacactaggacttccttttattcgaacctccgttgaccatggcacagcattagatatagcaggatctggaactgtagacctaggaagcactaaagctgcgatacatttagccgagcacctatctggttttagccatggtgagaactaga

SEQ ID NO: 206423 - DNA, 912 bp, Unknown
  Bacterial polypeptide expressing nucleotide sequence isolated from the Sargasso Sea
tgcagctaatcgtttgtgccaacgcagaagtattgcaacaaagagcggcagcgttaaacctgccgcttcagcttttaccttatgtgcctgagcaaccagcacagcagcaacaggctggtactctgacttgcgtggatttcgcagtggaggctcctgtggtaacaggacagctcaatgaagctaatggtcggtatgtggtagacaccttacgatatgtcggcgaaaaggccatgtcaggtgaatttgatgccatagttacggggccggtgcacaaaggtattattaataaagctggcatcccctttagtggtcatactgaatattttgctcacctgtctaacactccttatgtggtgatgatgctggccactgaaggtctgcgtgttgcactggcaaccactcatattccattggcctatgtcgctaaagccatcacaaaagagcgcttacacaaagtcattacggtgctgcaccacgacttgcgacacaaattcgcgatcgagtcccctgttatttatgtctgtgggctaaatccacacgctggagaggatgggcatctgggccgcgaagaaatagatatcatcagcccggctttagaagaattacgtttacaaggcatggatctggtcggcccattacctgccgatactttgtttcaggctaaatatctggagcatgccgatgccgtcttagccatgtatcatgatcagggcttgcctgtattgaaacataaaggctttgggcggtcagtgaatatcagtttgggcttacctttaataagaacatcagtcgaccatggtactgcgctggatttagctggcacaggaaaggccgatcccggcagtttattccatgccctggaacaagccatttatttagcgcaaagagccaagttatcacatgacagataaa

SEQ ID NO: 206424 - DNA, 598 bp, Unknown
  Bacterial polypeptide expressing nucleotide sequence isolated from the Sargasso Sea
gaatgttattcacagcaaaatcaccaattacggggttgggagatttaatacattattagctacaacccacattgctctttgtgatgttcccaaaaaattaactaaagaattaattcactctaaattagatcttttcaaagatttttgtagtaaatacattgagaaacctactttaaaggtagcgggattaaaccctcatgctggcgaagaagggattttgggcagtgaagaaaaagattggctcaatgatgcattgattgattggaataataagaatagagagattaaattattgggccctttatcaccagatagttgttggaattcttcagtaaaagcatggagtgacagagatgctgaaaagcatgatggcattcttgctatgtatcatgatcaaggtctaataccaatgaaagtgatagctctcaattactcagtcaataccacattaggtttaccatttataaggacatctccagatcatggaacaggatttgatattgctggcaaaggaatagctcaatcacaaagcatggttgaagctataaaggctgccatagaaatgactaacaattcaagactgcttaacacgcattaa

SEQ ID NO: 206425 - DNA, 200 bp, Unknown
  Bacterial polypeptide expressing nucleotide sequence isolated from the Sargasso Sea
gattgagattagagataaatcgaaacagttagctattatagatattgctttagcaaacaaagagagagaaattccagaatacattcaactagatgaaaaaaataagaaattaaagtttgttagaatacctaagttcgatgaagttccttacccaatagtaatggaaccaaatcttgttattgaatactattctagataaa

SEQ ID NO: 206426 - DNA, 964 bp, Unknown
  Bacterial polypeptide expressing nucleotide sequence isolated from the Sargasso Sea
ttttataattactgataataatatctttaaaaaggtaaaaaaaaaatttcttaaaaaaaaaataaaaattctgaacaactttaactccattaaagatataaaaaaaactgatatcactatcgcagctataccaggtatttctggcttagaaccaacaatcaaaatgatttcaaaaagtaaaaaagttttattggctaataaagaatctataatatgtggatggcagcttattaaaaaagaagcaaaaaaaaataaaactctattagtacctgtagactcagagcattattcaattttaaaattattagaaaataaaaatataaaagatattaaaaaaatctacataactgcttctggtggaccttttttagattacaaaattaaccaacttaaaaaagttactcctcaagaggccttaaaacaccctaagtggaaaatgggaaaaaaaatttcaatagattcctcaactttgatgaataaaatatttgaactagtagaagctcaaaaattatttgatatacctatatcaaaactagatatcttaatacatccaaactcgttaatacatgcaattataaaacttaataatggtttaagtatttttatttatcacgaaacgactatgaaaatacctttagcaaatgctatttttgatggaaaacttaatatagaagattttcataaaaataaaaaagaaagaaatattgaatttgaaaatttgagatttgaaaaagtgaatccaaaaatatttccgacgatatcacttaaaaaaattgccaatcaatacccttcaacgccaattatattaaattcttgcaacgaagtcttagttgatcaatttcttagagaaaatataccctttttgagcatatataaaatcataatgactattctaaaagatagaaacttcaaaaaatatgctataagaaatccaaaaaatattactgaaatatataaaatttaa

SEQ ID NO: 206427 - DNA, 864 bp, Unknown
  Bacterial polypeptide expressing nucleotide sequence isolated from the Sargasso Sea
gtttagatggtttataccctacatacaaaattatcaaacatactaaaaatcttgctattgccaacaaggagtccataatttgtgcatggaatttaattaataaagaattagtaaaaaataaaacaagatttattccagtagattctgaacatttttcaatatggtatgcattaaaagacaatagtaatacaacaattgaaaaaatttatcttacagcatctggtggacctttgctaaatattccaaattacaaatttgataatttaaaaattgaaaaagtcttgaaacatccaaattggagaatgggaaaaaaaataagtgtagattcatcaacaatgatgaataaggtctttgaaataattgaagcaaaaaaaatatttaatttagattataataaactatcaattttgattcatccaaaatcttatttacatgcaattattaaatttaataatggtatgattaaaattattgcgcatgacactactatggaaatacctatatttaatactttgtatggagattctggaaaaaaatataaatctgaaaaattaaatttaaaaaaattaaacaatctacacttgcgtgttataaataacaaaaaatttccattgataaatttaattaaaaatttgccaaaaaataattcattgtttgaaactgtgattgtttctgctaatgatgaattggttaatttgtttttaaaaaaaaggattaaatattcagaaattagctataatttgcttaaaataataaatatgattgaatttaaaaaaatgaaaaaaattaatccaaaaaaaatttcagatatcttaaatttaaacttttatgttcgtaacaaaatcattaatactttaaaataat

SEQ ID NO: 206428 - DNA, 934 bp, Unknown
  Bacterial polypeptide expressing nucleotide sequence isolated from the Sargasso Sea
aagaaacaaatatcaaaatataaaccatcaaatatttatatagaatgtaagaaagcaagagaaaagtttaaacactataatattaaatataaatttaatattattgaaaaaaaatcagaattgaatgattttgtttcatctgataaaaacgatattcttatagcctcatcatctggaattaattcaattgatacagttatagcagccctaaagaagaagaaaaaaatttgtgtagcaagtaaagagatctttcttttatatggaaaagaaattatgaagatttcaaaaaaatttaacaataaaataatacctattgatagtgaacactcaggggtttttcaactgctagaaagtaataaggtagaagatgttaaaaaagtttatattagtgcctcaggaggtcctttttatggaagaaaaataaaagatttatcaaaaattaaaaagcaagatgcactaaatcatccaacttggaaaatgggggataaaattacaattgattcagctactcttatgaataaaggtatcgagataattgaagcagcaacaatttttaatatatccagtgataagatatgtcctattatagataaaaaaagtaaaattcattctattgttgaatttatagacggtaattatttgttttgtgcaagtataaacgacatgagaattcctattagttatgcattaaattatcctgataaaataaattttaagagtaaaaaaattcctaattttctagaaactctctcactttctgaaattaatgaaaaagatcacaaagcattcagacttgtaagatatgcattaaagaaaggaggctctacaatagctgtacttaatgccgcaaataatattgctgtaaacgaatttttagagggtagaattaagttcgtagatattcttaatgtagtggaaaaagtgatcaagaatc

SEQ ID NO: 206429 - DNA, 454 bp, Unknown
  Bacterial polypeptide expressing nucleotide sequence isolated from the Sargasso Sea
caaaaattaaaagcttattacggaaatattaatgagagacaatttagaaatatttacaaaaaagctgttatgcttaaaggtgatactggagaaaatttaattggtctacttgaaagaagactagatgctgtgatctatagagcaaaatttgcaactacaattttttcggctagacaattaattaatcacggtcatgttaaagtaaatggtaaaaaagtaaatattggaagctatctagttagagaagaagattcaattgagataagagataaatctaaacaattagctataattgatatcgctttagcaaataaagaaagagaaacaccagaatatattcaaatggacgaaaaaaataaaaaattaaaatttgttagaattccaaaatttgatgaagttccatatccaatcgtcatggaacctaatttagtaattgaatattattctaggtaat

SEQ ID NO: 206430 - DNA, 815 bp, Unknown
  Bacterial polypeptide expressing nucleotide sequence isolated from the Sargasso Sea
agagtctttgatatgtggttggaatttactacatgcaaaaataaaaaaatataatacaaaatttatacctgtagattctgaacatttctctattttgtcattaattaaaaatgtatctgaagatatcgagaagatttacatcactgcctctggagggccttttttaaataaaaaagccaaagatttaaaaaaaattaaacctgaagctgcaataaggcatcctaattggagaatgggaaaaaaaatttctatagactcagccacaatgataaataaagtttttgaactaattgaggctaaaaaaatatttaatttaaatttaaatcaatttgaaattttacttcatccagattcttacgtacatgccatagtaaaatttaagaatggtcttactaaaattttaatacatgatactaatatgaaaataccaattttcaattcaatttattttaacgaaaaaaaaccatacaaatcaaattctttaaattttactaaaattaataattttaactttaaaaaagttaaccctaaacaatttacagtggttaatatattaaaaaattttaaacaagttcaaaatagcctttacgaaacagttttggttagtgcaaatgatgaattagtaaatttatttttaaaaaagaaaattagtttttctgatatcagtaaaaaactcattatgattataaatttaaaagaatttacaaaattaaaatcaataaaacctcttaattttaagcaaatttttaaacttaataaacatgtaagattgaaaacccaatctttatgtgtaagatctcaacacaatgtttaaa

SEQ ID NO: 206431 - DNA, 496 bp, Unknown
  Bacterial polypeptide expressing nucleotide sequence isolated from the Sargasso Sea
aatgactaaaagaatttctatactaggttctacaggatctattggggttagtactttaggtgtggttgatcagtttcaaaatcaatttgatattgtatatttatctacttttcaaaattgtaagttaattatagagcaagcaaaaaagtatcgccctaaagctgtagttattgttaatgattcaaatatagaaaatgttaagaaagaactagttaaggataatattgatgttctcgttggaagagaaggattattagagatttcaaaaagagatgatattgatttagtaatgaatgggctagttggatctgcaggaatggaaccaactattaatgcgttaaattcaggtgttgatgtagcattaagcaataaagaaagtatggttatggcaggtgatttaataaataagataatgaatgaaaaaggcgcaaaaatttaccctgtcgatagtgagcattcagctatttggcaatgtttagtaggtgaaaatattcaa

SEQ ID NO: 206432 - DNA, 844 bp, Unknown
  Bacterial polypeptide expressing nucleotide sequence isolated from the Sargasso Sea
atgaaaataaatatctttggaagtactggaattattggaaaaaaagtacttaaaattattgatcattcttccagaaaaatagatgttaatcttttaacagcaaattcaaatttaaaatcaatcttatcacaaattaaaaaattcaaaccaaaatatgtacatttaaataatgaaaaaaaactaaatgaattaaaaaaatatattgataaaaaaacaaaaattttagataaaaatgatttgtcagattatttatctagctctaaatcagacttcactatattagctatatctggttacaattcactaaatttttttgatgaaattgtaaataatacaaaaaatttaggaatagttagtaaagaggctattgtttctgggggacacttatttaaaaaaaacagttattttaaaaaaactaatatttatcctttagactcagaacatttctcactttatacccatttaaatttagatgaaaaaaataaagaaaatataaagaatattttaataactgcatcaggaggtcccttttataaatatcaccataataatttaaaaaatataacatttgaaaaagcaattaaacacccaaaatggaaaatgggttataaaaatagtattgattctgctactttagtaaataaatgtcttgaagttattgaggcacattacttatttaatattccatatgaaaaaattaatattttgattcatccagaagccatagtccattcaattattcaatataataatttaatatcaaatatgattttatttaaaaatgatatgtccataccaatttataattttttatataaatctcaatctaatttatatgattaca

SEQ ID NO: 206433 - DNA, 702 bp, Unknown
  Bacterial polypeptide expressing nucleotide sequence isolated from the Sargasso Sea
actctgagcatttttctttacttaataatagatttaataacaaaaatataaaaaaaatatttataactgcatctggtggtcctttttatttcaaaaaaaaaataaatctaaaaaaagttaacttaaaaaatgtcttatcacatcctaaatggaaaatgggtattaacaatagtatagactcatcaaattttattaataaaattctagaaatttttgaactttctattatctatgaaatagatatcaaaaaaattgattttttaatttctccagaagcttacattcatagtattgttatatataaagataatattgttaatattaattgttttgaaaacaatatgcttataccaatgataaaaccactagaacaaattcatacaatcattcctttacataataaaagtaattttttagatttaaaaatgcttagattagagaaatttaatgataatcgttttaaattatataaatattttaaacttcttaaaacatttaacactaataaacaaatatctttcatgattttaaataatatagctcataaaaaatatttgtcaggagatatcgaatataatgatatagttgattatattatgtctaatttgaaaaatacaaattcactgattagtttgaattctattaataaaagaataatgtttattaaatccatcgaaaaaaaatatgaaattacaaattaac

SEQ ID NO: 206434 - DNA, 619 bp, Unknown
  Bacterial polypeptide expressing nucleotide sequence isolated from the Sargasso Sea
atgacaaaaagattaaattcaaaacataaagttgaccgaagattaaaggtaaacttatggggtagaccaaaaagtccttttaacacaagagcgtacccaccaggtcaacatggtcaaactaaatctacaaaaccatcagattatggaattcagcttcaagcaaaacagaaacttaaatcatattatggaaacatgaatgaaagacagtttagaaatatttacaaaaaagcaataatgaaaaaaggtgatacagcggaaaatttaattggtctgttagagagaagactcgatgctgttatttatagatcaaagttatctaatacaatgttttcatcaagacaattaattaatcatggacatgttagagtgaatagcaaaaaagttaatatttcgagttatcaagtaaaagaggaggatacaattgaaataagagataagtcaaaacaacttgctcttatagatattgcattagctaataaggagagagacgttccagaatatttacaattagacgaaaaaaataaaaaagtaaaatttgtaagaatacctaaatttgaagaagtaccttatcctgtaacaatggaaccaaaccttgttatcgaatattattctagatagt

SEQ ID NO: 206435 - DNA, 528 bp, Unknown
  Bacterial polypeptide expressing nucleotide sequence isolated from the Sargasso Sea
cttacggaccaggacaacatggtcaaacaaaaacatcaaagccatctgattatggaatacagcttcaagctaaacaaaaattaaaagcatactacggcaacattaatgagagacagtttagaaatatttacaaaaaagcggtaatgcttaaaggtgatactggagaaaatttaattggccttcttgaaagaagattggatgccgttatctacagagcaaaatttgcaacaacaattttttcagctagacaattaatcaatcacggccatgtaaaagtaaatggtaaaaaagtaaatattggaagttatttagttagagaagaagattcaattgagataagagataaatctaaacaacttgcaataatcgatattgctcttgctaataaagaaagagaaactccagaatatattcagatggatgaaaaaaacaaaaaattaaagtttgttagagttccaaagtttgaagaagttccatatccaattgttatggagcctaatctggtgattgaatattattctagataat

SEQ ID NO: 206436 - DNA, 322 bp, Unknown
  Bacterial polypeptide expressing nucleotide sequence isolated from the Sargasso Sea
atttatagagcaaagtttgcaactacaatattttcagcaagacagttaattaatcatggacatgtaaaagtgaatggaaaaaaagttaatatttcctcatatctggttaaagaagaagatactattgaaattagagataaatccaaacagcttgcaattattgacattgctttggcaaataaagagagagaaactccggaatacattcaactagatgaaaaaaataaaaaattaaaatttgttagagttcctaagtttgaggaagtgccttatccaattattatggaacctaatttagttattgaatattattcaagataaa

SEQ ID NO: 206437 - DNA, 484 bp, Unknown
  Bacterial polypeptide expressing nucleotide sequence isolated from the Sargasso Sea
tatgaataaaaaaaaaattaacatatttggagtcacagggtctatcggcaaaagtactcttcaagttttgagggaggaaaaaactaaggataaatatcaaccttttgtattttctgcaaacgaaaatgtagatcagctagtaaaagattgtcttgagttcaaacctagacatgctgttatagctaatgaaagtaaatataatagtctaaaaaaagggctatctggtacaaatattcagccatattcaggaaaagaagctttgcttgaactagcctctgaaagagtaaactggtcaatgtcggctataattgggtttgctggtgtagaggtggcattaagatgtgctgagttttcagatgttttagccttagcaaataaggaagcattggtgtgtgctggaacgctattgttatcaaaaattagttatcaccaaaacaaacttattccagtcgatagtgagcatagtgccatttatcaatgttta

SEQ ID NO: 206438 - DNA, 724 bp, Unknown
  Bacterial polypeptide expressing nucleotide sequence isolated from the Sargasso Sea
catgaacttaagtcctaaaattttaattattggatctacaggtgaattaggttctaaactaattaaattttgtaatagtaacaaaattaaaattcatgcaattacaggatataaaaataaaagaaaactaaaaatacaaaaagaaaagcttcatataaaaaattctttcttgttaagtaatcatcaagaaaaattaaatttcatagaatttttaaataaaactaaaatagacattgtttattttttagatttcggctatgaatcaattatttacgctgacattttcttacttaataataaaaattcttatttagctattgctaataaggaaatgattcttgctggaggaaatttattaaaaaaaaaaatacttaaatcaaaaaataacttaattccattagactctgaacatttctctctctttaattttaattttaaaaacgaatatataaaaaaaatatttattacggcttctggggggcctttttattttaaaaagaaaattaatttaaataaagtcaacttaaaacaagttttattacatccaaagtggaaaatgggtataaataactcaatcgactcatctaattttataaataaaattcttgagatgtacgaattatcaataatttttgatattgatctaaaaaaaataagttttttagtttctcctgaagcttatgtacacagtattataattaataacgataatactgtgaatata

SEQ ID NO: 206439 - DNA, 409 bp, Unknown
  Bacterial polypeptide expressing nucleotide sequence isolated from the Sargasso Sea
tagaaatatttataaaaaagcaagtatgcttaaaggtgatacaagtgaaaacttaattggtttattagagagaagattagattcagttatttatagagctaagtttgcaacaacaattttttcagcaagacaattgattaatcatggccatgtaagagtaaatggaaaaaaagttaatatagcaagttattcagttagagaagaagatacaatcgaaattaaagataagtcaaaacaactagcaatcatagatatagctttagctaataaagaaagagaaacaccagaatatattcagatggatgaaaagaataagaaatttaaatttgtaagaataccaaaatttgaggaagttccttatccagttataatggagcctaatttagttattgaatattattctagataa

SEQ ID NO: 206440 - DNA, 496 bp, Unknown
  Bacterial polypeptide expressing nucleotide sequence isolated from the Sargasso Sea
tcatctaaaccatcagactatggaattcaacttcaggctaaacaaaaacttaaatgttactacggtaacattaatgaaagacaatttcgaaatatttataaaaaagctatcatgaaaaaaggcgatactgcagaaaatttaatcggattattggaaagaagattagatgctgttatatatagatcaaaactttcaaatactattttttcatcaagacaacttattaatcatggccatgtgagagttaatggtaaaaaagtaaatatttccagttatcaagttaaggaggaagatagcattgaaataagagacaaatctaaacagcttgctttgatagatatagctcttgcaaacaaggaaagagaagtgcctgagtatttgcaattggatgagaagaataaaaaagttaagtttgtaagaattccgaagtttgaggaagtaccatatccagtagtaatggagccaaacttagtaattgaatattattcaagataaa

SEQ ID NO: 206441 - DNA, 358 bp, Unknown
  Bacterial polypeptide expressing nucleotide sequence isolated from the Sargasso Sea
tttaattggccttttagagagaaggttagacgctgtgatctacagagcaaaatttgcaacaacaatattttccgcaagacaattaattaatcacggtcatgtgaaagtaaatggcaaaaaggtaaatatatctagttatatggtaaaagaagaagatgccattgaaatcagagataaatctaaacagctagcaataatcgatatagctttagcaaataaagaaagagaaattccagaatacattcaattagatgaaaaaaataaaaaatttaaatttgtaagagtgccaaaatttgaagaagttccttatccaatagttatggaaccaaatctagttatcgaatattattcaagataa

SEQ ID NO: 206442 - DNA, 304 bp, Unknown
  Bacterial polypeptide expressing nucleotide sequence isolated from the Sargasso Sea
gcaacaacaatattttcagctagacagctaattaatcatggacatgttaaagttaacggaaaaaaagttaacattggaagttatttagttaaagaggaagattcaattgagattagagacaagtcaaaacaactagctgttattgatattgctctagcaaataaagaaagagaaactccagagtatattcagatggatgaaaaaaataaaaaacttaagtttgtaagaactccaaaatttgatgaagttccttatcccattgttatggaacctaacctagttattgaatattattctagataat

SEQ ID NO: 206443 - DNA, 286 bp, Unknown
  Bacterial polypeptide expressing nucleotide sequence isolated from the Sargasso Sea
tctagacaattaataaaccatggacacgtaagagttaatggtaaaaaagttaatatctcaagctaccaagtaaaagaggaagatagtattgaaataagagaaaaatctaaacaattagccttgatagatatagctcttgcaaataaagaaagagaagttcctgaatatttacaattagatgaaaaaaataaaaaagttaaatttgtaagaattccaaaatttgaggaagttccttaccctgttgtgatggaacctaaccttgtagttgagtattattctagataat

SEQ ID NO: 206444 - DNA, 574 bp, Unknown
  Bacterial polypeptide expressing nucleotide sequence isolated from the Sargasso Sea
taagttaacttatgggggaagaccaaaaagtccatttaattctagagcatatccaccaggacaacacggtgccgctaaatcatcgaaaccttcagattacggtattcaacttcaagcaaaacaaaaattaaaatcttattacggaaacataaacgagagacaatttagaaatttatatagaaaagcaataatgaaaaaaggggatactgctgaaaatttaataggattattggaaagaagacttgatgcagtagtttatagagcaaaattatccactactattttttcagcaagacaattaattaatcatggacatataagagttaatggaaaaaaggtaaatatttctagctaccaattaaaagctgaggagacagttgagattagagataaatcaaaacaattagcttttattgatattgctttagcaaacaaagaaagagaagtacctgagtatttacaagtagatgaaaaaaataaaaaagttaaatttgtaagaattccaaaatttgaagaagttccttatcctattgtaatggagcctaacttagttgttgaatattactctagatag

SEQ ID NO: 206445 - DNA, 820 bp, Unknown
  Bacterial polypeptide expressing nucleotide sequence isolated from the Sargasso Sea
aaggcaagctaaattttttaaggtcaaaaatcttattattactaatgagaatagttataataaaataaaaaaggatagattttctaaaaaaataaatatttataataatttcaataattttagaaaaatttttaaaaaaaaagttgattatacaatgagttcaatctcaggaattcaaggccttaaacctacaattgaagttataagatttactagtaaaattgctattgcaaataaggagtcaattatatgtggttgggatttaattcaaaaagaattaaaaaaaaacaaaacagaatttattccagtagactcagaacatttttcaatttggtatgccttaaaagatataaataaagaactaatagagaaaatttacataactgcatctggaggaccatttttaaataagccacttaacaaattaaaaaatgtgagtttgaaacaagcaattaaacatcctaattggaaaatgggaaaaaaaatatcaatagactcagcaacaatgatgaataaagtatttgaaataatagaagccaaaaaaatttttaatttatcttacaaaaaattatcaattttggttcacccaaaatcttatgtacatgcaataataaaatttaaaaatggtttaacaaaaatagttgcacacgatacaaatatgaaaattccaatctttaattctctatattcatcaaataattttatgaattcaaagaaattaaatctaaaaattttaaataatttagaatttaaagaaataaattataaaagattttcggtgattaagattttaaataaactgcctgaaaattcatcactg

SEQ ID NO: 206446 - DNA, 619 bp, Unknown
  Bacterial polypeptide expressing nucleotide sequence isolated from the Sargasso Sea
aatgacaaaaagattaaactctaaacataaagtagatagaagattaaaagttaacctttggggaagacctaaaagcccttttaataccagagcttatggtccaggacaacatggtcaaacaaaaacatccaagccatctgattatggaatacagcttcaggctaaacaaaaattaaaatcatattacggcaatattaatgaaagacaatttagaaatatttataaaaaagcagtaatgctcaaaggtgatactggtgaaaacttaattggtcttctagaaagaagattagatgctgtgatttacagagcaaaatttgcaacaacaattttttcagctagacaattaatcaatcatggccacgtgaaagttaatggtaaaaaagtgaatataggaagctatttagttagagaagaagattcaattgagataagagataaatctaaacaacttgcaataattgatattgcacttgcaaacaaagaaagagaaactccagaatacattcagatggatgaaaaaaacaaaaaattaaagtttgttagagttccaaagttcgaagaagttccatatccaattgttatggaacctaatctagtaattgaatattattctagataa

SEQ ID NO: 206447 - DNA, 227 bp, Unknown
  Bacterial polypeptide expressing nucleotide sequence isolated from the Sargasso Sea
gagctatcaagttaaggaagaagacactatgaaaattagagacaaatcaaagcaacttgcacttattgatattgctcttgcaaataaagaaagagaagtacctgaatatttgcagctcgatgaaaaaaataaaaaagtaaaatttgtaagagttcctaaatttgaagaagtgccttatccagttgtaatggaaccaaatcttgttatcgagtattactctagataat

SEQ ID NO: 206448 - DNA, 349 bp, Unknown
  Bacterial polypeptide expressing nucleotide sequence isolated from the Sargasso Sea
ttacttgagagaagattagatgcagtaatttatagatcaaaattatcaaacactattttttcatctagacaattgataaaccatggacacgttagagttaatggtaaaaaagttaatatctctagctaccaagtaaaagaagaagacagtattgaaataagagacaaatcaaaacaattagctttaatagatatagctcttgctaacaaagaaagagaagttcctgagtatttacaactagatgaaaaaaataaaaaagttaaatttgtaagaattccaaaatttgaggaagttccttaccctgttgtaatggaacctaatcttgtaatcgagtattattctagataat

SEQ ID NO: 206449 - DNA, 90 bp, Unknown
  Bacterial polypeptide expressing nucleotide sequence isolated from the Sargasso Sea
aattacttaaagaacataaggtgtcagaaataaaaaaaatttatataactgcttcaggggggccatttttaaaaaacaaatctttctaaa

SEQ ID NO: 206450 - DNA, 721 bp, Unknown
  Bacterial polypeptide expressing nucleotide sequence isolated from the Sargasso Sea
ttgcctgactcagttcatctctggtttttagaaaatattattatatacagtttaatatttgtctttatattaaatttcgttactccattaaggagagagtctaaattattatcgaagttgctttctaagccaggtggaatttttttattttctttaccaataattcttgaaggtcacttagtagaaactgttgggtggtggtatggaaacgactactcgctctatcttgatacattacatgggtttttcctaggtgcaatatggtttttactaggtattattttgacttcacaaggagaagctttctgggaatcgaataaagtaaattggaaaattcacactgtaattgcatttagtttatatatctatcggttccttaatgaatttgaaggaattgataatcggataatagcttttgaatcctttaattttatttttcttgttttaggattaggagctacttatttaaataaagaatcgagtcagcttgattattataagactgcaatttttccagtttatatagttcacttcccaattcaatatgctttgatgttttactttggaggttggaatataaatccctggttaaagtatcttatatttttatttttgatctgttttttaagtctcaccttttatcatgctataaaaaatgtaagaatcttaagacctttatttgggctacgaaacaaaccaaaaaaagaaatagatggataaa

SEQ ID NO: 206451 - DNA, 229 bp, Unknown
  Bacterial polypeptide expressing nucleotide sequence isolated from the Sargasso Sea
atcaagctaccaagttaaagaagaggatactgtcgagattagagataagtcgaaacaattaccacttatagatattgctttagcaaataaggaaagagaagttccagagtatatacagttagatgagaagaataaaaaagttaaatttgtaagagttccaaaattcgaagaagttccttacccagtggtaatggaaccaaatttagtcattgagtattattcaagataa

SEQ ID NO: 206452 - DNA, 253 bp, Unknown
  Bacterial polypeptide expressing nucleotide sequence isolated from the Sargasso Sea
gttaatggtaagaaagttaatattggaagttatttagttaaagaagaagattccattgaaattagagataaatctaaacaattagcaattattgatatagcattagcgaataaagaaagagaaacacctgagtatatccaaatggatgagaaaaataaaaaattaaaatttgtaagggttccaaaatttgaagaagttccttatccggtgatcatggagcctaacttggttattgaatattattcaagataac

SEQ ID NO: 206453 - DNA, 358 bp, Unknown
  Bacterial polypeptide expressing nucleotide sequence isolated from the Sargasso Sea
tttaataggtttacttgaaagaagattagatgcagtcatatacagagcaaaatttgcaacaacaatattctcagctagacaattaatcaatcatggacacgttagagttaatggtaaaaaggtgaatatcggaagttatctagttaaggaagaagattcaattgagatcagagataagtccaagcaattagcaattattgatattgctttagcaaataaggaaagagaaactccagaatatattcaaatggatgaaaaaaacaaaaagtttaaatttgtaagaacaccaaaatttgaagaagttccttatccaattgttatggagcctaatttagttattgaatattactctagataa

SEQ ID NO: 206454 - DNA, 868 bp, Unknown
  Bacterial polypeptide expressing nucleotide sequence isolated from the Sargasso Sea
taagccaaaatttattataataaatgatagcgatagctataaaaaatttgttagagtaaataagaataattgtaaagtttttaatacttacaaagatatttctaaattaaaaaaaaaaattgattatacaattagtgcaataagcggtttcgatggtcttgaacctacgctagaaataataccgttttcaaaaactatagcaatagcgaataaggaatctctaatatgcggatggaatttgataaaaaaaaaaatagttaaacatcaaacaaattttataccaatagactctgaacacttttctatttggtctttattaaaaggcacaaattcaaaaattgagaaaatctacataaccgcttctggcggacctttttttaaaaaaaatattaaacacatgaaaaatataaaaccaaatcaagctattaaacacccaaaatggaatatgggaaaaaaaatttcaatagactctgctacaatgataaataaagtatttgaattaattgaagcaaaaaacatttttgatattgatttaagaaatcttaaaattttaattcatccggactcttatgtgcatgctattgtaaaatttcaaaatggtataacaaaacttttaattcatgatacggatatgaaagtacctatattcaattcaatttaccaaaatgaaaaaaaaaaacttacatctaattcattagacatttcaaagctaaataatttaaaatttgaaacagttaaaacgaatcagtttcaatctattaaaatattaaagctatttaaaaatgttaataattcactttatgaaactgttctaattagtgcaaatgatgagttggtaagtctttttttacaaaataaaataggattt

SEQ ID NO: 206455 - DNA, 430 bp, Unknown
  Bacterial polypeptide expressing nucleotide sequence isolated from the Sargasso Sea
aatgaaaaaaaaaatagcgattttagggtcaacaggttcaataggaaaaacatctttagatatttttaagaaagatttaaaaaaatttcaaattattttgttatcagctaattcaaattattcatcaattattaaacaaattaaaatatttaaacctaaatattttatagtgaataatttctttgtgtttaaaaaagttatcaataacaataaaatcggaaatacaaaaatttataataaattttcagatttaaattataataatattaaatttgatataacgatttcagccatagttggaatagcgggattagaacctacaataaaatttactaaaattagtaaaaaaattttattagcaaataaagaaagtattatttgtggttggcatttgttaaataatgctcgaaaaaaaaacaaatcaaatatt

SEQ ID NO: 206456 - DNA, 346 bp, Unknown
  Bacterial polypeptide expressing nucleotide sequence isolated from the Sargasso Sea
acttgagagaaggttagatgcagttatttatagatcaaaattatctaatactattttctcatctaggcaattgataaaccatggacacattagagttaacggaaaaaaagttaatatctcaagctaccaagtaagagaagaagatagtattgaaataagagataaatcgaaacaattagctttgatagatatagctcttgctaataaagaaagagaagttcctgagtatttacaacttgatgaaaaaaataaaaaagttaaatttgtaagagttccaaaatttgaagaggttccatatccagttgtaatggaacctaacttagtaattgagtattattctagataa

SEQ ID NO: 206457 - DNA, 172 bp, Unknown
  Bacterial polypeptide expressing nucleotide sequence isolated from the Sargasso Sea
atggttccttttcttgagggaattgctcttggagcaagtctgatcatcgccataggaccccagaacgcttttgtgatccaacagggcattctacatcagcatgtttttctggcagcatttgtctgcaccctcgtggatgtagttctgatcattgttggtgctgcaggattgg

SEQ ID NO: 206458 - DNA, 499 bp, Unknown
  Bacterial polypeptide expressing nucleotide sequence isolated from the Sargasso Sea
tatgacaaaacgattaaactcaaagcataaagtagatagaagacttaaagttaatttatggggtagacctaaaagtccttttaatactagagcttaccccccaggacaacacggacaaaccaagtcatctaaaccatcagattacggcattcaacttcaagctaaacaaaaactcaaatgttactatggtaacatgaatgaaagacaatttcgaaatatgtataagagagccattatgaaaaaaggtgataccgcagaaaatttaattgggttacttgagagaaggttagatgcagtaatttatagatcaaaattatcaaatactattttttcatctagacaattaataaaccatggacatgttagagttaatggaaaaaaagttaatatctctagctaccaagttaaagaagaagatagtgttgaaataagagacaaatcaaaacaattagctttaatagatatagctcttgctaacaaagaaagagaagttcctgaa

SEQ ID NO: 206459 - DNA, 814 bp, Unknown
  Bacterial polypeptide expressing nucleotide sequence isolated from the Sargasso Sea
ataatttgtggttggaaatttattgaaaaaaatttaaaaaaaaataatacaaattttatacctatagactctgaacatttttcaatttggtctttaataaaagaagagaataaaaagaatataaaaaaaatttatattactgcatctggaggaccttttttaaaaaaaaaaataaataatcttaaaaatattaagcctaaatcagcactaaatcatccaaattggaaaatgggaaaaaaaatttctattgattcagcaactatgatgaacaaaatatttgaagttattgaagcaaaaaaaatatttaatttaggaattgataaatttaatataataattcatccaaagtcttatatacatgcaattgttaattttaagaatggtttaattaaaattttggtacatgatactaatatggaaattccaattattaattcaattaactataataaagagattttcgaatataataataaagatataaattttaataagttgaatggaataaattttctcaaccctgatattaagaaatatccatctttaaaattattaaaattaattccaaaaaaattttcatattttgaaacaatattaattacattaaacgatgaattggtgaaaaattatttaaaaaataaaattagttatttttcaataattaaaattctcatgaaaatgataaaaacaccatatttttgtaaattttatcactattctccaaatagtattaatgatattaaaagtatggttggaaaagttaaatcttaccttaatatttatctgaaaaaatatgaaaactattcagaataat

SEQ ID NO: 206460 - DNA, 706 bp, Unknown
  Bacterial polypeptide expressing nucleotide sequence isolated from the Sargasso Sea
ttagattcagaacatttttctctttacaactcaaatatgaaaaataataaagttcaaaaaatatatataacagcatccggtggaccattttacttcaataaaaaaataaatttatcaaccgtttctaaatcaagagttttgtcacaccccaagtggaaaatgggaaaaaacaacttaatagactcttctaattttataaataaaattttagaaatatatgaattatcatacatttataaaattccattaagtaagattgattttttgatttctaaagaggcttatatccatagtataattcattataaagatagtactttaacaattaatgcttttcataatgatatgattattactttaattaaaccccttagttttttttataaaattaaatctgctactttgaagcaaaactactttaatgttgataatttaattgttgagaaaccacaagatgcaaggttcactttttttaagtataaaaataaattattgaaattgtctcattccgagcaaataaaattaatgataattaataattcggcacataaactttatttatcaaataaactaaaatataatgatatcattgattatattatgaaaaatattatgaataattcaaaaaatataagatttaaaaattttgactctattttaaaatttatctcagtaaacaatgattattataaagcaaatgtttaaa

SEQ ID NO: 206461 - DNA, 619 bp, Unknown
  Bacterial polypeptide expressing nucleotide sequence isolated from the Sargasso Sea
atgacaaaacgattaaactcaaaacataaagtcgatagaagacttaaagtaaatttatggggtagacctaaaagtccatttaatactagagcatatcccccaggacaacacggtcagtcaaaatcatctaaaccatctgattatggtattcagcttcaagctaaacaaaaattaaagtgttactatggtaacatgaacgaaagacagtttagaaatatgtataaaagagcaataatgaaaaagggcgatactgctgaaaatttaattggactattagaaagaagattggatgcagtgatctatagatcaaaactatcaaatactattttttcatcaagacagttgattaaccatggacatgtaagagtaaatggtaaaaaagttaatatatcaagttatcaagttaaagaagaagatagtattgaaataagagataaatctaaacaattagcgttgatcgatattgcacttgctaacaaagaaagagaagtcccagaatatttacaattagatgaaaaaaataaaaaagttaaatttgttagaattccaaaatttgaagaagttccttatccagtcgttatggaacctaatttagtaattgaatattattcaagataat

SEQ ID NO: 206462 - DNA, 430 bp, Unknown
  Bacterial polypeptide expressing nucleotide sequence isolated from the Sargasso Sea
atgaaaaaaaaaattgcaattttaggatcaactggttcaatcggcacaacttcacttgaaatttttaaaaaagacttaaagaaatttgaaataattttactatccgcacaatctaattattttctcattaataaacaaattaaaaagtataaacccaaatattttattattaaggatacaaaagtttttaaaaaaattaaagaaaagtataaaagaaaaaagataaaaattcataataagttttcagatttaaatttgaaaaataaaaaattcgacatcacaatctctgctatagttggaatagctggattagagccaacaataaaatttacaagtataagtaaaaaaattttattagctaacaaagagacaataatttgtggatggcacattttagaaaaaatttgtaaaaaaactaaaacctctgtgt

SEQ ID NO: 206463 - DNA, 748 bp, Unknown
  Bacterial polypeptide expressing nucleotide sequence isolated from the Sargasso Sea
ttatacctggttgactcagaacatttttctatatggtcagtaattaaagatcttaattcatcagctgtagaaaatataataatcacagcttctgggggacctttttttaataataaaaataatagtataaaagtaacacccaaactagcatctagtcatccaaattggaagatgggagcaaaaatttcagtggactcatcaactttgatgaataaagtttttgaggtaattgaagctaaaaaaatatttaatatagaattaaaaagatttaaaatcctaatacatccaaaatcatatgtgcatgctattgttaaactaaaaaatggcttaattaaaattatagctcatgatacggatatgaaaattccaatttttaattcattatactttgatgaaaataagcacataaaaacaaaaaaaataaatattaaatttttaaataacctaaaattgacagaggttaataaaaaacaatttcccttgataaatttacttaaaaaaataccaaaaaataatacactttttgaaactttactcgtatcaattaatgatagactagtagatctatttttaaataaaaaaatatcatatgaccaaatatctaaaaatataataagccaaataaattcaaaatctttttctaaatttaagcgtaaaaaacttaataatttagctcaaattgaaaaattaaataattttgttagattgaaaacaaaggctttaagtgtaatatcctctaaaaaatgaa

SEQ ID NO: 206464 - DNA, 267 bp, Unknown
  Bacterial polypeptide expressing nucleotide sequence isolated from the Sargasso Sea
attgaaatacattactgtgctcggttctactggttcaatagggactcaaactctcgaaatagctagtgagcagcctgataagtttaaagccgtagctctttctgcaggaagaaatattaatttattaactgaacaagttaaaacacataatccagaggtagttgctattgaggatgaaagtcttatagaagatttaaaagataacattaataacctagatttggatgatgctcccttagttttaggtggaaaacaggggattaacgc

SEQ ID NO: 206465 - DNA, 611 bp, Unknown
  Bacterial polypeptide expressing nucleotide sequence isolated from the Sargasso Sea
aagattaaactccaaacacaaagttgatagaaggttaagagtaaacttatggggtaggccaaaaagtccatttaatacaagagcatatccaccaggccaacatggtcagtcaaaaacttcaaaaccgtcagattatggaattcaattacaagcaaaacaaaaacttaagtcttattatggaaatatgaatgaaagacaatttagaaatatgtacagaagagctattatgaaaaaaggggatactgcagaaaatttaattggattattagaacgaagactagacgctgttatatatagggcaaaactttcaaatacaattttttcttctagacagctaataaatcatggtcatgtgaaagttaatggtaaaaaagtaaatatttcaagttatcaagttaaagaggaagacagtattgaaataaaagataaatcaaaacaattagcaatagtggacatcgctctagcaaataaagaaagagacgtgcctgaatatatacaggttgatgaaaaaaataaaaaagttaaatttgtaagagttcctaagtttgaagaagttccttacccagttacaatggaaccaaatcttgttattgaatattattcaagataat

SEQ ID NO: 206466 - DNA, 902 bp, Unknown
  Bacterial polypeptide expressing nucleotide sequence isolated from the Sargasso Sea
ggcgcctgaaggttctggcgcgggctactttccgatgtacaaccgcaacaagcggtccgtcgccctcgacctcaagcatcccaaaggccgcgacgtcgcactgcaactgattcagtccgccgacatcgtgctggaaaatttccgcaccggtaccatggccaagttaggcctcgattacgagtcgctaaaagccgaccattcgggtcttatctattgctcattgaaaggttttctctcgggcccttacgagaatcgggttgcgctcgacgaggtcacacagatgatgggcggactggcgtatatgaccggcttacccgaccgtccgctccgcgctggttcatcggtgattgatattaccggcggcatgtttggggtgatcgccattctgtcggcactgcaccgccgtcgggaaaccggcgagggtagccacgtaacgagcgccctgtttgaaaccacggcgtttttagtgggccaacacatggcacagcaggccgtcagcggtgatgcaccacctcccatgtcggtcaggcaatcggcctgggccatctatgacattttcgaactcgactcgggagagcggctgttcgtgggtatcgtcagcgacaccttatggcagcgcttctgtgaggaattcgagctctccgattgggcggcagatacggcgcttgatagcaacgccggccgcgttgcggcgagagagaccttactgcccgccattcgagaactgtttgccccactctcactcctagagctcagcgagcggctggatcgggcaggcctgcccttcgcgcctatcaacacgcccggtgacttatttgacgacccgcatctgactgcgtcgggcggtctgctgcctgtgcacctgaccgagggcgatcatgcaggcgagcagaccacgttac

SEQ ID NO: 206467 - DNA, 394 bp, Unknown
  Bacterial polypeptide expressing nucleotide sequence isolated from the Sargasso Sea
aaagctataatgaaaaaaggagacactgctgaaaatttaattggtttattagaaagaaggctagatgctgtaatttacagatcaaaattgtctaatacaatattttcatcaagacaattaattaaccacggtcatgttagagttaatggtaaaaaagtaaatattgcaagctatcaagtaaaagaagaagatagtgttgaaattagagataaatctaaacagcttgctcttattgatatagctttagcaaacaaagaaagagaagtgccagaatatcttcaacttgatgaaaaaaataaaaaagtaaagtttgttagaattcccaagtttgaggaagtaccttatccagtcgtaatggaaccaaatcttgttattgaatattactctagataaa

SEQ ID NO: 206468 - DNA, 948 bp, Unknown
  Bacterial polypeptide expressing nucleotide sequence isolated from the Sargasso Sea
aaaaatattcctttaaacttagtgacccaaaaaatgtcaataaatttcaattatttttaaaaaataataaaattaatttaatctattttttagattttggatataaatcacttttatatgcagacatttttttaaataaaaatactaaatcacaaattgctattgctaataaggaaatgataatcgcaggtggtgaaactttaattaataaaatatcatatactaagaatatacttgtacctcttgattcagaacatttttcactttcaaagagctatattaaagatgaaaatatacaaaaagtttttataacagcttcaggtggacctttttattttaataaaaatattaatcttaataaggtgaaattaaataatgttttgaaacatcctaaatggaaaatgggaattaataattcaattgactcttctaactttgtaaataaaattttagaaatttttgaactctcaattatttataaaatagatcttaaaaaaattgactttttagtttccaaagaagcatatgttcatagtttgattttgaataaggataatattgtaaatattaactgctttaataatgatatgttaatttctttaattagccccttgttaaaatattatccaaatatcgagcttactactaaaaaatcatatttaaaaaatgagttgtttaaaatagaaaaatttcacgataaacgttttaaaataagtaattaccttaatacacttaaaaatttaacaacaaataagcaaattttgtttatgatacttaataatattgcacaaaaaaaatacttatctgaagaaataaagtataatgaaatcatagaatttataatgaaaaatcttaataaacataataaatttgttaaatttaaatctataaaagataggcttaaatttattgattatattgagtcgaaatatgatttcctaagttaat

SEQ ID NO: 206469 - DNA, 619 bp, Unknown
  Bacterial polypeptide expressing nucleotide sequence isolated from the Sargasso Sea
aatgacaaaaagattaaactctaaacataaagtagaccgaagattaaaggttaacctttggggtagaccaaaaagtccttttaacactagagcttatggacctggtcaacatggtcaaacaaaaacatctaaaccatcagattatggaattcaattacaagctaaacagaaattaaaagcttactatggaaatattaatgaaagacaatttagaaacatttacaaaaaggcagttatgcttaagggtgatactggtgaaaatttaattggtcttttggaaagaagattagatgcagttatttatagagcaaaatttgctactactattttttcagccagacaattaattaatcatggtcatgtaagagtaaatggcaagaaagtaaatattggcagttatttagttaaagaggaagattcaattgaaattagagataaatctaaacaattggcaattatcgatattgctttagcaaataaagaaagagacacgccagaatacatccaaatggatgagaaaaataaaaaattaaaattcgtaagggttccaaaatttgaagaagttccttatccagtaatcatggaacctaacttggttattgaatattattcaagataa

SEQ ID NO: 206470 - DNA, 574 bp, Unknown
  Bacterial polypeptide expressing nucleotide sequence isolated from the Sargasso Sea
gggtagtaaaatatctgtagactcagctacattaatgaataaagtttttgaagttatagaagcccaaagaatttttaatattaatataaataaatttaaaatttatatccatccaaaatcttacgttcatgcagtaattaaatttaataatggtttgaccaaaattctagtccacgatacgagtatgactattccaatttttaatattatttatgacaaaacagataaatctattatcacaaaaaaaatagatttttccattattaataatttaaattttcaagaaccaaataaaataaaatttccatctttaaaactattaaataagttttctagtaaaatttcactttatgatacagtcttagttgcagctaatgatgaattagtttatttattcttgaaaggccaaattaagtttactgaaatttcaataatattaaaaaaaatattggaattaaaagaattctctaaatataaacaaattattcctactaattatgagcaaatttacaagcttagccgatatgtaagattgaaaacattttccttaagtgtattatcccaaaaatgctaa

SEQ ID NO: 206471 - DNA, 498 bp, Unknown
  Bacterial polypeptide expressing nucleotide sequence isolated from the Sargasso Sea
aatcagcaaagccatctgattatggaattcaattaaatgcaaaacaaaaattaaaatcttattatggcaatatgaatgaaagacaattcagaaatgtttacaaaaaagccataatgaaaaaaggagatactgctgaaaatttaattggtcttttagaaagaagacttgatgcggtgatatacagatctaaactttcaaatacaatattttcatcaagacaattaattaatcatggtcacgtaagagttaatggaaaaaaagttaacattgcaagttatcaagttagagaagaagacagtatagagattagagacaaatcaaaacaattagctttaattgatatagctcttgcaaacaaagaaagagaagttccagaatatttacaactagatgaaaaaaataaaaaagtaaaatttgtaagagttcctaaatttgaagaagttccttacccagttgtaatggaaccaaatctagtaattgaatattattctagataat

SEQ ID NO: 206472 - DNA, 619 bp, Unknown
  Bacterial polypeptide expressing nucleotide sequence isolated from the Sargasso Sea
atgacaaaaagattaaactctaaacataaagttgatagaaggttaaaggtaaatctttggggaagaccaaagagtccttttaatacaagagcttatcccccagggcagcatggacaaaccaagtcacagaaaccatccgattatggaattcaacttcaagcaaaacaaaaattaaaatcttattacggtaacatgaacgaaagacagttcagaaatatgtataaaaaagcgattatgaaaaaaggtgacacagcagaaaatttaattgggttacttgagagaaggttagatgccgttatttatagatcaaagttatcaaatactattttttcatcgagacagttgattaaccatggtcatgttagagttaatggaaaaaaagtaaatattgctagctttcaagtaaaagaagaagacactattgaaattagagataaatctaaatcactagctttaatagatatcgctcttgctaacaaagaaagagaagtgccagaatatcttcagctagatgagaaaaacaaaaaagtaaaatttgtaagagttccagcttttgaagaagttccttatcctgttgtaatggaacctaatttagtaattgaatattattcaaggtaaa

SEQ ID NO: 206473 - DNA, 586 bp, Unknown
  Bacterial polypeptide expressing nucleotide sequence isolated from the Sargasso Sea
accaacgattgatgcaattaaagttagcaagtctgtagcaattgcaaataaagaagcgatcatttgtggatggcaaataatatcaaagctcttaaaaaaatataaaactaaaattattccagttgattcggaacatttttctataatggaacttactaaaaatgttaccaataatgagattgaagaaataattattactgcttccggaggcccttttttaaaaaagccattttacaagttaagaaaaataaaacctgagcaagctattaaacacccaaattggaaaatgggtaaaaagatttctgtcgattcagcaaacatgatgaacaaagtttttgagattgttgaagcaagtaaactttttcaatttgataaatcaaaatataaaattatgatacacccgcagtcttacgtacattcaataattcgttttaaaaatggtctaatcaaaatggttttatataattctgatatgaaaataccaatttcaaacaccctttatgataagagtgaaaatttaattaatactgttaatataaattttaaaaatcttaataatttaaatttttcaaaaagtaaatactaa

SEQ ID NO: 206474 - DNA, 619 bp, Unknown
  Bacterial polypeptide expressing nucleotide sequence isolated from the Sargasso Sea
atgacaaaaagattaaactctaaacataaagtagatagaagattaaaagtgaacctgtgggggagacccaaaagtccttttaatacaagagcctatcctccaggacaacatggacaaacaaaagctggaaaaccttcagactatggaatccaactccaggctaaacaaaaattaaagtcttattatgggaacatgaatgaaagacagtttagaaatgtttacaaaaaagcaattatgaaaaaaggtgatactgctgaaaatttaattggattattagaaagaagattagatgctgtaatttatagatctaagttatcaaacactattttttcatcaagacaattaattaaccacggtcatgttaaggtaaatggaaaaaaagttaatatagcaagctaccaagttaaagaagaagatacgattgaaattagagataaatcgaaacaacttgctttagttgatattgcacttgctaacaaggaaagagaagttccagaatatctacaattagatgaaaaaaataaaaaagttaaatttgtaagagttccttcttttgaagaagtgccttatccagttgtaatggagccaaatttagtaattgaatattattctagataat

SEQ ID NO: 206475 - DNA, 196 bp, Unknown
  Bacterial polypeptide expressing nucleotide sequence isolated from the Sargasso Sea
ttgaaatacattactgtactcggttctactggttcaatagggactcaaactctcgaaatagctagtgagcagcctgataagtttaaagcaatagctctttctgcagggaaaaatattaatttattaactgaacaagttaaaacccataaaccagagatagttgcaattgaggatgaaaatctcatagaagatttaa

SEQ ID NO: 206476 - DNA, 766 bp, Unknown
  Bacterial polypeptide expressing nucleotide sequence isolated from the Sargasso Sea
taataaaattagaatattaaatgaaaaagaacttactcattatttaaataattctcaaagtgattttagtattttggctatttcgggttaccaatctttatattttttaaaacctataattttaaatacaaaaaatttaggaattgttaataaagaatgcattgtttcagcaggtcatttgattgataaattagtaaaaaaatcaaatataaaaatttttccattagactccgaacatttttctttaaaaaaatattttgataataaaaaacctgaatttaaaaaaatcttcattacagcttctggaggaccattttacaaaaaaaaatggaaagatataaagttatctaactataaagaagctgttaatcatcctaaatggaagatgggttacaaaaatagtattgactcagctactttagcaaataaatgtttagaattaatagaagcccattatttatttaaaataccttttagcaaactagatatattgattcatcctcaagctttagtacattctgttatagaatttaataattatacagcagaattaaattatttttatcataatatggatattccattaataaatttcttgaatttgtataacaaagaatcatcatttcttaattttactcataaaaaatatgattttaataaaaatttaatattagaatttaatacaccaaattcaaaattatttcctatattgtcaatttttaacaagatagataagaaaaacccaagagagtttattaaatttaat

SEQ ID NO: 206477 - DNA, 247 bp, Unknown
  Bacterial polypeptide expressing nucleotide sequence isolated from the Sargasso Sea
gaaaaaaagttaatattgcgaagttatttagtaaaagaagaggattcaattgagataagagacaagtctaaacaattagcaattgttgatattgccttagcaaataaggaaagagaaactccagaatatattcaaatggatgaaaaaaataaaaagcttaagtttataagaactccaaagtttgatgaagttccttatccgattgttatggaacctaacctagttattgaatattattctagataat

SEQ ID NO: 206478 - DNA, 601 bp, Unknown
  Bacterial polypeptide expressing nucleotide sequence isolated from the Sargasso Sea
atgacaaaaagaacaaattctaaacacaaagtagatagaaggcttagagtaaacctttggggaagaccaaagagtccatttaatacaagagcttatcctccgggccagcatggacaaactaaagcggctaaaccttctgactatggtgttcaattacaagcaaaacaaaaattaaagtcttattatggcaatattaacgaaagacaatttagaaatctttatagaaaagcaataaaaaaaaggggcgatactgcagaaaatttaattggtttacttgaaagaagattagatgcaattgtttatcgagcaaaattatctagtacaatattttcttcaagacaattaataaatcatggacatgtgcgagttaatgggaaaaaagtaaatattgcgagttatcaagttaaggaagaagataatatagaaataagagacaaatctaaacaactggcaattattgatatagcactagcaaacaaggaacgtgaaattccagaatatcttcaagtagatgagaaaaataaaaaaattaaatttgttagaatacctaaatttgaagaagttcgttacccagttgtaatggaaccacaatcttgtagtt

SEQ ID NO: 206479 - DNA, 213 bp, Unknown
  Bacterial polypeptide expressing nucleotide sequence isolated from the Sargasso Sea
aagaagaggatactattgaaattagagataaatctaaacagcttgctttaattgatattgctcttgccaacaaagagagagaagttccagaatatttacaattagacgaaaaaaataaaaaagttaaatttgttagagttccgtcttttgaagaagttccttatccagttgtaatggagccaaatttagttattgagtactattcaaggtaaa

SEQ ID NO: 206480 - DNA, 619 bp, Unknown
  Bacterial polypeptide expressing nucleotide sequence isolated from the Sargasso Sea
aatgactaaaagattaaactctaaacataaaatagatagaagattaaaagtaaatctgtggggaagacccaaaagtcctttcaacactagagcttatggacctggtcagcacggccaaaccaaaacatctaaaccttccgattatggaattcaactccaggcaaagcaaaaattaaaagcttattatggaaatattaatgaaagacaatttagaaatatttacaaaaaggcagtaatgcttaagggtgatacaggtgaaaacttaataggtcttttagagagaagattagatgcagtaatttatagagcaaaatttgcaacaacaattttttccgctagacaattaatcaaccatggtcacgtaaaagttaatggtaaaaaagttaatattggaagctacttggttaaagaggaggatactattgagataagagataaatccaagcaacttgctataattgatatcgctcttgcaaataaagaaagagaaactccagaatatatccaaatggatgaaaaaaacaaaaaattaaagtttgttagagtgcccaagtttgatgaagttccatatccaattgttatggaaccaaatttagttattgaatattattctagataa

SEQ ID NO: 206481 - DNA, 372 bp, Unknown
  Bacterial polypeptide expressing nucleotide sequence isolated from the Sargasso Sea
gtacgccaattgcttacgggcttgcccatccggctcgtattgatgccggcgtcaggccactcgatttttcggatatgaaagacttcagttttcatacaccgtgttttgagcgttatccaaatttgaagttagcgatagaagcatgtcgagcaggacaagcagcaacaacatggctcaatgcagcgaatgaagtcgcggtgtcacactttcttgaagggcatatcgcgttttgtgatattgcgtacgtcaacgaatcaacgcttaatgctatgtcttccgttgacgttacctcgattcagcaaatagtagagcaggatgaattagctagggtagctgctgagtctgttattaaggttaaggtagcatgttagg

SEQ ID NO: 206482 - DNA, 619 bp, Unknown
  Bacterial polypeptide expressing nucleotide sequence isolated from the Sargasso Sea
atgactaaaagattaaactctaaacacaaaatagatagaagattaaaagttaacctttggggaagacccaaaagtccttttaataaaagagcttatggtccaggacaacatggacaaacaaaacagggcaaaccatctgattatggtattcaacttcaagctaaacaaaagcttaaagcttactatggaaatattaatgaaagacaatttaggaacatttataaaaaagcttcaatgttaaaaggtgatactagtgaaaatttaattggtcttttagaaagaagacttgattcagtaatttacagagctaaatttgctacaacaattttttctgcaagacaattaatcaatcatggccatgttaaagttaatggaaaaaaagtaaatatttcaagttatttagtaagagaagaagacacaatagaaatacgagataaatcaaaacaaatggctttagtggatattgctctcgctaacaaagaaagagaaacaccagaatatattcagcttgatcaaaagaataaaaaatttaaatttgtaagaatacctaaatttgaagaagttccttatcctgtggtaatggaacccaatttagtaattgaatattattcaagataat

SEQ ID NO: 206483 - DNA, 514 bp, Unknown
  Bacterial polypeptide expressing nucleotide sequence isolated from the Sargasso Sea
cagcacggtcaaacaaaaacatctaaaccttcagattatggaattcagttacaagctaaacaaaaattaaaagcttactatggaaatattaatgaaaaacaattcagaaatttttataaaaaagcagttatgcttaaaggggatactggtgaaaacctaatcggacttttggagagaagattagatgcggtgatttatagagcaaaatttgcaactaccattttctcatctagacaattaatcaaccatggtcatgttagagtaaatggtaagaaagttaatataggaagttatttagttaaagaagaagatacaattgaaattagagataaatctaagcaactagcaatcattgatattgctttagctaataaagaaagagaaacaccagaatatatccaaatggatgaaaaaaataaaaaattaaaatttgtaagagttccaaaatttgaggaagttccttatcctgtaattatggaacctaatctagtaattgaatattactctagataat

SEQ ID NO: 206484 - DNA, 210 bp, Unknown
  Bacterial polypeptide expressing nucleotide sequence isolated from the Sargasso Sea
aagaagatacaattgaaattagagataaatctaaacaacttgctttaattgacattgctcttgcaaacaaagaaagagacgttccagaatatttacaattagatgaaaagaacaaaaaagttaaattcgtcagaatccctacttttgaagaagtgccttatccagttgtaatggagccaaacttagtaattgaatattattctagataat

SEQ ID NO: 206485 - DNA, 781 bp, Unknown
  Bacterial polypeptide expressing nucleotide sequence isolated from the Sargasso Sea
aaaacacatttctaaaaaaactcactcagaagttgtcccaattgattcagagcatttttctatacagcaattaacaaaaaattacaaagatcatgaaataaagaagatttatatcactgcctcaggaggcccattcttaaatagagctttaagagtttttaaaaatataaaagcaaaagacgctataaaacatccaaattggcaaatgggtaaaaaaatatcaatagattcatccaatatgatgaacaaagttttagaacttatcgaggcattcaaactttttccatttaaagaaaataaatatgaaataattgttcatccgcaatccctcattcacgcaatagttttttttaaaaatggccaaacaaagtttctctaccatgagacggatatgacaattcccatagcaaatgcaatatacaacaatcaaattaatattgaaaagttcatccaaacaaaaaataattttttaaaaaatttacaaagtttaaaatttgaaaaaattgataaaaaaagatttccaattgttacacttttgccaaaaatcattaaacaggattctgccccaatagttttaaatgcaagcaatgaagtgtttgtagatagttttataaagggaaaaataacatttaattctatctattcgtatctaagggctgtttttagggatagagattttggtaaatatgctataaaaaagacaccaagcctcaaggacatttatataattgataaatgggctaggaaaaaagcagaagagttagtgaaaaaagggatttga

SEQ ID NO: 206486 - DNA, 201 bp, Unknown
  Bacterial polypeptide expressing nucleotide sequence isolated from the Sargasso Sea
attgaaatacattactgtgctaggttctactggttcaatagggactcaaactctcgaaatagctagtgagcagcctgataagtttaaagccgtagctctttcggcaggaagaaatattaatttattaacagaacaagttaaaacacataaaccagaagtagttgcgattgaggatgaaaatcttatagataattttaaaag

SEQ ID NO: 206487 - DNA, 619 bp, Unknown
  Bacterial polypeptide expressing nucleotide sequence isolated from the Sargasso Sea
aaagaaaaattttcaaatatttcagttaaaaaagcactcaatcatccttattggaggatgggaaaaaaaataacaatagattctgcaacattaatgaataaagtttttgaagtcattgaagcaaaaaatatttttaatttagattatggaaaaatttcaattttgacacaccctaaatcttacttacatgcgattgtaaagtttaagaatggattaacaaaattactgttacatgaacctgatatgaaaattccaatttataatgcaatttattttccacatataaaaagaattaaaactaataaactaaattttaaaattttaaataacctagaacttagggaagtagatataaaaaaatttcctttaattaagttattaaataaacttccaaattatccatcattatttgaaacagttttaataactattaatgattatctagtttttaaatttttaaaaaagaaaattaactttccaaaattaatcaaattaatcgatagaatttcaaatttgaaagaatttcaaaaatttaagaaaattaagccaaaaaatatagatgatatctatcaactaagagattatgtaagtttaaaattagataatttaggtatataaa

SEQ ID NO: 206488 - DNA, 422 bp, Unknown
  Bacterial polypeptide expressing nucleotide sequence isolated from the Sargasso Sea
catgataaaaaaaattgcaatcttaggatctacaggatcaattggtacagcatcgttaaatatatttcaaaaggatttaaaaaaatttaaaattgtgcttttatccgctaattctaactattcacttataagaaaacagataaaaatatacaaaccaaagtattttgttattaacgataagactgtttttagaaagattaaaaacaagtatggaaaaaataaagtaaaaatttataataaattttctgacattaatttaaaaaaaataaaatttgatattacaatttctgcgatagtaggaatcgcaggttttgagcccactataaagtttattaatcatagtaaaaagattttgcttgctaacaaagaaacaattgtttgtggatggcatattgttaaaaatatttctaaaaacaataaaa

SEQ ID NO: 206489 - DNA, 196 bp, Unknown
  Bacterial polypeptide expressing nucleotide sequence isolated from the Sargasso Sea
ttgaaatacattactgtgctcggttctactggttcaatagggactcaaactctcgaaatagctagtgagcagcctgataagtttaaagccgtagctctctcggcaggaagaaatattaatttattaactgaacaagttaaaaaacataaaccagaagtagttgcaattgaggatgaaaatcttacagaagattaaa

SEQ ID NO: 206490 - DNA, 802 bp, Unknown
  Bacterial polypeptide expressing nucleotide sequence isolated from the Sargasso Sea
aattataaaaataaaattggtaaaactaaaattttagactttaatgaattattaagttacttatcttcaagtaaatctgacctaagcgtacttgcaatttctggatataaatctttatactttctcgagcatataattgaaaacaccgataatcttggaattgcaaataaagaagctatagtttctgcaggacatatttttcaaaaaaataaatttttttacaagacaaatatttttccattagactcagagcacttttcattgtttgattattttaaaaaaactaaaattaaaaataatattaaaaattatattattactgcctctgggggcccattctataaaagaaaatttaaaaatttgaaaaatattaaattttcggaagcaattaatcatccaaaatggaaaatgggttataagaatagtattgactcagctacattagttaataaatgtcttgaattaatagaagcacattatctttttgatataccatttgataaaatgaaaattcttattcatcctcaagctattgtacattctgctattgaatatgagaattttgtaactcaatttaatttattcaaaaatgatatgaaaattcctatttttaatttcttgattaactctaaagtagctactaattttaatcaatctaagttatttcttaaagattactcccaatttagttttaaagatgttaataatgatatttttcccatttataaattttttaaaagtatagacaaaaaaaaacctcaaaatttaataaaatttaatataggaaatgaatttgcagtaa

SEQ ID NO: 206491 - DNA, 532 bp, Unknown
  Bacterial polypeptide expressing nucleotide sequence isolated from the Sargasso Sea
tagagcttatgggccagggcagcatggtcaaacaaaaacatcaaagccatctgattatggaattcagctgcaggctaaacaaaaattaaaagcctattatggcaatattaacgagagacaatttagaaatatttacaaaaaagcagtaatgctcaagggtgatactggtgaaaacttgattggtcttctcgaaagaagattagatgctgtgatttacagagcaaaatttgcaacaacaattttttcagctagacaattaatcaatcatggccatgtaaaagtaaatggtaaaaaagtgaatattggaagctatttagttagagaagaagattcaattgagataagagataaatctaaacaacttgcaataatagatattgctcttgcaaataaagaaagagaaactccagaatatattcagatggatgaaaaaaacaaaaaactaaagtttgttagagtaccaaaatttgaagaagtcccatatccaattgttatggagcctaatttagtaattgaatattattctagataa

SEQ ID NO: 206492 - DNA, 514 bp, Unknown
  Bacterial polypeptide expressing nucleotide sequence isolated from the Sargasso Sea
acaacatggtcaaacaagatcgtctaaaccatctgattatggaatccaattacaagcgaagcaaaagttaaaagcttattatggtaacattaatgaacgtcaattcagaaatatttataaaaaagctgtaatgctaaaaggtgatacaagtgaaaatttaattggtttattagagaaaagattagatgctattatctatagagcaaaatttgctacaactatattttcagcaagacaattaattaatcatggtcatgttaaagtaaacggaaaaaaagttaatatttcctcgtactcagttaaagaggaagatacaattgaaattagagataaatctaaacaacttgctattattgatattgcattagcaaataaagagagagaaacacccgaatatattcaaatggatgaaaaaaataaaaaattaaagtttgtgagaattccaaagtttgaagaagttccttatccaatagttatggaacctaatttagttattgaatattattcaagataa

SEQ ID NO: 206493 - DNA, 411 bp, Unknown
  Bacterial polypeptide expressing nucleotide sequence isolated from the Sargasso Sea
ttattcattcaatggtgaattatgatggttcctacaaagcacatttaggcacacccgatatgaaagtccctatacaatatgcgttaacctatccagcaagaaaaacattggctatcgatagtttagatttaagtgatttaagtcttgcatttcaatctcctgattataaaagatatcccattctaggtcttgtacatgagcttataaagttaggtggcaatagggtagctgttatgagtattgcgaatgattacatagtacaaaaatttctagatgaaaaaatttcctttaatcaaatattcattcttactaaagaggttgtaagcgaatttggatctgatgatctaccttctttagaagatttacttattttagatgaaaatattaagctatatttagaaccaaattaaa

SEQ ID NO: 206494 - DNA, 501 bp, Unknown
  Bacterial polypeptide expressing nucleotide sequence isolated from the Sargasso Sea
atcatttatttgatataccttttgagaatattgatgtcgtcgttcatccgcaaagcatgattcatagtatggtatcgttttctgacggaaatatcttagcgcagctaggacctcctgatatgaggtatcctattcagtatgtcttaacttatcctgaaaaaaaagggtgtccatggcctaaattaaccttatcagacttacaagatcttcagttttttaaacctgatactactaaatttcctttattatctttagcctatgaaatgggtaaaaaaggaggctcatatccggttgttttaaatgctgcaaatgaagctattgttggtttattccttcaggaaagaatttcatttgtagacatttataatctgatcaagtatgttatcactacaacgcatcatcaagatgaccctagtttagaggatatcgtttccattgatttagatgttaagaatcgtgttaatcatgataatttcttaaaagagtgtcacgctctttaat

SEQ ID NO: 206495 - DNA, 808 bp, Unknown
  Bacterial polypeptide expressing nucleotide sequence isolated from the Sargasso Sea
taaagaatctattatttgcggttgggatattatcgaaaaaactgctaacaaatttagtgttaaaattatccctgttgattcagaacatttttcgatattaaaattacttgaaaatcaaaatataaacgatatcaaaaaaatttttatcacagcttcaggcggcccttttttgaattataagcccagtcagcttaaaacaataaccccctcgcaagcgttaaggcacccaaaatggaaaatgggaaaaaaaatttcaatagactctgctaccatgatgaataaagttttagaaataattgaagctcaaaaattattcaaattacctaataacaagttggaaattattattcatccagagtccttagtgcatgcaattatagaatataaaaatggtttattaaaatttatttaccatgaaacttcaatgatcatacctttggcaaatgccatatttgatggaaaattaaatataaaagatttttattttaaggaaaaaaccatagaaccaaacataaagaatttaactttctcaagagtagacaataaaattttttcaataataaagttaaaaaataggttaaatgagcacccatcttcctcaattataattaatgcggctaatgaaatattagttgatcattttcttcgaaaaaaaataccttttttaagcatatcaaaaatcattatgaccattctgaacgatagaaattataagaaatatgctataaggaaacctaaaaatgttgaccaaatctatgaaatagatatttgggcaagaaaagcaactatggataagataaatttataa

SEQ ID NO: 206496 - DNA, 705 bp, Unknown
  Bacterial polypeptide expressing nucleotide sequence isolated from the Sargasso Sea
atgtaaaaaaaatttatattactgcttctggaggaccttttttaagaaaaacattaaaatcttttaagaaaataaatgctacagaagcatccaaacatcctaaatggaaaatgggtaaaaaaatatcaatagactcgtcaaatcttatgaacaaaacattagaaattattgaggcctatagactttttccatttgacccaaaaaaatatgaaataataattcatccacaatctctagtacacgcaatagttttttttaaaaatggtcaaagtaaattcctatatcacgaaacggatatgaaaattcctatcgcaaatgctatttatgataataatcttgatatttcaaatttattaaaaaaaaaagataatcttttatcaaatttaaaatttttaaaatttgagaaagtagataaaaaaagatttccaattgttactcttttaaatgataaaattcttaaaaattctgccccaataatccttaatgctagcaacgaaatattagtggatagttttattaaaaagaaaataccttataatgaaatctatcaatatcttaaaagagtttttaaagatagagatttcaacaaatatgctataaaaaagacccctaatattaatgagatttataaaattgatgattgggcaagaaaaaaaaccattgatataattagaaaaaaaaataatgaaaaatacttttattaaa

SEQ ID NO: 206497 - DNA, 792 bp, Unknown
  Bacterial polypeptide expressing nucleotide sequence isolated from the Sargasso Sea
gtattgtttcatgtggtcatttatttagtaaattattaaaaaaacacaaagtcaatatattccctttagattctgaacatttttcaatacacaatttagaaaatcaaaaaacaaattctctaaaaaatttatataaaatttatcttactgcttcaggtggcccattattaaattataataaaagaagaatgaataatataagccttaaagaagttgttaatcatcctaaatggaaaatgggatataaaaatagtatcgactctgcaactttagctaataaatgtttagaattaattgaagctatgtatttatttcaagtatcaatgaaagatttagatatagttattcaccctgaagctttgatacattctattattgaatataataattcaacatctattttcaattatttctacaacgatatgtcaattccaatatttcattttatgaattatattacaaataaaaaattaaaaaaaatggataaatttaaaataaataaaaatttcaatttaaatttcattgaagttgataaaaataaatttcctatttatgatatatttaaaaatatagattataattctcctcaacaaataattaaatttaatgctgcaaatcaatatgctgtagaattatttaaaaaagatatgataaaatacattcaaatacccaaaataattgaaaaaagtatttcttatgaattaaatgcttctattaattctataggtagtataattaaatatgaaaaagaatttaataaaattatgataagtaattatgaaaaagcttaaa

SEQ ID NO: 206498 - DNA, 388 bp, Unknown
  Bacterial polypeptide expressing nucleotide sequence isolated from the Sargasso Sea
tgcaatgttaaagggagatactggagaaaattaattggtcttttagaaagaagattagatgctgtaatttatagagcaaagttttcaacaacaattttttctgcaagacaattaattaaccacggccatgtaaaagtaaatggtaaaaaagtaaatatatcaagttatttagttaaagaggaagactcaatagaaattagagataaatcaaaacaattagctattatagatattgcattagctaataaggaaagagaaattcctgaatatatccaaattgatcaaaaaaataaaaaatttaagtttataagaattccaaaatttgaagaggttccttatccaattatcatggagcccaacctagtaatagaatattactcaagataat

SEQ ID NO: 206499 - DNA, 578 bp, Unknown
  Bacterial polypeptide expressing nucleotide sequence isolated from the Sargasso Sea
attaaaagtaaatctatggggtagaccgaaaagcccatttaacacaagagcttatggaccgggtcaacatggtcaaacgaaaacttcaaaaccttcagattatggaattcaattacaagcaaaacaaaaattaaaagcttactatggtaatataaatgaaaaacaatttagaaatatttataaaaaagcgagtatgctaaaaggtgatactagtgaaaacttaattggtttacttgagcgaagactagactcagtcatttacagagcaaaatttgcaacaactattttctcagctagacaattaattaatcatggccacgttaaagtaaatggtaaaaaaattaatataggaagcgctttagtaagagaagaagatacaattgaaataagagataaatcaaaacaattagctatagttgatattgccctagcgaataaagaaagagaaactccagaatatattcaaatggatgaaaaaaataagaagtttaagtttgtaagaattcctaagtttgaagaagttccttatcctgtagtaatggaacctaatttagtaattgaatattattcaagataat

SEQ ID NO: 206500 - DNA, 619 bp, Unknown
  Bacterial polypeptide expressing nucleotide sequence isolated from the Sargasso Sea
atgactaaaagattaaactctaaacataaagtagatagaagattaaaggttaacctttggggtagaccgaaaagtccatttaatacaagagcctacggaccaggacaacatggtcaaactagatcatctaagccttcagattatggaattcagttacaagctaagcaaaaattaaaagcttactatggtaatataaatgaaaggcaatttagaaatatttataaaaaagcagcgatgcttaaaggtgatacaggtgaaaatttaataggtttgcttgaaagaagattagatgctgtaatttacagagcaaaatttgcaacaacaatattttcagctagacaattaattaatcatggacatgttaaagttaatggaaaaaaagttaatattggaagttactcagttaaagaggaagattttatagaaattagagataagtccaaaaaattagcaattattgatattgcccttgctaacaaggaaagagaaacaccagaatatcttcaaatggatgaaaaaaataaaaaattgaaatttgttagaattcctaaatttgaagaagtaccatatccaattgttatggaacctaatcttgttatcgagtattactcaagataga

SEQ ID NO: 206501 - DNA, 619 bp, Unknown
  Bacterial polypeptide expressing nucleotide sequence isolated from the Sargasso Sea
atgacaaaacgattaaactcaaaacacaaagtagatagaagattaaaagttaatttatggggacgacctaaaagtccatataatacacgagcttatcctccaggacaacacggccaaactaaatccgcaaagccatctgattatggtattcaattgcaagcaaagcaaaaactaaaatgttattacggaaatatgaatgagagacaatttagaaatatgtataaaaaagctataatgaaaaaaggagatactgctgaaaatctaattggtttacttgagagaagactagatgctgtaatttatagatctaagttatcaaatactattttttcatcgagacagttaataaatcacggccacgtcagagttaatggaaaaaaggtaaatatttctagttaccaagttaaagaagaggatagcattgaaattagagataaatcaaaacagttagcgttgattgatattgctttagccaacaaagaaagggaagttccagaatatttacaattagacgaaaaaaacaaaaaagttaaatttgtaagagtaccaaaatttgaggaagtgccttaccccgtggtgatggagccaaacttagtaattgagtattattctagataat

SEQ ID NO: 206502 - DNA, 265 bp, Unknown
  Bacterial polypeptide expressing nucleotide sequence isolated from the Sargasso Sea
ggagaacttgaaaaacttatcaataaagaagagaatgatattattgtatgtgcaacatctggatttgcagggctaaaagctgcttacattgctgctaagacgggaaagaaaattttattagcaaataaagaaagcattgttgccgggggagatttaattttacccttagccaaaaaaaataaccctgaaattatcccaatagacagtgaacataaggcaatctttcagggcttatctggtgagaagggtacagaagaagttaaac

SEQ ID NO: 206503 - DNA, 724 bp, Unknown
  Bacterial polypeptide expressing nucleotide sequence isolated from the Sargasso Sea
tccggtagactctgagcatttttctattttaaatttattaaaaaatcactcaataaaagaaataaaaaaaatatacattacagcatctggaggtccttttttaaatttcaatagaagacaatttaaaaaaataaaaccatctgatgcattaaatcatccaaaatggaaaatgggaaaaaaaatttctatagactcgtctacattaatgaacaagatattcgagttggttgaagctaaaaaattatttaatatatcaaatgataaacttgatattcttgttcatcctgactcacttgtgcatgcaattattgaatttaaaaatggtttagttaaatttatgtaccatgatacttctatgataataccgcttgcaaatgcaatatttgatggaaaaattaatattgaggatttttatacaaataaaaaagcaaaatttaaagacaaagtaattaaagatttaagatttagcaaagtgaataatgaggcattccccctaataaagttaaaaaataggattttagaatttccctctactccaattattgtcaatgcagctaatgaaatattagttgatcattttctcaataaaaaactacaatttttaaggattaataaaatcataatgagcgttcttaatgatagaaattataaaaaatatgctataaggaagcctaaaatattaaccatattattaaaattgataaatgggctagaaaacagctaa

SEQ ID NO: 206504 - DNA, 427 bp, Unknown
  Bacterial polypeptide expressing nucleotide sequence isolated from the Sargasso Sea
tatgaatgaaagacagtttagaaatgtttacaaaaaagcaatcatgaaaaaaggtgatactgctgaaaacttaataggattattagagagaagattagatgctgtaatttatagatcaaagttatcaaacactattttttcatcaagacaattaattaatcatggtcatgttaaagttaatggaaaaaaggtaaatattgcgagttatcaagtcaaagaagaagatacaattgaaattagagataaatctaaacaacttgctttaattgatattgcgcttgcaaacaaagaaagagaagttccagaatacctgcaattagatgaaaagaataaaaaagttaaatttgtaagagttccatcttttgaagaagttccttatccagttgtaatggaaccaaacttagtaattgaatattactctagataa

SEQ ID NO: 206505 - DNA, 626 bp, Unknown
  Bacterial polypeptide expressing nucleotide sequence isolated from the Sargasso Sea
ttacttaatgacaaagagattaaattctaaacataaagttgatagaaggcttagagtaaatttatggggtagaccaaaaagcccatttaatgcaagagcatatcccccaggacaacatggacaaactaaatcgacaaaaccatccaattatggtgtgcaacttcaagctaaacaaaagttaaagtcctattatggaaatattaatgaaaggcaatttagaaatctttatagaaaagctataatgaaaaaaggtgatacagcggaaaatttaatcggtctgttagagagaagactagatgcaattgtttatagagctaaattatcaactactattttttcttcaaggcaactaatcaatcatggtcatgttacagtaaatggaaaaaaagtgaatataccaagctatcaacttaaagaagaagacaccatagaaataagagataaatcaaaacaactggcgctaatcgacattgctttagcaaataaagagagggaagtgcccgaatatttacaggttgatgaaaaaagtaaaaaagttaaatttgttagaattcctaagtttgaggaagttccttatccagtagcaatggaacctagtctggttgtagaatattactctagataat

SEQ ID NO: 206506 - DNA, 805 bp, Unknown
  Bacterial polypeptide expressing nucleotide sequence isolated from the Sargasso Sea
gcaaatacaaattatttaacgataaaaaaacaaatccaaaaatttaaaccaaaattttttgttgttaacaataaagttatatttaaaaaaattaaaaaaaaatttattcgttcaaaaacaacaataataaataaattttcagatatttcaaaaaatgtaaaatttgacattacaatatcatcgattgttggaattgctggacttgagccaacaattttttttactaaaaagagtaaaaaaatattaatagcaaataaagaaagtatcatttgtggatggcatctgataaaaaaaatttcaaaaaaatataaaactaaaattatccctatagactctgaacatttttcaatttaccagctaacaaaaaattacaaagataatgatattaagaaaatttacataactgcgtcaggtggaccgtttttaaaaaaaccattaaatttttttaaaaaagcaaaagcaaatgatgccgctaagcatcctaattggaaaatgggaaaaaaaatatctatcgactcatctaatttaatgaacaaagttttcgaagttgttgaagcttataagctttttccgtttagtaaaaataaatatgacatattgattcacccgcaatctttaatacatgcaattgttttatttaataatggacaatgtaaatttttatatcatgaaactgatatgagaataccaattgctaatgctatttatgataatcaaataaatattaaaaatgtgtttaaaagcaaaagtaattttttaaacaatttacaacatctaagattgaaaaagtcgataaaaaaaagtt

SEQ ID NO: 206507 - DNA, 514 bp, Unknown
  Bacterial polypeptide expressing nucleotide sequence isolated from the Sargasso Sea
atgaaaaaaaaaattgccatattgggatctactggatcaattggacaagcttctttaaagataattaaaaataatttaaaagaatttaatatttttttattatctggaaattcgaaccagatattaattaatgcacaaataaaaaaatataaaccaaaggttttcgttataaacaattttgctgtctataaacaaataaaaaaaaaatataagaataaaaaaattaaaatttataataaattttcacatattcctttatccttaacaaaattagatattacaatatcagccattgttgggattgcaggtttagaacctactatacagtttataaaaaaaagtaaaaaaattcttttagctaataaagaaacaataatttgtggttggcatataattagaaatctttgtaaaaaaactaaaactaaaataattccaattgattcagaacatttttcaattgatcagttaacaaaaaattttcaagataaagatatagaaaaaatttatataacag

SEQ ID NO: 206508 - DNA, 178 bp, Unknown
  Bacterial polypeptide expressing nucleotide sequence isolated from the Sargasso Sea
caaacaattagcaatagttgatatagctttagcaaataaagagagagaaactccagaatatattcaaatggatgaaaagaacaaaaaatttaaattcataagagtgcccaagtttgaagaagttccttatccaattgttatggaaccaaatttagttatcgaatattattctagatag

SEQ ID NO: 206509 - DNA, 619 bp, Unknown
  Bacterial polypeptide expressing nucleotide sequence isolated from the Sargasso Sea
atgacaaaacgattaaattcaaaacataaagtcgatagaagacttaaggtaaatttatggggaagacccaaaagcccttttaacacaagagcttatccaccaggacaacacggacaaacaaaatctgctaaaccttctgattatggaatccagcttcaagctaagcaaaaactaaaatgctattatgggaacatgaatgaaaaacaatttagaaatatgtacaaaaaagcaattatgaaaaaaggagatacagcagaaaatttaataggattgcttgagagaagacttgatgctgtaatttatagatcaaaattatctaatactatattttcatctagacaactaattaatcatggtcatgttagagttaatggaaaaaaggttaatatttcaagttaccaagttaaagaggaagatagtattgaaataagagaaaaatctaagcaattagctttaatagatattgcacttgctaataaagagagagaagttcctgaatatttacaattagacgagaaaaacaaaaaagtaaaatttgtgagagtgccaaagtttgaagaagttccataccctgtagtaatggagccaaatttggtaattgaatattattcaagataat

SEQ ID NO: 206510 - DNA, 610 bp, Unknown
  Bacterial polypeptide expressing nucleotide sequence isolated from the Sargasso Sea
atgaatattaatatctacggaagcactggaacaataggaaaaaaaacattaaatattatagataaatttttcccaaatattaaaattaatttattatgtgcaaattcaaatgatgtacttttattaaaacaaataaaaaaatttaatccaaaatatgtacatatctatgataaaaataaattaagtaaattaaaaaagagtgtatctaaaaaaattacatttcttgattttgatgaattaaataattatttgtatacaaataaatctgaattaagtatccttgctatttctggttataaatctctatattttttagatcaaattatttataatacagataatcttggattagttagtaaggaagccattgtttctgctggacacatttttaaaaaaaaaaaatatttccaaaaaacaaatatatttccattggactctgaacatttttcattatttgactttatgcaatctagtaaagaaaataatatatataaaatcataattacagcatctggtggaccttttcataaaaggaaatataatgatctgaaaaatattaaatttgaagaagctataaaacacccaaagtggaatatgggttataaaaata

SEQ ID NO: 206511 - DNA, 811 bp, Unknown
  Bacterial polypeptide expressing nucleotide sequence isolated from the Sargasso Sea
aaaaattttgatataattttattaactgcgaacaacaattataaaaaattagttcaacaagccaaagaatttaatgttaaaaatgttttaattaaaaatgaaagttattatgaaataacaaaaaaaagtctaaaaaggaattcaacaaaagttttttcaggagacactccaattaaaaaaatctatccaaaaaaattagattatacaatttccgcaatagtaggaatagccggtttacaaccaacacttgatgcaattaaaaatagtaaatcagtagctattgctaataaagaatctattatttgcgcttgggacattttaattaaagaaattaaaaaacataaaacaaaaatattaccagtcgactcagagcacttttctattcttgaactcactaaaaacatcaaggatcaagaagtcgaagagataattataacagcatctggaggtccctttttaaatttacctttaaataaattatataaagtaaaaccaagtgaagctatcaatcacccaaattggaaaatgggtaaaaaaatatctgtagattcctcaaacttaatgaataaggtatttgaagttattgaagcttgtaaattttttaatttcaattcaaaaaaatatagaataatgattcatcctcagtcgtacgttcattcaataataagatttaagaatggattagttaaaatgatacttcataacgctgatatgaaaataccaatatccaatacattgtatggtaaaaaaaactatattccaaatattaaaaaaattgatagtaaaatattaaataatttaaattttagcg

SEQ ID NO: 206512 - DNA, 619 bp, Unknown
  Bacterial polypeptide expressing nucleotide sequence isolated from the Sargasso Sea
atgacaaaaagattaaactctaaacacaaagtagacagaagattaaaagtaaacttatggggtagacctaaaagtccttttaacacacgtgcatatggtccaggccaacatggtcaaacaaaaagttcaaaaccctctgattatggtattcagcttcaagcaaaacaaaaattgaaagcctattatggaaatataaacgagagacaatttagaaatatctataaaaaagcgacaatgcttagaggagacactggagaaaacttaattggtttattagaaagaagattagatgctgttatttacagagcaaaattttcaacaacaattttttcagcgagacaattaattaatcatggacatgttaaagtaaatggcaaaaaagttaatatctcaagctatctggttagagaagaagacactatcgaaattagagacaagtcaaagcagttagcaattattgatattgctttagcaaataaagagagagaaactccagaatatatacaaatggatttaaaaaataaaaagtttaaattcgtaagaaccccaaagtttgaagaggttccttatccaattgttatggaaccaaacttagtaatcgaatattactcaagataaa

SEQ ID NO: 206513 - DNA, 222 bp, Unknown
  Bacterial polypeptide expressing nucleotide sequence isolated from the Sargasso Sea
atcaactgaaagaagaagaaactattgaaataagagacaaatcaaaacagttagctttaattgatatagctttagcaaataaagaaagagaagttcctgaatatcttcaagtagatgaaaaaaatagaaaagttaaatttgttagaacacctaagtttgaggaagtgccttacccagttgtgatggaaccaaatctcgtaatcgaatattattctagataaa

SEQ ID NO: 206514 - DNA, 619 bp, Unknown
  Bacterial polypeptide expressing nucleotide sequence isolated from the Sargasso Sea
atgacaaaaagattaaactctaaacataaagttgatagaagacttaaagtaaatttatggggcagacctaaaagtccttttaatactagagcatatggaccaggacaacatggtcaaaccaaaacatctaaaccatcggattatggaattcaattacaagctaaacaaaaactgaaagcttactacggtaacattaatgaaagacaatttagaaatatttacagaaaagcaagcatgcttaaaggagatactagtgaaaatcttattggtttactggagagaagattggatgcggtaatatatagagcgaaatttgcaacaacaatattttctgcaagacagttgattaatcatggacatgtaaaagtaaatggtaagaaagtaaatatttcaagttatatggtaaaagaggaagatacaattgaaataagagataaatcaaaacagcttgcgattattgacatagctttagctaacaaagaaagagaaactcctgaatatattcaattagatgaaaaaaataaaaaatttaaatttgttagggtgccaaaatttgaggaagttccttatccaattgttatggagccaaatttagtaatagaatattactcaagataaa

SEQ ID NO: 206515 - DNA, 906 bp, Unknown
  Bacterial polypeptide expressing nucleotide sequence isolated from the Sargasso Sea
atgtgatgctgtgccattaaaagggttaaatcgtattttagttaacaaaggtttagaggtgatgcagaagcttaataatccaggattaagagccttagcagaaaaatctaatataaagcagaaggtgtctgtttatgatttaggatttaaattgggccccagaataaatgctgcaggtagacttggaaggtcaagttttgggacagatttattgacagcaagtcagaaactaattgctgatcagatttcagaagagttaaataagtttaattctgaacggcgaacaattgaaagttatgtattagaccaggcgattgaacaagttaccaaggataaacttaagaataaagttttaattgtttatggtgagggatggcatgaaggagtaataggaattattgctagtcgtttaaaagataaatttaataaacctactttagtattttcaattaatgatgatgtggccaagggatctggaagatctctcaaaggaattgacttaggaagtttagtggttgctgctcaacaaagtcaaataattttaaagggtggcggtcatgcaatggctgcgggtctaacaatggaaaaaaataaaatagatgaattaagtcaattctttgaaaagaaattgaataaggttgatgcgattgagactaactttaccaccatgcttgctgatgataaacttagtatttcagcagtaaatttagaggtatatgatgagattgaaaaagttggaccatttggctcagagaatcctgagccaaattttatatttgaaaatattaagctagcttctgtggatcagattggggaagatcatctcaaatgtctcataaaatcaaatgaaagctctttcattgaggcaatggcatttagaagtttaaatacgaaacttggagatga

SEQ ID NO: 206516 - DNA, 487 bp, Unknown
  Bacterial polypeptide expressing nucleotide sequence isolated from the Sargasso Sea
atgacaaaacgattaaactcaaagcataaagtagacagaagactcaaagttaatttatggggtagacccaaaagtccgtttaacacaagagcatatcctccaggccaacatggtcaaactaaatcagccaaaccctcagattatggtattcaattacaagcaaaacaaaagttaaagtgttactatggaaacatgaatgagagacaatttagaaatatgtataaaaaagctattatgaaaaaaggagatacagctgaaaatttaatagggttactggaaagaagattagacgcagtgatttacagatctaagctgtcaaatacaatcttttcatcaaggcaattaattaatcatggacacgttagagtaaatggaaaaaaagtaaatatctcaagctatcaagtaaaagaagaggataatattgaaataagagataaatctaaacaattagctttgatagacatagctcttgcaaataaagaaagag

SEQ ID NO: 206517 - DNA, 421 bp, Unknown
  Bacterial polypeptide expressing nucleotide sequence isolated from the Sargasso Sea
gtggtggcgcaccttgctggcgctgatatgcgaacaccgatttcctatgcactggcttggccagaccggttgcaatgggcatctgagcgtcttgatcttgccactatggatcaactaacatttgcgtctgttgacacacagcgctttccctgctttgcgttagcgcggcaagctttatgtgatggcggggccgctccagcggttttgaacgccgcaaatgaggtagctgttgcggcgttcttgcagaaaaaaatcggattcggtcagattccagctattgttgagacggttcttaaccaatcaacaactttgccaattgatcatttagacgcggtaatggagattgacgccgatgcacggcaattagcggtagcggctgtgacaaaaaatcggagttacttgtcaccgatactgcgctaag

SEQ ID NO: 206518 - DNA, 584 bp, Unknown
  Bacterial polypeptide expressing nucleotide sequence isolated from the Sargasso Sea
cagaaggttaaaagtaaacctgtggggaagaccgaagagtccatttaatacaagagcatatcccccaggacaacacggacaaacaagaagttcaaaaccctctgattttggaattcaactgcaagcgaaacaaaaacttaaatcatattatggaaacatgaatgagagacaatttagaaatacttacaaaagggctatcatgaaaagaggcgacactgctgaaaatttaattggattgctagagagaagattggatgctgtaatctataggtcaaaattatcaaatacaatattttcatctagacaactaatcaaccatggccacgtaagagttaatggaaaaaaagtaaatatttctagttatcaagttaaagaagaagatagtattgaaataagagataagtcaaagcaacttgccttaatagatattgctcttgcaaataaagagagagaagtcccagaatatcttcaacttgatgaaaaaaacaaaaaagttaaatttgtaagaattccaaagtttgaagaagtgccttatccagtagtaatggagccaaacctagtaattgagtattactctagataat

SEQ ID NO: 206519 - DNA, 515 bp, Unknown
  Bacterial polypeptide expressing nucleotide sequence isolated from the Sargasso Sea
tatgaaaaaagtaatacttttaggttctagtggctcaattggtttgagcacgtgcaaggtggctcgtgccctgccagatgagatgcatttggtaggacttgcggtcaaccgcagtgtcgatgtactggaggagcaagtgaatgaatttagcccggttgctgtggcggttacggatccggattgcgctcaaaaagctgctggtcgtttcacgggctgtcactattacgctggtgaagcaggtctggtgcgtctggtcgaagaaacggatgccgatatggtactggttgcgattgtgggcacagctgggctggctcctgccttggtcgctttaaaaacgggtaaagatctggcagttgccagtaaagagattctggtcatggcaggtgaatccgtcatggagactgcaaaacaagaagggcgagcagtgttacctgtggatagtgagcataatgcgattttccagtgcttgcagggggctccggatcaggaagtgcgcaagttgattctgaccgctt

SEQ ID NO: 206520 - DNA, 553 bp, Unknown
  Bacterial polypeptide expressing nucleotide sequence isolated from the Sargasso Sea
ggaatatgggggataagatctcgggttgattcatcaaccatgatgaataaatgtttagaaataatagaagctaaatggttatttggatttgacaatatagatgtgcttatccatccagaaggtatcattcattccttggtcgagtttaaagataaatcgctgatggcccaactttctattccagatatgaaaattccaatagcttacggtttgggtttccctgaaagaatcaattctggtagtgattcacttgattttgaaaagatcagtaatctttcttttgtaaaaccagattcaaaaaaatttccttcattagttcttgcaaaggattgtattaattctggtggaacaagcttttctactttaaatgctgcaaatgaagagtgtgttgcttcctttttagaaggtagaataggctacttagatatacatagaattatttcagaggttttggataaatcagacataaagatggtcgaagaaatagaagatattttcgaagctgatatgcaatctagagagatgactaaagaacttataaatacaaattaat

SEQ ID NO: 206521 - DNA, 619 bp, Unknown
  Bacterial polypeptide expressing nucleotide sequence isolated from the Sargasso Sea
tatgacaaaacgattaaactcaaaacataaagtagatagaagacttaaagttaatttatggggtagacccaaaagtccttttaacactagagcatatcctccaggacaacacggacaaacaaaatcatctaaaccatcagattatggtattcaacttcaagctaaacaaaaacttaaatgttactatggtaacataaatgaaagacaatttcgaaatatgtacaagaaagcaattatgaaaaaaggtgatactgcagaaaatttgatcggcttacttgagagaagattggatgcagtaatttatagatcaaaactttcaaacactattttttcatctagacaactaattaaccatggtcatgtcagagttaatggaaaaaaagttaatattgctagttaccaagtcaaggaagaagatagtatcgaaattagagataagtcaaaacagttggctttaattgatatagctttagctaataaagaaagagaagttcctgagtatttacaactagatgaaaaaaataaaaaagtaaaatttgtaagggttccaaaattcgaagaagtcccatatccagtagtaatggaaccaaaccttgtaattgagtattattctagataa

SEQ ID NO: 206522 - DNA, 710 bp, Unknown
  Bacterial polypeptide expressing nucleotide sequence isolated from the Sargasso Sea
ctcgaggaaatcgaagatgttagaaaaaagatattaccagttgatagtgaaccaagtgcaatttggcaatgtattgaaaaagaatctagtatagctaatataattataactgcatctggtggatcattaagaaatatttccacagataaatacgaaaacgtaacaccagaacaagttttaaaccatcctgtatggtctatgggtagtaaaattactattgattcagcaacttttgcaaataaagcatttgaagttattgaagctaagtggttatttgatattgattatgaaaaaatatccgtattagtacacccacaaagtattatccattctatagtagaatttaatgatggctcgatgaaagcacaattagcaaaccctgacatgagactacccatccagcatgctttgctctacccagaaagaaaacccaatgatcttgtatccccattgaatttagctgaaattggaaaactggaatttaacgaaactgataatcataaatacccatgttttaaattaattcttgatgctgcgaaacttgggaaatcttatcccgcactaatatgtgcaacagatgaagtattggtaaatgcttttttaaatcgtcaaattaaatatactgatatacctcgatatcttgagaaaatcattaatcaacataagccgtctataataactaaagacacaattatacaaattaccgagga

SEQ ID NO: 206523 - DNA, 577 bp, Unknown
  Bacterial polypeptide expressing nucleotide sequence isolated from the Sargasso Sea
atgacaaaaagactaaactctaaacataaagttgatagaaggctaaaagtaaatctatggggaagacccaagagtccatttaacacaagagcttatcctccaggtcaacacggccaatcaagaagttctaaaccatcagattttggaattcagcttcaagctaaacaaaaacttaaatcttactatggcaacatgaatgagagacaatttagaaatatgtataaaaaagcaattatgaaaaaaggtgatacagcagaaaatttaattggtttattagagagaaggctagatgctgttatatatagatcaaaactatctaatactatattttcatcaagacaattaatcaaccatggacatgtaagagttaacggtaaaaaagttaatatatctagctatcaagtaaaagaagaagacagtattgagataagagataaatcaaaacaattagccttaatagatattgccttagcaaacaaagaaagagaagttcctgagtatttgcaactagatgaaaaaaataaaaaagttaaatttgtaagagttcccaaatttgatgaagtcccttatccggttg

SEQ ID NO: 206524 - DNA, 780 bp, Unknown
  Bacterial polypeptide expressing nucleotide sequence isolated from the Sargasso Sea
aatgataataaatgtttatggaagtacgggagttattggcaaaacattcttaagaattattaaaaaccaatttcctaaatataagattaatcttctttgtgctaaaaataatatcaaattattagcaaatcaatgtaaagaatttaatgcaaattttgtttatttagataatcaaaaaaagattaatactttaaggtcaattttacctaaagcgattaaaatactaaataaaaatgaattaaatgaataccttcaaaaatcaagatctgatttatctattttatcagtctcaggttatgagtctctaaaatacttagaactcatttgcattaatacagataaaattggtattgttagtaaagaggcaatagtttctgcggggcatatacttaaaaatattataaaaaaaaataatacaaaaatttttccactagactctgaacatttttctatttttcagaactttaatacaaccagcgtagactactctaatataaaaaaaatatatatcacagcttcaggaggtccattcataaataagaaatttaatttattaaaaaacgtgtcttttaaagaagctactaagcatccaaaatggaaaatgggatataaaaatagtattgattctgcaacattggtaaataaatgtcttgaattaattgaagctcattatttatttgatattcctctaacaaaactagatattctaatccatccagaatctcttgtacattcaatcattgaagatcataattatgtttcaaaattaatatattttca

SEQ ID NO: 206525 - DNA, 616 bp, Unknown
  Bacterial polypeptide expressing nucleotide sequence isolated from the Sargasso Sea
aatgacaaaacgattaactcaaaaacataaagtcgatagagacttaagtaaatttatggggagacctaaaagtccatttaatactagagcatatccaccaggacaacacggtcagtcaaaatcatctaaaccatctgattatggaattcagcttcaagctaaacaaaaattaaagtgttactatggtaacatgaatgaaagacagtttagaaacatgtataaaagagcaataatgaaaaaaggggatactgctgaaaatttaattggattattagaaagaagacttgatgcagtgatctatagatcaaaactgtcaaatacgattttttcctctagacaattaattaatcatgggcatgtaagagtgaatggaaaaaaagttaatatatcgagctaccaattaaaagaagaagatagcattgaaataagagataaatcaaaacaattagctttaattgatatagcactcgcaaataaagaaagagaagtcccagaatatttacaattagatgaaaaaaataaaaaagttaaatttgttagaattccaaaatttgaagaagttccttatccagtagtcatggaacctaatttagtaattgaatactattcaagataa

SEQ ID NO: 206526 - DNA, 619 bp, Unknown
  Bacterial polypeptide expressing nucleotide sequence isolated from the Sargasso Sea
atgacaaaaagattaaactctaaacataaagtagacagaagattaaaagtaaacctttggggaagacctaaaagtccttttaatactagagcttatggaccaggacaacatggtcaaacaaaaacatcaaagccatctgattatggaatacagctccaagctaaacaaaaattaaaagcatattatggcaatattaacgagagacaatttagaaatatttataaaaaagcggtaatgcttaaaggtgatactggagaaaacttaattggtcttcttgaaagaagattggatgccgttatctacagagcaaaatttgcaacaacaattttttcagctagacaattaatcaatcacggccatgtaaaagtaaatggtaaaaaagtaaatattggaagttatttagttagagaagaagatttaattgagataagagataaatctaaacaacttgcaataatcgatattgcgcttgcaaataaagaaagagaaaccccagaatatattcagatggacgaaaaaaacaaaaaacttaagtttgttagagttccaaagtttgaagaagttccatacccgattattatggagcctaatttagtaattgaatattattctaggtaat

SEQ ID NO: 206527 - DNA, 619 bp, Unknown
  Bacterial polypeptide expressing nucleotide sequence isolated from the Sargasso Sea
tatgacaaaacgattaaactcaaaacataaagtcgatagacgacttaaggtaaatttgtggggaagaccaaaaagcccttttaatacaagagcttacccaccaggtcaacacggacagacaaaatcagctaaaccatctgattacggaattcaactccaagctaagcaaaaactaaaatgttattatggaaacatgaatgaaagacaatttagaaatatgtataaaaaggcaattatgaaaaaaggagatacagcagaaaatttaataggattgcttgagagaagacttgatgctgtaatttatagatcaaaattatcgaatactatattttcatccagacaactaattaatcatggtcatgttagagttaatggaaaaaaggttaatatttcaagttaccaagttaaagaggaagatagtattgaaataagagaaaaatcaaagcaattagctttaatagatattgcacttgctaataaagagagagaagttcctgaatatttacaactagatgaaaaaaataaaaaagtaaaatttgttagagttccaaaatttgaagaagttccataccctgtagtaatggagccaaatctggtaattgaatattattcaagataa

SEQ ID NO: 206528 - DNA, 508 bp, Unknown
  Bacterial polypeptide expressing nucleotide sequence isolated from the Sargasso Sea
tggacagactaagtcatcaaaaccttcagactatggaacacaacttcaagcaaaacaaaaactaaaatcatattatggaaacatgaatgaaaagcaatttagaaatatgtataaaagagcaattatgaaaaaaggagatacagccgaaaatttaattggtctgctagaaagaagattagatgccgtaatttatagatcaaaattgtcgaacacaatgttttcatctagacaactaattaatcatggacatgtaagagttaatggaaaaaaagtaaacatttcaagttatcaagttaaagaagaggataatattgaaattagagacaaatctaaacaattagcccttatagacatagcgctagctaataaagaaagagaagttccagaatatttacaattagatgaaaaaaataaaaaagttaaatttgtaaggattccaaaatttgaagaagttccttatccagttgtcatggaaccaaatcttgtaatcgaatattattctagataa

SEQ ID NO: 206529 - DNA, 427 bp, Unknown
  Bacterial polypeptide expressing nucleotide sequence isolated from the Sargasso Sea
attaatgagaggcaatttagaaatatttataaaaaagcaagcatgctcaaaggtgatacaagtgaaaacttgattggtttgctagaaagaaggttggatgcagtcatatatagagctaagtttgcaaccactattttttcagctagacagttaatcaaccatggtcatgtgaaagtaaatggaaaaaaagttaatatagcaagttactcagtgagagaagaagatactatagaaattagagataaatcaaaacaattagcaatcatagatatagctttagcaaataaagaaagagaaactcctgaatacatccaaatggatgaaaaaaataaaaaattcaaatttgttagagttccaaaatttgaagaggtaccatatccaatcgtaatggaacctaacctggttattgaatattactcaagataat

SEQ ID NO: 206530 - DNA, 619 bp, Unknown
  Bacterial polypeptide expressing nucleotide sequence isolated from the Sargasso Sea
atgacaaaaagattaaactctaaacataaagtagatagaagactaaaggtaaacctttggggaagaccaaaaagcccatttaacagtagagcatatcccccaggacaacacggacaaacaagatcttcaaaaccttcagattacggaattcaacttcaagcaaagcaaaaactaaaatcttattatggtaacataaacgaaagacaatttagaaatatgtataaaaaagctattatgaaaaagggtgatacagctgagaacttaattggtttattagaaagaagattggatgcggttatttatagatcaaagttatctaatacgattttttcatctagacaattaattaatcatggccatgttagagttaatggtaaaaaagtgaatatttcaagttatcaagttaaagaggaggatgctatagagattagagataagtcaaaacagcttgctcttattgatatagctttagcaaataaagaaagagaagtacctgaatatttacaacttgatgaaaaaaataaaaaagtaaaatttgttagaatccctaagtttgaagaagttccttacccagttgtcatggaaccaaatttagttattgaatattattctagataat

SEQ ID NO: 206531 - DNA, 619 bp, Unknown
  Bacterial polypeptide expressing nucleotide sequence isolated from the Sargasso Sea
atgacaaaaagactaaactctaaacataaagtagatagaaggttaaaagtaaatctatggggaagaccaaagagtccatttaacactagagcatatcccccaggtcagcatggtcaaactaaaagttcaaaaccatctgattttggaattcaacttcaagcaaaacaaaaacttaaatcttattatggtaacatgaacgagagacagtttagaaatgtttacaaaaaagctattatgaaaaaaggcgatactgctgaaaatttaattggattattggaaagacgtttggatgctgtaatttatagatcaaaattatctaatactatattttcttcaagacaattaattaatcatggccatgtaaaagttaacggaaaaaaagttaatatctctagttatcaagttaaagaagaagatagtattgaaataaaggataagtctaagcagctagcttttatagatattgctttagcaaataaagaaagagaagttcctgaataccttcagcttgatgaaaaaaataaaaaagtgaaatttgttagagttcctaagtttgaagaggttccttatccagtagtaatggagccaaatctagtaattgagtattactctagataat

SEQ ID NO: 206532 - DNA, 511 bp, Unknown
  Bacterial polypeptide expressing nucleotide sequence isolated from the Sargasso Sea
atgacaaaaagattaaaatctaaacacaaagttgatagaagacttaaggtaaacctatggggtagaccaaaaagcccatttaatgctagagcatatcctccaggacaacacggacaaacaaaatcatcaaaaccttctgattatggtgtacagcttcaagcaaaacaaaaacttaaatcttattatggcaatattaatgaaagacaatttagaaatgtttatagaaaagcaatcatgaaaaaaggcgatacagcagaaaacttaattggattattagaaagaagactagacgcagtagtttacagagcaaaattatcaacaacaattttttcggccagacaattaattaatcatggacatgttaaagttaatggcaaaaaagttaatataccaagttatcaagttaaggaagaagacagcattgagataagagataaatcaaaacaattagctttaatagatattgctttagctaataaagaaagagaaactccagaatatatccaagtag

SEQ ID NO: 206533 - DNA, 619 bp, Unknown
  Bacterial polypeptide expressing nucleotide sequence isolated from the Sargasso Sea
atgacaaaaagattaaattctaaacacaaagttgatagaagattaagagtaaatttatggggcagacctaaaagcccttttaattcaagagcataccctcctggacaacatggacaaagtaagtcggcgaaaccttctgattatggcgttcaacttaatgcaaagcaaaaacttaaatcatattatggaaatattaacgaaagacagtttagaaatttatataaaaaagccatcatgaaaaaaggagatactgcagaaaatttaattggtttattagaaagaagattagacgctgttgtatatagatccaagctttcaaatacaattttttcatctagacaattaattaaccatggtcatgtcagagttaatggaaaaaaagtaaatatttcaagctatcaagttaaagaagaagatagtatagaaataagagataagtctaaacaactttcaattattgatattgctcttgcgaataaagagagagaaacaccagagtatcttcaagtagatgaaaaaaataaaaaagttaaattcgttagggtacctaaattcgaagaagttccttaccccgttgttatggagccaaatttagtaatcgagtattattctagatagt

SEQ ID NO: 206534 - DNA, 619 bp, Unknown
  Bacterial polypeptide expressing nucleotide sequence isolated from the Sargasso Sea
atgacaaaacgattaaactcaaaacataaagtagatagaagacttaaagttaatttatggggtagacctaaaagtccttttaatactagagcttatcccccaggtcagcacggacagacaaaatcatctaaaccatcagattacggaattcaacttcaagctaaacaaaaactcaaatgttactatggtaacatgaacgaaagacaatttcgtaatatgtataagagagccattatgaaaaaaggtgatactgcagaaaatttaattggattgcttgagagaaggttagatgcagtaatttatagatcaaaattatcaaatactattttttcgtctagacaattaataaaccatgggcacgttagagttaatggtaaaaaagttaacatatccagttaccaagtaaaagaagaagatagtattgaaataagagacaaatctaaacaattagctttgatagatatagctctagcaaacaaagaaagagaagttcctgagtatttacaactagatgaaaaaaataaaaaagttaaatttgtaagaattccaaaatttgaggaagttccttaccctgttgtgatggaaccaaaccttgtaattgagtattattctagataat

SEQ ID NO: 206535 - DNA, 619 bp, Unknown
  Bacterial polypeptide expressing nucleotide sequence isolated from the Sargasso Sea
atgacaaaaagattaaattctaaacataaagttgatagaagattaaaagtaaatttgtggggaagaccaaaaagcccatttaattctagagcctatcctcctggtcaacatggccaaacaaaatcttcaaaaccatctgactacggtattcaactccaggcaaaacaaaaattaaagtcatactatggcaatattaacgaaagacaatttagaaatatttataaaaaggcaatcatgaaaaaaggtgatacagctgaaaacttaattggtcttttagaaagaagacttgatgctgttatatatagagccaaactagctacaacaattttttcagcaagacaattaatcaatcatggacatataagggtaaacgggaaaaaagttaatatctcaagctatcaattaaaagaagaagagtcagttgaagttagagataaatcaaaacaactttctataattgacattgcgctagcaaataaagaaagagaagtacctgaatatatacaggttgatgaaaagaataaaaaaattaagtttgtgagagtaccaaaatttgaagaagtaccttacccggtagtaatggaacctaatcttgtaattgaatactattctagataac

SEQ ID NO: 206536 - DNA, 619 bp, Unknown
  Bacterial polypeptide expressing nucleotide sequence isolated from the Sargasso Sea
atgacaaaaagattaaactctaaacacaaagtcgatagaaggctaagagtaaatctatggggaagaccaaagagccccttcaatacaagagcatatccaccagggcagcatggtcaatcaaaatcatctaaaccatctgattatggaattcaattgaatgcgaaacaaaaattaaaatcttattatggaaatatgaacgaaagacaattcagaaatgtttacaaaaaagctataatgaaaaaaggagatacagcagaaaatttaattggtttattagaaagaagacttgatgctgtaatttatagatcaaaactttctaatactattttttcttcaagacaattaattaatcatggtcatgttagagttaacggaaaaaaagttaacattgcaagttatcaagttaaagaagaagatagtatagagattagagataaatcaaaacaattagctttaattgacattgctcttgctaataaagaaagagaagttccagaatatttacagttagatgaaaaaaataaaaaagtaaaatttgttagagttcctaaatttgaagaagttccttatccagttgtaatggagccaaatctagtaattgaatattattctagataat

SEQ ID NO: 206537 - DNA, 531 bp, Unknown
  Bacterial polypeptide expressing nucleotide sequence isolated from the Sargasso Sea
aatgacaaaaagattaaactctaaacataaagtagatagaagattaaaagtgaatttatggggcagacccaaaagcccatttaatacaagagcctatcctccaggacagcatggacaaacaaaagctggcaaaccttcagactacggaattcaacttcaagcaaaacagaaattaaaatcatattatggtaatatgaatgaaagacagtttagaaatgtttacaaaaaagcaatcatgaaaaaaggtgatactgctgaaaacttaataggattattagagagaagattggatgctgtaatttatagatcaaagttatcaaacactattttttcatcaagacagcttattaatcatggtcatgttaaagtgaatggaaaaaaagtaaatattgcgagttatcaggtcaaagaagaagatactattgaaattagagataaatctaaacaacttgctttgattgatattgctcttgcgaacaaggaaagagaagtcccagaatatctacagttagatgaaaagaataaaaaagt

SEQ ID NO: 206538 - DNA, 619 bp, Unknown
  Bacterial polypeptide expressing nucleotide sequence isolated from the Sargasso Sea
aatgacaaaaagattaaactctaaacataaagttgatagaagattaaaagtaaacttatggggaagacctaaaagtccctttaatagtagagcttacccaccaggccaacatggacaaaccaaaagttcaaaaccttcagattttggaacacagcttcaagcaaaacaaaaacttaagtcttattatggcaatatgaatgagagacaatttagaaatatgtacaaaaaagctataatgaaaagaggtgatactgctgaaaatttaattggactgttagaaagaagattagatgctgtagtttatagatctaaactttcaaatacgatgttttcatctagacaacttattaaccatggccatataaaagttaatggaaaaaaggtaaatatttcaagctatcaagtaaaagaagaagacactgttgaaattagagataaatcaaaacaattagctttaatagatatagctttagccaacaaagaaagagatgttcctgaatatctgcaagtagatgaaaaaaataaaaaagtaaaatttgttagagttccaaaatttgaagaagttccttacccagttacaatggaaccaaatttagttatcgaatattattcaagataa

SEQ ID NO: 206539 - DNA, 401 bp, Unknown
  Bacterial polypeptide expressing nucleotide sequence isolated from the Sargasso Sea
tatgaatattttattacttggagcaaccggaagcattggagacagtgttttaagtgttataaaagaaaaccactcagagttaaatttatttggaattacttttcacaaaaacaaaaataagtcacaggaaattattaaagatttcaaacctgaatttgcatatgttgaagataggtctacatttgaagacctaaaagatacaagcgatattacttttcttaatggagactcttcgcttaaagaacttattgaacatgatgatgttgatgtaatcatttcagctatttctggttttgcaggcctaaaagcaacctatttagctgcctcaacaggaaaaaaaatattacttgcaaacaaagaaagtattgttgccggaggagatttaatcactgctagagcta

SEQ ID NO: 206540 - DNA, 367 bp, Unknown
  Bacterial polypeptide expressing nucleotide sequence isolated from the Sargasso Sea
atgaatattttgttactcggagcaaccggaagcattggagacagtgttttaagtgttatagaagaaaaccactcagaattaaatttatttgggattacttttcacaaaaacataaataagtcacaggaaattattaaagatttcaaacctgaatttgcatatgttgaagacaggtctacatttgaagacctaaaagatacaagcgatattacttttcttaatggagactcttcgctaaaagagcttattgaacatgatgatgttgatgttatcatttcagctatttctggttttgcaggcctaaaagctacctatttagctgcctcaacaggaaaaaaaatattacttgcaaacaaagaaaaagtat

SEQ ID NO: 206541 - DNA, 619 bp, Unknown
  Bacterial polypeptide expressing nucleotide sequence isolated from the Sargasso Sea
atgactaaaagattaaactctaaacataaagtagatagaagattgaaggttaacctttggggaagacctaaaagtccttttaatactagagcttacggaccaggacaacatggacagactagatcatccaagccttcagattacggaattcagttacaggctaagcaaaaactaaaagcttactacggtaatatcaatgaaagacagtttagaaatatttataaaaaagctgtaatgcttaaaggtgatacgggtgaaaatttaataggtttgcttgaaagaagattggatgctgtgatttacagagccaaatttgcaacaactattttttcagccagacaattaatcaatcacggacatgttaaagttaacggtaaaaaagttaatattggaagttactctgttaaagaggaagattctatagaaattagagacaagtctaaacaattagcaattattgatattgcccttgctaacaaggaaagagaaacaccagaataccttcaaatggatgaaaaaaataaaaaattgaaatttgttagaattcctaaatttgaagaagtgccatacccaattgtcatggaaccaaacttggtgatcgaatattactcaagataat

SEQ ID NO: 206542 - DNA, 406 bp, Unknown
  Bacterial polypeptide expressing nucleotide sequence isolated from the Sargasso Sea
aatatatataaaaaagcatcaatgcaaaaaggtgatactagtgaaaatctaattggactcttagagagaaggcttgatgcaattatctacagagcaaaatttgcaactacgatattttctgcaaggcaattaataaatcatggtcatgtcaaagttaataataaaaaagtaaatattgcttcttatttagttaaagaagaggacacaattgagattagagataaatcaaaacaattagcaattattgatattgcccttgctaacaaagaaagagaaactccagaatatattcaaatggacgaaaaaaataaaaaattaaaatttgttagagtgcccaaattcgatgaagtcccttaccctatagttatggagcctaatttggttgtggaatattattctagataat

SEQ ID NO: 206543 - DNA, 502 bp, Unknown
  Bacterial polypeptide expressing nucleotide sequence isolated from the Sargasso Sea
gataacatcgatgtcatcgttcacccgcaatcgatcgttcactcgatggtcgagaccgccgacagctctgtgttggcgcagttgggctggccggacatgcgcttgccgattctttacaccatgtcctggccgaaccgcgtccagtgctccgaagtcacttggccacgactcgacttcgtcaagatgggcgatctcaccttccgcgcgccggactttgagaagtacccgtcactcaccatgggctacgccgccggtcgcttcggtggtacgatgactggtgttttctccgcggcgaacgaacaagcggtcgccatgttcttggataagaagattggtttcttcgacatctacaaggtcatcgacctcgccatggaggcgcacaagaacgagctcgtcctcgatccgacgctcgatgacatcgttcacttcgacttgtgggcgagagacttcgtcaagcaagtcgtggaatctggcaaatgcaccgaagctttgccggtataaa

SEQ ID NO: 206544 - DNA, 544 bp, Unknown
  Bacterial polypeptide expressing nucleotide sequence isolated from the Sargasso Sea
aatgacaaaaagattaaactctaaacataaagtagatagaagactaaaagttaacctatggggaagaccgaaaagtcctttcaatactagagcttacggaccaggacaacatggtcaaacaagacaaggtaagccttcagattatggtattcagttacaagctaagcaaaagttaaaagcttactatggaaatattaatgagagacaatttagaaatatttataaaaaagcagttatgcttaaaggtgatactggtgaaaacttaattggtttattagagagaagattagatgcagtaatttacagagcaaagtttgcaactacaattttttctgcaagacaattaatcaatcataaccatgtaagagttaacggtaaaaaagttaacgttggaagttatttagttaaagaagaagattcaattgagattagagataagtctaagcaacttgcaatcattgatatcgctttagccaataaagaaagagaagctccagagtatatccaaatggatgagaaaataaaaaatttaaatttgttagaa

SEQ ID NO: 206545 - DNA, 691 bp, Unknown
  Bacterial polypeptide expressing nucleotide sequence isolated from the Sargasso Sea
tatggttcttgttttgaagacagttagcgttttaggatctactggatctgttggcaaaaatactttagaggtaatatcaaatctgtctgataggtttgagttatatggaatatcatgtaatgaaaacaattcattattgtatgatcagatcattgaatataatccgaaagttgcagtaatcacaaatcatgaaaaatataatgaatttatgaatgagtatggaaacaaaatcggtgaaacaagaatcttatttggagatgagggccttaatgaaatatcatcacatgataacgtagatgttgtagtcgcagctattgttggtttccagtgcttaaagcccgtcatagatgctatagcttcaaacaagacagtaatcattgctaataaggaaatcttagttgcagcaggagagatgatagtatcaattttgaatgagtccgatggcaaacttttgccagtcgatagcgagcataatgccttactacaagttattttatcgtctggtctagaatacaaagtcaataataaggaatactatgaagcaaatataaaaaatcttactattactgcatctggtggaccattcattgatcttgatgtttctgaatttaaaaagataaaatctaaacatgcaataaagcatccgacatgggatatgggagaaaaatctcagttgattcatctaccatga

SEQ ID NO: 206546 - DNA, 619 bp, Unknown
  Bacterial polypeptide expressing nucleotide sequence isolated from the Sargasso Sea
atgacaaaaagattaaactctaaacataaagtagatagaagattaaaagtgaacttgtgggggagacctaaaagccctttcaatacaagagcctatcctccaggacaacatggacaaacaaaagctggcaaaccttcagattacggaattcaacttcaagcaaaacaaaaattaaaatcttattatggaaacatgaatgaaagacagtttagaaatgtttacaaaaaagcgatcatgaaaaaaggcgatacagctgaaaatttaattggattattagagagaagattagatgctgtaatttatagatcaaagttatcaaatactattttttcatcaagacagcttattaatcacggtcatgttaaagtgaatggaaaaaaagtaaatatttcgagttatcaactcaaagaagaagatactattgaaattagagataaatctaaacaacttgctttaattgatattgcacttgctaataaggaaagagaagttccggaatatctacaattagatgaaaaaaataaaaaagttaaatttgtaagagttccatcttttgaagaggtgccttatccagttgtgatggagccaaatttagtaattgaatattactctagataat

SEQ ID NO: 206547 - DNA, 619 bp, Unknown
  Bacterial polypeptide expressing nucleotide sequence isolated from the Sargasso Sea
aatgacaaaaagattaaactctaaacataaagtagatagaagattaaaagtaaatttatgggggagacccaaaagtccttttaatacaagagcttatcctccaggacagcatggacaaacaaaagctggcaaaccttcagactacggaattcaacttcaagcaaaacagaaattaaagtcttattatggaaacatgaatgagagacagtttagaaatgtttacaaaaaagcaatcatgaaaaaaggtgatacagctgaaaatttaattggattattagagagaagattggatgctgtaatttatagatcaaagttatcaaacactatattttcatcaagacaattgattaaccacggtcatgtcaaagtaaacggaaaaaaagtaaatattgcgagttatcaggtcaaagaagaagatacgattgaaattagagataaatctaaacaacttgctttaattgatattgctctagctaataaagaaagagaagttccagaatatcttcaactagatgaaaaaaataaaaaagttaaatttgtgcgtgttccgtcttttgaagaagttccttacccagttgtaatggagccaaatttagttattgagtactattcaaggtaa

SEQ ID NO: 206548 - DNA, 505 bp, Unknown
  Bacterial polypeptide expressing nucleotide sequence isolated from the Sargasso Sea
caaacaaaagctggtaaactttcagactatggaattcaacttcaggcaaaacaaaaactaaagtcttattatggaaacatgaatgaaagacagtttagaaatgtttataagaaagcgatcatgaaaaaaggtgatactgctgaaaatttaatcggattattagagagaagattggatgctgtaatttatagatcaaaattatcaaacactattttttcatcaagacaattgattaaccatggtcatgttaaagtaaatggaaaaaaagttaatatagcaagctaccaggttaaagaagaagatacgattgaaattagagataaatctaaacaacttgctttaattgatattgctcttgcaaataaagaaagagaagttccagaatatctacaattagacgaaaaaaataaaaaagttaaatttgtaagagttccatcttttgaagaagttccatacccagttgtaatggagccaaatttagtaattgaatattactctagataat

SEQ ID NO: 206549 - DNA, 605 bp, Unknown
  Bacterial polypeptide expressing nucleotide sequence isolated from the Sargasso Sea
agatataaatgactttgactccattactcctgaagatgctattaatcatcctgtctggaacatgggaagaaagatatcagttgattcatctacattaatgaataaaggtttagaaattatagaagctagatggcttttcaattgcgagaatatagaggtattgattcatccagaaggaattatccattctttagtggaattcaaagataattctgttctggcccaactatcaaaccctgatatgaaaatacctatagcatatggtttaggttatcctgataggattaattccggttccaaacaattgaatttaaaagaaataaaatctttgaattttatggagcctgatttagaaaagttcccttgtttgaaattagctatggatcttttaccaattggtggaaatagtttttctattcttaatgcttcaaatgaagaatgtgtagatgctttcttagaaggtcggataagctataagcaaatttatgaaataatctctaaagtcttggatagaatagaaataaaagctgtccaatcattagaggatatatttgattcagacaaagaatctcgtttggagactgtttctattattaataattaaa

SEQ ID NO: 206550 - DNA, 547 bp, Unknown
  Bacterial polypeptide expressing nucleotide sequence isolated from the Sargasso Sea
atgacaaaaagattaaactctaaacataaagtagatagaagattaaaagttaatttatggggtagacccaaaagtccatttaatacaagaggatatcctccaggccagcatggacaaagcaaatcttcaaaaccttcagattacggtgtccaattaaacgcaaagcaaaaattaaaatcatattacggcaatatgaatgaaagacaatttagaaatgcttataaaaaagcaatgatgaaaaaaggtaactcagcggaaaatttaattggtctgctagagagaagattggacgccattgtatatagagcaaaattagcaacaacaattttttctgctagacaattgattaatcatagtcatgtgaaagttaatggtaaaaaagtaaatatctcgagctatttagttaaggaagaggatagtattgaaattagagataaatctaaaaaactagcttttattgatatagcattggcaaacaaagaaagagaagtacctgagtatttacaagtagacgaaaaaaataaaaaagtaaaatttttagagtcca

SEQ ID NO: 206551 - DNA, 577 bp, Unknown
  Bacterial polypeptide expressing nucleotide sequence isolated from the Sargasso Sea
tgaagaagctttgaatcacccaaattgggatatgggtgacaaaataactattgattcagcaacacttgttaataagtgttttgagctaattgaagcaaaatatttgtttgatcttgacgtagataaattagaagtattaattcagcctcaaagcattattcattcaatggtggaattaaaagatggctcagttgaagctcaaatgtctctaccaagcatgataattcctttatcttttggtttattgggtgaatattctgataaaacgaaaaaagatttctctttagatatgttcaaagaagatgtaaagctaacaatttcagattttcctaaggacagagaagaattaataggaatatcaaaagatgttatgaaaaatggaggcaatagagggcttatatttgcagctgtaaatgattttgcagttaaaaaatacttaaaaggagaaatcaattttggagaaatatataatttaatttttcaacattactctgagattgaaaagaaagaaattttaagtttagaggacttaagaggcaatcaacgtaaaatattgaattatttaggaagtatttaa

SEQ ID NO: 206552 - DNA, 619 bp, Unknown
  Bacterial polypeptide expressing nucleotide sequence isolated from the Sargasso Sea
aatgacaaaaagattaaattctaaacacaaaattgatagaagactgaaggttaacctttggggaagaccaaaaagtcctttcaacaaaagagcatatcctccaggacaacacggacaatctaaaaatgcaaaactttcagactacggaactcaacttcaggctaagcaaaaattaaaatcatattatggaaatataaatgagcgacaattcagaaatgtttatagaaaagctattatgaaaaaaggggatactgcagaaaatttaattggattattagagagaagactagactcagttatctatagagcaaaattttctagtacgattttttcatcaagacagtttattaatcatggacatgtgaaagtaaatggcaaaaaagtaaacatatcaagctatcttttaagtgaagaagacactattgagattaaagataaatcaaaacaattagctatcattgatatagcgttagctaacaaagaaagagatattcctgaatatttgcaagttgatgaaaagaaaagaactattaaatttgtgagaacaccaaagtttgaagaagttccttatcctgttgttatggagccaaatttagtaatcgaatattactcaagataa

SEQ ID NO: 206553 - DNA, 619 bp, Unknown
  Bacterial polypeptide expressing nucleotide sequence isolated from the Sargasso Sea
atgacaaaaagattaaactctaaacataaagtagacagaagattaaaggttaacctatggggtagaccaaaaagtccttttaatactagagcatatggacctggtcaacatggtcaaacaaaaacatcgaaaccttcagattatggaattcagttacaagctaagcaaaaattaaaagcatattacggaaatattaacgaaaaacagttcagaaacatttacaaaaaagcagttatgcttaagggtgatacaggtgaaaatttaatcggtcttttagagagaagactagacgcaattatttatagagcaaaatttgcaactactattttttcagctagacaattaatcaatcacggtcatgttagagtaaatagtaagaaagttaacattggaagctattcagtaaaagaagaggatacaattgaaattagagacaaatctaagcagttagcaatcattgatatcgctctagcaaataaagaaagagaaacaccagaatacatccaaatggatgagaaaaacaaaaaattaaaatttgtaagagttcctaaatttgaagaagttccttaccctgtgataatggaaccaaatcttgtaattgaatattactctagataat

SEQ ID NO: 206554 - DNA, 619 bp, Unknown
  Bacterial polypeptide expressing nucleotide sequence isolated from the Sargasso Sea
aatgactaaaagattaaactctaaacacaaagtcgatagaagattaaaggttaacctttggggtagaccgaaaagcccttttaatactagagcttacggaccaggacaacatggccaatctagatcatccaagccttcagattatggaattcagttacaagctaagcaaaaactaaaagcttactacggtaatatcaatgaaagacaatttagaaatatttataaaaaagcagtcatgcttaaaggtgatacaggtgaaaatttaataggtttacttgaaagaagattagatgctgtaatttatagagcaaaatttgcaacaacaatattttcagccagacaactaattaatcatggacatgttaaagttaacggaaaaaaagttaatattggaagctatttagttaaagaagaagattcaattgagataagagataagtccaaacaacttgctatcattgatattgctttagcaaataaggaaagagaaactccagagtatattcagatggatgaaaaaaataaaaaacttaagtttgtaagaactccaaaatttgatgaagttccttatccaattgttatggaacctaacctagttatcgaatattattctagataa

SEQ ID NO: 206555 - DNA, 619 bp, Unknown
  Bacterial polypeptide expressing nucleotide sequence isolated from the Sargasso Sea
atgacaaaaagattaaattctaaacataaaattgatagaagattaaaagttaacctttggggaagaccaaaaagtccttttaataaaagagcataccctccaggacaacacggacagtcaaaaaattctaaactctcagattacggaacccaacttcaagcaaaacaaaaactaaaatcatattacggaaatattaatgagcgacagttcagaaatgtttatagaaaagccattatgaaaaaaggggatacagctgaaaatttaataggattattagagagaagattagatgcagttatttatagagcaaaattttctagtacgattttttcatcaagacagtttattaatcatggacatgtaaaagtgaatggcaaaaaagtaaatatatcaagttatttgctgggtgaagaagatacaattgaaataaaagataagtcaaaacaattagcaattatcgacatagctttagctaacaaagaaagagatattcctgaatacttacaggtagatgaaaaaaaaagaacaattaagtttgtgagaacaccaaagtttgaagaagttccttatcccgttgttatggaaccaaatctagtaatcgaatattactctagataat

SEQ ID NO: 206556 - DNA, 250 bp, Unknown
  Bacterial polypeptide expressing nucleotide sequence isolated from the Sargasso Sea
atgctaagaaagttaatattgggaagttatttagttaaagaagaagatacaatagaaattagagataaatccaagcaattagcaatcattgatattgctttggccaataaagaaagagaaacaccagaatacatccagatggatgaaaaaaataaaaaattaaaatttgtaagagttcctaaatttgaagaagttccttatcctgtaattatggagccaaatctagtaattgaatattattctagataat

SEQ ID NO: 206557 - DNA, 619 bp, Unknown
  Bacterial polypeptide expressing nucleotide sequence isolated from the Sargasso Sea
tatgacaaaacgattaaactcaaaacataaagtagatagaagacttaaggttaatctatggggaagacctaaaagtccttttaacactcgagcttatcctccaggacaacatgggcaaaccaaatctgcaaaaccatcagattatggtttacagctacaagcaaaacaaaaattaaaatgttattatggcaatatgaacgagagacaatttagaaatatgtataaaaaagctataatgaaaaaaggagataccgctgaaaatttaattggattactggagagaagattggatgctgtaatttacagatctaagttatcaaatactattttttcgtcaagacaactgattaatcatggtcatgtaagagttaatggaaaaaaagtaaatatttctagctaccaagtaagagaagaagatagtatagaaattagagataaatcaaaacagttggctttaattgatatagcactagctaacaaagaaagagaagttccagaatatttacaattagatgaaaaaaacaaaaaagtaaaatttgtaagagtacctaaatttgaggaagttccttacccagttgttatggaaccaaatttagtaattgaatattattctagataa

SEQ ID NO: 206558 - DNA, 298 bp, Unknown
  Bacterial polypeptide expressing nucleotide sequence isolated from the Sargasso Sea
aatgaaacgaattgctatatttggttctactggatctatagggacccaaactttatctatcattgacgaatataaagaaaaatttcaaattgtgtgtctttcttgcaataacaatgctgatttattattacaacaagtagaaaaatttatgccaaagaaggtcgcaataaatgatattgaatcaaatcatctattaaatgatttttgtcacaagaatcatattgagttaattgttgagtctaatgcctctaataaactttcacagtataatggtgttgatttggcaattaatgctatt

SEQ ID NO: 206559 - DNA, 460 bp, Unknown
  Bacterial polypeptide expressing nucleotide sequence isolated from the Sargasso Sea
atgaaaaatatcttaatacttggggcaaccggtagcattggagagagtgttctaagtgttattaaacaaaattatgaaaagttaaatttatttggaatctcttttaatcaaaatattgctaagggcaaacaaataattgatgagttttctccatcttttgttcacatagatgatttaatgggatacaacaacattgaaaaatcagagaactcctcttatctgaatagcattgaagatctagaaaatttaataaatcatcaggacatcgatattatagtatgcgctatttcaggctttgctggcttaaatgcaacacatatggcagttcatactggaaaaaagttattgctggcaaacaaagaaagtattgttgctggaggtgatttaatccttccaatagcaaaggaatataaaaccgaaattatacctattgacagtgagcataatgccatttttcaat

SEQ ID NO: 206560 - DNA, 619 bp, Unknown
  Bacterial polypeptide expressing nucleotide sequence isolated from the Sargasso Sea
atgacaaaaagattaaactctaagcataaagtagatagaagattaaaagtaaatctttggggcagacccaaaagtccatttaatacaagagcctatggaccaggtcaacatggtcaaacaaaacaaggtaaaccctcagattatggaattcagttacaagctaagcaaaaattaaaagcttactatggtaatatcaacgaaagacaatttagaaatatttataaaaaagcagtgatgcttaaaggtgatacaggtgaaaacttaatcggccttcttgaaagaagattggatgctgtcatctacagagcaaaatttgcaacaacgattttttctgcaagacaattaataaaccatggtcatgtaagagttaatggaaaaaaagttaatattggaagttacttagtaaaagaagaagatacaattgaaattagagataaatctaaacaacttgcaattattgatatcgccttagctaataaagagagagaagctccagaatatattcaaatggatgaaaaaaataaaaagtttaaatttgttaggattccaaaatttgaagaagttccttatccaattgtaatggagcctaacttagtgattgaatattattcaagataat

SEQ ID NO: 206561 - DNA, 619 bp, Unknown
  Bacterial polypeptide expressing nucleotide sequence isolated from the Sargasso Sea
aatgacaaaaagattaaactctaaacataaaatagatagaagattaaaagttaatttatggggtagacctaaaagcccatttaatactagagcctatggtcctggacaacacggacaaactagaacttcaaaaccatctaactatggtattcagcttaatgccaaacaaaaattaaaagcttattatggaaatataaatgaaagacaattcagaaatatttataaaaaagctacaatgcttagaggtgatacaagtgaaaatcttattggtcttttagaaagaagacttgatgcaattatttatagggcaaagttttcaactacaatattttcagctaggcaattaataaaccatggtcatgttaaagttaataacaaaaaggttaatatagcttcttatttagttaaagaagaagacacaatagaaattagagataaatcaaaacaattagcaattattgacattgctctagcaaataaagaaagagacactccagaatatattcagatggatgaaaaaaataaaaaattaaaattcgttagaattccaaagtttgaggaagtgccttatccaatagttatggaacctaatttggttgttgaatattattctagataa

SEQ ID NO: 206562 - DNA, 619 bp, Unknown
  Bacterial polypeptide expressing nucleotide sequence isolated from the Sargasso Sea
aatgacaaaaagattaaactctaaacacaaagtcgatagaagattaaaggtcaacctttggggtagaccaaaaagtccatttaatacaagagcctacggaccaggacaacacggtcaaacaagatcatcaaagccttcagattatggaattcagttacaagctaagcaaaaactaaaagcttactacggtaatatcaacgaaagacagtttagaaatatttataaaaaagctgtaatgcttaaaggtgatactggtgaaaatttaataggtctacttgaaagaagattagatgcagtaatttatagagcaaaatttgcaacaacaatattttcagctagacaattaattaaccacggccatgttaaagttaatggtaaaaaagtaaatattggaagttatttagttaaagaggaagactcaattgaaataagagacaagtctaaacaattagcaattgttgatatcgctttagcaaataaggaaagggaaactccagaatatattcaaatggatgaaaaaaataaaaagcttaagtttgtaagaactccaaagtttgaggaagttccttatccgatagttatggaacctaatttagttattgagtattattctagataa

SEQ ID NO: 206563 - DNA, 619 bp, Unknown
  Bacterial polypeptide expressing nucleotide sequence isolated from the Sargasso Sea
aatgacaaaaagattaaactctaaacataaagtagatagaagactaaaggttaacctatggggtaggccaaaaagtccttttaacactagagcttatggacctggacaacacggtcaaacaaagacatctaaaccctcagattatggaattcagttacaagctaaacaaaaactaaaagcttactacgggaatattaatgagaagcaatttagaaatatttataaaaaagcagttatgcttaaaggagatactggtgaaaacctaattggccttttagagagaagattagatgcgattatttatagagcaaaatttgcaactactattttctcagctagacaattaattaatcacggacatgttagagtaaatggtaagaaagttaatattggaagctatttagttaaagaagaggatacaattgaaattagagataaatctaagcaacttgcaatcatcgatattgctttggcaaacaaagaaagagaaactccagaatacatccagatggatgagaaaaataaaaaattaaaatttgtaagaattccaaaatttgatgaagtaccttatccagtaattatggaaccaaatctagtaattgaatattactctagataa

SEQ ID NO: 206564 - DNA, 401 bp, Unknown
  Bacterial polypeptide expressing nucleotide sequence isolated from the Sargasso Sea
ttacaaaaaagcagtaatgcttaaaggtgatactggagaaaatttaattggtcttcttgaaagaagattggatgccgtgatctatagagcaaaatttgcaacaacaattttttcagctagacaattaattaatcacggccatgtaaaagtaaatggtaaaaaagtaaatattggaagctatttagttagggaagaagattcaattgagataagagacaaatctaaacaacttgcaataatcgatattgcacttgcaaataaagaaagagaaactccagaatatattcagatggatgaaaaaaacaaaaaactaaagtttgttagagttccaaagtttgaagaagttccttacccaattgttatggaacctaatctagtgattgaatattattctagataat

SEQ ID NO: 206565 - DNA, 619 bp, Unknown
  Bacterial polypeptide expressing nucleotide sequence isolated from the Sargasso Sea
atgacaaaaagattaaactctaaacataaagttgacagaaggttgagagtaaatctatggggaagacccaaaagtccttttaacactagagcatatcctccaggtcagcatggacaatcaaaatcatcaaaaccatcggactacggaattcagttaaacgcaaaacaaaaattaaagtcatactatggcaatatgaacgaaagacagttcagaaatgtttataaaaaagcaataatgaaaaaaggagatacagcagaaaatctaattggtttattagaaagaaggcttgatgctgtaatttatagatctaaactttcaaatacaattttttcatcaagacaattaattaatcatggccatgttagagttaatggcaaaaaagttaatatagcaagctaccaagtaagagaagaggacagtattgaaattagagataaatctaaaaaattgcctttgattgatattgcgcttgcaaataaagaaagagatgtgccagaatatttgcaattagatgaaaaaaacaaaaaagtgaagtttgtaagagtaccaaagtttgaagaagttccttaccctgtagtaatggaacctaatttggtaattgagtattattctagataat

SEQ ID NO: 206566 - DNA, 619 bp, Unknown
  Bacterial polypeptide expressing nucleotide sequence isolated from the Sargasso Sea
aatgacaaaaagattaaactctaaacataaagtagacagaagattaaaagtaaacctttggggaagacctaaaagtccttttaataaaagagcatatggaccaggacaacatggtcaaacaaaaacatcaaagccatctgactatggaatacagcttcaagctaaacaaaaattaaaagcctattatggtaacattaacgagagacaatttagaaatatttacaaaaaagcagttatgcttaaaggtgatactggtgaaaatttaattggccttcttgaaagaagattagatgcagtgatctacagagcaaaattttcaacaacaattttttcagctagacaattaatcaatcatgggcatgtaaaagtaaatggtaaaaaagtgaatattggaagctatttagttagagaagaagattcaattgaaataagagataaatcaaaacaacttgcaataatagatattgctcttgcaaataaagaaagagaaactccagagtatattcagatggatgaaaaaaacaaaaaactaaagtttgttagagtgccaaaatttgaggaagttccatatccaattgttatggagcctaatctagtaattgaatattattctagataa

SEQ ID NO: 206567 - DNA, 619 bp, Unknown
  Bacterial polypeptide expressing nucleotide sequence isolated from the Sargasso Sea
aatgacaaaaagattaaactctaaacacaaagttgatagaagattaaaggttaacctatggggaagaccaaaaagtcctttcaacacaagagcttatggaccaggtcaacatggtcaaacaaaaacttcaaaaccttctgattatggaattcaacttcaagctaagcaaaaattaaaatcttattatggcaatattaatgaaagacaatttagaaatatttataaaaaagcttctatgcttaaaggtgatactagtgaaaacctaattggcttattggaaagaagattagatgcaattatctatagaggtaaatttgcaacaacaatattttctgcaagacaattaattaatcatggacatgttagagtaaatggtaaaaaagttaatattgctagttatatagcgaaggaagaagatactattgaaattagagataaatctaaacaattagcaattattgatattgcactagcaaataaagaaagagaaactccagaatatattcaaatggacgaaaaaaataaaaaattaaaatttgttagagttccaaaatttgaagaagttccttatccaattattatggaacccaatctagttgttgaatactattctagataa

SEQ ID NO: 206568 - DNA, 238 bp, Unknown
  Bacterial polypeptide expressing nucleotide sequence isolated from the Sargasso Sea
agttaatattgcaagctatcaagttagagaagaggatactatagagattagagataaatcaaaacaattagctttaattgatatagctcttgctaataaagaaagagaagtaccagaatatttacaattagacgaaaaaaataaaaaagtaaaatttgtaagggttcctaagtttgaagaagttccttatcccgttttaatggagccaaatctagtaatcgaatattattctagataa

SEQ ID NO: 206569 - DNA, 751 bp, Unknown
  Bacterial polypeptide expressing nucleotide sequence isolated from the Sargasso Sea
tatgaatataaatctttatggatctacaggacaaataggacaaaaaacgttaaatataattaaaaaatattttccccaattaaaaattaacctattatgtgcaaattctaatgtttcacttttattaaaacaaataaaaatatttaaacctaattatatttatttagataatccaaatgctgcaaaaaaacttaaatctaatttaccaaataatattgaattattgacctttaatgaacttaaaaattatttgaaaaaatcaaattctgattattctattcttgcagtgtctggatataaatctttatattatcttgaagacattgttaataatacaaaaaatttaggaatagttagcaaagaagcaatagtatctgcaggacatttattcagaaaaaaaaaatatttcaataaaaccaatatatttcctttagactcagagcatttttctttatttgaaaattttaaatctattaattattttaaaaatattaataaagttataattactgcttctggcggaccattttataagaaaaattttaaaagtttaaaaaatattaaatttcaagaagcaattaaacatcccaaatggaaaatgggatataaaaatagtattgattcagctacattagttaataaatgtttagaagtaattgagacacattatttatttaatattccttacaataaaatagatgttttgattcatcccccaagctttaattcattcaatagtgaaaaagataat

SEQ ID NO: 206570 - DNA, 763 bp, Unknown
  Bacterial polypeptide expressing nucleotide sequence isolated from the Sargasso Sea
ggctaaaaaatatcaatcagaaataatacctctcgattctgagcattccgctattttccaatgccttcaaggctcttctaacgatgatgtaaataaaattatattatgttgctcaggcggtccattttgggataaaaaaattgaatcttttaaaaagataactgtccaagatgcattgaaccatcctgtttggaaaatgggagaaaaaatatcaattgattcttcaactttgatgaataaatctttagagatcatagaggcatcggttttatttggggtagatgctaataaaatagacgttgtgattcatcctcaacatattgttcactcaatggttgagtttaaggatggctcaatactttctaatttatcagcacccgatatgaaagcctcaatatcatatggactaggatttcctaagaggcttgaatctggaatagaaagactatctttttctgatctttctttaaatttttttgagcctgaccataaaaaatttccaactttagattacgcaaaaaaagctttatctttaggagggaaccttcccttaattctaaattcattcaatgaagttgcagttgatcttttcttgcaaaaaaaaataaattacctagatatctttcaattgattagtcatgcttttgatgcgaaagataatctagacatgaataaaaaatttgacactgttgacgaaatcttgcattttgaagccttatctaaaaaacaggctaaagtttatgcagagagatatactttctaa

SEQ ID NO: 206571 - DNA, 319 bp, Unknown
  Bacterial polypeptide expressing nucleotide sequence isolated from the Sargasso Sea
atatagatcaaagttatcaaatactattttttcatccagacaactgattaatcatggtcatgttagagttaatggaaaaaaagtaaatattgccagttaccaagttaaagaagaagatagtatcgaaattagagataagtcaaaacagttagctttaattgatatagctttagctaataaagaaagagaagtcccagaatatttacaattagatgaaaaaaataaaaaagtaaaatttgtaagagttccaaagttcgaagaggttccttatccagtagtaatggaacccaaccttgtaattgaatattattctagataa

SEQ ID NO: 206572 - DNA, 427 bp, Unknown
  Bacterial polypeptide expressing nucleotide sequence isolated from the Sargasso Sea
tatgaatgaaagacaattcagaaatgtttacaaaaaagccataatgaaaaaaggagatactgctgaaaatttaattggtcttctagaaagaagacttgatgcggtgatatacagatctaaactttcaaacacaatattttcatcaagacaattaattaatcatggtcacgtaagagtaaatggaaaaaaagttaacatcgcaagctatcaagttagagaagaagacagtatagagattagagacaaatcaaaacaattagctttaattgatatagcacttgctaacaaggaaagagaagttccagaatatttgcaactagatgaaaaaaataaaaaagtaaaatttgtaagagtacctaagttcgaagaggttccatatcccgttgtaatggaaccaaatctagtaattgaatattattctagataa

SEQ ID NO: 206573 - DNA, 619 bp, Unknown
  Bacterial polypeptide expressing nucleotide sequence isolated from the Sargasso Sea
aatgacaaaaagattaaactctaaacacaaagtagacagaaggttaaaagtaaacctttggggaagacctaaaagcccatttaacactagagcttatcctccaggacaacacggacaaacaaagtcagcaaaaccatccgactatggaattcaacttcaagctaaacaaaaattaaaatcatattacggcaatatgaacgaaagacagttcagaaatatgtataaaaaagctattatgaagaaaggtgatactgcagaaaatttaataggtttattagagagaagattagatgcagttatctacagatcaaaattatccaatactattttttcatcaagacaattgattaatcatggtcatgtaaaagttaatggaaaaaaagtaaatattgcaagttttcaagttaaagaagaggatactattgaaattagagataaatcaaaaacactagctttaatagatattgctcttgctaacaaagaaagagaagttccagaatatcttcagctagatgaaaaaaataaaaaggtaaaatttgttagaattccagcctttgaagaagttccatacccagttgtgatggaaccaaatctagttattgaatattattctagataa

SEQ ID NO: 206574 - DNA, 589 bp, Unknown
  Bacterial polypeptide expressing nucleotide sequence isolated from the Sargasso Sea
atgaaaaagaaaattgcaatacttggatccacaggttcgattggaaaaaaaacattgcacatattaagaaatgataaaaaaaactttgatatttttttattaacagcaaataaaaatacatccctattaattaaacaaattaaagaattcaatcctaaaaatataataattactgatgataaaaattataaaattgtaaaaaaaaaatttaaaaataaaaacgtttatgacagcttaaataaaattaactcaatatttaaatcaaaaattgattatacaatgagttcaatctcaggttttaatggattaaaaccaacgctagaaataataaaatttactaagacaatagcaattgcaaacaaagaatccatcatatgtggatggaatttaataagtaaacaattaaaaaagcacaaaactaattttattccaatagactctgaacatttttctatatggtccttaattaaaaattcaccacgcgaaggcattgataaaataataattactgcatctggtgggccatttttaaaaaaaacttataaacaattaaaaaaaattaatcctattgatgctataaaacatccaa

SEQ ID NO: 206575 - DNA, 762 bp, Unknown
  Bacterial polypeptide expressing nucleotide sequence isolated from the Sargasso Sea
aattaattaaaaataatactaaatttataccaatcgattccgaacatttctctatttgctcactaatcgaaaatgagccaattaataaagttgaaaaaataataattacagcatctggaggtccttttttaaattataaattaaacaaactaaaaaacgtcaaacctaaagatgcaattaaacatccaaactggagaatgggaaaaaaaatatccattgattcagcaaccttaatgaataaagtttttgaagttattgaagctcaaagaatatttaaaattgatataaataaattcgatatcttaattcacccaaaatcatatattcattcgataattaagtttataaacggtcaaatcaaaattttagctcacgatactgatatgaaaattccaatatttaattctatttaccaaggtgagataaaaaaaattatgacaaaaaaaattaatattaacctattaaataatatgaaattaatgaaagcagacaataaaagatttccatctattaacttattgaaaaaatttaataataataacactttattcgagactgtacttatatccgcaaacgatgaattggttgagttgtatttaaataataaaataaaattttttgatattaataagattttaataaaaattttaaataataaaaattatagaaagctaaataagaaaaaacctaaaaatatatctgatattataaatttatccaaagaagtaaggttgaaaactagaaatctatgtatacagtaaa

SEQ ID NO: 206576 - DNA, 931 bp, Unknown
  Bacterial polypeptide expressing nucleotide sequence isolated from the Sargasso Sea
tttgaattacaaaatcaaaaattctaatatcttaattacagctataccaggaattgatggtttgaaacctactttagattttataaagaaaagccaaaaacttttgatagcgaataaagagtcaattatctgcggttggaatcttataaaaaaagagtcaagaaaatataaagtgaaaataattcccattgattctgaacatttctcaataatgcaaatacttaaaaacatcaaaaacaacgatatagagaaaatttttataacagcatctggcggtccttttttaaaatttaataaaaaacagattgcacaagcaacaccctctcaggcactaaagcatccaaaatggaaaatgggtaaaaaaatatcaatagattcagcaacacttatgaacaagatttttgaagtagttgaagcaagcaaactattttcaattaatctaaataaaattgaaattttaatacacccgcaatctttaattcatgcgattataaaatataaaaacggtttaagtacattattatactttgagccagacatgactattccaatttgtaatgctatttctgatcaaggtttagacattaaaaattatttaaatgccaaaactaagaaagacaatttaataattaaagaaaaattagaattttttaaagtcgataaaaataaatttccagcaatcaagcttaaacctatattgaacaaatttaatagtctgcctatcgtggtaaatgcgggaaatgaaatatttgttgatcaatttttgaaaaaaaagataagtttttactcaattatttataatcttttcaaacttttaaaagacccaaaaatcagaaaatatgctataaaaaagtccacaaatttaaattcaataataagtattgacaagtgggcaagagatcaagcgactaaaattttggaaaagaaataa

SEQ ID NO: 206577 - DNA, 996 bp, Unknown
  Bacterial polypeptide expressing nucleotide sequence isolated from the Sargasso Sea
gatgaaaaagaatattgcaatacttggatgcacgggatccattggaaaaaaaacattagatatattaagaaatgataaaaaaaattttgatatatttttgttaacagcaaataaaaatacatcgctgctaattaaacaaataaaagagtttaatcctaaaaatataataattactgataataaaagttataaaattgtaaaaaaaaaatttaaaaataaaaaaatttatgacagcttaaataaaattaattcaatatttaaatcaaaaattgattatacaatgagttcaatctcaggttttaatggattaaaaccaacgctagatataataaaatttactaagacaatagcaattgcaaacaaagaatctatcatatgcggatggaatttaataaataaacaattaaaaaatcacaaaactaattttattccaatagactccgaacatttttctatatggtcattaattaaaaattcaccacacgaagatattgataaaataataattactgcatcaggtgggccatttttaaaaaaaactcataaacaattaaaaaaaatcaaacctgctgatgctataaaacatcctaactggaaaatgggaaaaaaaatttctatagattcagctactttaatgaataaaatttttgaagtaatcgaagccaaaaaaatatttaatattaaattcaataagtttaaagtacttattcacccacaatcttatattcacgcgattataaaatttaaaaatggactcataaaaataattgcgcatgatactgatatgaaaattccaattttcaattcattatataataatgaaaacaaagcaattcatagcaagaatataaatttaaaaattttaaataatttagaattgcaagaagttgatccaaaaaaatttccggttataaaattacttaataaaattcctaataacgaaactctcttcgaaactttattggttactatgaacgatgaattagtcgatttatt

SEQ ID NO: 206578 - DNA, 787 bp, Unknown
  Bacterial polypeptide expressing nucleotide sequence isolated from the Sargasso Sea
tatatgtggctggaacttaattagaaatcaattagataaatttaaaactaattttattccaatagactcagaacatttttcaatttattcattaattcaaaaaaataataaagatcagattgataaagtttttattacagcttcgggaggtccttttttaaatacttcatcaaaaaaactaaaaaatattaaaaaaaaagatgcacttaaacatcctaattggaaaatggggaaaaaaatatcaattgattcttcaacaatgatgaacaaagtttttgaagttattgaagctaagaaattgtttaatttaaattataaaaatatatcaatattaactcatccaaaatcctatgttcatgcgattgtaaaatttaaaaatgcactaataaaaatcctaattcatgaacctgatatgaaaatcccaatttataattcattatatccattgactaaaaataaagtaaaatcaaaaaaattaaatctttcaatcttaaataatttagatttaaaaaaaattaattaccataaatttcctcttcttaaattattaaataatttaaatgaaaaagattctttgtatgagacaatacttgtggttattaatgatttttttgtcttaaaatatttaaacaatgaaattaaatatcatgaaatgattaaattaatttataaatattccaattataatgaatttttaaagtataggaaaatattgccaaaaaaagttactgatatttataaattaagagattatgtaagtttaaaattaagtactttaagtgtataa

SEQ ID NO: 206579 - DNA, 547 bp, Unknown
  Bacterial polypeptide expressing nucleotide sequence isolated from the Sargasso Sea
aatgtcaaaaaaaaaaattgcaattcttggatctactggctcaattggaaaaactctctttgatattataaaaaaagataaaaataaatttaaaatattattattaacagctaataaagattataaaactttattagatcaggctaaaatttttaaagtaaaaaatttaattataactaataaaaaaagtttcaaaattttaaaattaaaagctaataaattaaatataaatatttttaataattttgataatcttaaccaaatttttcaaaataaaattgactatacaatgagttcaataacaggtattgaaggtctagatcctacattagaaataataaaatatacaaaaaaaattgccatcgcaaataaagagtcgattatttgtggatggggtttaattaataaatcattaaaaaaaaataaaacagaatttataccagttgactctgagcacttttctttatggtatgggcttaaaaatataaatctcaatataattgataaaatatatttaacagcatcaggtgggcctttttttaaaacg

SEQ ID NO: 206580 - DNA, 826 bp, Unknown
  Bacterial polypeptide expressing nucleotide sequence isolated from the Sargasso Sea
aatttaatttgcgctaagtcaaattataaattactaaaaaaacaaatttataaatataatcctaagtatgcatttctttacgatatagatgaattgccaaaatttaattataaaattaataaaacaaaaattttaaattttgatgaattaataaattatttattaggaagtaaatctaatttaactattttggcaatatctggatacaaagcattatattttctagaaagtataattcaaaatactgataacttaggattagcgaataaggaatctattgtttcagctggacatcttttcaaaaagaaaaaatatctttccaagacaaatatatttcctttagattcagaacacttttctttatatgatttttttaataaaacaaatcaagctaaaaataatataagtaaaataattcttactgcatcaggcgggcctttttataaaaaaaaatttaatgatttaaaaaccattacttttttacaagcaacaaatcatccaaaatggaaaatgggatataaaaatagtattgattcagctacattagtaaataaatgtttggaattaattgaggctcattatttatttgatataccatttaaaaatatggatattcttgttcatcccgaagctattgttcattctgcaattgaatataaaaattatattactcatcttaatcttttcaaaaatgatatgaaaataccgattttaaactttttacttacttcaaaatataaaaacaatttgattaaaaataaaaagtacttacttaattttaataatcttaactttcataaagttaaaaatgatatttttcctattt

SEQ ID NO: 206581 - DNA, 718 bp, Unknown
  Bacterial polypeptide expressing nucleotide sequence isolated from the Sargasso Sea
catgattaaaagaaaaattgctattcttggatcaactggttctatcggagtttcttctctagatatattaaaaataaacctaaaaaaattcaaaattatattactatcagcgaataaaaattatcctcttattaaaaaacaaattaagaaatacaaacctaagtattttatcattaataataaagatgtttttaataggatcgttaaaaccaataaatataataaaacaaaaatttataacaaattttcagatatcccattaaaaataaaatttgatattaccatttcttcaattgttggtatcgcaggtcttgaaccaacaataagttttgttaagagaagtaaaaaacttttactcgctaataaagaaagtataatttgtggttggcacattttgaaagaaatttccaaaaaaagtaatacagaaatacttccaatagattcagaacacttctctatataccaattaacaaaaaattgtgatgacaatgatattaaaaaaatatacatcactgcttctggtgggccttttttaaggaaacctttaaagttttttaaaaatattaaagccaatcaagctgtaaaacacccaaaatggaaaatgggaaagaaaatttctattgattcatcaaatcttatgaacaaagttttggaagttattgaggcatataaattctttccatttcatcaaaaaaaatatgaaatacttattcatcca

SEQ ID NO: 206582 - DNA, 805 bp, Unknown
  Bacterial polypeptide expressing nucleotide sequence isolated from the Sargasso Sea
gcattactcttttaaacaagcaaaatattttaatgttaaaaatgtaataatattaaacacaaaaaaatattttttatggaaaaaaaagtttgagaaaaataaaattaaaatatttaatagctatagagatttaaacaaaataattaaaaaaaaattagattacacaattaatgcaatatcaggtcttgatggattagaaccaacaataaaaataataaaacatactaaaaaaattgccatagcaaataaggagtcaataatatgtgggtggaacttaatagaaaaagaattagaaaaaaatagaacggaatttatacctgtagattctgaacatttttcaatttatagtttaattaacaaaacaccaaataatcaaattaaaaaaatcattattactgcatccggtgggccatttttaaaaaaaagtattaaatctaaagttaaaatatccgatgcattaaatcatccaaattggaaaatgggaaaaaaaatatctatagattctgcgactttgatgaataaagtttttgaagtaatagaggcaaaaaaaatttttaaattaaaatatgataaaatacaaattttaataaacccaaattcatatttacatgcggtagtaatttttaataacggaactataaaattattagttcatgagactaaaatggatattccaatttataattctatatacagcacatctaattataaattatataaaacaaaaaatttagatttaaataaaattaataatttgtttctttcaaagccggactcaaagaaatttaaatcaatcgatgtgtta

SEQ ID NO: 206583 - DNA, 797 bp, Unknown
  Bacterial polypeptide expressing nucleotide sequence isolated from the Sargasso Sea
gcaaataaaaatcatttaaaattaattaaacaagcaaacaaatacaaagttaaaaatataataataaccaatcctaacagttataaaattttgaaaaaaataaacaaaaataagcaaataaaaatttataataattttgataatttaaataagatttttaaaactaaagttgactatgcaatgagttctatcactggactggatggtttgaaacctacaatagaaatatcaaaatttacaaagaaactagcaatagcaaataaggaagcaattatttgtggttggaatttaataagtaaaatattgaaaaaatataaaacagaatttgtaccagttgactctgaacatttttctatttggtacgctttaaaaaataatatggacatagtcagtaaaatttatttaacagcatcaggcggtccttttttaaatttaccaacttctaaattaagaaaagtaaaaattaaagatgcattaaaacatcctaattggaaaatgggaaagaaaatttcaattgattctgcaaccatgatgaataaggttttcgaaattattgaggcaaaaaaaatttttaatttaaagtataatcaattgtctattttaacccatccagactcttatattcatgctattgtacaatttaagaatggactagttaagcttattgctcataaaactgatatgaaaataccaattgagaataccatttatgatagaaagaaaaatttttctgacaatgtaaaattagagatatctaagttaaataatatcaatcttaaaaagatagacgaaaaaaa

SEQ ID NO: 206584 - DNA, 754 bp, Unknown
  Bacterial polypeptide expressing nucleotide sequence isolated from the Sargasso Sea
atctaccttagatataattagtaatgataaaaaaaaatatagtattgaattgttggtagcaaacaagaactttaaaacaatccataagcaagtaataaaatttaaacccaaatttgtttatttagcaaataagatctattcaaggagactaagcatattattaagaaataataaaactaaaattattactaattttgatgaaataaataaaaaaatatctaagtcagatataatgatgagttccataactggtttggatggccttaaatataacttatcattaatcaaaaaagcaaaaaaaatactttttgctaataaggagtctattatttgtggctggaacttaataaagaaagaaatgaataaatacaattcatcatatgtacctgtagactctgagcattttgcgatatctgagctgataaagaataaagattttaaaaaaattaaaaatattacgattactgcatctggaggtcctttttttaactttgagaaaaaattaatgaaaaatataaataaaaaaatggcgcttaatcacccaaaatggaaaatgggtaaaaaaatatcaattgattcagctacaatgatgaataaaatttttgaggtaatggaggcatatagattatttgatttaaagtcacatcaagtaaatattgtaattcatccacaatcaattgttcatgctattgtgaactataaaaatggaactagtcacgcattattacatcataccgacatgagaattccaatt

SEQ ID NO: 206585 - DNA, 285 bp, Unknown
  Bacterial polypeptide expressing nucleotide sequence isolated from the Sargasso Sea
gctgggctccaccggttcgataggaacccagaccctccagatcgccgaggagttccccgatcaatttcgcgttgtcgcgctgaccgccggccgcaatctgtcgctgctggtgcagcagatccagcgccatcagcccgaactggtggccttggcggatcctgcactgctgccggttctgaagcaacacctagaggatctccccgccgaccagcgaccggccaaagcgcccgagctcgtggctggacccagcgggctcaacgctgccgcctcatgggacacggctga

SEQ ID NO: 206586 - DNA, 661 bp, Unknown
  Bacterial polypeptide expressing nucleotide sequence isolated from the Sargasso Sea
atgaaaaagaaattatcagtttttggatgcacaggttcaataggagaaacaacttttaaattattaaaaaataataaacaatttaaattctatattcttacaggatttaaaaattataaaaaaataaaatatttaatcagatattacaaaccaaaatactttgtaatatttgatgataaaacttttttaaaaataaaaaaagaattcgataaaaaaaaagttataatattaaattctaaagatttttattccttcaaatttgaaaaatcggacgttacaatcttagctattccaggtatggcaggtctagaaccaagtttagaaattataaaaaaaagcaaaaaaattttaattgcaaataaggagtccgttatttgtggttggaatttaataaacaaaatagctaagaaatataaagttaaaatcttaccagtcgactctgaacatttttcaataatgaatttaattaatgaaacacataataagtttatagaaaaaatatatcttacagcttctggcggaccttttttaaattatccgctaaaaaaaatgagcaaaattaaaccatcccaagcaattaatcaccctaagtggaaaatgggaaaaaaaatatcgatagactccgcaactcttatgaataaattatttgaagttatagagg

SEQ ID NO: 206587 - DNA, 880 bp, Unknown
  Bacterial polypeptide expressing nucleotide sequence isolated from the Sargasso Sea
gatgtcggcaatttcaggattggatgtttaaaaccaaccatagatataattaagtttagcaaaactatagctatagctaataaagaatctataatttgtgcatggaatttaattcaaaaaaacttaactaaatataaaactaaatttattccagttgattcagaacatttttctatttggtctttactaagtgataataaaaaaaataatatagaaaaagtaattattactgcttcaggtggaccatttttaaaaattcctttgtcagagtttaaaaagattaaaccaaatgatgctgttaaacatcccaattggaaaatgggtaataaaatatctatagactcagcaacacttatgaataaagtttttgaagttattgaagcacaaagaatttttaaaattaacgtaaataaatttaaaattttaattcatccaaaatcttatgttcacgccattataaaatttaataatggtttaacaaaaattttagtacacgatactgatatgaaaattcctatatttaattcaatatataatgaaaaaaatataaattttaaaaattctaaacttaatttaaaaattttaaataatttaaatttttcaaatgtaaatttaaaaaaatttccttcaataaaaattttaaataaaatacctaaaaaaatttctctttatgaaacagttctagttagtgcaaacgaccaactagttgacttatttttaaaaaataaaattagttttcaaaaaattactttttttttaaacaaaatattaataaaaaagaattttttgaaatataaaaatagatcacccaaaaattacgacgaaataatcaaactaagcaattatgttagattgaaaacaagactattatgtatatgat

SEQ ID NO: 206588 - DNA, 678 bp, Unknown
  Bacterial polypeptide expressing nucleotide sequence isolated from the Sargasso Sea
gatgaaaaaatcaatttcaattctcggctcaactggttcaattggaaccactgtatttaaaattattgataaaaaaaaaaataattttaaaattgatattttatctgctaacaaaaatattaagattattttaaaacaaataaagaaatataagccaaaatacttcataattaataataaaaaatcttttttaaaaattaaaaaaaaatattcaaataaaaaaactaaaatatttaataatttaaattcaattaaaattaataaaaaatcagatatttgtgtctcagcaattccaggaatagcagggttagaacccacaattcttatgattagtaatagtaaaaaaattttgatagcaaataaagagtcaattatctgcggatggaatattattaaacaaaaagcaaaaaaatataatacaaaaataatcccagtggactcagaacatttttcaattatgaaattatttgaagatcataaaattaaagaaatagataaagtttttatcacagcatctggtggaccttttctaaattataaattaaatcaatttaatcacattaaacccagtgacgctctaaaacatccaaagtggaaaatgggaaaaaaagttactatagactcttctacaatgatgaataaattgttagaaataattgaagctcaaaaattgtttaa

SEQ ID NO: 206589 - DNA, 607 bp, Unknown
  Bacterial polypeptide expressing nucleotide sequence isolated from the Sargasso Sea
tcaacaaaaaatattgcaatagcaaacaaagaatcaatcatatgtgcttggaatcttatagaaaaaaaattaataaaaaataagactaaatttatacctgttgattcagaacatttttcaatttggtccttgttacaaaatgaatcaattaataatgtagaaaaagttattattacggcatcaggtggtccttttttaaattataagttaaataaattaaaaactgtaaagcccaatcaagcaatgaaacacccaaactggaaaatgggcaaaaaaatttctattgattcagcaacacttatgaataaagtttttgaaataattgaagctcaaagaatatttaaaattaatattaaaaaatttgatatcttaatacatccaaattcatatatacattcgataattaaatttaaaaatggtcaaataaaaattcttgcacacgacacagatatgaaaattccaatatttaactcaatatatccagatggttttaaaaaaattgatacaaatcaaattaatattaattttcttaatgacttgaaattaagtaatatagatatcgttagatatccttctattaaaattttaaaaaaaattaacaacatca

SEQ ID NO: 206590 - DNA, 772 bp, Unknown
  Bacterial polypeptide expressing nucleotide sequence isolated from the Sargasso Sea
taaaagaaatgcaaaaaaaaattctacaaaaataattccgatagactccgagcattattcaataatgaaattattagaaaatcacaaaataaatgatatcgaaaagatctttttaacagcttcaggtggcccattcttaaattataagttaagtgagttaaaaaatattacaccttcagctgctcttaaacacccaaaatggaaaatgggaaaaaaaatatctatagactctgcaactttaatgaataagattttggaattaattgaagctcaaaaattattttcaattccaaattcaaaaatagatatattaatacatccaaattctcttgttcacgcgattattaattttaaaaatggccttactaaattactttatcatgagacctcaatgattataccattagctaatgctatttttgatggaaaaataaatatcaaagatttttacaaaaaaacaaaacaaaaaaataacaaaattttagataacctttactttgaaaaggtaaataaaaaaacttttcctataattaaaataaaagatgaaataaacaaatttccatctaccccaataattgttaatgctgttaatgaggtgctagttggtgagtttttaaaaaaaaaactgccctatttgagcatatacaaacatatcttaggcataatgaaggatagaaattttaaaaaatatgctataaaaaatccaaaaagtataaaacaaatcttggaaattgataattgggctaaatcaacaataaaaaagaaattatga

SEQ ID NO: 206591 - DNA, 763 bp, Unknown
  Bacterial polypeptide expressing nucleotide sequence isolated from the Sargasso Sea
aagcctttatattttttagttagtgataaaattatttataaaaaaataaaagaaaaatttaaaaagaaaaagaataggacaataattatcaatagaattgaagaaattaagattagaaaaaagtcagatgtcacaatttcagccattcctgggataattgggttaaagccaacaatttatcttataaaattaagtaaaaaaattttgttagctaataaagagtcagtaatttgtggctgggatttaatacgaaaagagataaaaaaatacaatacaacattagtgccaattgactcagaacattactctattatgaatttaattaaaaatcacaagattaatgaaataaataaaatttttataacagcatctggcggtccattcttaaactacaaagtttctcaatttaaaaaaatcaatccaactgatgctttgaaacatcctaaatggaaaatgggtaaaaaaatttcaatagattcagcaactttaatgaataaaatattagaattaattgaggcacaaaaattgtttaatttgcctccagaaaaattagaaattgttattcacccagagtcattagtacattcaattatagattttaaaaatggtattaaaaaatttatttatcatgaaactacaatgattattcctatcgcaaatgctttatttgaagaaagtatcaatattgaaaatattataaaaattgcaaaaaaagaaaaaattaaaaatttgatttttaaaaaagtagataagaaaatatttc

SEQ ID NO: 206592 - DNA, 751 bp, Unknown
  Bacterial polypeptide expressing nucleotide sequence isolated from the Sargasso Sea
atgaatataaacatctttggttctactggcgtaataggaaataaatctttaaatttaattaaaaaattttttcctgaaatacgaatcaatcttttagttgctaacaataattataaaaaactaatctcacaatgtgataaatataaaccaaaatacatatgtattataaatgaaaatttaatttataaaataaaaccacatattgataaaaaaataaaaattataaaaaataaaaatttaaataaacatttaaatgcagttaaaactgatttaactattctatcagtatcaggctacaaagcactgatttattttgaatcaatattaaaaaatacgaaatatttaggtttggttaataaggaaattatagtttcagtaggacatttattcaaagaaaaaaaattccttaataatactttaatatttccattagattctgaacatttttcattatttaatttttttcaaaaaaataattataaaataaatgaaataagaaaaatatatttaactgcttctggcggcccatttttaaattataatattaagaaactacaaaatgtaaaacttaaagatgctattaaacatccaaagtggaaaatgggtcataaaaatagtattgattccgctactttagcaaataaatgtttagagttaattgaagcacattacttatttaatgtaccttttaataaattagatattttaattcatcctgaatctttagttcattcaatcgttgagttaaaaa

SEQ ID NO: 206593 - DNA, 948 bp, Unknown
  Bacterial polypeptide expressing nucleotide sequence isolated from the Sargasso Sea
ttatccaaatctatttatttctcttgtgaggaagccaaaaaagaatttaaaaatcttcggactaaatatagaggttcttgattgcattgaaattgttgctgagagaatagagaatagcccaagtgatatttacttatcagctgtaagttcttatgaggcacttgaactcacaattgcggcagcaaaatcaggaaaaaaacttttactagcaaataaagaatcattagttgtttttggtaaatttataatggatacagtttcctcatctggaacagaattgattccaattgattcagaacatttttcacttttttcatctcttaggagtttaaataaaaatgatataaaaaagatctttataacagcttcaggcggaccttttttaggacaaaatctagaacaaataaaaaataaaaaagcagttgatgctctcaagcatccaacatggaagatgggcgataagattacaattgactctgctactcttacaaataaatgctttgaactaattgaggcaaaatttctttttgatttagatcctgaaaaattagatatattaattcaaccccaaagcattattcattcattgattgaattaaacgatggctctgtggaggcccaattatcaaagccaagtatgattattccactttcgtatggactgctggatagcagatcagatgaagtaagaaataaattctcgttaaatatgtttgaggaagaaataaacttacaattaaagttctttcctgaagatagaaaagaattattaaaaataactaaagagattatggatcttggaggcaatagaggactcatttttgcaacactgaatcagatagctgtaaataattttttaaaagatcaaattaaatttggagaaatttatgagtttatttataacaactattttaattttgaaaaaaaagaattaaatacactagaaga

SEQ ID NO: 206594 - DNA, 793 bp, Unknown
  Bacterial polypeptide expressing nucleotide sequence isolated from the Sargasso Sea
aatatgtggttggacattaattgacaaggaattaaaaaaaaataaaacaaaattcatccctgtcgactctgaacatttttcattatggtatggacttataaatactgaaattgatttaattgaaaaaatatatttaacagcatcaggtggtccattttatcttacacctcttaaaaaatttaaaaatattaaaatacagcaagctttaaaacatccaaattggaaaatgggtaataaaatttctatagattctgcaacaatgataaataaaatatacgaggttattgaagcaaaaaatatttttaatattccatattcaaaaatagaaattttagttcatccaaaatcatatgtacatgcaattattaaattcaaaaacggtctaacaaaaattatagttcatgatacaacaatgaaaattccaatttttaatactctatataataatacaaagaaaacacttaaatctggtcaattaaaaattgatttattaaataatttaaaattcaacaaggttgaatacaaaagatatccaatgattaaaattttaaattatttgtcaaataaacattctctttatgaaacaattattgtttccgctaatgatgctttagttgatttatacttaaagaaaagaattaaatttgtagatatacataaaaaattatttgatttgattaaaactaatcattttttaaaatataaaaagatttacccacgaaaaataaaagatattcttgaattaaatgattatgtccgtttaaaagtaaatgaaaaagtgtataaatcataa

SEQ ID NO: 206595 - DNA, 583 bp, Unknown
  Bacterial polypeptide expressing nucleotide sequence isolated from the Sargasso Sea
atgaaaaaaattgcaattttaggttcaacaggctctattggtcaacagaccattgatattttaaggaaagataagaaacaatttaaaatattattattaacagctaacaaaaatcatttcttattatcaaaacaaataaaagaatttaatgtaaaaaatgtttttattactaacaaggagggttgctcaatcttaaaaaaaaagtttaagaaagttaatatttttaatgatattaacaaaattgataaaattttaacttcaaaattagattataccatgagttccattgctggtttcgatggtttaaaacccacacttaaaattattaaaaaaacaaaaaaaattgccatagctaacaaagaatctattatatgtggctggagtctaattgagaaggagattaaaaaacataaagttaaatttatcccagttgactctgaacacttttcgatttggtctcttattaaaaacactgatcctaaaaaagttgatgaaataattatcacagcatccggtggtcctttttataaatcaaagaaaaaaaatgtaaaaaaaactcctaaatggcaacaaatcatccaaa

SEQ ID NO: 206596 - DNA, 880 bp, Unknown
  Bacterial polypeptide expressing nucleotide sequence isolated from the Sargasso Sea
atgaagaaaattaatttagttatttatggagctacaggcagcatagggaaatcggtcttatcaattataagggaaaataaagataaatttaatattcaaggaattacttgtgataaaagctataaaaaattaatcaaaattggcaatgagtttagtataaaaaaaattggcattaataaagaaattaaaaataaaattaaagaactagggaagtttagcatttatcataaaattgaaaaatttcatgaaatcatagataataaaacggatataattatatttgcaattactggcttagctggactagacctaatttcgaatttaatcaaatctggaaaaaaaataggaattgcaaataaagaatgtataatttccctaggaaataatttacctagactagcgagatcatattcaacagaaataataccgttggattccgagcataattctatttatcatttattaaataataaatacggtgaatttgagtcaattactattacagcatctggaggaccgttcagaaacatgcctcgtaaaaatttaaacaatgtaacaatagatcaagctttaacacacccgatttggaaaatggggaaaaaaatttcaattgattcagctactatgatgaataaagctcttgaaattatagaggctaaatatctatttgatttgaaagatagtcaaatcaatgcaattattcatccacaggcaatcattcatgctgtgattaactataagaatggggtttcttctgcattgatgaataaacctgatatgagaataccaatttcgtctttattttttaaatttgagtcatactcaaaaaatgacaaacaattgagccttgttgatcactctaatttagagttttttgaca

SEQ ID NO: 206597 - DNA, 674 bp, Unknown
  Bacterial polypeptide expressing nucleotide sequence isolated from the Sargasso Sea
agttaaaaatcaagaatcaatatcacgtctaatattaacgggatcgggtggtccttttctcaatagagacatcaatgactttaagaatataacccctaaagaggcaacctcacatcctatctggaatatgggggataagatctcggttgattcatcaaccatgatgaataagtgtttagaaataatagaagctaaatggttatttggatttgacaatatagatgtgcttatccatccagaaggtatcattcattccttggtcgagtttaaagataaatcgctgatggcccaactttctattccagatatgaaaattccaatagcttacggtttgggtttccctgaaagaatcaattctggtagtgattcacttgattttgaaaagatcagtaatctttcttttgtaaaaccagattcaaaaaaatttccttcattagttcttgcaaaggattgtattaattctggtggaacaagcttttctactttaaatgctgcaaatgaagagtgtgttgcttcctttttagaaggtagaataggctacttagatatacatagaattatttcagaggttttggataaatcagacataaagaaggtcgaagaaatagaagatattttcgaagctgatatgcaatctagagagatgactaaagaacttataaatacaaattaat

SEQ ID NO: 206598 - DNA, 862 bp, Unknown
  Bacterial polypeptide expressing nucleotide sequence isolated from the Sargasso Sea
acaacatttattaaagtcgatagagataagtaaaaaagttggagtagctaataaggagtcgataatatgtggttggaatttaattaaaaaatctttatataaaaatcaaacaaaattcatacctctggactctgaacatttttctttatggagacttattcgaaataaaaaaataaatgatattaaagaagtatttttaactgcatcaggaggcccctttttaaataaaaaaaaatcagatttaaaaaacattgattccaaattagcattaaggcatcccaattggaaaatgggtaaaaaaatctcaattgattctgcaacaatgatgaacaaagtttttgaagttattgaggctcacaaactatttaatattgactttaataaaataaaaattttaattcatcctacatcatacattcattctattgtaaaactaaaagatggaacaattcatttacttgctcatgatacaaaaatggaaatccctatagcaaattcgttatttgaaaataatatatataattataacgataataaatttaatattaatataaataatatgaaattttataaaccaaataaaaatcagtttccttcactaaaatttttagaccaatttaaaaatagaaataaatattatgaaattttactaattgttggaaacgatgaattagtaaactattatcttaaaaataaaattaaatatgaagatatctattatttactatccaaacttattaaaatgaatttgtttaaaaattatgataataatgggcatatatcactaaaaaaaattaataaaataattaaaatagtaaaatcaaatataagaaatataattaaaaataaaaaaataaaatga

SEQ ID NO: 206599 - DNA, 582 bp, Unknown
  Bacterial polypeptide expressing nucleotide sequence isolated from the Sargasso Sea
aatgaaaaaaaaaattgcaattcttggttcaaccggttcaattggccaatctactttagatgtaatagaaaaagataaaaagaattttgatatagtttttctttctgcaaacaacaattataaaaaacttatacaacaagcaaaaaaatttaaggtaaaaaatgttttaataggaaataaaaaattttatcaaaaggttaaaaattcactaaaaaaaactaaagtgtatacaggtgaaatctcaattcaaaaaattatttctaaaaaaattgattacacaatggcagcagtcgtaggtatagcgggattacaaccaacgattgatgcaataaaagtaagtcataatgttgctattgctaataaagaaacaattatttgtggctggaacattttatctaaacttataaaaaaatataaaacaaaaattattccagtagattcagaacatttttcaataatggagttaacaaaaaatatgaaagattctgatattaatgaaataattataactgcttctggcggaccatttctttataaaaatataaaaaaaataaataaagctactccttctcaagcttccaa

SEQ ID NO: 206600 - DNA, 808 bp, Unknown
  Bacterial polypeptide expressing nucleotide sequence isolated from the Sargasso Sea
aagtttaaggttaaaaatttaataatcagaaataaaagaggttttgaaattttaaaaaataaattaaaaaatgataaatcaataaaaatatttaataattataacagttttagtaaaatttttaaaaaaaaaaattattatgtaatgagttccataagtggagtagatggcctctctccaacagtgaaaataattaagtatacaaaaaacatagctatagctaacaaagagtctataatcatagcttggaatttaattgatagggagctaaaaaaaaataaaacaaattttattcctgttgactctgaacacttttctgtttggtatgggctaaataatttagatgccagcaatgttgaaaaaatatatttaacagcatcaggtggaccatttgcaaatcttcctctaaaaaatttcaaaaaaattaaactcaaacaagcgttgaagcatcctaattggagaatgggtaaaaaaatttctatagattcggcaacaatgattaataaaatttatgaagtaatagaagcaaaaaatatattcaatattaattataaaaatattaaaattcttcaacattcaaattcttatattcatgcaatacttaaatttaaaaatggactaataaaattagtcgcacacgatacaactatgaaaattcctatttttaacacactttattttaatgaaagaaaaaaaattagttcaaaaaaattaaatttaaatactttaaataatttaaaatttaaaattccagactctaaaagatatcctatgattaaattattaaaacttttgcctattaaaccat

SEQ ID NO: 206601 - DNA, 783 bp, Unknown
  Bacterial polypeptide expressing nucleotide sequence isolated from the Sargasso Sea
aattatagactaatatgtaaacaaattaaaaaatttaaacctgagatatttattatttttaatacaaaagtatttgaaaaaacaaaaaaaaaatttaagaataataaagttaaaatagttcaaaatattaatattaaaaaaaatattttgaaaaaatcagacgtcactattgcagcaataccaggaattgcaggtttaaaaccaacgattgaattaactaaattaagtaagaaaattttaattgcgaacaaagaatctattatatgtggatgggacttgataaaaaagaatgctataaaatataatactaaggtaattcccgtagactcagaacatttttcaatacagaaattgttagaaaatcaaaaaattaataacgttaaaaaaatttatataacagcatccggaggtccttttttaaatcataaaatttctaaattgaaaactgtaaaacctcatgatgcaattaaacatcctaaatggaaaatgggaaaaaagatttcgatagactcagctaccttaatgaataaaattcttgaagttattgaagcacataaactttttaatatcgacattaaaaaattcgaaattgttatacaccctgaatctcttattcatgcaattgtcgaatttaaaaatggtttgtataaatttatatatcatgaaacttctatgcttattcctttagctaatgctatttttgatgataatatagatattgattattttttaaaatctaaattaaaatcgaaaagatcaatttttttccaaagtttaaatttt

SEQ ID NO: 206602 - DNA, 694 bp, Unknown
  Bacterial polypeptide expressing nucleotide sequence isolated from the Sargasso Sea
tatcaattattaaataataataaacattcagttagaacaatcactattacggcaacaggaggaccatttctaaataaaaaacttgatgattttaaaaacataaaagttgaggaagccataaatcatccagtttggaatatgggagaaaaaatatctgtagattcagcgacaatggtaaataaaggtctagaagtaatagaggcaaaatatctttttgacttagatgttaacaaaattaatgttttggtacatccacaagctataatacatggctttatcacttataaagataattcaatattttcatttatgagttatcctgatatgcagataccaatttccaatttactctttccaaataaggacgttaattttgatgatctttatttagatttagccaagatacaaactcttaatttctacgatattaatgaaaaaaaattcccagcaataaaatatgctaaagaagtgatcagtataggaggtttagctcccaatggatttaattacgcaaatgaaaaattagttaatttttttttaagtaaaaaaattaattttatagatatcgttaatttcaatatagccactatagataaattttttgcaaaaaattcaaatatagaaaggcccacaattgaggatatatttaattttaataaatggattgacgaaaatatttatctgggcgattaat

SEQ ID NO: 206603 - DNA, 904 bp, Unknown
  Bacterial polypeptide expressing nucleotide sequence isolated from the Sargasso Sea
tttaaatattttaaagaaagacaaaaaaaattttagaataaaattattaactacacactcaaatataaaaaaaatttataaacaagcattattatttaatgttaataaaattgtaatatttaataaaaaagaatttttaaaaaattataaaaagtttgaaaaaaaaaaaataagtgttttttgtactataggtgatgcttttaaaacaaataaaaaaaaatcttatttaactataaatgcaatctcaggtatagatggcttagaaccatcattgaacataataaaatattcaaataatttagctattgcaaataaagagtctataatttgtggttggaaatttttacataaagaattgttaaaaaacaaaacaggctttattccacttgactccgaacatttttcaatttggtcattacttaaacaagaaaaaaaacaaaacatcaaaaaaatttatctaacagcttcaggaggtccttttttgaatcttaaattaaaaaaaataaaagatataaaaccaaagtatgctctaaaacatcctaattggaaaatgggaaaaaaaatatcaatagattcagcaacaatgatgaataaaatctttgaagtaattgaagcgattaaaatatttaatttagattcaaaacaaatagatattataattcaccccaaatcatatttacatgctatcgtaaatttcaataatggattaaccaaattacttgcccatgatacaacaatggaggttccaatagctaattcaatatatcaaaactttaaaatatataattataaaaatagtacatttaaatataagatgttgaatggattaaatttcattaaaccggatcaaaaaaagtttccattacttaaaattcttaaatataaatttaataatacatattta

SEQ ID NO: 206604 - DNA, 457 bp, Unknown
  Bacterial polypeptide expressing nucleotide sequence isolated from the Sargasso Sea
ttgaaatacattactgtgctcggttctactggttcaattgggactcaaactctcgaaatagctagtgagcagcctgataagttcaaagccgtagctctttcggcaggaagaaatattaatttattaacagaacaagttaaaacacacaaaccagaagtagttgcgattgaggatgaaaatcttatagaagatttaaaagataatattaataacttagatttggatagtgctcccttggttttgagtggaaaggaggggattaacgcagttgcagcatgggataaggcagatactgtggttacagggatagtaggatgtgcaggcttaattccaacaatgtcagcaattaatgcggggaaagatattgcacttgctaacaaagaaactttaattgcggcagggccaattgttattcctgcattaaagaaaaataatagtaggcttttacctgctgatt

SEQ ID NO: 206605 - DNA, 682 bp, Unknown
  Bacterial polypeptide expressing nucleotide sequence isolated from the Sargasso Sea
tatggtaaataaaaaaagagtttctattataggatcaactggctttattggtaaacaaactcttaatgttgtggacaaacagccatggtttaaaattgagttgttatcatgttatagaaatatcaaagaattaaagaaacaaatatcaaaatataaaccatcaaatatttatatagaatgcaagaaagcgagagaaaagtttaaacactataatattaaatctaaatttaatattattgaaaaaaaatcagaattgaatgattttatttcatctgatagtaacgatattctcgtagcctcatcatctggaattaattctattgatacagttatagcagcactaaagaagaagaaaaaaatttgtgtagcaagtaaagagatcttccttttatatggaaaagaaattatgaagatttcaaaaaaatttaacaataaaataatacctattgatagtgaacactcaggggtctttcaactgctagaaagtaatagggcagaagatgttaaaaaaatttatattactgcctcaggaggtcctttttatggaagaaaaataaaagatttatcaaaaattaaaaaggaagatgcactaaatcatccaacttggaaaatgggggataaaattacaattgactcagctactcttatgaataagggtattgagataattgaagcagcaaca

SEQ ID NO: 206606 - DNA, 518 bp, Unknown
  Bacterial polypeptide expressing nucleotide sequence isolated from the Sargasso Sea
gttcggccttgataacgaccacatcgagatcgtgatccacccgcagagcatcatccactcgatgattgagctgcgggactcttctgtgctgccccagctgggctggccggacatgaaactgccgatcctgtactgcctctcctggccctcccgcctggagaccccatggcgacgacttgatctcaccgaggttggacagctgaccttccgcgctcctgacaccaccaaatatccctgcatggaactggcctacgccgccgggcgagcgggtggcaccatgcctgccgtgctgaatgcggccaacgaggaagccgtcgctcaattcctcgaggaacgcatccacttcctggatatcccggaggtgatcgaggctgcctgtgaacgccacaagccggatctgatgaaccatccccagctcgaggatgtgctgagcgtcgaccgctgggcccgcgaggccgtccgtgagcaggtcagccgaggcacccggcgcgtgccggtcgccgccctggcggcatgag

SEQ ID NO: 206607 - DNA, 853 bp, Unknown
  Bacterial polypeptide expressing nucleotide sequence isolated from the Sargasso Sea
tcttatttgcgctaaatctaatgtaaatattttacttaaacaaattcattattataaccctagttatgcttgcatatatgattcaagaaaagttgatattataaaatctaaaatcaataacaatactaaattaattacttttaatgaacttttaaaatatcttaaatctagtagttcaacatacagtgttcttgctatatccggatataaatcattatactatttagatgatattataggtaatactgagcatttaggaatcgctagtaaggaagcaattgtttcagcaggacatatttttacaaaaaaaaattattttaataatactaaaattttcccactagactctgaacatttttcattatttgattatttaaatcaaaataattttaataaatcaattaaaaaaattacacttactgcttctggaggacccttttataaaagaaaatttcaaacgttaaaaaatgttaaattcaaaaatgctatcaagcatcctaagtggaaaatgggatataaaaatagtattgactcagccacgcttgttaacaaatgtttagaattaattgaagcacattatttatttggagttccatttagcaaattaaatattaaaattcatcctcaggcattagtacactctattgttcaaaaagataactttgtctttcatatgaatctttttaaaaatgatatgaaaattcctattttaaattttctaaatataaaatataaaaatattgattatatcgaaaaaaaactttcaataatcgattttaaaaagttagaatttttagaagtaaaaaatacaaattttcctatttataattttttcttaaaaagggacaaaaat

SEQ ID NO: 206608 - DNA, 806 bp, Unknown
  Bacterial polypeptide expressing nucleotide sequence isolated from the Sargasso Sea
gatagtaaacaaagagtctataatttgtggatggaatttaatcaaaaatgccttagagaaaaataaatgcaattttatacctatagactctgaacattattcgattcattcactgttaaaggggcatcaattaaatgaaatcgaaaaaatttatataacagcttcaggcggcccttttataaatattccaaagaaaaaatttgataatataaaactgaaagatgcattaagtcatcctaattggaaaatgggaaaaaaaattactatcgactcatccactttaatgaacaaggtttttgaagttattgaggcaagaaatatatttaatattgattacaaaaaaattttaattttgactcatccaaagtcttatgtacatgccatcgtaaaatttaataatggtttaagtaaaattttgttacatgagccagacatgaaaattccaatttataattcattaaatttgacaaataaaaaaaccagaaccctcccacttagatttgatacattaaataaattaaattttaatgaagtagataataaaaaatttcctctagtaaatatcattaataaattaccaaaaaaaatatctttatttgagactatcttaatcacagtaaatgattattttgttaataaatttttagaaaaaaaaatcagctataagaaattaatttttataattataaaaatattaaacatgaaagaatttcaaaaatataagaaaataaagcccaaaaacattgaagatatttaccgtcttagagattatgtaagtttcaaaatggactctttaagtatataaa

SEQ ID NO: 206609 - DNA, 976 bp, Unknown
  Bacterial polypeptide expressing nucleotide sequence isolated from the Sargasso Sea
atacaaacctaaaatatttataataaataaccatgcaatatttaaaaaagtaaaaaaaagatttaaaaaaaaaaaaactataattcttaataattttaattctttaaaaataagaaaaaaatctgatattacagtttcagcaattccaggaatagctggccttcagccaacattaaaaatgattgcagggagtagaaaaatacttattgcaaataaagaatctattatttgtggatgggatatattaaataaagaggcaaaaaaaaataaaacaaaaataataccaatagactcagagcacttctcaattatgaaactattagagagtaataaattagaggatataaataaaatttatattacagcatcaggtggacctttcttaaactatagcattaatcaacttcaaaaaattagaccatcggacgctttaaaacatcctaaatggaaaatgggaaaaaaagttacaatagactcagcaacactaatgaacaaaatattagagttaatggaagctcagcttttatttaatttagatttaaaaaaattagatatcttaattcacccagagtcacttgttcatgcagttgtggagttaagtaacggattatataaatttatctatcatgatacttcgatgattatacctctcgcgaatgcaatatatgaggacaagttaaatattaatcatttttatattaaaaaaaatagcataataaaaaatcttacttttcaaaaagtaaataaaaatatttttcctattatcaagcttaaaaagaaattaaatgaatacccagcaactccaattattattaatgcagcaaatgaaatattagttgatcaatttttgcgaaaaaagatacctttttcgagcatatataaattcattatggccattctgaaagatagaaattatagaaaatatgctataaaaaggcctaaaaatattaaatcaatttttaaagtggataattgg

SEQ ID NO: 206610 - DNA, 665 bp, Unknown
  Bacterial polypeptide expressing nucleotide sequence isolated from the Sargasso Sea
aaagagtagcatagatagagtttttattactgcatctggtggaccttttgttggacaatcacgtcaagaaatagaggacaaaaagcctgaagaagcattagatcacccaaattgggatatgggtgacaaaataactattgattcagcaacacttgttaataagtgttttgaattaattgaagcaaaatatttgtttaatcttgatgcagataagttagaagtattaattcaacctcaaagtattattcattcaatggtggagctaaaagatggctcagttgaagcccaaatgtctctaccaagcatgataattcctctatcttttggtctgttagaccaatattctgataaaacgaaaaaagatttctctttagatatgttcaaagaagatataagactaacaatttcagattttcccaaggacagagaagaattaatagatatatcaaaagatgttatgaaaaatggaggcaatagagggcttatatttgcagctgtaaatgattttgcagttaaaaaatacttagaaggagaaatcaattttggagaaatatataatttaattttcaaacattactctgagattggaaagaaagaaattttaagtttagaagacttaagagataatcaacgtgaaatattgaattatttaggaagtatttaat

SEQ ID NO: 206611 - DNA, 560 bp, Unknown
  Bacterial polypeptide expressing nucleotide sequence isolated from the Sargasso Sea
gatgaaaaaaaaattatcaatatttgggtgcacaggttcaattggtgatacaacgttaaagcttttaaataaaaagaataaagaatatagtttttatattttaagcggttataaaaattataaaaagataaaatacttgattaaaaaatataatccaaaattttttgtaatttttgacaataatacatttaaaaaaataaaaaaagaaaacttaaaaagtaatgcaaaaattttaaattcctttgagtatcaaaattttaaatttaaaaaatcagatatctctattcttgctattcctggaatagcaggactagaaccaacattaaaagctatacgaataagtaaaacaatcttaattgcgaacaaagagtctgttatatgtggttgggatttaattaaaaaattagtaaagaaatgcaaaactaaaatttttccagtagactctgaacatttttcaataatgaatttgattaatcaatcaaataaaaaaaatgttgaaaaagtttatcttactgcttctggtggcccttttttaaaatattctttaaaaaaaatgaaaa

SEQ ID NO: 206612 - DNA, 703 bp, Unknown
  Bacterial polypeptide expressing nucleotide sequence isolated from the Sargasso Sea
atatcaaattttagttaacgctaatatagaaagtatatcaaaagtaattattactggttctggtggcccttttagggggttttcttataagaaattaaaaaaagttactttggaagaggcaataaaccatcccatttggaatatgggtaaaaaaataagtgtagactcagcaaccttaatgaataagggcttagaattaatagaagcggcatatttatttaatattaaacaaaaaaatatagatataataatacatccagaatcaattattcatggcatagtagaatttaaggatggttctatgaatgcagggttgagtcatccagatatgaaaagccctatttcatatgctttgaattacccagataaggttaaagccaatattaaaaaattaaatttaacagtaataaagagtcttaattttgaagaagttgatacatcagtttttaaatcaataaatattagtcgatctgcacttaagcagggtcatgcatttgtgataagtttaaatgctgttaatgaagtagctgtcgagtcttttataaaaaataatataagttttaatgcaataataaatattatagaagaatctttaagtaaaattaaaactaataatatcaataacttagaagatatatttattattgatgataatgctagaaaaattagcaagcagattattaaaaatgggaattttaaatga

SEQ ID NO: 206613 - DNA, 383 bp, Unknown
  Bacterial polypeptide expressing nucleotide sequence isolated from the Sargasso Sea
aatgaaaaaaaaaattacaatttttgggtctacgggatcaataggattatcaacacttgatattattagtcaacacaatgacaagtacgagattgttggcttaagtataaataataattacgaaaaattacttgagcaagtttcggcttttaagcctaagatagtatctataaaagacaccaattcctttgaaaagtttaaaaatagaaataccctaaaaaatctaaaaatattaaatggaagtgactcttttgatgatattctaaattatgaaactgatattgtagtggctgctattacgggatctgctggactacttccagttgttggagctgtaaaaagaggtataaccatagccctggctaataaagaaagtttagttt

SEQ ID NO: 206614 - DNA, 886 bp, Unknown
  Bacterial polypeptide expressing nucleotide sequence isolated from the Sargasso Sea
tatgagctcaattacaggaatagagggacttaaaccaacattagatattattaaatttagtaaaaaaattgctatagcgaacaaagaatcaatcatttgtggatggaatttaataaattttcaattaaaaaaaaataaaacaaagtttattccagtagactctgaacatttttctttatggtacggtctcaaagatataaataacaatattatagataaaatttatttaactgcatctggaggtccttttgttaaaactccattaaaaaaactcaaatatgtctcagtaagagaagcacttaaacatcctaattggaaaatgggaaataaaatatcaatagactccgctactatgataaataaaatttatgaagttatagaggctaaaaatatatttaatctttcatataaacaaatagaaatcttaattcatactaattcatatgttcatgcaattataaagttaaaaaatggaatgattaaagtaattgctcatgatacaacgatgaaagtaccaatttttaacacattattttttaactctaataaaatgttaaaaacaaataatcttaaaataaaatctttaaataatttaaatttaattaaagtaaattctaaaagatttccaatggttaaaattttaaatctattatctaataagcactctctatataatactgtaatagtttcagctaatgacgtgcttgtgaacttatatttacaaaaacaaattaagtttacagatattcaaaaaaaattatttttaattttgaaaaataaagaatttttgaaatataaaaaatattttccatcaaaagcaaaagacattattgaattgaataaatatgttcatttaaaagttttggaaaatgtgtataaatcttaa

SEQ ID NO: 206615 - DNA, 610 bp, Unknown
  Bacterial polypeptide expressing nucleotide sequence isolated from the Sargasso Sea
atgaaaaaaaaaatttctatttttggctcaacaggttccattggaaatagttctttaaaactatttaaaaacaataaaaaaacacatgaactatatattcttacagctaacaaaaattttaataaaattatatatcaaattaaaatttttaaaccaaaaatatttatcatttttgattataacacctatattaaagtaaaaaaaattattaaaaataaaaaaattttaattttaaattcacataattattatagttataaatttaaaaagtccgatgtagcaatatctgctataccgggtattgccggtcttgagcccacacttcatttaattaaaatttgtaaaaagctattaattgcgaataaggagtcggtaatatgtggttggaatttgataaatagtttatctaaaaaaaaaaaggtgaaaattgtacctatagactctgaacatttttcaattctaaatttattaaagaatattaaatttcaagagattgaaaaaatttatttgaccgcttctggcggcccctttttgaatttacctcttaataaattaaagtcggtaaaaccatcacaggcagtaaaccacccgaagggaaaatggaaaaaaa

SEQ ID NO: 206616 - DNA, 589 bp, Unknown
  Bacterial polypeptide expressing nucleotide sequence isolated from the Sargasso Sea
atgaaaaaaactatagcaattcttggttcaaccggttcaataggaaaaaatacttataatataattaaaaataataaaaatgattttgatgtaatactactttctactaataaaaatataaatacaatatataaacaagccaaagagttaaaagctaaaaatattatagtttctagtaaatttcattttcttaaactaaagcaaaaaataaaaaaaagtaaaattaaaattcataatgatcttgataacttgcaaagtattattgataaaaaaattgattatacaatgtgtgcaatttctggtttaaatggattaaaaccaacaatagatgcaattaaatttagtaaaacgattgcaatagcaaataaagagtccattatatgtggatggcatattattaataaacaattgaaaaaaaataaaactaattttataccaatagactcagaacacttttcaatttggaccctaattaaaaatcaaaaaaaggaaaatataaaaaaaatttatttaacagcatcaggcggtccgtttcttaataaaaaaaactctgtaatagcaaatattaaacctaaatttgctttaaaac

SEQ ID NO: 206617 - DNA, 553 bp, Unknown
  Bacterial polypeptide expressing nucleotide sequence isolated from the Sargasso Sea
gcaacaatgatgaacaaaggcctagaagtcatagaagcgcactggctgttcgatactccggttcaaaacatacaagtggtgatgcatcgagaaagcgttattcattccattgtagaatttgtcgacggctctttcttagcacagatgggacttcctgacatgagggttccgctggcctattgcctgggatggccaaagagattgcccttgaaaattcaacgtatggaccccatatctttaaaatccctaaattttgaggaaattgaccctaagcgctttccatgcctggcaatatcgataacagctgccaagcatggcggaggtgcccctgccgttttgaatggtgcaaacgaaatattagtcgattcttttcttgaggaagaaattaattttttggatatttctaaaaatctgcattcagtgatgcagaagttttatagaacaatctcacttcctgaagttccttcatttttgaagcaaattagtaccatcgaagacgcatttaaggcggaccagtggggcagagaagaagccataaggtgcatgtcttaat

SEQ ID NO: 206618 - DNA, 886 bp, Unknown
  Bacterial polypeptide expressing nucleotide sequence isolated from the Sargasso Sea
aactttgtctgtaattaataaaaataaagataaatacagagttcattctttagctgcgggaaaaagtattaagcttttactaaatcaagtatcgaaatttaaacctcagataatatcaataatgaatgaaaaagatgcaattttactgaaaaaaaatccattgcttaaaaaaattaagattctacacggagatgaagggttgaaagaaataggtcaatcaaataaggcagatattcttgtatcagcaacttcaggagttaattcattaattccaactatagagtttcttaaacttggtaaaagagtatgtgtagcgagcaaggaaatatttttattatttggcgaaaagattaatgacacagcaaaaaaatattcaggagaaataatccctatagatagtgagcattcaggactttttcaattgatcaaaaatgaaaatattaataatataaaaaagctttatcttactgcttcaggtgggcctttttttgggagaaaaatgaaggaattattaaatgtaacaccaaaagaagctcttaatcacccaacctggtcaatgggtcgtaaaatttcaattgattctgctacaatgatgaataaggctatagaaattatagaagcatctattatgtttaatattccacataataaaatattacctatcataaacaaaaagagccatattcactctattgttgaatttattgatggaaatataatgttctcaggaagtgaaaatgatatgaaaatacctataggttattctttaagttatccctctaggctaaaatcttataaaactaaattctcaaataacgatcatattgaattaatcagagtgaatgaaaaatcttataaagcttttagtttagcaagaaaagcccta

SEQ ID NO: 206619 - DNA, 634 bp, Unknown
  Bacterial polypeptide expressing nucleotide sequence isolated from the Sargasso Sea
aatgaaaaaaattataatattagggtcgactgggtcaattggcagacaaactttagaaataattaagaaagataagaataaatttaaaattctcttattatctacagacaaaaacatcaatcttatatcgaaacaaatcaaaacttttaatgtcgaaaacgtcgtagttactaacaaaaaaaaatataacatattaaaaaaaaaatttaaaaaaattaagatatttccagattttaaaaaaatagataaagagcttaaaataaaagctgattatacaatgtcagcaatatcaggaattgaaggtttaagaccaacaattcatataatcaaaaaaacaaaacgaattgccatcgcaaacaaagagtcattaatatgtggatggggcttaattcaaaaagaattaaaaaaacataaaacagaatttatacctgtcgactcagaacacttttctatatggtcagtaatcaaagattatcaaaaatcagatattgaaaaagtaattcttactgcatctgggggaccattcttaaataaaaaaataaaaaaaaatgtatcaacaagagatgcaataagtcaccctaattggacaatgggaaaaaaaatctcaattgattcagcaactatgagaataaaa

SEQ ID NO: 206620 - DNA, 632 bp, Unknown
  Bacterial polypeptide expressing nucleotide sequence isolated from the Sargasso Sea
ttttagaaattggagtctagaaatgatgcagtccgcaacattagaggaggcattaaagcacccaaactggagcatgggatcacgaataactattgacagtgcctcaatgtttaataaatcgcttgaattaattgaagcaatgcatttatttgaattagaattttctgatgtagaagtgataatacatcctcagtcgattatacattcaatggtaaactttaaggacggaagcactttggcacaaatgtcttttccggatatgagaggtccaattggttattcgcttaattatcctaaaagattaaacattggaatagaaaatattgattttgcaaaaattggttctcttgacttttataaacctgataagaaaaagtttcgttctttggaaatcgtagagcaagttggaagaaatttagatttaggggttatttttaatgctgctaaggagatagctctagatagatttatttcaggagaaatttcttttttagatatggtaaccttagtagaaaaaactcttgcagaaagttcattgcttaataaaattacgaaatcgcctcagagcgtttctgaaatattagagatgaatgaactctcaaggatatttgcagaaaaaataaaagtttagg

SEQ ID NO: 206621 - DNA, 565 bp, Unknown
  Bacterial polypeptide expressing nucleotide sequence isolated from the Sargasso Sea
tatgaaaaaaaaaattgctatacttggctcaactggctctattggaaaaactacatttaatattataaaagagaacaaaaaacactttaatgttgtattgcttactacaaaccaaaatataaatgaaattataaaacaaacacatcaagtaaaggttaaaaatattttagttactaataaaaaaaaatatttaatattaaaagataaactaaaaaatactaacatcaaaatatttaataattttgataatattaataagattgttaaaaaaaagttagattatactatgtctgcaatttcaggtttagatggattaaaaccgactataaatattatcaaatctacaaaaaatatagcaattgcaaacaaagagtccataatttgtggatggaacctaatagataaagaattaaaaaaaaacaaaactaattttattcccgttgattctgaacatttttctatttggtcgaatataaataaaattaataaaaattttattaatcaggtaatacttacagcatctggtggcccatttttaaaaaaaaataataaatttttaaaaaag

SEQ ID NO: 206622 - DNA, 274 bp, Unknown
  Bacterial polypeptide expressing nucleotide sequence isolated from the Sargasso Sea
gctgggctccacgggctcgatcggtacccagacccttcagatcgccgaggaattccccgagcaattccgcgttgtggccctgacggcagggcgcaaccttgacttactggtgcagcaaatccaacgtcaccagcccgagctagtggccctggccaatgctgatcttctgccggagctgcagcagcggctcgacgccctcggcacagatcgaaagcgtccgcaacttgtgggcggtcccgatggcctgaacattgcagcctcgtgggagagcgcg

SEQ ID NO: 206623 - DNA, 736 bp, Unknown
  Bacterial polypeptide expressing nucleotide sequence isolated from the Sargasso Sea
catggttgaaaatctaggaatagctaacaaggaatctataatatgtggctggaaattcataagtcaagaattaaaaaaaaataaaacaaagtttataccacttgactcagaacatttttctatttggtcattattaagatcagaaaataaaaataatgttaaaaaaatatatttaacagcatctgggggaccgtttttaaataaaaaattaaaagatataaaaaatattaaacccaatgaagccttaaagcatcctaactggaaaatgggaaaaaaaatttctatagattcagccacaatgatgaataaaatttttgaggtaatagaagcaaaaaaaatatttaatttaaatatcaattgttttgaaattttaattcatcctaaatcttatgttcatgctataattcattttaaaaatggattaacaaaacttttggctcatgatacaacgatggaaattccaattattaactttttaaattcaaaaaacgataattttacatataacaatagtttcaattatttaaacttaaatggattaaattttataaaacctaaaaaaacaaattttcctttattaaatataataaatcataattttaatgatacatatttcgaaattattctagttactattaatgataagttagttaatttatacttgaataattctatttcttattattcaattcataaattgctattaatattattaagaaaaccttatttttctaag

SEQ ID NO: 206624 - DNA, 796 bp, Unknown
  Bacterial polypeptide expressing nucleotide sequence isolated from the Sargasso Sea
atgaaaaaaaaaattgcaatattaggatcaactggatcaataggggaaagtacaattaaaattataagtaataataaaaatgattttgatgtaatttttttatcaactaacactaattataaaaagttattaaaacaaactgaaattgttaaaccaaaatcagtaataatatttaatgaaaaaatttatttaaaacataaaaaaaagtttattaaaaaaaagatcaaggtatttaattcattcaaagaactaaaaaaaaaattactcaaaaaaaaaatagattatattatgtgtgcaatcactggtatagcaggtcttgattcaacaataaattgtattgataaaactaaaagtattgcaatagcaaataaagagtcaattatttgtgcttggagacttatagaaaaaaaattaattaaaaataacaccaaatttataccaattgactcagagcatttttcaatttggtcgttaataaataatgaaccaattagtaaagttgaaaaaataattatcacagcatctgggggaccttttttaaattataaattaaatcaactaaagtatgttaaaccaaaagatgcaattaaacatccaaactggagaatgggaaaaaaaatatcaattgattcagcaactttaatgaacaaggtatttgaggttattgaagctcaaagaatctttaaagtagatattaataaatttgacattttaatacaccctaaatcttatattcattcaataattaagtttataaatggtcaaattaaaattttagctcatgatacggatatga

SEQ ID NO: 206625 - DNA, 415 bp, Unknown
  Bacterial polypeptide expressing nucleotide sequence isolated from the Sargasso Sea
attgaaatacattactgtgctcggttctactggttcaattgggactcaaactctcgaaatagctagtgagcagcctgataagtttaaagccgtagctctttctgcaggaagaaatattaatttattaaccgaacaagttaaaacacataaaccagaagtagttgcgattgaggatgaaaatcttatagaagatttaaaagataatattaataacttagatttggatagtgatcccttggttttgagtgggaaggaggggattaacgcagttgcagcatgggataaggcagatactgtggttacagggatagtaggatgtgcaggcttaattccaacaatgtcagcaattaatgctgggaaaaatattgcacttgctaacaaagaaactttaattgcggcagggccaattgttatt

SEQ ID NO: 206626 - DNA, 574 bp, Unknown
  Bacterial polypeptide expressing nucleotide sequence isolated from the Sargasso Sea
aatgaaaaaattaatttcaatattaggttcaacaggatctgttgggttaacaactttaaatataatagataaagataacaaaaattttataccatatttattttctgcaaacaaaaattataattttatatgtaaacaaataaaaaaatacaaaccaaaatattttattataaataatgtgaatatttttttaaaagtaaaaaaaaaattttataaaacacgtactaaaatattaaataattttagctccattagtttaaaaagaaaatcagatattacaatatgtgcaattcctggtatagcaggtcttaaacctacaatatcattaattaattttagtaaaaaaattcttattgcaaataaagagtctataatttgtggatggagtctaataaaacaaaaatcaataaaaagtaagacaaatattattccaattgactcagaacatttttcgatttttaatctaataaagaatcgagagaaaaatgaaataaataagatatacttgactgcttctggtggaccctttttaaattacacgcaaagtgaattaaaaaaagttaaacctaaagat

SEQ ID NO: 206627 - DNA, 793 bp, Unknown
  Bacterial polypeptide expressing nucleotide sequence isolated from the Sargasso Sea
aaatttagtaaaaaattttatcaaaagaaaataaaagttttttttaatattaaagatgcattaaaaaataaaaccaaaaaaaattatttaacgattaatgctatctctggtattgaaggtttaggaccaactttagaaactataaaatattctgaaaacatcgcaatagccaataaagagtcaatcatctgtggatggaaatttattcagaaagaactgagaaaaaatagttcaaattttatacctcttgactctgagcatttttcgatatggtcaataataaatggagaaaatacaaataatataaaaaaaatttatttaacagcttcagggggaccttttttgaaaaaaaaattaacacaaattaaaaatatcaaatcaaaatacgcgcttaaacaccctaactggaaaatgggaaaaaaaatttctatagattcagctactatgatgaacaaaatatttgagattagagaagcatctaatatttttaatttggaaatgagtaaatttgaaatcttaattcacccgaaatcttatatacatgcaatagttcattttaaatcaggacttgtaaaatttttggctcatgacacaactatggaaatacccattgcttgtgctctttataaaaataatgaaaatattgtttttaaaaataataaatttaaatatcatatcttaaatgaggataattttaaaaagccaaatataaaaaattttccattattaaatatattgaaatataaatttcccaaatctttttttgatacaatattagttacaattaatgacg

SEQ ID NO: 206628 - DNA, 541 bp, Unknown
  Bacterial polypeptide expressing nucleotide sequence isolated from the Sargasso Sea
gatgtgtagaagagtttttattcttggttcaacaggttcgattgggacatcagcaatcgatgtcatatgccatttgaatgaattaagcccagattcatacaatgtcgttggactagcagcaaagactagtaaggacttattgcttaaacaagcgcacgcgcttaaagccaatgcaatatcactttcttcgggaacgattgattacaaaaatttctcaaaatctgctgtcgaattactttctgaacatgctcaacaaggtgatcttgtgattgcggcaatggttggttttgatggaatagagccagtccttaaagcaattgagattggctgtgacattgcacttgccaataaagagtgccttgttgctgcaggtgaattgatcatgaagcaagtaaatggctcatcttcttccatgattcccattgacagtgaacattcagcaatctatcaagcgttaggccacaactcttcaaagtcaatacagaaagttatcctcactgcaagtgggggatcattacgagacttttctaccatgaaataa

SEQ ID NO: 206629 - DNA, 637 bp, Unknown
  Bacterial polypeptide expressing nucleotide sequence isolated from the Sargasso Sea
atgtgtagaagggttttcattcttggttcaacaggttcgattggcacatcagcaatcgaagtcatatgccatttgaatgaattaagcccagattcatacaatgtcgttggactagcagcaaagactagcaaggagttgttgcttaaacaagcgcacgcacttgaagccagtgcaatatcactttcttcggaaacgatcgattataagaatttctcaaactctgctgttgaattgctttctgaacatgctcaacaaggcgatcttgtgattgccgcaatggttggttttgatggaatagcgccagttcttaaagcaattgagattggctgcgacattgcactggccaataaagagtgccttgttgctgctggtgaattgatcatgaatgaagtagatggttcatcttctaccatgattcccattgatagtgagcattcagcgatctatcaagcgttaggtcacaactcttcaaaggcaatacagaaagttatcctcactgcaagtgggggttcattacgagacttttctaaccatggaataaagaatgctacagttgatgatgtgttgaatcatccaacgtgggatatgggtcagaaagtcactgtcgactcagcgtctctaatgaacaaaggattag

SEQ ID NO: 206630 - DNA, 593 bp, Unknown
  Bacterial polypeptide expressing nucleotide sequence isolated from the Sargasso Sea
aatgaaaaaaaaaattgccattataggatccacaggttcaataggtaaaagtactattcaagttataaaggagaatagaaatgattttaatatattacttttatccactaataataatgttaataaaatttataaacaagcattagagctaaacgtaaaaaacgtaattattaataatagatttaaatatttaaaaataaaaaataaatttaaaaaaaagaaaattaaagtttattttgatcattcaaatattaaaaaaattattaaaaaaaagttagattattgcatgtgtgcaatctcaggtttagaaggactttcaccaacattagaagcaattaaatgtagcaaagttgtaggaattgcaaataaagaatcgataatttgtggttggaatttaatacaaaaaaacttaaataaatataaaactagatttgtaccaatagactcagagcatttttcaatatggtcattgttaaaaggatcaaacaaaaaaaatgtagagaaaatttatattactgcgtcaggaggtccttttttaaatacaaaaataagtaaacttaaaaaagttactcccagattagctattaatcatc

SEQ ID NO: 206631 - DNA, 629 bp, Unknown
  Bacterial polypeptide expressing nucleotide sequence isolated from the Sargasso Sea
taaattaccactttcaaaattttcaaaaattaagatcagtgatgcaatcaaacatccaaattggagtatgggaaaaaaaatatcagttgactcagcaacaatgatgaacaaggtttttgagattatagaggcaaaaaatatttttaatttatctgtaagtaaattaaaaattttaattcatacagattcatacttacacgctattgtaaaattttataatggtttgtcttatatggttattcatgatacgagtatgaaaattccaatttttaatactttgtatgaaaataaaaagttttatcaaaattcgaataatattgatctttcaaaattaagtcatttaaatttaaaaataccagatcctaaaaaatttcctttgattaaagtattaaaaaaaattcagtcaaaatcgactttgtatgagacattaatcgtctctatcaatgacacattagttgatctttttttaaaaaataaaataggttttactcaaatttctaaaatttttttttcaactataaatgatcaacaatttttaaaatataaatcaataacaccaaaaaatattgatgaaataataaaaattaaaaatattgtacaaaaaaaaattaaatcaagatatatatgaa

SEQ ID NO: 206632 - DNA, 839 bp, Unknown
  Bacterial polypeptide expressing nucleotide sequence isolated from the Sargasso Sea
tactaaaaaaatagcgattgcaaataaagagtctattatatgtgggtgggatttaattaaaaaagaattaaaaaaaaataatactaaatttattcctgtagattctgaacatttttcaatttggtatgctttaaaaaatgaaaattctaaaaatatcgaaaaactttatattacggcatctggtgggccattctacaaaattcctataaaaagttttaaaaatattaaggtaaagaatgcattaaaacatccaaattggaaaatgggaaaaaaaatatcagtagattcagcaacaataattaataaagtatatgaaattatagaggcaaaaaatatttttaatttatcatataaaaaaattaaagttttaattcatcctaattcatatgtgcattgtataataaaatttaaaagtggattaataaaaattattgcacatgaaacaacaatgaagattcctattttaaataccatatatagcaataagcataataagttaattaaaagtaaaattgatattaaatcattaaataatttaagtttaggtgaagttagtcgcttaagatatccaatgattaaattaattaatttacttccagaaaaaaattccttatttgaaacgatcattgtttcagctaatgatacattggttgatttatttttaaaaaaaaaaattaaattcacaaatattcagaaggaattatttaattttattcagtctaaggaatttggtaaatataaaaaaatctttccaaaaaaagttcaagatattataaaattgaaccattatgttcgtttaaaacttttaaaaaaagtgtataaattcgatgatgtttaaa

SEQ ID NO: 206633 - DNA, 396 bp, Unknown
  Bacterial polypeptide expressing nucleotide sequence isolated from the Sargasso Sea
aatggggtcgacgggatctattggaactcaaacacttgagatcattcaagatcatccggatgaatttgaagtggttgttttgggagcagccaaatctgtcgaactattgatagagcaagcaaaaaaacatgaacctcagatagttgcaatttctgatccgttgttagaaaaagaactacgacaaaaattacctccacaaattgatgtaatttcaggtccagaagcattagcaaactcttgtcctgtagctgatgtcgtaatcaacggagtggttggattcgcaggtcttcctattacaatctcagcactgaaggcagggaaaagacttggattagcaaataaagagtctctgattgctgccggtcctctaattcaaaattttcgttcaatagaggg

SEQ ID NO: 206634 - DNA, 877 bp, Unknown
  Bacterial polypeptide expressing nucleotide sequence isolated from the Sargasso Sea
ttattagcagctaattctaattattcattgatttgcaaacaaataaaaatttttaaacctcaatattatataattagcaatcaattagtttttaaaaaaattaaaaagagatttaaatataaaaaaataaaaatatataacaatttttctgatataaatttaaaaaaaaaaaggtttgatattacaatttcttctattgttggtatagcaggcttatctcccactataaaatttgttaaatgttcaaaaaaaattttattggcaaacaaagaaagtattatttgtggatggcatttaattaagaatttatcaaaattacataaaacaaaaataattccagttgactctgaacatttctcaattgatcaattaaccaaaaattataaagataaagatattgaaaaaatttatttaacagcttcaggcggtccttttttaaataaatcattaaattcctttaagtcgataaaggtgtccgatgctattaaacatccaagatggaagatgggtaaaaaaatatcgatagactcttcaaatttaatgaataaagttttggagacaattgaagcttacagattatttccatttaaaattgataaatatgaaataattattcatcctcaatcattgatacacgcaattgttctttttaaaaacggacaaacaaaatttctttaccacgaaacagatatgaaaattccaattttaaatgccatctttgaaaacaactttgacaaaaagaacttcatttatccaaaaaaagatatactaaaaaagtttgaaaatttaaaatttataaaagttgataaaaaaagatttccaattgttacattattgaaaaagttttctaacaataattctggtcctattatactaa

SEQ ID NO: 206635 - DNA, 515 bp, Unknown
  Bacterial polypeptide expressing nucleotide sequence isolated from the Sargasso Sea
gatgaataaagggcttgagattattgaggccaaatggctttttgatttaaagccagatcaaattgatgtaattgttcatcctcaatcaattgttcattcgatagtacagtttgaagacggaagtatgaaggctcaaatgggtttgcctgatatgaagctgcccattcaatttgctttgacctatcctcacagaatgcctacaaagtttccaagatttaattttttagattatcctcaattaaatttcgaaaaagcaaatacagacgtttttaaaagcatattacttgctcagcaagccatgattgaagagggaacagcggcatgtactttaaatgcggcaaatgaggtaagtgttcaggcttttttagatgaaaagatatcctttttagatattttaaacatcaatgaaaaggttttaaatgatatgagcaacaagaagtcaccattacttcaagattacattagtgctgataaagaagcgcgtttatatgctgaaaaactttgtgctatttgac

SEQ ID NO: 206636 - DNA, 688 bp, Unknown
  Bacterial polypeptide expressing nucleotide sequence isolated from the Sargasso Sea
ttatccggtgagaagggtactgaagacgtaaagagtattactattactgcatctggtggtccttttattaatgcctctattcaagagttacagcatgttagtgtagaggatgctcttaatcatcctaattggaaaatgggaagcaaagttacaatcgattctgctactttagttaataaatgcttagagttaattgaagcgagatatttatttgatttagatgaaaaatattttgatttagtcattcatccgcaaagcattatacactcaatagtcacatatatagatggctcaagtatatgtcaaatgagttcccctgacatgagggtcccgattgctcatgctctttctgaagagaacagaataccaatagattttaaagacttagactttagtaacttaaatttatcttttcaaaagtttccatccgacagatcgaagattcaagatattgcaagagaagtatgtaataaaggtggatttctaggaactgtatttaatgccgctaatgaaattgctgtggaaagttttctaaataaaaaaattagctttaatgaaatttatgaagttatatatcgaacttttgataaaaatattgtgtctaatgaagtaacgatagaatcaataaatgaggttgacgctcaaacacgcattcatgctcagaaggtggtaaaatcgtttgcttaaa

SEQ ID NO: 206637 - DNA, 607 bp, Unknown
  Bacterial polypeptide expressing nucleotide sequence isolated from the Sargasso Sea
atgaaaaaaaatataattattctaggttcaacaggttcaattggtaaaacttcactatctgcaatcaacaataataaaaattataaagtttgtttgctttcaacaaggtcaaacgttaaaaaattatataagcaggctctacaatatgacgtaaaaaaagtaattattgaagataaaattagctttaataggtataaaaataattttaaaaaaaaaaaaatcaatgtctatttagggcatgacaatctaaacaaaatttttaaaaaaaaaattgatttctgcataaattcaatttcaggtattgaaggtttatttccaacattaaagattataccttttacaaaaaatattttaatagcaaataaagagtcaattatatgcggttgggatttaatacaaaaaaatttacaaaagtataaaacaaactttataccaattgactcagagcatttttcaatatggaatttaattaaaaatgaagaaaaagaaaatattgaaaaagtaattttaacagcgtctggtggtccttttttaaaaaaaaaaataaaaaatatatccaatattaaacctatcgaagctacaagacatccaaaatggaaaatgggga

SEQ ID NO: 206638 - DNA, 790 bp, Unknown
  Bacterial polypeptide expressing nucleotide sequence isolated from the Sargasso Sea
gcggtaattacaaattatgaaaaatataacgagtttctaaatgaacatggcaatgaaataggtataacaagaattttatttggcgacgaaggcctgaatgaaatatcatcaaataatggcattgatattgtagtaatagctattgttggttttcagtgtctcaagcctactgtaaatgctatacgcacaaataagaccgtcatcattgctaataaagaaatcttggttgctgcaggtgagatgttgatgtctattttgagtaaatctgatgccaagcttttgcctgtggatagtgaacataatgctttactccaggttattttatcgtctggtttggaatataaagtgaataacaaggaatattacgaatctaatataaacaacctaactataaccgcatctggtggtccatttattgatcttaatatttctgaatttaagaacataaaacctaaacacgccattaaacatccaacatgggatatgggcgaaaagatatcagtcgactcatcaaccatgatgaataaagggttagaaatcatagaagcaaaactactttttaatttaaatctagataaaataaatgcaattattcataggcaaagtagagtccacgctctagtcgagttctttgatggtacaatcattgctcatatgtcagatccagatatgaagatcccaatatcttatgctcttacatttccccatagagtatataaatcagcatccagcaaatttatttataataatctaacttttgaggacattcctatctcgaaatttccatgct

SEQ ID NO: 206639 - DNA, 817 bp, Unknown
  Bacterial polypeptide expressing nucleotide sequence isolated from the Sargasso Sea
aataaattatttaaaattaatattttagcagcaaacaagaattatcaattaatttgtaaacaaataaatcaatttaaaccagaagtatttgttgttaatgatgcaaaagttttaaaaaaagttaaaaaaagatttaagaataataaagttaaaataattaaagatattgatattaaaaaaaattattttaaaaaatcagacattactattgcggcgatacctggtattgctggattaaaaccaacggttgaattaactaaaataagcaaaaaaattttaattgctaataaagagtcaattatttgcggatggaatttgataaagaaaattgctctaaaacacaacaccaaaattattcctatagactcagaacatttttcaataatgaaattattagagaatcaaaaaatcaatgatgttaaaaaaatttatcttactgcttctggaggcccttttttaaatcttaatatttctaaattaaaaaatgttaaacctcatgaagctattaaacatcccaaatggaagatgggaaaaaaaatttcaatagactcagctactctaatgaataagattcttgaagttattgaagcgcataagctttttgaaattgatataaaaaaatttgaaattgttatacatcctgaatctttaattcatgcaattattgaatttaaaaatggtttgtataaatttatttatcatgaaacttcaatgctgattccgctagctaatgctatttttgataatacgataaatattgatgattttttaaaacctagattgaactccaaaaaatcaatttttttccaaagtttaa

SEQ ID NO: 206640 - DNA, 580 bp, Unknown
  Bacterial polypeptide expressing nucleotide sequence isolated from the Sargasso Sea
aatgaagataaatatatttggatcaacaggaatcattggtgataaatctctaaaattaattagtaaattatttcctaaaattcaaattaatttattagttgctaataataattacaataaattaatcaagcagtgtaatctatatagtccaaaatatgtttgtattaaaaattcaatttatataaacaaaattaaaaataatataaataataaaataaaaattattgaatataaaaatttaaatatttttttaaaaacaaaaaaatctgaaataacaattttatctatatctggttatcaagcattagattattttgaatctattttaaaaaatacaaaatttttaggtttagttaataaagaaaccattgtttcaattggccatttatttagaaatagtaattttaaaaaaaatacaatattttttcctcttgactctgaacatttttctttatttgattttttttctaataataaaacagatttaaataaagttaaaaaaatctatttaacagcatctggcggaccatttttaaactacaatattaaacaattgaggaaagttaaatttggccaagca

SEQ ID NO: 206641 - DNA, 867 bp, Unknown
  Bacterial polypeptide expressing nucleotide sequence isolated from the Sargasso Sea
atgaagaaataaatcatcaaattggaaaaagagtaaatagttttgatgaattacttcaaatcgatgattcagatttaattataattgcactatctggtatttctggcttttatccagtggttaactctattaaacagggcaggaaaattgctcttgccaataaagaaagtttagttgcttgtggcgatctgcttatggaaataagtaaaaataataattcagaaataattcctttggatagtgaacattctgcaatttggcagtgtataaaaaatgagaaagaaaaatatgttaaatctatagttatcactgcttcaggaggcagcctaagggatgcttctataaatgaattatcttcagtaactccaaaaactgttttaaatcatccaacttggaaaatgggagataagattacagtcgattcatcaacattaattaataaagtttttgaggttaaagaagcagcaaatttattcgacatagcacttgaagatattgaagtaatttttcacaatgaaagtattattcatggaatggtaaatatggtagatggaaatacattggcgttgttgtcaaaaccagacatgcgcataccaatactttattcacttttctatcctgagaggactgaaagtaaaaatattgaaaaaatagactttacaaaacttggtaaactgtcatttcgaaatcgcgatgaaaaaaagttaaattttttcaattttggtattgatgtaattagaaattctaaattaggagcttccttcttagttggttcagaccaagcagttgttgaaaattttttggaagagaagataaattacttggatatgcttgatataatgaaaagtgtatatgaaaaagattaaa

SEQ ID NO: 206642 - DNA, 802 bp, Unknown
  Bacterial polypeptide expressing nucleotide sequence isolated from the Sargasso Sea
aagaggaatatcaatagatatattaaaaatttcaaaaaaaaaaagaattaatgtttttttttcaataaaaaatttccttaaaaaaaataaaaaaaaatcctcaattacaataaatgctatttctggaattgatggactagaacccacattgaatataattaagtattcaaaaaatttagcaattgcaaataaagagtcaattatatgtggatggtattttataaataaagaattaagaaaatataaaactggatttattccattagactcggaacatttttcaatatggtctttattaaaaaatgaaagaaaaagtaatatcaaaaaaatttacctgactgcctccgggggaccttttttaaatagaaaacttttaagtattaaaaatgtaaagcctaaaattgcccttaatcatcctaattggaaaatgggaaaaaaaatatctattgactcggctacaatgatgaacaaaatttttgaagttatagaagcaatgaaaatattcaatttaaattcaaataaatttgaaatattagttcatccaaagtcatacattcacgccataattcattttaaaaatggcctaacaaaattattggctcataataccacgatggaaatacctatagctaattcgatagatttaaattctaacagatataaatttaaggatgataatttcaattataatatattaaatggtgtcaattttataaatccagatataaaaaaatttccactactgaagattttaaattatgaatttaaaaatacatattttgagataatattagtctcaata

SEQ ID NO: 206643 - DNA, 219 bp, Unknown
  Bacterial polypeptide expressing nucleotide sequence isolated from the Sargasso Sea
tattgcgcttgccaataaagaaaccttaattgccgcggggtctgttgttatacctgcgttaaaggaaagcaaaagtagacttttacctgcggactctgagcattcatctatctttcaatgcatacaaggattacctaattatgaaaatgccgatttttcaacaggtcaaatcccaaatggtttaaaagctattcatttaactgcatcaggaggtgcttt

SEQ ID NO: 206644 - DNA, 778 bp, Unknown
  Bacterial polypeptide expressing nucleotide sequence isolated from the Sargasso Sea
atgaaaaaaaaaattgtaatactgggatcaaccggatcaattggaaaaacactaattgaaattatcaaaaaagataaaaaaaaatttaatattttacttttaacggctaacaaaaattataaaacaattttaaaacaagcaaaaaaatttaaagtaaaaaatattatcattaaaaataaagaaagttatttaaaatctttaaaattaaacagagataagaaattaaaaatttataataattttgataattttcataaaatattcaaaaataaagttgattacactatgagttcaattacaggtatcgatggtcttgagccaaccataaagattattaaacatactaaaaaaattgctatagctaataaagaatctttgatatgtggttggaatttaattaataaagagttagttaaatttaatacagaatttgtacctgtggactctgaacatttttcaatttggtatgcattaaaaaacaacaaagatagtattgagaaattatttttaacagcttctggtggtccatttaacaatttatctattaagaaatttaaaaaaatttcagttaaagatgctttaaatcatcctaattggaaaatgggtaaaaaaatatcaatagattccgcaacaatgatgaacaaagtttttgaagttatagaagctaaaaatatatttaaaactacttataaaaaaattgatattttaattcatcctaaatcatatgttcatgcactagttcaattcaaaaatggaatttcaaaaagtaatcttacat

SEQ ID NO: 206645 - DNA, 877 bp, Unknown
  Bacterial polypeptide expressing nucleotide sequence isolated from the Sargasso Sea
tgggtaatgtctgcaataataggttcagcaggtttgttgccggggttaacggctatgcaagctggtgccaatgttgctttggctaataaagaaagcatggtggcagcagggccaattatgaaacaagtctgtgaagaaagaggagttaagttattaccagttgatagtgaacattcagctgtttcgcaggtgattaggggtgaagatagaaaaactcttgataaaataataattactgcatctggtggtgcgtttagaaatagatctattgacgagttgaaaaaggtaactcctgacgaggcctctaagcatcccaattgggatatggggcaaagaattacgattgacagcgcctctttgtttaataaagcgttagaaataattgaagcaaaagaattttttaatctaaatcattctgaaataaatgtactcattcatcctcagtcaatagttcacgctatagcctgctttcatgatcaaggaatgaaggctcatttgggtcctgctgatatgaagcacgctatagcttatgctttacatgaagaaaaaagatttcgtctgcctcttaaggaaattaatttgtcagaaataggaacgcttaatttttacgaacctgatgttaataaatatcctgcgttagagcttggttacgatgtaattcgtcatggaggcttagctggagccgcttttaacgccgctaaagaagaggctttagataattttctcaacttgaaactcagttttcttgggatgtctgacgtggtgagagcaacgatggatgaattgacggcttcaaatcaactagatcaagtagtggaattagacgcggtgatggaaatagacttactggcaagatcggttgcaaaaaaatacgtcg

SEQ ID NO: 206646 - DNA, 808 bp, Unknown
  Bacterial polypeptide expressing nucleotide sequence isolated from the Sargasso Sea
aattgctaacaaagagtcaataatttgtggatggaatttaataagtaaagaattaaaaaattataaaacaagttttataccagttgattctgagcacttttcaatttggtctctattacaaaattacaactctaacgatattgataagatttttattactgcatcaggtggtccttttttaaaattaccaaaaaaacaattttctaatatttctattaaaaaagctctcaatcatccaaattggagaatgggaaaaaaaataactatagattcagcaacattaatgaacaaagtttttgaagttattgaggcaaaaaatatttttaatttagactatagtaagatttcaattttaacacatccaaaatcgtacttacatgcaattacaaaatttaaaaatggtttaacaaaattacttttacatgatccagatatgaaaattccaatttataattcaatttattctacagatatcaagtcaataaaaactcattctttgaatcttaaaattttgaatgatttagaacttaaagaagttgatacaaaaaaatttcctttaattaaaatattaaataaacttccaaaatacacatcattatttgaaacagtcttgataactattaatgattatctagtatttaaatttttagaaaagaaaattaattttcaaaaattaattaaattaattgatagattttcaaatttaagagaatttcaaaaatttaagaaaataaagccaaaaaatatagatgatatctataaactccgagattatgtaagtttaaaattagatagtttaggtatataa

SEQ ID NO: 206647 - DNA, 566 bp, Unknown
  Bacterial polypeptide expressing nucleotide sequence isolated from the Sargasso Sea
aatgaatattaatatatttggaagcacaggtattattggcaaaaaaacattagaattaattgataaaaatttttctaaaatagaagttaatcttttatgcgctaaatcaaattccaatttactaaaaaaacagatttataaatataatcctaaatatgcttttctttatgatggttttaaatttaaatataaaaaaaatataattggaaaaactaaaattttaaattttaatgaattattaaattatttatcaaatagtaagtctgatttaagtatattagcaatatctggttataaatcattgtattttcttgatcatatagttaaaaatactaatttcttgggaatagtaagtaaagaagctattgtatcggcaggacacatttttaaaaaaaaaaattattttaaaaaaacaaaaattatacctcttgactctgaacatttttcactttttgaattgtttaaaaaaactggtaattttaattcaatcaataaaatcattttaactgcatcaggaggaccttttcataaaaggaaatttaatactttaaaaaatataaaatttt

SEQ ID NO: 206648 - DNA, 813 bp, Unknown
  Bacterial polypeptide expressing nucleotide sequence isolated from the Sargasso Sea
aataaaattattagaaaaaaacttgactatactatgtgttcaattacaggtttagctggtctaaaaccaactatagattgtattaaatttacaaaaaccatagctattgctaacaaagagtcaataatctgtgcttggaatttaattcaaaaaaaattaaataaacataaaactcaatttatacccgtggactcagaacacttttcaataatgagtctattaggaagtaaaccaatatcaagcgttgatgaaataattattactgcttcaggaggtccttttttaaatattccaaaaaataagttttataaaatcaaacctaaagatgcaattaaacatcctaattggagcatgggaaaaaaaatatcaatagattcttctactttaatgaataaagtttttgaagttattgaggcacaaaaaatatttggaattgattccaaaaaatttaaagtattaacacatccaaaatcatatgttcacgctattataaagtttaaaaacggattaactaaaattcttattcatgatactgatatgaaaattccaatatttaattcaatatttaacaattataataattatttaaaaacaaaaaaaatagattataaaaaaataaataatttagattttcaggaaatagattcaaataagtttccttcaataaaaattttaaaaaaactaaacaataaaaataccctttttgaaactgttttagttagtgcaaatgaagagttagttgatttgtttataaaagataagataaaatttacagatatcacaagaattctatttaaaattttaaataataaa

SEQ ID NO: 206649 - DNA, 727 bp, Unknown
  Bacterial polypeptide expressing nucleotide sequence isolated from the Sargasso Sea
aatgaaaagtttagctattttaggttctactggctctgttggaaaatcaactttagatgtcataagagaaaataaggacgaatttaatatagaactactcacagctagtactaatttccgccttatggtagaacagtgtaaagaatttactccaaaatttgtctatctagaaaataaagaagcccaaaaatcctttctggatgaactgggaataaatagttcaagagtgactttattgtctgatgagaaggaattaaaccaaattattgcctcacaagatttagaaatagttgttgctgctatggttggaatagtggggttaaagcctgtatttcaagcaataaagcatggaaagcatattttattagcaaacaaggagtcttatgttgtagcaggagaaattttaaataatttatctaaaaaaaccggcgctacaatttttccaattgacagcgagcatagtgcaattcatcagtgcttaatgggagttaaaaatgaagaatcaatatcacggctaatattaacaggttcgggtggtccttttctcgataaagatataaacgactttaagaatataacccctaaagaagcgaccgcacatcctatttggaatatgggggataagatctcggttgattcgtcaactatgatgaataaatgcttagaaattatagaagctaaatggttatttggatttgacgatatagatgtgcttatccatccggaa

SEQ ID NO: 206650 - DNA, 772 bp, Unknown
  Bacterial polypeptide expressing nucleotide sequence isolated from the Sargasso Sea
atgaaagatatttttttattaggttctactggatcaataggtcagtctaccttaaatgtggttaaaaaagaaaaaaaaaaatataaaatagccttattaaccacaaataataatgtaaataaaatctataaacaagctttggaatatagtgtaaaaaatgttgtaatttttaataaagaaaaagcttacaagagttatcaaaaattcaaaaaaaaaaaaattaatattttttttacaatcgaagaggccttaaaaaaagtaaaaaaaaagtcatatattactattaatgctatatctggaattgaaggattagagccttcattaacgataattaaaaaaacaaaaaacttcgctatggccaacaaagagtcaattatctgtggatggtcatttattaaaaaagaattacaaagacataatacaaatttcatacctttagactcagaacatttttcaatatggtatcttttaaaatctgaaaatataaaaaatattaaaaagatataccttacagcctcaggtggaccctttttaaaaaaaaaactaaaagatataaaaaatgttaatccgcagtacgctcttaaccatccaaattggaaaatgggagataaaatttctatagactcggctacaatgatgaataaaatttttgaagtaattgaagctataaaaatatttggtttaaatccaaaaatatttcaaatattaattcatccaaagtcttatattcatgcaattgtacatttgaattctggtttaataaaattttagc

SEQ ID NO: 206651 - DNA, 691 bp, Unknown
  Bacterial polypeptide expressing nucleotide sequence isolated from the Sargasso Sea
atgcataaaatagaaaaaataatattaactgcctccggaggaccttttttaaatacatcagttaaaaaaattaaaaatattaatccgaaatatgctctctcgcatcctaattggaaaatgggtaaaaaaatatctattgattcgtcaaatatgatgaataaggtttttgagtatattgaggcaaaaaaaatttttaacttagatagaaaagaacttgatattttagttcatccttcatcatacgttcatgcaatagtatattttaaaggaggcatcattaaattattagctcatgaagcaaaaatgaccatacctatttctagcgctctaggagttgacgattttagttcaaaaaattcgtttgatttaagtttgaaaaagcttaattcaatgaaatttcttgttccaaataagtttaaatttccacttctgtcattaattgatcagctgcctacaaatacatcttattttgaaactatactaataactttgaatgactctttagtaaaaaaatatctggataaaaaaataaattatatatcaattcagcaaaatttactaagattaattaaaaaacctttttttagaaaatattataaattaaaacctaaaagtatttatgatataaaaaaaatgatttcgataacaaaaagttatcttaatactaatataaattattataatgattaga

SEQ ID NO: 206652 - DNA, 812 bp, Unknown
  Bacterial polypeptide expressing nucleotide sequence isolated from the Sargasso Sea
aacaaagattataagacattattaaaacaagcaaaaaaatttaatgttaagaatataattttaacaaattcagaaatttacaaatcattaaaaaataaaaattacagatcaaaaataaatctttttaattcatttaaaaatttaaataaaatttttgaaaaaaaaattgattatgtaatgagctcgatagttggtatacaggggttagagcctacatataaaataatcaaatatactaaaaatattgcaattgctaataaagaatcaattatttgtggttggaatttgataaacaaagaattaaaaaaaaataaaacaaattttataccagtagattcagagcatttctctttatggtacggattaaaaaatataaataaagattatattgaaaaaatatatttgactgcgtcaggaggtcctttttacagcacacctctatctttgtttaaaaaagtaagcatcaaaaatgcaattaaacatcctaattggaaaatgggaaaaaaaatttccattgattctgcaaccttgattaacaaagtttatgaggtaattgaggctaaaaatatttttaatatatcctataaaaaaattgaaatttttacacatccaaaatcttatgttcacgcattgattaaatttaaaaatggtatgattaaaataatagcccatgacacaacaatgagaatacctatatttaatacattgtatttaaataaaaaaaaaattgaatcaaaaaaaataaatttaaatatcttgaataatttaaattttaaaaaagtaaattcaaaaaggtttccaatgatcaaatt

SEQ ID NO: 206653 - DNA, 716 bp, Unknown
  Bacterial polypeptide expressing nucleotide sequence isolated from the Sargasso Sea
catgattaaaaaaaaaattgccattctaggttcaaccggatctattgggaggtcatctctacaagtattaaaaaataataaaaaaaaatttaaaattattttgttatctgctaactcaaattattctactattataaaacagattaatatatataaaccaaaatatttcgttataaatgactggatagtttttaacaaagtttttaaaaaacataatacagtaaaaacaaaaatatataataaattttcagacattccttcaaaaatagaatttgatataactatttctgcaatagtaggtgttgccggacttgaaccaactataaattttataaaaaaaagtaaaaaagttttacttgcaaacaaagagagtattatttgtggttggcaccttttaaaaaagatatcaaaaaaaaataaaacaaaaataatccctatcgattcagaacatttttccatctatcaattaacaagaaactgcaaagacagtgacattaaaaaaatatatatcaccgcatctggcggtccctttttaagaaaacctctaactcaatttaaaaatattaaagcaaaagaagcaataagacatccaaattgggaaatgggaaagaaaatttcaattgactcatcaaatcttatgaacaaagtttttgaactcatagaagcctataaattttttccatttgatataaaaaaatatgaaatattaattcacc

SEQ ID NO: 206654 - DNA, 664 bp, Unknown
  Bacterial polypeptide expressing nucleotide sequence isolated from the Sargasso Sea
aagagtagcatagatagagtttttattactgcatctggtggaccttttgttggacaatcacgtcaagaaatagaggacaaaaagcctgaagaagcattagatcacccaaattgggatatgggtgacaaaataactattgattcagcaacacttgttaataagtgttttgaattaattgaagcaaaatatttgtttaatcttgatgcagataagttagaagtattaattcaacctcaaagtattattcattcaatggtggagctaaaagatggctcagttgaagcccaaatgtctctaccaagcatgataattcctctatcttttggtctgttagaccaatattctgataaaacgaaaaaagatttctctttagatatgttcaaagaagatataagactaacaatttcagattttcccaaggacagagaagaattaatagatatatcaaaagatgttatgaaaaatggaggcaatagagggcttatatttgcagctgtaaatgattttgcagttaaaaaatacttagaaggagaaatcaattttggagaaatatataatttaattttcaaacattactctgagattggaaagaaagaaattttaagtttagaagacttaagagataatcaacgtgaaatattgaattatttaggaagtatttaat

SEQ ID NO: 206655 - DNA, 630 bp, Unknown
  Bacterial polypeptide expressing nucleotide sequence isolated from the Sargasso Sea
taaataaaattaaaaaagcaacccctaaatttgccatcaaacatccaaactggtcaatgggtaaaaaaatttctgtggattctgctactatgatgaacaaagtatttgagttaattgaagctcaacgaatatttaatcttgatagatcaaaatttaaaattcttatacatccccaatctttagttcatgcaatgataaaatttgataatggtttaaccaagctgttaattcatgatacaaacatgaagattccaatttttaatactatttatgataattctgaaaaaaaaataaatagtaaaaaattgggtcctgaccagttaaatagattaatgttcaaaaaaattgatttaaataaatttccatcaattaatattttaaaaattttgccaaaaaaaatatcactttttgaaacgatcattgttagttgcaatgatgagctagttgatctttttttgaaaagaaaaattaatttttggtcaatccatatgattttaaaaaagttattaaatatgaaagaatttactaaatacaaacgaataactcccaataatacaagacaaatatatgatttatgtgaatatgttagattgaaaactagagctttaagtataatatccgcaaaatgat

SEQ ID NO: 206656 - DNA, 886 bp, Unknown
  Bacterial polypeptide expressing nucleotide sequence isolated from the Sargasso Sea
aaaaaaaaatatgaaattataaaaaaaaaatttaaaaatattaatatttttccagactttaaaaatatagataaaaaaattgatagtaaagtagactacacaatgtctgcaatttcaggtttagagggtttaaacccaacattaaaaattattaaaaaaaccaaacgtattgctatagcaaataaagaatctataatttgtgggtggggactaattcaaaaagaattaaaaaaacataaaactgaatttattcctgtagactcagagcatttttcgatttggtctgtaattaaagattataataattcagatatagaaaaaattattttaaccgcttcaggcggtccttttttgaataagaaaattaaaaataatattaaaatcaaagatgccataaaacatccaaattggaaaatgggtaaaaagatttcaattgactcagcaactctcatgaataaaatttttgagatagttgaggcaaaaaaaatatttgatattgagtttaaaaaatttgatatcttaattcatccaaaatcatatatacatgcaattgtaaaacttaaaaatggtctgattaagataattgctcatgataccaatatgcgaatacctatttataactcaatttatatggggagcaaaaatcaaaagtttatcaaatcaaaaaatatcaatctaaacattcttaattcattaaattttcaaaaagtaaattttaaaaaatttccagtcactaaaattttaaataaactaactgaaaaaaatagtttatttgatacagttttagtctccattaacgatgagcttgtgaatctttttttagagaataaaataaactttttagatatttcatcaaaatatttggcttttaataaattccccatca

SEQ ID NO: 206657 - DNA, 577 bp, Unknown
  Bacterial polypeptide expressing nucleotide sequence isolated from the Sargasso Sea
atgaagaaaaaaattgctatattaggatcaacagggtctattggtaaacaaacactcgaaattgtaaaaaataataaaaaaaattttgaaatatttcttttatctacaaataaaaatcttaaagaaatttctaaacaagtaaaattatttaagcctaaaaatttaataattactaatgaaaaaagattttttttatttaaaaaaaaaaataaaaaaataaatgtatttaataattatgataattttaaaaaaatttttccaaaaaaaattgattatgttatgagtgctattagtggttttgatggactacaacctacaatagagataataaaacacacaaaatcaatagcaattgcgaataaagaatctataatttgtggttggaacttaattaatgaagaactaaaaaaaaataaaactagttttgttcctgttgactctgagcatttttcaatatggtgtttaactaacaaaaaatatgggaatatcgatgaaatatatttaactgcatcaggtggaccttttttaaataagaaacgacaacatttaaaaaacataaaacctgttcatgcaataa

SEQ ID NO: 206658 - DNA, 739 bp, Unknown
  Bacterial polypeptide expressing nucleotide sequence isolated from the Sargasso Sea
aaaaactatttcgatacttggttcaactggttctataggtttaacatcacttggaattattaataaaaaaaaaaaattatttaatatttttcttctttatgcaaatcaaaacttcgatctaattagtaaacagataaaaaaatatcaaccaaagttttatattataaaaaacaaaaaggtttattctaaaataaaaaaaaaatttaagagaagtaaaacaagatttttaaataatctagaaagtttaaaattaaaaaaaaaaatagacatttcaatatccgcaattccaggtatatcaggattagaaccaacaataaaagttatcaaaaatagtaagaaagttttaatagctaataaagagtctgtaatatgtggctggagcgttattaagaaattgtcgtcaaaaaaaactaaattaataccagtagattcagaacatttttcaatttttaaacttctcaaagatcataaaatagaggaaattaataagatttttataactgcttctggtggaccatttttaaggtacaaaaaaaaacagtttaaaaatattacccctaataaagcattaatgcaccctaaatggaaaatgggaaaaaaaattagtgtagactcttctactctaatgaataaaatttttgaagttatagaggctcaaaaattatttgaaataccatataataaattagatatcttgatccacccacaatctttagttcatgcaattattgaatttaaa

SEQ ID NO: 206659 - DNA, 583 bp, Unknown
  Bacterial polypeptide expressing nucleotide sequence isolated from the Sargasso Sea
tttattgcaccagctcagggctcttaaacacccggaattgggaacatggggtaaaaaaatatcaattgactcagctacaatgatgaacaaagctttagagttagtagaggcactatggctttttgatatagatattgaacagattgaaattacaatacatccacaatcaattattcattcaatggttgaatttattgatggttcctacaaagcacatttaggcacacccgatatgaaagtccctatacaatatgcgttaacctatccagcaagaaaaacattggctatcgatagtttagatttaagtgatttgagtcttgcatttcaatctcctgattataaaagatatcccattctaggtcttgtacatgagcttataaagttaggtggtaatagagtagctgttatgagtattgcgaatgattacatagtacaaaaatttctagatgaaaaaatttcctttaatcaaatattcattcttactaaagaggttgtaagcgaatttggatctgatgatctaccttctttagaagatttacttattttagatgaaaatattaagctatatttagaaccaaattaa

SEQ ID NO: 206660 - DNA, 478 bp, Unknown
  Bacterial polypeptide expressing nucleotide sequence isolated from the Sargasso Sea
ggaaagcatcattcactcaatggttgaattttgtgatggttccactttggcccagcttggttttcctgacatgcgaatcccgatttcctattgtcttggatggcctgatcgacttgaactggaactcccaaatttagacctgacaaagatcggaagcctgaatttttcatcagtcgaaccgacccggtacccctgtcttgagctagctatcgatgcggcctggatggacagaagtgttccggccgttttaaacggcgcgaatgaagcggtggttgaatcatacctgaatgggcatctgcatttttttgaaattgctaaattactccaggatgtaatgtccggatatcaaagtatctcccaaaaatctgattgcccatcatacctcagagatattcaaaccctcgaggatgccgtaaaggcggaccaatggggacgggaggaagcccagcaacggatgcagaaaagagttgctgcctga

SEQ ID NO: 206661 - DNA, 808 bp, Unknown
  Bacterial polypeptide expressing nucleotide sequence isolated from the Sargasso Sea
catgaagaaaaaaattgctatattaggatcaacaggatcgattggtaaacaaacacttgaaattataaataattataaaaaaaattttgaaatacttcttttatcaactaatacaaatcttgaagaaatttctaaacaaataaaactatttaagcctaaaaatttaataattactgatgaaaacaaattccatttatttaaaaaaaaatataaaaaaataaaagtttttaataattatgataattttaaaaaaatttttccaaaaaaaattgattatgctatgagcgctattagtggttttgatggactgcaacctacaatagagattataaaacacacaaaatctatagcaattgccaataaggaatctataatttgtggttggaacttgattaatagagaactaaaaaaaaataaaactaattttgttcctgtagactcagagcatttttcaatatggagtttaaccaacagaaattatggaaatatcgatgaaatatatctaactgcatctggcggaccttttttaaacaagaaacgacaacatttaaaaaaaataaaacctgttcacgcaataaagcatcctagatggaatatgggaaaaaaaatttcaatagactcggccacaatggtgaataaagtttttgagataatagaagcaaataaaatatttaatgttagttttaataaaataaaagttttttctcaccctgagtcatatgtccatgctattgtaaaattcaaaaatggattaacaaaaattttaatacatgacacaaatatgaaaattcctatatttaattcatta

SEQ ID NO: 206662 - DNA, 457 bp, Unknown
  Bacterial polypeptide expressing nucleotide sequence isolated from the Sargasso Sea
gaccctgatcaaataaacatcatagttcatcctcagtcaattatccattccatggttgaaatgaaagatggatctgttaaggctcaaatgggagtgccagatatgaaggtgcccatacaatatgctctcacctatccacgacatatagaagctacatgggaaaagcttgatcttattaattgtgcagatttgacatttgaaaagccagattataatcgatttccatgtatagctttaggctttaaggtattagagagatttggatcttctggtgctgcattaaatttatctaatgattatgcggtctatcgttttttaaatgaagaaatacaattcactgatatcccgaaaatcaatgaatctgtgcttgaagaacatccctggattgaagagccatctcttgaggatcttatagaattagatgaatgggtcaaaaattatgtaactacacactgat

SEQ ID NO: 206663 - DNA, 562 bp, Unknown
  Bacterial polypeptide expressing nucleotide sequence isolated from the Sargasso Sea
aatgaaaaaaaaaattgcaattttaggctcaactggttcaattggaactacatctttaaatataattaaaaagaaaaaaaatttatttaatgttgaacttttgtcagcaaataagaattacaaaagtatttgtcaacaaataataagatttaaacctaaatactttgtagtaacgaataatcttatttttttaaaaattaaaaaaagatttaaaaataaaaaaactaaaattctcaatagttatgacaatttatctttgacaaaaaaaattgacgtaaccatagcatcaataccaggtatagctggattaaaaccaacaattagtcttgttcggaaaagtaaaaaaattcttttagccaacaaagagtcagttatatgtggatggaagataattaataatcttgcaaaaaaatacaaaactaaaattgtgccaatagactcagaacatttttctataatgaaacttttagaaaatcataaaaaaaatgaaatagaaaaaatttatataaccgcttcaggtgggccctttcttaatttgcctaaaaataagttaaaaatataa

SEQ ID NO: 206664 - DNA, 611 bp, Unknown
  Bacterial polypeptide expressing nucleotide sequence isolated from the Sargasso Sea
catgaaaaaaaaaattgctattctaggatcaacaggatctattggtaaagcttctttagaagtaatttcaaaaaataaatcagaatttaaaataactttactatctgctaactccaattattttttaataaaaaaacaaattaagaattttaaaccaaatttttttattataaataataaaaatgtatacaataaaataaaaaaagaatttcataataaaaaaactaatatttataataaattttctaatataccagcaaatgtaagatttgatataaccatttccgctattgttggaatagctggacttgaaccaactattaattttattaaaaaaagtaaaaaaattttattagcaaataaagaaagtattatttgtggttggcatatattaaaaaaaatctcgttaaaatataaaactaaaattctcccaatagattccgaacatttctctatacatcaattaactcaaggctgcagtgactcagatattaaaaaaatttacataacagcatctggcggtccatttttaagaaaacccctaaagtactttaagaatataaatccaatagaagctgcaaaacacccaaggtggaaaatgggaaaaaaga

SEQ ID NO: 206665 - DNA, 936 bp, Unknown
  Bacterial polypeptide expressing nucleotide sequence isolated from the Sargasso Sea
tatcaaagtactaactcaacaaattagaaaatataaacctaaatacgcatttttatatgatcatgaaaaattttctaatttcgattataaaattggtaaaactaaatttttaaatttagatgagttaaaaagttttttatcatctagtaaatctaatttaagtttactagcaatatcgggatataaatcattatattttttagaaaatataattcaaaatacagataatttaggtatcgtttccaaggaagctattgtttctggtggacatatttttaaaaaaaaaaattattttaataaaacaaatatatttcctattgattctgagcatttttcgttatttgaattatttgggaaaataaaaactaaaacgaatataaaaaaaattattttaactgcttctggcggtccatttcataaaaaaaaatttaattctttaaaaaatgtaaaatttaatcaagcaattaaacatcctaaatggaaaatgggatacaaaaatagtattgactcagcgacactagtaaacaaatgtttagaattaatagaggcacattacttatttgatataccttttaaccaaatgaaaatactcattcatcctgaagctttagtgcactctattgttgagtttgataactatgttacacagtttaatttgtttgaaaatgatatgagcattccaattataaattttttatgtaaatcaaaaattaaatataaatatgatgataaaagattttatattaatagatataaaaacttaaattttgaagatatcaaagatgatatatttccagtatataaattttttaatgatatcaataaaaaacaacctgaaaatttgattaaatttaatattggtaatgaatttgcagttaatttgtttaaagaaaataagataaaatatacagatatttacagaataattaaaaaagt

SEQ ID NO: 206666 - DNA, 862 bp, Unknown
  Bacterial polypeptide expressing nucleotide sequence isolated from the Sargasso Sea
tgctaaaagcaaccatcctttgttactagaacaaataaaattatttaagccgaattatatttatttagaagatgagagttccttcattagcataaaagacgcaataaaagacatagatcaatctttggaggtgataaataatgagcaagatcttttaagtttaatttcctctaatattatagatacagtcgtagcagctgtagttggtatagcaggattaaatggtgtagaagcggctttatcttcaggaaaaagggttctattggcaaacaaagaatcttatgttgttgctggagagtaccttaataaattatgtaaagaaaacggaggattaattatccctctggatagtgagcacagcgcaatacatcaatgtctttccagaggaaaccaaaaagaaaaagcttctaggatcatattgactggttcaggggggccttttttaaataaaaagaagactgacttggctaatgtaacgatggaagaagctataaaccaccccatttggacaatgggaagaaagatatcagttgattcttctacattaatgaataagggcttggagctaatagaggcaaaatggttatttgaatcagatactaatgaaatagaaataattattcatcctgagggtatagttcactcattagtagaatttaaagataattccatcattgcccaattaggaaaacctgatatgaagatacctatagcttatggattaggctttccgaatagaattcattctaatgttgaatctcttaatctttcagagcttggccccttaacttttttagaccctgactttgataaatttccttgcttaggacttgctactgaagccttgatcacaggggggacg

SEQ ID NO: 206667 - DNA, 820 bp, Unknown
  Bacterial polypeptide expressing nucleotide sequence isolated from the Sargasso Sea
taattttgtgggatggaaatttattaaaaagtcactcaaaaaaaataatacaaattttgttccattagactcagaacatttttctatatggtcattaattaaatctgaaaatattgataatatcaaaaaaatttatttgactgcttctggaggcccctttttaaataaaaaattggatgatataaaaaatattaaaccaaaatttgctttaagacatccaaattggaaaatgggaaaaaaaatttcaattgattcagcgacaatgatgaataaaatttttgaagtaattgaagcaaagaaaatatttaatattaaaagtaataaattagatattataattcatccaaaatcttatattcatgctgttgtacattttaaaaatggtctaactaaattcttagctcatgatacaaccatggaaataccaattcttaactccttatataaaaaaaatgaaaaatttatttttaataataaggattttaattatatgaaatttaatggaacaaactttttaaaaccagatcctaaaatatttccattacttaaaattctggattataactttaatggtacatattttgatataattttagtgtgtcttaacgatatattagttaatttatatttaaaaaattcaataaactatatttctattcataaattgctgataaaattactaaaaaaagcatatttttcgcgttactatgataaaagccctaaaaatataaacgaaatagaaaatatggtaaataaggtaaaaaaatatttatataaatatcttaaattaaatgaaaaattttacaaaaataataattaa

SEQ ID NO: 206668 - DNA, 865 bp, Unknown
  Bacterial polypeptide expressing nucleotide sequence isolated from the Sargasso Sea
gagcccaacattaaaaattattaaaaaaacaaaacgaattgcaatagcaaataaggaatctataatttgtgggtgggaattaattcaaaaagaattaaaaaaatccaaaaccgagtttattcctgttgactcagaacatttttcaatttggtcagtaattaaagaccatgataaatcagaaatagaaaaaataattttaactgcttccggtggcccttttttgaataaaaatatcaaaaataatataaaaataaaggatgcaataaatcaccctaactggcaaatgggaaaaaaaatttcaattgattctgcgactcttatgaataaaatttttgaaatcatagaggcaaaaaaaatatttaatattgagcttaaaaaatttgatatcttaattcatcccaaatcatatgttcatgcaattgtaaaatttaaaaacggactaataaaaataattgcacatgatacagacatgcaaatacctatctctaactcaatttatatgggtagcgctagaaaggaatttataaaatcaaaaaaaattgatctaaatattctcaattcgctaaattttaaaaaagtaaatgtaaaaaaattcccagtgattaaaattttagataagatatctaaacaaaatagtttattcgatacagttttggtttcaattaatgatgaacttgtgaacctttttttaaaaaataaaataaattttttggatatatcatcaaaaatttgtcatttaataaatttatcaattttttcaaaatataagcttcaaaaaccaaaaaatttagctcaaattgaaaaattaaatgagtttgtaagattgaaaacaagaactttaagtgtaatatcgcgaacaaaatga

SEQ ID NO: 206669 - DNA, 714 bp, Unknown
  Bacterial polypeptide expressing nucleotide sequence isolated from the Sargasso Sea
atttttcaatttggcaattattgaaacaagaaaatataaacaatgtaaaatttatatatctaactgcatctggcggcccatttttaaattacaataaatcacaattaaaaaaaataatcccaaaaaaagcaataaatcatcctaaatggtctatgggtaaaaaaatatcaattgactcagcaactatgatgaacaaagtgtttgaagttattgaagcgcaaaggttatttagtatagattacaaaaatattaaaattttaattcatccagaatcttacttacattctatcgttaaatttaataatggtataactaaatttttagttcacgatacaaatatgaaaataccaatatttaattcaatttatacaaacaaaaacgctaaaattaaaagcaataagttaaatttaaaaattatgaataatttaaatttaacttttccaaataaaaagaaatttccgcatttaacaatactaaataaaattcctaaaaaaatatccctctttgaaacagtactcatttctgcaaacgacgaaattgttaaccaatttttatctggtaaaatctcttatctaaaaatttataagattttaagtagagtgattaattatgataaatttaaaaaattaaaaaaatcaaaacctttaaatcttaagcaaattcaccgtttacataattacgtaagattgataactagaagctattgtgagtaat

SEQ ID NO: 206670 - DNA, 607 bp, Unknown
  Bacterial polypeptide expressing nucleotide sequence isolated from the Sargasso Sea
agcaattgctaataaggaagcaattatatgtggttgggatttaattgaaaaaaggttaaataaacataaaactaaatttatacctgtagactcagagcatttttcaatttggtatgctttacaagaaattgaaaaaaatcttatagaaaaaatatatctaacagcatcaggaggaccatttctaggtaagtcttttcgaaaattaaaaaaggttaatattaaggaagttataaatcatccgaattggaaaatgggaaaaaaaatatcaacagactctgcgaccatgatcaataaagtttttgaagttatagaggcaaaaaaaatatttaaaatctcttataataaattagcaattatcattcatccaaaatcatatgttcatgccataattaaattcaaaaatggtttaactaaaattattgttcatgatactgatatgaaaattccgatttttaattctttatattcatcaaaaaaattcattaactctaaaaaattagatttcaaagctcttaataatttggattttagaggtgccaacccaaaaaaatttccattgattaaagtccttaaaatgttacttgacaatacatcattatttgaaacc

SEQ ID NO: 206671 - DNA, 832 bp, Unknown
  Bacterial polypeptide expressing nucleotide sequence isolated from the Sargasso Sea
taaaaatattaaaatttataataatttttcttcgtttgataaaatatttaattctaaaattgattatgtaatgtcttcaattactggaattgcaggtctagagcctacgcttaaaattataaaacatacaaaatctattggtattgcaaataaagaaacaataatttgtgcatggaatttaatctataaacagttaaaaatatataataccttttttgtaccaatagactctgaacatttttcaatatattcactaaacaatggttttaatacatcccaaatagaaaaaattttcataactgcttctggtggtccatttttaaaatttacaaaaaaaaaattaaatatggtaaatccctcgaaagcagtacagcatccaaattggaaaatgggaaaaaaaatttcagtggactcagcaactttgatgaataaagtatttgaagtaatagaagctcaaagaatttttaatttaaaaaagaaattttttgaaattctaattcatccaaagtcttatttgcactcaataattaaatataaaaatggtacatcaaagctattaattcatgacacaacaatgaaaattcctatatttaattatatttgtaaagacatttcacataaattgaatactaataaaattaattttagtctgttaaataatctagaattaaaaaaaccaattcaaagacaatttccacttttaaaaatattaaataaaatacctgaaaatatatctttatttgaaacaattttaatttcggcaaatgatgaattagttgaaaattttattaatggtaatatcaaatttaatcaaatacataaaatattattt

SEQ ID NO: 206672 - DNA, 708 bp, Unknown
  Bacterial polypeptide expressing nucleotide sequence isolated from the Sargasso Sea
ataaattcattatctggaattgatggtttggaaccaacattaaaaataataccacgtacaaaaaacattctaattgcaaataaggaatcaataatatgtggatggcatttgataaaaaaaaaattaaataaacataatacaaaatttattccaatagattctgagcattattcgataatgaaattaattcaaggtgagaatatagagtcaatagataaaattattctaacagcctcgggcggaccttttctaaataaatcaaaaaaacaaatagtaaatatatcccccaaagaagcaataaatcatccaaattggaaaatgggaaaaaaaatttcgattgattcctctaatatgatgaataaaatttatgaatatattgaagcaaaaaaaatatttaatttatcaaattcaaaattatcaatattaattcatccaaattcatatgttcatgctataattaatttaaaaggaggattaatcaaatttttagctcatgatacaaacatgagaattccaattttgaatgctttaggaattaaaaaaaaaactgaaaatattttttcaaataaaagtttaaaaagctttaataatttaaaatttaaaaaacctaccactaaacagttcccactattaaatattttaaatattatacccaacagaacatcttactttgaaacaattctaataacattaaatgactcgctggta

SEQ ID NO: 206673 - DNA, 711 bp, Unknown
  Bacterial polypeptide expressing nucleotide sequence isolated from the Sargasso Sea
gatgaaaaaaaaaattgctatacttggatctactggttctattggtttaacaacattagatatcatttataaaaataaaaaatcattcaaaatagaactattatcaacaaatagaaatattaaaaagataaagagtcaaattaaaaattttaaagtgaaaaatatcattattcacgataaaaaaatttttgataaaaataaattttattttgaaaaattgaatataaatgtttatcaaaatcttagagattttcgaagagaatttaaaaaaaaactcgattatgttatgtgtgcaattactggacttgatggtctagagcctacattagatattattcaatcaacaaaaaggatagcaattgcaaacaaagagtcaattatttgtggatggaacttgattaaaagaaaattgaaaaaatataaaacagaatttattccaattgactcagaacatttttcaattttcgaacttattaaaaatgacaaaccagaaaacatcaaaaagatttatattacggcatcaggtggtccttttcttaatatcgataaatcaaaattaagtaaatttgttccaaaaaatgcaattaaacatcccacatggaaaatgggaaaaaaaatttcaatagattcatcaactttaattaacaaggtttatgaattaattgaagcaaaaaaaatatttgaattagattataacaagtttgaaataat

SEQ ID NO: 206674 - DNA, 545 bp, Unknown
  Bacterial polypeptide expressing nucleotide sequence isolated from the Sargasso Sea
aatgaaaaaaaatatagttatactaggctcaactggctccattggaaaaagcacaattaaaataattgaaaaagataaaaaaaattttaaaataaaacttttatctactaataaaaatgtcttagaattaattaaacaggcaaaaaagtttaaagttaaaaatttaatcatcaatgacctaaaaaaatttaatcaagcaaaaaagaaattcaaaaacttaaaaatgaatttttataattctttttctgtattggacaaactttttaaaaaaaaagagatctactattctatgatttctttagttggcatagatggattaaagccctcaatgcaaatgattaaatcctcaaagaatattgctatagtaaataaagaatctttaatttgtggttgggacttattaaagaaaagtttgaaaaaatacaaaacaaattttattccaatagactctgaacatttttcaatattttcacttatagataatattaatgctgtagataaaatttatataactgcatcaggtggaccttttttgaaatattcaa

SEQ ID NO: 206675 - DNA, 706 bp, Unknown
  Bacterial polypeptide expressing nucleotide sequence isolated from the Sargasso Sea
aatgaaaaaaattataatattagggtctacaggatcaattggaaagcaaactttagaaataattaagaaagataagaacaaatttagaattctcttgttatctacagataaaaacatcaatattttattgaaacaaataaaaacttttaaagttgaaaacattgtagttacaaaccaaaaaaaatataaaatattaaaaaaaaaaattaaaaaaattaaaagaattaaaatttttcaaaattttgaaaaaataaataaagaacttaaggttaaagctgattatgctatgtctgcaatatcgggaattgaaggtttaagaccaacaattaatatcattaaaaatacaaatcgaattgccattgcaaataaagaatctttaatttgtggatggagcttaatacaaaaagaattaaaaaaacataaaacggaatttatacctgtcgattcagaacacttttctatttggtcaataatcaaaaactatcagaaatcagatattgaaaaaataattcttacagcatcaggtggaccatttttaaataagatgataaaaaaaaatatcttgcctagagatgcaacaagtcaccccaattgggtaatgggaaaaaaaatctcaattgactcagcaaccatgatgaataaaatttttgaaattatagaggctaaaaacatatttaatatagagttaaataaatttgaaattctt

SEQ ID NO: 206676 - DNA, 574 bp, Unknown
  Bacterial polypeptide expressing nucleotide sequence isolated from the Sargasso Sea
atgacaaaagatattttcttattaggttctactggatcaattggagagacaacattaaaagtaattaaaaaagataaatcaaactttaatataaaattattatctactaataaaaatgttgaaaaaatttacaaacaagcaatacaatttggagtaaaaaaagtagtcgtttttgataaaaaaagctacctcaataatttaaaaaaatttagagaaaaaaaaataaaaatttttctaacaataaaagaagcgttaaaaaataataaaaaaaaatccttcttaactttaaatggtattgctggaattgagggacttgaaccaacattagatataataaaatattcaaataatttagctatggctaataaggaatcaattatttgtggatggcaatttatacaaaaagaattaaaaaaaaggcagacaagatttatacctttagactctgagcatttttcaatttcgtctcttattaaagatgaaagtaaacaaaatataaaaaaaatatatttaactgcatctggaggtccttttttatataaagatctaaagaaaattcaaaatataaaaccta

SEQ ID NO: 206677 - DNA, 454 bp, Unknown
  Bacterial polypeptide expressing nucleotide sequence isolated from the Sargasso Sea
ttgaaatacattactgtgctcggttctactggttcaatagggactcaaactctcgaaatagcttgtgagcagcctgataagtttaaagccgtagctctttctgcaggaagaaatattaatttattaactgaacaagttaaaacacataaaccagaggtagttgcaatcgaggatgaaagtcttatagaagatttaaaagataatattaatattttagatttagatgatgctccattggttttaggtggtaagcaggggattaacgcagttgcagcatgggataaggcagatactgtagtaactgggatagtaggctgtgcaggcttaattccaacaatgtcagcaattaatgcggggaaaaatattgcacttgctaacaaagaaactttaattgcggcaggaccaattgttattccagcattaaagaaaaataatagtaggcttttacctgctg

SEQ ID NO: 206678 - DNA, 880 bp, Unknown
  Bacterial polypeptide expressing nucleotide sequence isolated from the Sargasso Sea
ataactgggttagcaggcttagattcaacaataaattgtattgattcaacgaaaaacatagcaatagctaataaagagtcaataatatgtgcatgggatttaataaaaaaaaaattaaataaatataatactaaatttataccggtagattcagaacatttttcaatttggtctttgttaaaaagtgaatcagttagtaatgttgaaaaaataattatcactgcttctggaggaccttttcttaacttaaatttaaaaaaactaaaaaatgttaaatccaaagatgcagttaaacatccaaattggaaaatgggtaataaaatttcagtcgactcagctacgctaatgaataaagtttttgaagttattgaagctcaaagaatatttaatatagatatgaataaatttttaattttaattcatccaaattcttatatccattcaataatcaaattttacaatggtcaaataaaaatattagctcatgaagcagatatgaaaataccaatttttaattcaatatatcagaatacttacagaaaaattgttacaaaaaaaatcaatttaaatgttctaaacaatataaatctaagcaaagttgatactaacaaatttcaatcattgaaatttttaaaaaagataagaaataaaaacacattattcgaaactgtactaatatctgctaatgatgaattagtagatctatttattaaaaacaagattagttttttggatatccataaaaaattaacaaaaatcattaacaacataaaatattcatcacttataagcaaaaaacccaaaaatatatctgatattataactctttctgaagatgttagattgaaaactagaaatctatgtgtaaagataaaatgat

SEQ ID NO: 206679 - DNA, 868 bp, Unknown
  Bacterial polypeptide expressing nucleotide sequence isolated from the Sargasso Sea
aataaatatttatggttcactggtgtaataggccaaaagtctttaaagctagttaataattatccaaatataaaaattaatttattactagcaaataataattataaaaaacttatatcccaatctataaaatataaacctaaatatatttgtatcaaaaattctaaacattatgagtaccttaaatccaaaattcctaaaaatgttaacttaataaaacataatgatttaaattcatttatagaaaaaaattttgttgaaatttctctgcttgcagtttcaggttataatgcactattgtattttgattcaattataaataatacaaaatttttaggtttagttaataaggaagttattgtttcggctggtcatttatttaagaaaaaaaattatattaaatgtgcaaaaattttccctattgattcagaacatttttctttgtttaattttttcaataactataattataaactagctgatattaagaacgtatatcttacagcctctggcggaccttttttaaattataattcaaataagttagctaatgtttctgttaaagaagcaaccaatcatcctaagtggaaaatgggtaaaaaaaatagtatagattcagctacattagcaaacaaatgtttagaattaattgaagctcattacctttttgatataccctacaataaattaaaaattctaatacatcctgaatctcttgttcattctatagttgagttttacaatggaatatcaatttttaattatttctataatgatatggatattcctttaattaatttttttgaatatgttatgaataaaaaaagtattaatttaaaatctcaatattttataaacaaaaatttta

SEQ ID NO: 206680 - DNA, 592 bp, Unknown
  Bacterial polypeptide expressing nucleotide sequence isolated from the Sargasso Sea
gatgaaaaatattgttgtaatgggctctacaggatcgattggaattcaatcattagatgtaatatcaaaagataattcatataatgtagttggtcttacttgccattccaatgctaaccttctttttgaacaagctaaaaaacattcacctgattttgttgcaattgatgttatcgattcttctcacgacctttttaatctatgtaaagaaaataatattgaactcataattggcagtaaagcttcaagcaatatcccatttaaaaatttagatttagcaattaatgctattgttggtactgctggattacgacctacaattgaattaatcaaaaatggcgttgatatagctttaagcaataaagaatcattagtacttggaggccatattatcatgccattggctcataaaaaaaatgttaacataattcctgttgatagtgagcactcagctatttttcaatgtttgaatggtgaaaatcataaagaattaaaaaaaattattcttacaggaagtggtggaccttttcttgaaacaccaattcatgaatttgattctattacacctgaacaagcattaaaacaccctaat

SEQ ID NO: 206681 - DNA, 410 bp, Unknown
  Bacterial polypeptide expressing nucleotide sequence isolated from the Sargasso Sea
cctagatggctccgtacttgcgcaattagctaatcccgatatgagagtgcccatcgcgtacggcttgagttacccaagacgcatggaatcgggagtagagcacctagatttagttggactcacagatttgcagtttttagaggtagatgaggatcgatttccatgcttaaaattagcgaggttggcagctaaagagggaggctcgagtccaattttactaaatgccgctaacgaaattgctgttgaggcttttttgagaggtgaaatcagttttgtaaaaatccctcagataattgaggaggtaatgatgaaaataccttgtgaatcgcctgcatctatagctattattcatgacctcgatttgcgggcgagacaactgtctaaccggttgattaataaagggagctagc

SEQ ID NO: 206682 - DNA, 598 bp, Unknown
  Bacterial polypeptide expressing nucleotide sequence isolated from the Sargasso Sea
gatgaaaaaaaaaattggaatacttggatcaacaggatcaattggagataatacagttaaaataattcaaaataataaaaaagactttgatgtaatttttttatctaccaattcaaatgtaaaaaaattgttaaaacaatgtcaaattcttaaaccaagatctgctattatctttaatcataaaaaatacttaaagtataaaaaaaaattcctaaacaaaaaaattaatgtatttaattcatttaaagaattaaaaaaaaaatcgctcaaaaaaagagttgattatataatgtgtgctattagtggtttagcaggattggaaccaacaataaattctattgatgcaacaaaaaatattgcaatagcaaataaagagtcaataatatgtgcgtgggatctaataaattcaaaattaataaaatataaaactaaatttatacctatagattccgaacatttttcaatatggtcattgctacaaaatgaatctacaaaaggtgtagaaaaaatctttatcacagcatcaggtggtccttttttaaattataaattaaccaaacttaaaaatgttaaacctaaggatgcaatcaaccatcca

SEQ ID NO: 206683 - DNA, 706 bp, Unknown
  Bacterial polypeptide expressing nucleotide sequence isolated from the Sargasso Sea
atgaaaaaaaaaattgcaatacttggctcaactggttcaataggtaaatctactcttgaaatagttaaaaaagataaaaaaaattttgaagttgtattactttctacaaataaaaatcttcgagaattatccaagcagcaaaaaatttttaaaccaaagtatttaattataaatgattttaaaagttttattaaatttaaaaaaaaaaataaaagtaaaatcaaagtttttaatgactataattttataaaaaaaattttcaaaaaaaaaattgattatacaatgtgctcgataggtggttttgatggtttaaaaccaacattagatattattccatttacaaaaatagttgcagtagctaataaagagtctctgatatgtggttggaatttactacaagaaaaaataaaaaaatataatacaaaattcatacctgtagattctgagcatttctctatttggtcattaattaaaaatatatccgaagatattgataagatttatataaccgcatctggaggtccttttttaaataaaaaagcaaaagatttaaaaaaaattaaacctgaagctgcaataaagcaccctaactggaaaatgggaaagaaaatttctatagactcagccactatgataaataaagtttttgaagttattgaggctaaaaaaatatttaatttaaatttgaatcaatttgaaaatttta

SEQ ID NO: 206684 - DNA, 807 bp, Unknown
  Bacterial polypeptide expressing nucleotide sequence isolated from the Sargasso Sea
tatgaaaataaatatatttggcagtactgtcaatattggagttaaaagcttaaatttaattaaaacattttttcctaaaattaaaataaatttactttgcgctaaggataatattaaattgttagaaaaacagattgcagtatttaaacctaattatgtttttttagaaaatgagaaaaaatcatacattttaaaaaaaaaaattacaaaatgcacaacagtattaaattataatgacctccaaaaatatttaaaacaatcaaaatctgattacacaattttatcaatctcaggatataaatcattaaattttcttgaaaatatagtcggcaatacaaatcttttaggtttagtaagtaaagaagctatagtttcagcaggacatctttttcataagtctagtaaatataaaaaaaccattatttacccgttggactcagaacatttttcgatttataaatttttaaatttaaataagcccagatataaaattaaaaatttatttttaactgcttcaggaggtccatttttagggaaaaaatattttaatttaaaaaatatttcatttgaaaaagcatgtaagcatcctaagtggaaaatgggatataaaaatagtattgactcagctactttggtgaataaatgtttagagttggttgaggctcattatttatttaatataccttatgataaacttgatgttgttgtacatccagaatcattagttcactcaatttttgaatataaaaattatatatcagaatttatttattttcataatgatatgaagattccaatatataattt

SEQ ID NO: 206685 - DNA, 691 bp, Unknown
  Bacterial polypeptide expressing nucleotide sequence isolated from the Sargasso Sea
tatgctttaagaaataattcgattaccaatttagataaaatattgttaactgcctctggcggaccattattaaatgtaccaataaaaaaatttaaaaatttaaagataaggaaaataattaaacatccaaattggaatatgggagctaaaataagcgtcgattcttcaacaatgataaacaaagtttttgagataattgaggctaaaaaaatatttaatttaaaatataagcagttatcaatattgatacatccaaaatcatatgtgcatgcaattttaaaatttaaagatggcttgattaaaataatagctcatgaaactactatggaaattcctataattaatacattaaatcaaatagataaaaataagcttaaaacaaaaaaaataaatttaaaaaaattaaataatctcaacttatcaaatatagattctaacaaattccctttgacaaaaataattaaaaaattaccatcaaaagattcattatttgagaccgttctagtttctttaaacgatgaattggtaagattatttttaaataaaaaattttcttatttaactttaataaataaattatttaaattaatgcataaaaaagaatttattaagtataaatctatagaacctaaaaaaattactgatatattaaaattgaataaacttattaaatcaaaaataaaattataat

SEQ ID NO: 206686 - DNA, 379 bp, Unknown
  Bacterial polypeptide expressing nucleotide sequence isolated from the Sargasso Sea
atgacttcattagcgatatttggctccacgggttcaatcggcgaacagacacttgatgttgttagggccgatagagccggtttcgaaataaaggtattggctgccggaaattcgacttctcggatacttgagcaaatcaacgaattcaaacctgaattcgtgatcatggctgactctgatgctgctaagaaagtccaagatgcttctccaggagtagaggttgcttgtggagaaagtgcattaagagaagcttcaagtacagctgaagttgtagtgaatgctgtcgttggctttgcaggtttgcctgtcactatggaagcgcttaagtcagggcgcaggctcgcattggcgaataaagaatctttaatatccgcaggcc

SEQ ID NO: 206687 - DNA, 514 bp, Unknown
  Bacterial polypeptide expressing nucleotide sequence isolated from the Sargasso Sea
tatgaagaatattcttttgcttggtgctacaggaagcattggagaaagtgttctaagtgtcatttctcaaaataaagaatcattaaatttatttggcatatcattaaacaaaaatatccaaaagtctcaagagatattgaaagaatattctcctgattatgttttcattgatgatcatgattcctttaaaagtctggcaagcgaggattcagaaagatatttaaacgatgagggagatcttgaaaaacttatcaataaagaagagattgatattattgtatgtgcaacatctggatttgcaggtctaaaagctgcttacattgctgctaagacgggaaagaaaattttattagcaaataaagaaagcattgttgccggtggagatttaattttacccttagccaaaaaaaataactctgaaattatcccaatagacagtgaacataatgcaatctttcagtgcttatctggtgagaagggtacagaagatgttaaacgtataactatcacagca

SEQ ID NO: 206688 - DNA, 877 bp, Unknown
  Bacterial polypeptide expressing nucleotide sequence isolated from the Sargasso Sea
atgaaaaaaattatatcaatacttggatcaactggttctgtaggattaaatgctcttagaataattgataaaagacaggatttgtttaaatttaatttactctcagctaacaaaaattattctttaatatgtaaacaaattaaaaaatacaatccaagaatctttatcattaatgagaaaaaaatattcataaaagttaaatacaagtttagaaaaaaaaatattaaaatactaaatagttatgaagatttgaaactaaaaaaaatttctcatataactatttcagctattcctggcatagtaggactaaaaccaactattaagatgattaagaaatctaaaaaactattaattgctaataaagagtcaataatttgcggttggaatttaattgaaaaattatctaagagatacaaaactaaaattataccagttgactctgaacatttttcaattttaaaattgcttgaaaatcataaaataaaagaaataaaaaagatatatttaactgcatctggtggaccgttcttaaattatttaccaagtcaattaaaaaaaattaaaccaaaagaagcacttaggcatccaaaatggaagatgggtaaaaagatttcaatagactcctctactttaatgaacaaaattctagaattaattgaggcacaaaaattatttaatttgaagattaaaagtttagatattcttattcatcctgaatctttagtgcatgctatagtagaatttaaaaatgggcttacaaaatttatttatcatgacacttcgatgataattccactcgcaaatgcaatattcgatggatctttaaatattaaaaaattctacaaaactaaaaagaaaactataaatgatttatcat

SEQ ID NO: 206689 - DNA, 565 bp, Unknown
  Bacterial polypeptide expressing nucleotide sequence isolated from the Sargasso Sea
atgaaaaaaatatctattttaggttcaactggatctgttggaactcaatgccttgaaataatttcagagtttaaaaatcaatttgaaattatttcattaacagcgggaaaaaatgaagaattattaggtgatcaaataaaaaaatttaaacctaaatattatttatcagacaccaatgtgaatcatcgagatggtatacgaattaaaagttatgatgaactgttaaaaattgatgattcagatctaattgttatcgcattatccggcatttctggtttttttccagtacttaattgtattaagcaaggcagaaaaatagccttagctaataaagaaagtttagttgcttgcggagacctgcttattgaaattagtaaaacaactaactcagagataattcctttagacagtgagcattctgcaatttggcaatgcataaaaaatgaagaagataaatatgtgaaatctatagtaattacagcatctggaggcagtctcagagatatgccaataagtgaattatattcagtaactccagaaatagttttgaatcatccaacttgaa

SEQ ID NO: 206690 - DNA, 1168 bp, Unknown
  Bacterial polypeptide expressing nucleotide sequence isolated from the Sargasso Sea
catgataaacgttgctatattaggatcaacaggatcaatcggtcttacgacattaaatattattagaaaaaataaaaaaaaattcagaattcaattattgtctgcaaacacaaatgctaaaactttgtttgaccaagctaaagaatttaatgtaaaaaatgttatacttttaaatacaagtgagaataaaaaatggtttaaaaaatttaaaaaaaataaaattaatctatttaataatttcttaatatttgaaaatatttttaaaaaaaaattagaatatgtgattaatgcaataactggagttgatggacttaaaccaactttaaaaataattaaacatactaagaaaattgcaatagcaaataaagaatctataatatgtgggtggaatttaataaataaagaattagtaaaaaataaaacacaatttatacctgtagattccgaacatttttccatttatgaattaattaaaaatcaagaaaatcaattaataaaaaaaataattataaccgcttctggaggccctttcttaagaaagaaaagtttaaaaaaaataagagtaaaagatgcattaaaacatcccaactggaaaatgggaaaaaaaatttcaatagattcttcgacaatgatgaataaagtttttgaagttattgaagctaaaaaaatctttaatttaagttttaaaaaaatagaaattttaattaatccaaattcatatttacatgcaattgttttgtttgaaaatggaataataaaaatgttagcacacgaaaataaaatggagattccaatttataattcgatctatagtaaccaacccaaagatctatataaatctgatgaattaaatttaaataaaattaataaacttaacctatcaaaacctcgtattagtaaatttaatagtttaaaaattttgaagttaattcctgaaaaagatagtctctatgaaactattataatttcagtgaacgatgaattagttaatatgtttttgaataaaaaaatcgaatttaacagaatatcattttatttgctaaaaataattaattttaaaaaatttagaaaatattgtaaagttaaacccaaatcgattgagcagatttatgaagtaaaaaatttagctgtaaattttgttcatgattacctaaatttggaaaaataa

SEQ ID NO: 206691 - DNA, 772 bp, Unknown
  Bacterial polypeptide expressing nucleotide sequence isolated from the Sargasso Sea
attgatagatgagattcaaaagattaaatcaaaaattatccctttggatagtgagcataatgctattttacaatgctgcccagatggaaggaaaattgacgaagtcaaggaggttttgattactgcctctggaggcccattttttggtagctcagaggatgatttaaaaaatgtgagcatagaagaagcattagcacatccaaattggcaaatgggagcaaaaatatcggttgattcagcaactttaatcaataagtgtctagaattaattgaagcaagttacttatttgatctagatgaaaaaaaaataagactggccatccacccccaaagtattattcattcaattgttacttatatcaatggctcgagtattgctcaaatgagtaatccaagcatgaagatacctctagctagcgcccttggattgactcttggaaatagaaaaattccaatatcttttaatcctataaattttgacaaattggaactaaatttttttaaattccctgaagagcataattctttagaatccctagcaagggacattgcaaggtccaagaactcatctggaattatattcaatgcagctaatgagattggtgtggaagcttttcttgagaataagatacaatttactcaaattaaagaggtcattagtagaacttttgatacatcttgtttgtctaatgtttcaagcatagaggagatttttgaaattgataaagttgcacgcaatgcagctcataaggtgataaaatctcttaattag

SEQ ID NO: 206692 - DNA, 817 bp, Unknown
  Bacterial polypeptide expressing nucleotide sequence isolated from the Sargasso Sea
atggctaataaggaatcaataatttgtgggtggcaattcataagaaaagaattacaaaaaaggcatacaaggtttgtacctttggattctgagcatttttcaatatcgtctcttataaaagatgaaagtaaaaaaaatattaaaaaaatatatttaactgcttctggaggcccttttttatataaaaatttaaaaaatattaaaaatataaaacctaaatttgctttaaatcacccaaattggaaaatgggaaaaaagatatcaattgattcagctacattgatgaataaaatttttgaaataattgaagcaattaaaatatttgatatggaacgaagtaaatttgatatattaattcatccaaaatcttatttacatgctatagtgaattttaagaatgggctaacaaaattagtagcacatgaaacgacaatgcaaataccaatcgcaaatgctctatatctttcaaaaaataattatatttataatagcagtaatttcaattatcataaattaaatagtttaaactttataaagccaaatattaaaaattttcctcttttaaaaatattaaattacaaatttaaaaatacctattttgaaataattttagtctcgatcaatgatatgcttgttaaaaactatcttctaaataaaatttcttacatttctattcataacaagatgttagaattattaaaaaaaccgtattttataaaatattactcatctaaacctaagaatataaaagatatcaaatctatggtagaaattgtaaatcagtacattattaaaaatttaaaagttaatgattgaa

SEQ ID NO: 206693 - DNA, 853 bp, Unknown
  Bacterial polypeptide expressing nucleotide sequence isolated from the Sargasso Sea
catgacaaagaaagttgcaatacttggatcaacaggttcaattggaaaatctttattaaatattattgcaagtgataaaaataattttcaaatagttttattaacagcaaataaaaatcataaactccttttaaaccaagcaaaaaaatttaatgttaaaaacgtaattattaccaataaaaaaagttatgaaattttaaaagataggcttaaaaaaaataaatcaataaatgtttttaataattacaatagttttaataaaattttaaaaaaaaaaatttattacacaatgagttcaataagtggaataaatggtctttccccaactttgaaaataattaaatatactaaaaatatagcaatagctaacaaagagtctatcattatagcttggaatttaatttctaaagaacttaaaaaaaataaaacaaactttatacccgttgactcagagcacttttctatctggtatggattaaataattatgaaagtagcaacctagataaaatatacctaacagcatctggtggtccattttcaaatctagctttacaagaattcaaaaaaattaaacttaaacaggcattaaatcacccaaattggaaaatgggaaaaaaaatctctatagactctgcaacgatgattaataaaatttatgaagtaatagaggccaaaaacatatttaatattaattataaaaatataaaaattttacttcacccaaactcatatgttcatgcaatacttaaatttaataatggattaataaaattgattgctcatgatactacgatgaaaattcctattttcaacactctttattttaaccaatttaaaaaaaaattatttcaa

SEQ ID NO: 206694 - DNA, 907 bp, Unknown
  Bacterial polypeptide expressing nucleotide sequence isolated from the Sargasso Sea
attgttggtattgctggtcttgaaccgacaataaaatttgtatctcacagtaaaaaaattttattagcaaataaggaggcaattatttgcgggtggcaccttattaaaaatctgtctaaaaaaaataaaacgaaaattgttccaatagactcagagcatttttcaatttcagaattaaccaaagattacaaagataaagatattgaaaaaattttaataaccgcctcaggaggaccttttttagaaaaacccttgaaatctttcaaacacataagtgcttctgatgccgcaaaacatccaaaatggaaaatgggaaaaaaaatatcaatagactcttcaaacttaatgaacaaagttttagaaactatcgaagcctataaattatttccttttagcacaaaaaaatatcaaattattattcatccccaagcattagttcatgcaattgttttttttaaaaatggacaaacaaagcttctttatcaccaaacagatatgcgtatcccaatagcaaatgctatatacgaaaataactttgatgcaaaaatatttttaaaaaaccggcacaataaattattaaatttacaaaatttaaaatttctaaaagtagataaaaaaagatttccaattgttacacttttaaaaaaatattcagcaaaaaaatctggcccgatagtattaaacgcaagtaacgaagtactagtagacaaatttataaagggaaaaataacatttaaatcaatatttaattgcctgaaagcagttttgggggataaagattataaaaaatatgctataaaaagctcgcctaatatcaatgatatttataaaattgataaatgggcaagatttaagacattggagatagtaaaaaaaaagctaatcaatgaaaaaattattttataaa

SEQ ID NO: 206695 - DNA, 445 bp, Unknown
  Bacterial polypeptide expressing nucleotide sequence isolated from the Sargasso Sea
cctcaaagtattgttcatgctcttgtatcatttagcgatgggtctgtaatttcccatatgagtaatcatgatatgcgtattgccattagttatgcgctttcatggcccaaaagatatgatattggtatagaaaaattaaaaaataaaagtttttcaaatctatcatttgaaagagtcagaaagaatcaattcaaatgtcttgatttatgctctaaagctctgcaattgggtcataatgccccaactgtattaaatgcagcaaatgaagttgcagttgaaaaatttctcgaaaataagattaaatttattgatataccagttataattgaacatgcattgaataatatgaaacttacgaaaaaaaacacgttaaaatctattctggcatgtgacaaattaactagagatgaaatctcagattatataaaaattagatggaaataat

SEQ ID NO: 206696 - DNA, 907 bp, Unknown
  Bacterial polypeptide expressing nucleotide sequence isolated from the Sargasso Sea
atgaaaaaaaaaattattattttaggatcaactggctcaataggaaaaactacatttcaaattatacaaaaaaattctagtgaatttaatgttgttttattaacaacaaataaaaatattagtgaaatcataaatcaagccagatctttaaatgtaaagaatattattgtagctagtagagatcattatttaaaattaaaaaaaaacaataagaataaaaaattaaaaatttataataattttgatgtaattaataaaattttcaaaaaaaaagagatagactattgtatgtcagcaattactggattgaatggcttaaaaccaactttagatacaattaaattaagcaaaacaattgctattgcgaataaggagtctattatctgtggttggaatttaattgagaaaaaactaaaaaaatataaaacaaattttattccagttgactcagaacatttttcaatttggtccgttattaaaaattttaaaaatgatgacatagaggagataatcctaacagcttccggaggtcctttcttgaacaaaccactaaaatttattaaaaatgcgaatcctcttagagcaacaaaacatcctaactggaagatgggaaaaaaaatatcaattgactcagcaacattgattaataaagtttttgaaattatagaagcacaaagaatttttaaaattaataaaagtaaatttaaaattttaatacatccaaaatcatatattcatgcaatagttaaatttaagaatggattaataaaaatagttgcgcatgaaacaagtatgaaaattcctatatttaattcaatttattatgatgcaaataaacatatagaaacaaataaaataaatttagaagttttaaataatttaaatttatctaatcctgatttgaaaa

SEQ ID NO: 206697 - DNA, 777 bp, Unknown
  Bacterial polypeptide expressing nucleotide sequence isolated from the Sargasso Sea
catgaagaaaatcaatttactaatctatggagctacaggatcaattggagactcagttttaactatcattagaaagcatagagataggtttaatgttgttggaatgacatgtgataaaaatataaaaaaactatctatcttatcaaatgaatttgacactaaaaacattggcattgctacttacaataaggagctagattataaaaaatattttccagataaaaacatatattttacacttagtgagtttaacgaattaatcgctaaaaatgttgatataattatttttgcaatatctggtgcatcaatacttgctttgagcttagaaattgctaaatctggcagaattgtaggactagcaaataaagagtgtatagtgtctcttggaaatattctactagatgccgctaagtttcataaaacaaaaattattcctttagactcagagcataattcaatttatcaattattaaataataataagcattcttttagaacaataaccattacagcaacgggaggaccttttctaaataaaaaacttgacgattttaaaaacataaaagttgaggaagctataaatcatccagtttgggatatgggaaaaaaaatatccatagactcagctacaatggtaaataaaggcctagaggtaatcgaggctaaatatctttttgacttagatgtaagtaaaattaatgttctgatacatccacaagcaatgatacatggctttataacttataaagataattcaatattttcatttataagtta

SEQ ID NO: 206698 - DNA, 703 bp, Unknown
  Bacterial polypeptide expressing nucleotide sequence isolated from the Sargasso Sea
ttctatttttcaaattttaataatatcaaatttgatagttctaatatcaaaaaaatttatttaacagcatcaggaggtccatttagaaataagaaatttaacacattaacaaatgtttctttcaaagaagccactaatcatcctaaatggaagatgggttataaaaatagtattgactcggcaacattagtaaataaatgccttgaattaattgaagctcattatctatttgatattcctttaataaaattagatattttgatacatcctgaatcacttgtacattcaattattgaagatcataactatatttcaaaattaatatatttttataatgatatgaaaatccctttaattaattttttaaataataattcttatgacagcctcccaattattaatagatttgacttcctaaatgaattcagtcttaattttacaaaagtaaatactgagatatatcctgtatacaaattctttaaatctattgataaatcaaatcccagaaatctaattaaatttaatttgggaaatgaatacgctgtggatttatttaagcaaaaaaaaattaaatatgttgaaatattgcaattaattaaagaaataacttcattaaatatagattcagatgtaaataatattcataatattattcaatatcatgaaaatcttaaactctatatcaatacaaattttccataaa

SEQ ID NO: 206699 - DNA, 1114 bp, Unknown
  Bacterial polypeptide expressing nucleotide sequence isolated from the Sargasso Sea
tacatttaatattgttcaacaaaatgcaaaagattttgatgtagtacttttaacaactcattcaaatattaattttatattaagacaagcaaaaattttaaaagtaaataacataataattacaagtaaaaaagatttcttaattgcaaagaaaaaaaagattaaaaaaataaatatttataatgatttttctgtatataaaaaaatctttcataaaaaaattgactatacaatatcagctatatctggattggctggacttaaaccaacaatagatattattaaatttacaaaaaatatagcaatagcaaataaagaatcaattatttgtggttggaatttattaagcaaagaattaattaaaaataatacaaaatttataccagtagactctgagcacttttcaatatggtcaaatatacaaaatttaaatcttaatctcattgatcaagtaattattacggcttcaggaggtccctttttaaacaaaactaataaatttacaaaaaatgctacattaaaaaacgctttaagacatccaaattggaaaatgggaaaaaaaatttcaatagactcagctactttgatgaataaagtttttgaatttatagaggcaatgagaatttttaatttaagcaaagataaactcgatattttaattcatccaaaatcatatgttcattctattattaaattcaaaaatggtttaataaatattacagcgcatgatacaaatatgaaaattccaatatttaattcgatttatcaaccattctcaaaaaatattaaatctaaaaaaattaattttcaattgcttaacgatttaaatctatcaaaaccgtcatgtaaaaaatttccatcattaaatttaattaaatatataggtgatcaaacttcattgtttgagactattttaatcagcacaaatgataccttggtagatttatatattaaaaaaaaaataaaatttggtgatattattaaatatttaaataaaatattaaattttaaagaatttaaagtctataaacgtaaaaaacctactaatgtgcatcaaattttaaatttgaatgatcaagttagattgaaaacaataaaactatgtataaaatga

SEQ ID NO: 206700 - DNA, 467 bp, Unknown
  Bacterial polypeptide expressing nucleotide sequence isolated from the Sargasso Sea
taacattgacgtttctatgattgatattgtagttcatccacaatcgattatccactctatgatagagtttaaagatagctctattaaggcacagatgggtgttccagatatgaaggttccaatacaatatgcattgacatatccaaatcatttaagcgcgccttgggaaagattagattttaaattacttgctgatctgtcttttgaagctccagattttgacagattcccttgcataaaactcgcctatatgtctttagataaaatgggatcaactcctgctgttctaaatatggcgaatgattattcggtttataaatttttgaattctgaaattaagttcactgaaataccaaaaataatagaagctgcaatgatagatcatcaatgggttgaaaagccagatttagactatattagagaattagataattggactaaggattttgtgaataattttgattaat

SEQ ID NO: 206701 - DNA, 835 bp, Unknown
  Bacterial polypeptide expressing nucleotide sequence isolated from the Sargasso Sea
atgagaaaaaatatcgttattttgggttcgactggaagcataggagtaaatgctattgatgtaattaaacaacatccagaaaaatttaatgtaatcgcaattagcacaaacaaatcaattgatttaataattcaacaggctaaagagttaaaaccaaattatatttgtgttaaaaataaagaagatttaaataaaatttctaatgaattaaatgatccaaatttagaaattatttttggagaagattctcttgctaaattatctcaaattgaagaagcagattatgtacttaatgcaattgtaggttcagcaggtctaaaaagttctatgaatgctgttaaatctggaaaaaaattacttttagcaaataaggagccattggtaatgtgtggcgatttattaatgagatttgcaaacgataataatgcaattattcttcctattgacagtgaacataatgctattcatcaatgtattgaatcaaaaaataaaaaacatataaaaaaaattatgctcacggcaagtgggggaccttttttaaaaagagatttaaacacttttaattcaatatctgttaaagatgctttaaagcatccaacttggaaaatgggaaataaaattacgattgattgtgccacaatggttaataagggtttagaaataattgaggcaatgcatttatttgaaatgccaagtaatagagttgaagctataattcatcctcaaagcttgattcattcatgcgttttttttaatgataactctgtattaacacaaatgagcattagtgatatgaaaattccccatagcatactgcctagcatggcccgatagg

SEQ ID NO: 206702 - DNA, 605 bp, Unknown
  Bacterial polypeptide expressing nucleotide sequence isolated from the Sargasso Sea
tatgaaaaaaaaaattgccattttaggatccacaggttcaattggaactacatctttaaatatcataaaaaagaaaaaaaatttatttgatgttcagcttttgtcagcaaataagaattatcaaagtatttgtcagcaaatattaaaatttaaacctagatattttgtagtgacaaataataatatctttttaaaaattaaaaaaagatttaaaaacaaaagaactaaaattcttaacaattatgaaaatttatatttatctaaaaaaatcgacataactatcgcgtcaatcccaggtatagctggattaaaaccaacaattaatcttgttcgaaaaagtaaaaaaattcttttagctaacaaagagtctgtaatatgcggttggcagataataaataaccttgctaaaaaatataaaaccaaaattgtgccaatagactcagaacatttttctataatgaaacttttagaaaatcataaaaaaaatcaaatagaaaaaatttatataactgcatctgggggtccttttcttaatttgccaaaaagtaaatttaaaaacataaaacctaaagacgctataaagcaccccaaatggtctatgggaa

SEQ ID NO: 206703 - DNA, 364 bp, Unknown
  Bacterial polypeptide expressing nucleotide sequence isolated from the Sargasso Sea
aatgaaaaaacttaccctccttggatcaacaggttcaattggattaaatacactagatgtagtcaggatgtttccgcggcaattcaggattgaagcactgtcctgccgcagttcaattgaacagcttattgaacaaattagggagtttcaacccaagacggtgtgtgttgaaaaaaatgaaaacgctggtgagttaaggcaaatatttcctaataaggagttcgtctttggaatgcaaggcctcgaaaagatctccacaaacccagaaacagatctggtggtgtctggaattgtcggggctgcgggattaaagccaacattttcagctttaaaagctggcaagactgttgttttagcaaacaaa

SEQ ID NO: 206704 - DNA, 388 bp, Unknown
  Bacterial polypeptide expressing nucleotide sequence isolated from the Sargasso Sea
ttgaaatacattactgtgctcggttctactggttcaattgggactcaaactctcgaaatagctagtgagcagcctgataagtttaaagccgtagctctttcggcaggaagaaatattaatttattaacagaacaagttaaaacacataaaccagaagtagttgcgattgaggatgaaaatcttatagaagatttaaaagataatattaataacttagatttggatagtgctcccttggttttgagtggaaaggaggggattaacgctgttgcagcatgggataaggcagatactgtggttacagggatagtaggatgtgcaggcttaattccaacaatgtcagcaattaatgctgggaaaaatattgcacttgccaacaaagaaactt

SEQ ID NO: 206705 - DNA, 1153 bp, Unknown
  Bacterial polypeptide expressing nucleotide sequence isolated from the Sargasso Sea
atgaaaaaaaaaattgcaattttaggttccacgggatcaattggaaaaaatactattaatattttaaagaaagataaaaaaaacattaaaattgtccttttaacttcaaataaaaatattaaagaaatattaaagcaacaaaaaatttttaatgttcaaaacttaatcatcactgataagtctaaatttaaaattataaaagatattagtaaaaaacgtaattttaaagtttataacaactatgaatgtttgaaaaaaatttttaaaaacaaaattgattatgtaatggctgcgattactggtatcagcggacttgagcctacattaaaaattataaagtattcaaaaataatcgcaattgctaataaagaaagtatagtttgtgcttggaatttagtatctaaagaattaagaaaaaataatacagaatttatacctgttgactctgagcatttttcaatatgggaaatcttaaaaggttttaaaattaataatgttgagaaaatttatattaccgcttcaggtggaccattactaaatttgccaattaaaaaaattaaaaagatttcaaaaaaagagacacttaaacaccctaattggtctatgggaaaaaaaatttcgatcgattcatgtacgatgatgaacaaagtttttgaagtaatagaagctcaacgaattttcaatttaccatcaaataaaatagaaattttagtacacccaaagtcctacctacattcaatagtaaagtttaaaaatggaactgttaaattattaattcatgaaactgatatgaaaatacctatatttaatacattatatggaaatacagaaaaatcaataaacacaaaaaaaattaattttaaaaaactaaataatttaaatttacaaaagccgaatctaaataaatttcctttccttagattgcaaaaaaaaattccctcaaagatatcattatttgagaccgttttggtttcagcaaatgatgagatagttaaatattatttagatggtttaatagaatataatcagattttcccaaaattattaaaaattttaaacttaaagaaatttaaatctttaaaaaataaatccccaaaaaatctgcattcaatcaatcaattaaatgaatatgtaagatttgaaaaccagagaa

SEQ ID NO: 206706 - DNA, 586 bp, Unknown
  Bacterial polypeptide expressing nucleotide sequence isolated from the Sargasso Sea
atgaaaaaaaaatcaattataattctaggctctactggctctattggtgaaacatcattaaaggttataagagacaacaaaaaaaaatttagtattaaaatcttaatggctaattccaattatagaaaaatatttaatcaaataaaaaaatttaaaccaaaatattatatagttgaaaattatgaaacttttataaaaattaacaagaacaatccaaataaaaaaaccaaaatattaaatgtttacaaaaaattagataataagataattaaatcagatatactaatatctgcaattccaggactggctggattactcccaactattaaatttttaactcaaacaaaaaaacttttgatagccaacaaagagtcaattatatgtggatggaatttaattaaaaatattttaaagaaaaaaaaaattaagtttatcccaatagactcggaacatttttctattatgaaattattagagaataatccatcaaaaaatatagaaaaaatatttttaactgcttcaggaggaccattcttaaattatgatttaaaaaaaattaaaaatgcaaaacctaatgaagctataa

SEQ ID NO: 206707 - DNA, 580 bp, Unknown
  Bacterial polypeptide expressing nucleotide sequence isolated from the Sargasso Sea
ttgaaaaagatttttattcttggtgctacagggagtgttggagaaaatgcattatctgttatcgactcaaacaaagaaaaatttgaactaataggcatttctataaacagtaacgttgaaaaggctaacaagattattaaaaagcataatccaaagtacatttatattaacgataaattagttaaagaaaatatacttgtaacggaaaacgcaatcatttgtgaagatgataaagagctttcagatatcttcaattcaagtgatgttgatattgtaatctcagccatctcaggctttgctggaattaaaacgacattccaggcagcaaaatcaggtaaaaaggttcttcttgcaaataaagaaagtattgttgcaggcggatcattgttgatgaaaataattagagaaaataatacagaattagttccaattgatagcgagcataatgctatctttcaatgcttacctgaaacaaaatctacggaggatgtaaaacaaatagttattaccgcgtcaggaggacccttttatggaaagaatatagatgaactcaacaatatggagtccaagatgctctaaa

SEQ ID NO: 206708 - DNA, 775 bp, Unknown
  Bacterial polypeptide expressing nucleotide sequence isolated from the Sargasso Sea
aaataaaacggtggttattccaatcgactcagagcatttttcaataaaacagcttacttataattataaaaatgcggatataaaaaaaatatacctaaccgcttctggtggccccttccttaaaagacctcttcgttcttttaataaaataaaatccaaagatgcttgcaaacatcccaattggcgaatgggaaaaaaaatttcaatagactcctcaaatttaatgaacaaaattttggaattaattgaagcatataaattatttttatttgatccaaaaaaatatgaaattttaattcatccacaatcattaatacatgcaatagtaacttttgagaatggtcagagtaaatttttatatcatgatactgacatgagaattccaatctcaaatgcaatttatgataatcaggttaatataaaaaatataattaaaaaaaataacaattttttagataaattaaaaaatatcgaatttataaaagttgataaaaaaagatttccaattgttacctttattaataataaatttttatcaaaatcagcacccataatactcaatgccagcaatgaagttttagtcgatagttttattaaaaacaaaataccctataacggaatctttaagacattaaatagagtttttaaggatagagatttcggcaaatatgctgtaaaaaagacacctagtatttatgaaatttacgaaatcgataaatgggctagaaaaaaaactgtgcaattaatatcgagaaattatgagaaatttatttaa

SEQ ID NO: 206709 - DNA, 367 bp, Unknown
  Bacterial polypeptide expressing nucleotide sequence isolated from the Sargasso Sea
gctgggctccacgggctcgatcggcacccagacccttcagatcgccgaggagttccccgatcagttccgggtggttgccctcacagcagggcgcaatctcgatctcctcgttgagcagatccaacgccaccagcctgagctcgtggccctcgccgatgccgagcggctgccggaactgcagcagcgtctcgacgccctcgacccctcccaaaagccgggtcagccccctcagctggtgggcggtccggatggactcaacgtggcggcctcgtgggacacagccgatctggtgggtcacggaatcgtgggctgcgcggggctccctgcgactctggccgcccgtcgcgccgggaaggatctgggccct

SEQ ID NO: 206710 - DNA, 1144 bp, Unknown
  Bacterial polypeptide expressing nucleotide sequence isolated from the Sargasso Sea
atgaagaaaatttcaatttttggttttacaggcaatttaggtactcaagccttagatatccttaaatcttataaaaaccaatttgaatttgatatttttgtttgtgataaaaaccttaatcttgcaaaaagtgttgtaagggaatttaatccaaaatctatttttttctcttgcgaggaagtcaaaaaagagtttaaaaatctcgaactaaatgtcgaggttcttgattgtattgaagatgttgccgagagaatagagaacaacccaagtgatattttcttatcagctataagttcttatgaggctcttgaacttacaattgcggcagcaaaatcaggaaaaaaactcttactagcaaataaggaatcattagttgtttttggtaaatttataatggataaagtttcctcatctggaacagaattaattccaattgattcagaacatttttcacttttttcgtctcttaggagtctaaataaaaatgatataaaaaagatcttcataacagcttcaggcgggccttttttaggacaaaatctagaacaaataaaaaacaaaaaagcagttgatgctctcaagcacccaacgtggaagatgggcgacaaaattacaattgattctgctactctcataaataaatgctttgaacttattgaggcaaaatttctttttaatttagatcctgaaaaattagacatattgattcagccccaaagcattattcattcattgattgaattaaatgatggttcagtagaggcccaattatcaaagccaagtatgattattccactttcgtatggactgctggatagtagatcagatgaagtaagaaataaattttctttaaatatgtttgaggacgaaataaatttacaattaaagttctttcctgaagatagaaaagaattattaaaaattactagggagattatgaatcttggaggaaatagagggctcatttttgcaacactgaatcaaatagctgtaaataaatttttaaaagatcaaattaaatttggagaaatttatgaatttatttataaaaactattttaattttgaaaaaaaagaattagatacattagaggatctaaggtccgctcataaggatatacttgagaaattaaataaatcatgac

SEQ ID NO: 206711 - DNA, 1510 bp, Unknown
  Bacterial polypeptide expressing nucleotide sequence isolated from the Sargasso Sea
tggagccgctatcacagatacagccactgtaacctttacagttggcgcagctgatccaaccaatggaaacaccacattggttgcagcaccaacaagtgttgtcgctgatggctctacaacctcaagcgtgaccgtgacactggcagatgctagtggcaatcttctcactgcaagcggtggtacagttgcactatcctcgacaggtagcgcaacaatcggggccgtgaccgataatggtgatgggacttatacagcaacagtaacaaatacagttgcagaaagtgtgacaatctcaggcacactggatggagccgctatcacagatacagccactgtaacctttacagttggcgcagctgatccaaccaatggaaacaccacattggttgcagcaccaacaagtgttgtcgctgatggctctacaacctcaagcgtgaccgtgacactggcagatgctagtggcaatcttctcactgcaagcggtggtacagttgcactatcctcgacaggtagcgcaacaatcggggccgtgaccgataatggtgatgggacttatacagcaacagtaacaaatacagttgcagaaagtgtgacaatctcaggcacactggatggagccgctatcacagatacagccactgtaacctttacagttggcgcagctgatccaaccaatggaaacaccacattggttgcagcaccaacaagtgttgtcgctgatggctctacaacctcaagcgtgaccgtgacactggcagatgctagtggcaatcttctcactgcaagcggtggtacagttgcactatcctcgacaggtagcgcaacaatcggggccgtgaccgataatggtgatgggacttatacagcaacagtaacaaatacagttgcagaaagtgtgacaatctcaggcacactggatggagccgctatcacagatacagccactgtaacctttacagttggcttgagtgtcacaactagtgaaaaatctccaagagaagaatttttagaattagaagatgatatcagaaatgaaataaaatttaataccaatatcaatatcaatttgtttttgaaaacaacaaatacggccgtttcttcagctcgagaccgttatatctccaatcgtatgatgaattcctcttcaaaaattgaaaaccaattctctgaaggacctgtaagactcgaaaaagataatagtaacactgcaagtaattctgaaaagactaatggtgtaattcaaattgataatgataccgaaaactcttttaatctaagatcttcaacccggggaacagttgctgatgggcagatatacactactcataattattttaatggaaaagtagcacggtatacgggaacaaaatttaactttacgaaatcagaaaacaaagcaaagaccggaagtgccacaagccaaattatttttgagcaaaaaaaatcagacgaactgacaatcggttattttacaggttcatctttgagtaagtattctaattcagaacaa

SEQ ID NO: 206712 - DNA, 697 bp, Unknown
  Bacterial polypeptide expressing nucleotide sequence isolated from the Sargasso Sea
ttgaaaaagatattcattcttggtgcatctgggagtattggagaaaatgctctatctgttatcgactcaaacaaagaaaactttgaactagtaggcatttcggtaaacagtaatgttgaaaaggctaacaagattatcaaaaagcataatccaaagtacatttacataaatgataaatcagcaatagaaaatatactaaaaactgaagatacagttatttgtaaagatgagaaagagctttccgatatcttcaattcaagtgatgttgatattgtaatctcagctatatcaggttttgctggaattaagtcgactttccatgcagcaaaatcaggtaaaaaggtccttcttgctaataaagaaagtattgtggcaggcggatcattactaatggaaacagtaagagaaaataataccgaactagttccaattgatagcgagcataatgctattttccaatgcttacctgaatccagatcaacacaagatgttaagcaaatagttattaccgcctcaggagggccctttcacggaaagaatatagatgaactcaataatgttcgagtccaagatgcgctcaatcaccctaactgggaaatgggatcgaagatttcaatagattcagctactcttgtaaataagtgtttggaactcattgaagcatgctatttatttgatatggatgagagtttcttga

SEQ ID NO: 206713 - DNA, 550 bp, Unknown
  Bacterial polypeptide expressing nucleotide sequence isolated from the Sargasso Sea
atgacaaaagatctaataataattggttcaactggttcaatcggcaaatccacacttaatataataaaaaaaaataaaaaaaaatttaaaattaaattattaacaactaatacaaatatacaacaaattttcgaacaagctttagaatttaaagttaaaaaagttgttataaatgataaaaaaaattttcttaaatttagtaatttatttaaaaaaaaaagaataaaagtttatttcaacattgataatgcacttaaacaaattaaaaaaaaagtatattttactgtgagtgcaatttctgggattgaaggcttagagccaacattaagtgtaataaggtatacaaaaaatctaggcattgctaacaaagagtccatcatatgcggatggaaaatattggttaaagagttaaggaaatataatacaaactttattccacttgactcagagcatttctctgtatggtcaataattaaagatgagaacaaaaaaaatataaaaaaaaaatacctcactgcttctggaggtcctttcttaaaaaaaaaactaa

SEQ ID NO: 206714 - DNA, 692 bp, Unknown
  Bacterial polypeptide expressing nucleotide sequence isolated from the Sargasso Sea
atgcttatctggtcagagaagccccgatgacgttcaaaatataacaattactgcatctggaggaccttttataggaaaaaaaatttctgatttaaaagatgtaaccaaagatgatgccctaaatcatccaaattgggacatgggtagtaaaatttctattgattctgcaacgttagttaataaatgtcttgagcttatagaagctaaatacttatttgatttagaggaaagtatatttgatcttgttattcacccacaaagcatagttcattcagttgtaacctataaagatggttcgagcatttgccaaatgagcatgcctgatatgcgagttcctattgcacatgctttatctaatgagcacagactcccaatcaattttgagaagattaattttaatgacctaaatttatcatttcatgcgtttccagaagatagattgcaaattcaaaaaatagctagagaagtttgcaatagcggtgggcatcttgggacaatttttaatgctgcaaatgaagtggctgtagaaagttttctaaatgatcagataagctttgataaaatttatgaagtaattcatcgaacttttgataataactccatgtctaaagatgtatcgattgaatcaatatatgaggctgatacgcaaacacgcattaaagcaaagaaggtggtaaaatcgataacctgaa

SEQ ID NO: 206715 - DNA, 931 bp, Unknown
  Bacterial polypeptide expressing nucleotide sequence isolated from the Sargasso Sea
ggctgtgcaggcctgctgccgaccctcgccgctgttcgcgctggcaaggacctggccctggccaacaaggaaacactgatcgcagcgggaccggtggtgctgccggagctcaagaagagcggcagtcggctgctgccagcggactcggagcactccgccattttccagtgcctgcaaggcaccccctgggcggagaacgcccgactctcgacaggagtccccacccctggtctgcgtcgcattcagctcaccgcctcgggtggagccttccgggactggaaagccgaagaccttgaaaacgccaccgtggctgatgcaaccagccaccccaactggagcatgggacgcaagatcacggtggattcagcctcgctgatgaacaaagggctggaagtgatcgaagcccactatctgttcggcctggattacgaccacatcgagatcgtgattcaccctcagagcatcatccactcgatgatcgaactggctgattcctccgttctcgcccaactgggatggccagacatgaaattaccgatcctttattgcctgagctggccctccaggctggaaacaccatggcgccggttggatctcacggaggtgggacaactgaccttccgtgcgcccgatcccgccaagtacccctgcatgcaactggcctacgcggcagggagggccggcggcacgatgccggccgtcatgaatgccgccaatgaggaagcggtcgctcaattcctcgaggaaaaaatccacttcctcgacatccctgtggtgatcgaggcggcatgcgagcgccacaaggctgatctgattgcccacccccagctcgaggacgtgctggctgtggatcaatgggcccgcatggccgtacgggaacaagtgaagcgtggcactacccgggtcccgttggcagcgctggcggcatgag

SEQ ID NO: 206716 - DNA, 739 bp, Unknown
  Bacterial polypeptide expressing nucleotide sequence isolated from the Sargasso Sea
taaaattattccattagactcagaacataatgcaatatatcagatattgcagaatgaaaataaaaataacataaaaaatatagtcctgactgcctcaggtggaccatttttaagaatgaataagaaaaattttaaaaatattactgtagcagatgctttaaaacatcctaattggaagatgggaaaaaaaataactatagactcagcaacgctggtaaataaaataatagaggttattgaggcatctattttatttaatttaaatttaaaacagattgatattttgattcatccggcatctttaatacatggaattgttaactttgtagatgggtcttctcatttggtagcaagctcgccagatatgaaagtacctattagttttgctctaagttggcctgatagatattttaatcaagtaaaattcatagactttgtacaaaataatgatttgaattttataaaacctgattacaaaaaatttcctgcactatctttaaaaaaaatagttagcaatagtctttttacaaaatctactattattgttttaaatgcagctaatgaaatagccgtagataattttttaaaaaaaaatataaaatttgatgatatagtaaaaactataaaaaaaactatttataaatttaatcatattgaggttaaaacattaaatgatatattgtctgtggattgtgaagctagattattaacaaataaaattattaaaaaaaataattag

SEQ ID NO: 206717 - DNA, 946 bp, Unknown
  Bacterial polypeptide expressing nucleotide sequence isolated from the Sargasso Sea
ttaactgaacaagttaaaacacataaaccagaggtggttgccattgaggatgaaagtcttatagaagatttaaaagataatattaataacttagatttggatgatgctcccttagttttaggtggaaagcaggggattaacgcagttgccgcatgggataaggcagatactgtggtaacagggatagtcggctgtgcaggcttactcccaacaatgtcagcaattaatgcgggaaagaatattgcacttgctaacaaagaaactttaattgcggcaggaccaattgttattcctgcattaaagaaaaataatagtaggcttttacctgctgattcagaacactctgctatctttcaatgtttacaaggattacctaattatgaaaatgcagatttttcaacaggagagatgactaaaggtttaaaagccatacacttaacagcttctggtggtgctttcagagattgggccgttgaggatttaaagcatgtcacagtggaagatgcgacttcacatcctaattgggatatgggaaaaaaaataactgtagattctgcaactcttatgaataaaggattagaagttatagaagctcattatttatttgggacctcttacgaaaatatcgaaatcgttatccaccctcaaagtattattcattcaatgattgagatggaagattcttcagtattagctcaattaggttggccagatatgaagctacccattttatatgcgatgagttggcctgaaagatttaaaacaaattggaaaagattaaacctaagtgaaattgggaaattaacttttaaagagccagacgagtttaaatatccatgcatgggacttgcctatgccgcaggaaaatcttctgggactatgcccgcagtcttaaatgctgctaatgaaatggctgttgaacaattccttaaagaaaaaatttctt

SEQ ID NO: 206718 - DNA, 952 bp, Unknown
  Bacterial polypeptide expressing nucleotide sequence isolated from the Sargasso Sea
aatagggactcaaactctcgaaattgctagtgagcagcctgataagtttaaagccgtagctctttctgcaggaagaaatattaatttattaactgaacaagttaaaacacataaaccagaggtagttgcaattgaggatgaaagccttatagaagatttaaaagataatattaataacttagatttgaatgattctcccttgattttaggtggaaagcaggggattaacgcagttgcagcatgggataaggcagatactgtggtaacagggatagtaggctgtgcaggcttaattccaacaatgtcagcaattaatgcggggaaaaatattgcacttgctaacaaagaaactttaattgcggcaggaccaattgttattcctgcattaaagaaaaataatagtaggcttttacctgcagattcagaacactctgctatctttcaatgtttacaaggattacctaattatgaaaatgcagatttttcaacaggagagatgcctaaaggtttaaaagccatacacttaacagcttctggtggtgctttcagagattgggccgttgaggatttaaagcatgtcacagtggaagatgcgacttcacatcctaattgggatatgggaaaaaaaataactgtagattctgcaactcttatgaataaaggattagaagttatagaagctcattatttatttgggacctcttacgaaaatatcgaaatagttattcaccctcaaagtattattcattcaatgattgagatggaggattcttcagtattagctcaattaggttggccagatatgaagctacctattttatatgcgatgagttggcctgaaagatttaaaacaaattggaaaagattaaacctaagtgaaattggaaaattaacttttaaagagccagacgagtttaaatatccatgtatgggacttgcctatgccgcaggg

SEQ ID NO: 206719 - DNA, 974 bp, Unknown
  Bacterial polypeptide expressing nucleotide sequence isolated from the Sargasso Sea
attgaaatacattactgtgctcggttctactggttcaatagggactcaaactctcgaaatagctagtgagcagcctgataagtttaaagccgtagctctttctgcaggaagaaatattaatttattaactcaacaagttaaaacacataaacctgaggtagttgcaattgaggatgaaagtcttatagaagatttaaaagataatattagtaacttagatttggatgatgctcccttggttttaggtggaaaacaggggattaacgcagttgcagcatgggataaggcagatactgtggtaacagggatagtaggctgtgcaggcttaattccaacaatgtcagcaattaatacggggaaaaatattgcacttgctaacaaagaaactttaattgcggcaggaccaattgttattcctgcattaaagaaaaataatagtaggctattacctgctgattcagaacactctgctatctttcaatgtttacaaggattacctaattatgaaaatgcagatttttcaacaggagtgatgcctaaaggtttaaaagctatacacttaacagcttctggtggtgcttttagagattgggccgttgaggatttaaagcatgtcacagtggaagatgcgacttcacatcctaattgggatatgggtaaaaaaataactgtagattctgcaactcttatgaataaaggattagaagttatagaagctcattatttatttgggacctcttacgaaaatatcgaaatagttatccaccctcaaagtattattcattcaatgattgagctggaagattcttcagtattagctcaattaggttggccagatatgaagctacccattttatatgcgatgagttggcctgaaagatttaaaacaaattggaaaagattaaacctaagtgaaattgggaaattaacttttaaagagccagacgagtttaaatatccatgcatgggacttg

SEQ ID NO: 206720 - DNA, 834 bp, Unknown
  Bacterial polypeptide expressing nucleotide sequence isolated from the Sargasso Sea
aatattagaaaaatatgcacctgactacgtttatattgaagatcatgattcatttaaaagtctttgcagtaaagacaaggaaagatatttaaatggcgatgaggagcttgaaagacttattaatagagatgatgtcgatattattgtatgtgcaacatctggatttgcgggcttaaaaactgcatatattgcatccaagactggaaaaaagatcttattagcaaataaagaaagtgttgttgcaggaggagatttaattttaccctcagcaaaagagaataatactaaaattatcccaattgatagcgagcacaatgcaatttttcaatgtttatctgctgaaaaggggactgaagacgtaaagaatattactattactgcatctggtggaccttttattaatacccctattcaagagttgcagcatgttactgttgaggatgctcttaatcatcctaattggaaaatgggaagcaaagtttcgatcgattctgctactttagttaataaatgcttagagctaattgaagcgagatatttatttgatttagatgaaaaatattttgatttagtcattcatccacaaagcataatacattcaatagttacgtatatagatggctcaagtatatgtcagatgagttctcctgacatgagggttccaattgctcatgctctgtctgaagagaacagaataccaatagattttaaagtcttggactttagtaacttaaatttatcttttcaagagtttccatccgatagatcgaagatacaagatattgcaagggaagtatgtaataaaggtggatttctaggaactgtattttatgc

SEQ ID NO: 206721 - DNA, 583 bp, Unknown
  Bacterial polypeptide expressing nucleotide sequence isolated from the Sargasso Sea
atattgggaaaaaaaataactgtagattctgcaactcttatgaataaaggattagaagttatagaagctcattatttatttgggacatcttacgaaaatatcgaaatagttatccaccctcaaagtattattcactcaatgattgagatggaagattcttcagtattagctcaattaggttggccagatatgaaactacccattttatatgcgatgagttggcctgaaagatttaaaacaaattggaaaagattaaacctaagtgaaattggaaaattaacttttaaagagccagacgagtttaaatatccatgcatgggacttgcctatgccgcaggaaaatcttctgggactatgcctgcagtcttaaatgctgctaatgaaatggctgttgaacaatttcttaaagaaaaaatttcttttcaagaaattccaacatttataagtaaagcttgtgaatcacatatgaagaatttgaatttaagtcccgaattggaggatattcttgaaatagacaattgggccagactttttgttgagcaagaaattaaaaaagggaaaaaatacgtaagtattggataaa

SEQ ID NO: 206722 - DNA, 703 bp, Unknown
  Bacterial polypeptide expressing nucleotide sequence isolated from the Sargasso Sea
gagatacctaaaggtttaaaagccatacatttaacagcttctggtggtgctttcagagattgggcagttgaggatttaaagcacgtcacagtggaagatgcgacttcacatcctaattgggatatgggaaaaaaaataactgtagattctgcaactcttatgaataaaggattagaagttatagaagctcattatttatttgggacctcttacgacaatatcgaaatagttatccaccctcaaagtattattcattcaatgattgagatggaagattcttcagtattagctcaattaggttggccagatatgaaactacctattttatatgcgatgagttggcctgaaagatttaaaacaaattggaaaagattaaacctaagtgaaattggaaaattaacttttaaagagccagacgagtttaaatatccatgcatgggacttgcctatgcagcaggaaaatcttctgggactatgcctgcagtcttaaatgctgctaatgaaatggctgttgaacaattccttaaagaaaaaatttcttttcaagaaattccaacctttataagtaaagcttgtgaatcacatatggagaatttgaatttgagtcccgaattggaggatattcttgaagtagacaattgggccagactttttgttgagcaagaaattaaaaaagggaaaaaatacttaagtattggataaa

SEQ ID NO: 206723 - DNA, 709 bp, Unknown
  Bacterial polypeptide expressing nucleotide sequence isolated from the Sargasso Sea
atgaataaaaaaagaatttctatttttggagctacaggttcggttgggcaaaatacacttgatttaatttctcgtgatagagattcctacgaaattgtggtgctaactgcaggttcaaacatcgatttactcataaaagcagctttggaattcaaacctcaggccgttgtagctgcaactaatgatcaatttgaagagttaaaaaatgctttaagaaatactcaaatcaatattggtacaggtagagaggcactactcgaaagtgcttctagaaagtgtgatctggcattttccgccattgtaggtgctgcaggccttgagccaggattgattgcactggaaaacggagctgatttagcgctggcaaataaggaaagtatggttgcagcaggagatctggtaaagcaaaaggcctctaaaaataaatgtaaactaataccagttgatagcgagcactcagctatttttcaagcgctacatggagagaatgttaactcgatcgagagggttattttgactgcctctggcggcgcattccgagattggacaattgaggaaatagccaaggccactcctgagcaggcatcaacgcatccaaattggaatatgggtcaaagaattactattgatagtgcatcgatgtttaataaggccttggaagtaattgaagcgaaagagctttttaatctggcgtcaaagcaaattgagg

SEQ ID NO: 206724 - DNA, 802 bp, Unknown
  Bacterial polypeptide expressing nucleotide sequence isolated from the Sargasso Sea
taataaagaatccattatttgtgcatggaatttaatcgaaaaacaattaaaaaaaaacaaaacaaagtttattccggtagattcagaacatttttctatttggtctttagttaaaaatataaaaaattataaaatagataagattttaataactgcatctggtggccctttcttaaatttacctattaaaaaatttaaaaatattaaacccaaagatgctttaaaacatccaaattggataatgggaagaaaaatttctgtagactcagctacgatgatgaataaagtttttgaaattattgaagctcaaagaatttttaaagtaaatttaaataaatttgaaatattaattcatccaaattcatacttgcatgcaatagttaaatttgaaaatggactaacaaaaatgttagtgcacgatacaagtatgagtattccaatatttaatacaatttattctgaaagctctcgaaaaataaaaaataatactattaatctatcatatttgaataatcttaatttaagcaaacccaatgtaaaaaaatttcctaccttaaaaatcattaaactagttccaaaaaatatttcactatttgaaacagttattatcgcagtaaatgatgaactagttaattattttttgaaaggtaaaattagctttttagatatgcaaaaatatttgttaaaaataataaagtttagccaatttaaaaaatattgttataaaaaacctcaaaatatcaatcaaataacaaaagtaatggaagaagctagattgaaaactaagaatgtatgtgtatag

SEQ ID NO: 206725 - DNA, 585 bp, Unknown
  Bacterial polypeptide expressing nucleotide sequence isolated from the Sargasso Sea
tagaagaagcattaaatcacccgaattggagtatgggaaataaaataacaattgattcagcaactatgatgaataaaggtttagaagtgattgaagctcgttggttatttgatcttaaaattcatcaaattgatatattgattcaccctcaatctataatacattctatggtggagtttaatgatagatctataaaagcccaattaggaatacctgatatgaaaattcctattcagtatgcgcttacatacccaacacatttattatctgattggaaagagcttgatttagctaaaattggtaaactaacttttgaagaaaaggatatagaaaaatttccttgcatcgaacttgcatatgaatcattgcggagtggtggatcaactcctgctgtacttaatgtggcaaatgataatgcagtttatagttttttaaataaaaagattaaattcacggatatacccattataattgaagaagcttgtagcacacatgattttattaaaaatccaaatttagatgaattattagaattggaactttggactaatgaattcgtaaagaataaaattgataataaataaa

SEQ ID NO: 206726 - DNA, 697 bp, Unknown
  Bacterial polypeptide expressing nucleotide sequence isolated from the Sargasso Sea
ggacaagatacgggatcctgccggtgccggtatcacgcgtatactgctgacggcctccggcggccccttccgcgagcactccgccgaggacctgcggtcggtaacgccggcgcaggcctgtgcccatccgaactggtccatggggcagaagatttccgtggattctgcgaccttgatgaacaaaggccttgagctgattgaagcctgctggctgttcaatacaacaccgcagaaagtcgaggtgcatgttcaccccgagagcattgttcactccatggttgagtatgcggacggctctgtgttggcccagcttggcagcccggatatgaaaacgccgattgccaatggcctggcctggccggagcgtattgacgctggtgtcccgcctctggacctgttcgcgatcggccgctttcactttgagcggccagatctggtgcgcttcccctgcctgcgcctggctgccgaagcgtttgaggcgggtggcactgccccggcggttcttaatgccgccaatgaagtggctgttgccgcttttcttgagggtagcctgtgtttttcggatatccccgttatcatagagcgaacgctcgctgtgaccgccgttgagccagccgacaactttgacgttatcttcgccaaggataaagaagcacgggcttgtgcacgggaacagataggtctgttaactgtctga

SEQ ID NO: 206727 - DNA, 739 bp, Unknown
  Bacterial polypeptide expressing nucleotide sequence isolated from the Sargasso Sea
gccgacgctggcctgcccacgcaggcccatgcaggcacgccggccctggatgcgctggtctccggtccggagtgcgacaccgtcgtggccgccatcgtcggcgccgcgggcctgtcgtccaccctggcagcggcacgcgccggcaagcgcctgctgctggccaacaaggaatcgctggtgctggccggcgaactggtgacccgcgcagcggacgcatcgggcgccgagatcatcccgatcgacagcgagcacaacgccatcttccagtgcctgcgttcacgacaggctcagggcgatgtcagccgcatcgtgctgaccgcctcgggcggtccgttccgcgggcgccgccgcgacgagctggcgcaggtgacgcgcgaacaggccgtggcccatcccaaatggtcgatgggacccaagatctcggtcgattcggccaccctgatgaacaagggactggaactgatcgaagcccaccacctgttcggcgtggggcgcgagcggctcgacgtgctggtgcatccgcagagcctggtgcattcgctggtcgaattcgtcgacggctccacgctggcacaactcggcctgccggacatgcggacctcgctggcggtcggcctgggctggcccgagcgcatcgcctcgggcgtcggcggcctggacctgctgcggcacccgcggctggaattcgaagcccccgacaccgacgcctttccctgcctgcgcctggcctgggaggcga

SEQ ID NO: 206728 - DNA, 547 bp, Unknown
  Bacterial polypeptide expressing nucleotide sequence isolated from the Sargasso Sea
catgctgactgcttcaggaggaccattccttaacacccccataaacgagcttgcttcaaaaacacctgaacaggcttgtaaacaccctaaatggaaaatggggagaaagatttcagttgactcagcaacgatgatgaataaagggctagagataatcgaagcgtcatggttatttaatatagatcctgattcgattaatgttgtcattcatccgcaaagcattattcattcattagttgagtataaggatgggtcggtattagctcaactaggaaatcctgatatgcgtattcctatatctttcggtctagcatggccagatagaattaaaacaaaggtagagcgattagatttatttgatattagtcagtttgattttaaaaggccggaagaagatcggtttccctgtttaaggctcgcacgcgaagcaattaaacaaggaggaacaagtagcgctattttaaatgcggcgaatgaggtcgcggtgaacgagttcttaaacaataatttaaaatttacagatattgctattgttatagattctgta

SEQ ID NO: 206729 - DNA, 652 bp, Unknown
  Bacterial polypeptide expressing nucleotide sequence isolated from the Sargasso Sea
atgaagaatattgttctcttaggagctactggcagcattggaaaaagctgtttgaatgtgattaggcaaaataaagaacattttcatttgtttggtattggatttgggagtaacttagacaaggctcaagaaattgtgcaagaatttaatccagaccatatttatgttgctcaatctcaggctgataaatcgcataatttttggaaaattaattcgaacatattaaccagcgaagatgagttacaagcacttattcaagatccagatgtagatatagttatttcagctatttcaggatttgctgggttgaaaacaagttatttcgctatcgaggctggcaaaaaaattcttgttgcaaataaagaaagtattgtagcggccggagatattttaatgccactcgctgagttgagagactctgaaattattcctgttgatagtgagcacaatgctttatatcaatgtcttcctcgtgaaagaaatcttaatgaaatttctaaaatactaattaccgcttcagggggcccttttagagaaaagtctttgagcgatttgaagggagtatcacttgaggatgctcttaagcatcctacatggagcatgggagctaaaattacaattgattcagctactcttgtaaataaatgcttag

SEQ ID NO: 206730 - DNA, 756 bp, Unknown
  Bacterial polypeptide expressing nucleotide sequence isolated from the Sargasso Sea
tcacgatatcatgaaatattagaaaaacattcacctgactacgtttatgttgaagatcatgatctatttaaaagtctttgcagtaaagacaaggaaagatatttaaatggcgatgaggagcttgaaaaacttattataagagatgatgttgatattattgtatgtgctacatctggatttgcgggcttaaaaactgcatatattgcatccaagacaggaaaaaagattttattagcaaataaagaaagtattgttgcaggcggagatctaattttacctttagcaaaagagaataatactaaaattatcccaattgatagcgagcataatgcaatttttcaatgtttatctggtgagaagggtactgaagacgtaaagagtattaccattactgcatctggtggaccttttattaatgcctctattcaagagttacagcatgttactgtagaggatgctctaaatcatcctaattggaaaatgggaagcaaagttacgatcgattctgctactttagttaataaatgcttagagctaattgaagcgagatatttatttgatttagatgaaaaatattttgatttagtcgttcatccacaaagcatagtacactcaatagttacttatattgacggctcaagtatatgtcagatgagctctcctgacatgagggttccgattgctcatgcactttctgaagagaacagaataccaatagattttaaagaattagactttagtaacttaaatttatct

SEQ ID NO: 206731 - DNA, 911 bp, Unknown
  Bacterial polypeptide expressing nucleotide sequence isolated from the Sargasso Sea
tctatctgtcatcgactcaaacaaagaaaactttgaactagtaggtatttcggtaaacagaaatgttgataaggctaacaagattatcaaaaagcataatccaaagtacatttacataaatgataaatcagcaaaggaaaatatactaaagacagaggatgcagttatttgtgaagatgataaagagctttccgatatcttcaaatcaagtgatgttgatattgtaatctcagccatttcgggttttgctggaattaagtcgactttccatgcagcaaaatcaggtaaaaagatccttcttgctaataaagaaagtattgttgcaggcggatcattgctgatggaaacagcaagagaaaataataccgagctagttccaattgatagcgagcataatgctattttccaatgtttacctgaatctagatcaacacaagatgttaagcaaatagtcattactgcctcaggagggccctttcacggaaagaatatagatgaactcaataatgttggggttcaagatgcgctaaatcatcctaactgggaaatgggatcgaagatttctatagattcagctactcttgtaaataagtgtttagaactcattgaagcatgctatttatttgatatggatgagagcttctttgagcttgtaatccaccctgagagcattgttcattcgatagttacatttaatgatggatcttcaatttgccaaatgagtaatcccgatatgcgtgtacctattgccaatgcaatgtcatatgataaaagactttcaattccatttcagcctattgattttaataatctcaagcttaactttgaaatctttccaaatgacagagctgaaattgttcatctggctagagaggctgtccgagaagatagctcaaagggaatttatttta

SEQ ID NO: 206732 - DNA, 725 bp, Unknown
  Bacterial polypeptide expressing nucleotide sequence isolated from the Sargasso Sea
gcactgcgctcttcaccagtgccttcgatctagtgaccctgaaggtcaagctcgccatctccaccaattggttctgactgccagcggcggaccatttagaggattgagttcaatagagctggagcaggtaaccgttgaagaggcgcttgcacatccgacctgggcgatgggtccgaagatcacggtcgactcttcaaccttgatgaacaagggtctagaggtcatagaggctcacgaactgtttggagtcgattacgaaaagattgaggtcgtggttcatccgcaatcaatagttcactcgatggcgacctttaccgatggcacaactattgcccagttatcggaaccagacatgcgcttgccaattgcctacgcgcttgcttaccccgaaaggatctcgacatcgtttgggtctattgactgggggaaggcacaatcccttcactttgaaccaccagataaaaagacatttccctgcctcaacttggcctattcggccggtaaaaccggcggtacagctccagcgtggatgaatggcgcgaacgaagccgccgtggacgcgtttttggatggccacattccatggcaggaaattgccgcatcgattgagaatgccctggaacagcacgacggagcgaatccagactctgttgaagcaatagtgcgagccgaccagcgtggccgtgaatgtgtcgcgactcggcttgcgaagaggaactgctagt

SEQ ID NO: 206733 - DNA, 693 bp, Unknown
  Bacterial polypeptide expressing nucleotide sequence isolated from the Sargasso Sea
aatgaaaaaaaaaattgctattttaggttcaacaggttcaataggaacagcctcattagatattattgaaaaagatttaaaaaaattcaaaatttatttattatcagctaattcaaattattctctaataaataaacaaatcaaaaaatataaaccaaatatttttgtaataaataatttttatgtttataaaaaaattcttgaaaaatatagaaagaaaaatattaaaatatataataaattttctgatcttattaaaactaaatttaaatttgatataacaatttcagcaatagttggaatagccggacttgatcctacaataaaatttacaaaaattagtaaaaaaattttattagctaataaagaatctattatatgtggatggcatttattaaaaaaagtttcagaaaaaagcaaaacctgtataataccgattgactcagaacacttttcaataaatgagttaacaaaaaattgcaaaaataatgatattgaaaaaatatatttaacggcttccggcggaccttttttgagaaaacctaaaagggattttaaaaaaatcagaataaaagacgctattaatcatccaaattggcaaatgggaaaaaaaatttcagtagactcttcaacaatgatgaataaaattcttgaagtaatagaagcattcaaacttttcccctttaatgaaaa

SEQ ID NO: 206734 - DNA, 820 bp, Unknown
  Bacterial polypeptide expressing nucleotide sequence isolated from the Sargasso Sea
atgaaaaaaaaactttcaatttatggctgcacaggttctattggggactcaacttttaaattgtttaaacaaggtaataagaattataaattccatatattaacaggttataaaaatcataaaaaaattaaacatattattaaaaagtataaaccaaattattttgtagtattcgatgaaaaaacttatcttaaattaaaaaagagtaataacaaaacaaacgtaaagatattaaattcaaaagattttcaaaatcataaatttgaaaaatcagatatttcaattctcgctattccaggaatagctggattacaaccaactctaaacgcaattaaaataagtaaaaaagtccttatcgctaacaaggagtctgtaatatgtgggtgggatttaattaaaaaattagtaaagaaatttaaagttgatgtggtaccagttgactctgaacacttttctataatgaatttaattaatgaaactaataaagaatatatcgaaaagatatatctcactgcctctggggggccttttttaaattatccaataagtaagatgaaaaaaattaaaccgtctcaagcgatcaatcatcctaaatggaaaatgggaaaaaaaatatcagtggattccgcaacgcttatgaataaaatttttgaagttatcgaagcacacaagttattttcaattaatttgagaaatattgatattataatacatcctcaatctttagttcatgcaatcgttaaatttaaaaatggattatataaatttttatattttgaaactgatatgatgataccaaataggaaacgctttattggag

SEQ ID NO: 206735 - DNA, 627 bp, Unknown
  Bacterial polypeptide expressing nucleotide sequence isolated from the Sargasso Sea
catgaagaagaaaaaaatcgcaatactaggttcaacaggcagtataggaaaaaattcacttcaaatatttaatttaaataaaaaaaattttaatattgtattgttgtctgcacattctaattttaatgaaatattaaatcaaataagggtttacaaaccttcatactttgtaattacaaacttttttatttttcaaaaagtaaaaaaaaaaattagaaataaaaaaataaaaattttttataattttaaagatgttcctttaaaattaagatttgacataacaatctcagctatagttgggattgcaggtttagaacctacaatacgatttactaaacaatcacaaaaaatacttttggctaataaagaaagtataatttgtgggtggcatattttatcttcattaattaaaaaatataaaacaattctaataccaatcgactccgaacatttttcaataaaacaattaacagagaactatactgatttagatataaacaaaatatacattaccgcttcaggggggccttttttaagaaggtctcttaagtcttttaagaaaataaaatccattgaggcttttaaacatccaaattggagtatgggtaaaaaaatctcaatagactc

SEQ ID NO: 206736 - DNA, 616 bp, Unknown
  Bacterial polypeptide expressing nucleotide sequence isolated from the Sargasso Sea
acctacaattgagattattaaatttacaaaaaaaattgctattgcaaacaaagagtcgattatttgtggttgggacttgattcaaaaagagttaaaaaaaaataaaacagaatttattccagtagactctgaacatttttcaatttggtatgctttaaaagatatagataaaagattaatagaaaaaatttatttaactgcatctggtggaccatttttaaataaaccattaaatagattaaaaaatgtgagttcaaaacaagcaattaaacatcctaattggaaaatgggaaaaaaaatatcagtagattcagcaacaatgatgaataaagtttttgaaataatagaggccaaaaaaatttttaatttatcttacacaaagctatcaattttaactcacccaaaatcatacgtacatgcaataataaagcttaaaaatggtttaacaaaaattgttgcacatgacacaaatatgagaattcctatctttaactccttatactcttcaaataattttattgattcaaagaaattgaatcttaaaattttaaataatttatcatttaaagaaataaattataaaagattttcagtgattaagattctaaataagttg

SEQ ID NO: 206737 - DNA, 704 bp, Unknown
  Bacterial polypeptide expressing nucleotide sequence isolated from the Sargasso Sea
agagatgcctaaaggtttaaaagccatacacttaacagcttctggtggtgctttcagagattgggccgttgaggatttaaagcatgtcacagtggaagatgccacttcacatcctaattgggatatgggaaaaaaaataactgtagattctgcaactcttatgaataaaggattagaagttatagaagctcattatctattcgggacctcttacgaaaatatcgaaatagttatccaccctcaaagtattattcattcaatgattgagatggaagattcttcagtattagctcaattaggttggccagatatgaaactacccattttatatgcgatgagttggcctgaaagatttaaaacaaattggaaaagattaaacctaagtgaaattggaaaattaacttttaaagagccagacgagtttaaatatccctgcatgggacttgcctatgctgcaggaaaatcttctgggactatgcctgcagtcttaaatgctgcgaacgaaatggctgttgaacaattcctcaaagaaaaaatttcttttcaagaaattccaacatttataagtaaagcttgtgaatcacatatgaagaatttgaatttgagtcccgaattggaggatattcttgaagtagacaattgggccagactttttgttaggcaagaaattaaaaaagggaaaaaatacgtaagtattggataaa

SEQ ID NO: 206738 - DNA, 904 bp, Unknown
  Bacterial polypeptide expressing nucleotide sequence isolated from the Sargasso Sea
gagctcgcgtctgaaagagtaaactggtcaatgtcggctataattgggtttgctggagtagaggtggcattaagatgtgctgagttttcagatgttttagccttagcaaataaggaagcattggtttgtgctggagaactattattatcaaaaatcaattaccacaaaaacaaacttattccagttgatagtgagcatagtgccatttatcaatgtttacagggggagaatagaaaggggctcaaggaaataattttaacagcaagcggagggccttttagaaattggactgtgaatgacatgaaaaaagctactttgaaagatgccttagagcacccaaactgggatatgggagataaaataacaattgatagcgcttcaatgtttaataaatcgcttgaattaattgaagcaatgcatttatttaacgtctcctttcacgaaatcaaggtcgtaatccaccctcaatctataatacactcaatggttaattttaaagatggtactaccattgctcagctggctgtgccagatatgaaaggacctataggatatgctctaaactacccagaacgaaatgaattaggtatagagaatattaatttaactgaggtaggacaattagagttttttgaacctgactgtgaaaaatttcattcgttgaagattgttgaaaacgtaggtaaaaatttaaatttaggagtaatttttaatgcagctaaagaagtagctgtggagaaatttatctctggcgaaataaattttttagacatggcattggttgttgaaaaagcaataaatgagaattcattaagggaattaacaaaatcaggaaagcaaacatttttatctcttgtggacatagatttagctacaagagatttttcaagaaatattaattttt

SEQ ID NO: 206739 - DNA, 649 bp, Unknown
  Bacterial polypeptide expressing nucleotide sequence isolated from the Sargasso Sea
atgataaaagatatttatatactagggtctacaggatcagttggtacgaccactttaaaaataattaataaagataaaggaaattttaatataaagttattaactactaataagaacgttaataaaatctttaaacaagcattgaaatataatgttaataaaattgtaatatttgataaagaaaaatataaaaaaaatcttgataaatttaaaaaaaaaaaaattaatgtatatttaacgataaaagatgctttaaaaaataaaaaaaaaaaatcatttctaactattaatgcagtctcgggaattgacggattggaaccatcattaaatataattaagtatacaaaaaactttgctacagcaaataaagaatcaattatttgtggatggagacttttagaaaaagaatgtaaaaaaaataaaacaaattttatacctctagactcagaacatttttctatatggactttattaaaatcagaaaaccaaaaattaattaaaaaaatatttttaactgcgtctgggggtcctttcttaaataaaaaactaaaaaatataaaaaatataaagccaaggctagctttaaaacatccaaattggaaaatgggaaagaaaataacaatagattctgcaacaaatgatgaataaa

SEQ ID NO: 206740 - DNA, 808 bp, Unknown
  Bacterial polypeptide expressing nucleotide sequence isolated from the Sargasso Sea
tttctgccgggaattgataatttcacaacttagaaattctaaagctataatgttaccaatagatagtgagcataatgcattattacaaataatcttatcttcaggtctcgaatataaaattaatgatgcagactattacaaagctaaaataaaaaatatcattataactgcatcaggaggaccttttatagattataatttaaacgatctcaagagaattaatgctaaggatgctgtacaacaccctacatggaatatgggtaaaaaaatatctgtggactcatctaccatgatgaataaaggattagaaattatagaggctaaaacactatttaatcttgatataaataatatttcagccataatccatcgtcaaagcaagattcatgcatttgtggagttctttgatggaacagtaatttcacatatgtctaacccagatatgaaaatacccatatcttatgctatcacatatcctgaaaggatttatcatgataacaaaagcaatttctcatatgataacttttctttcgaggagttaatttatgataaatttccttgttatagattggcaaggaaggttgctgaaataggtaaaaatactggattaatacttaatgctgctaacgaaattagtgtagaatacttcttagaggacaaaatatcctacttagatattccgaatattattgaagatattcttgaatcaagtacagttgtcaatcatgatactcttgattccattatagataatgatagagaaattagagaattaactagggattgtatcaaaactaaatattcgtga

SEQ ID NO: 206741 - DNA, 777 bp, Unknown
  Bacterial polypeptide expressing nucleotide sequence isolated from the Sargasso Sea
acaggaaagaaaatattactgggcaaataaagaaagtattgttgctggaggagatttaattttaccattagcaaaaaaacataatactgaaattgttcccatagatagtgaacataacgcgatttttcaatgccttgcaggagagagcggtatggaagatgtaaaaaaaattacaatcacggcatctggaggaccttttctaaattcaagtatttcggatttaaagaacgtaagactgcaagaggctctcaatcatcctaattggaatatgggatctaagatcactattgattctgcaacgttagtaaataaatgtttagaacttattgaagcaagatacctatttgatcttgatgaaaaatattttgatttagttgttcatccccaaagcataattcactcaattgttacttatttagatggatctagtatctgtcagatgagctctccagatatgagagtacctattgctcatgcattatctgataaaagaagagttccaattaattttgattctcttaatttcagctctttgaatttgtcatttcaggaatttcctttagatagaattcaagttcagaatattgctagagaagtctgtattagtggaagtaatcttggaacagtttttaatgcatctaatgaaattgctgtagaaagttttataaatggcttaattagttttgataaaatttatgaggtcatatatagaacttttgatataaatattatgtctaaagatatgtctatagattcaattaatgatatagataagca

SEQ ID NO: 206742 - DNA, 700 bp, Unknown
  Bacterial polypeptide expressing nucleotide sequence isolated from the Sargasso Sea
gcagcatgggataaggcagatactgtggtaacagggatagtaggctgtgcaggcttaattccaacaatgtcagcaattaatgcggggaaaaatattgcacttgctaacaaagaaactttaattgcggcaggaccaattgttattcctgcattaaagaaaaataatagtaggctattacctgctgattcagaacactctgctatctttcaatgtttacaaggattacctaattatgaaaatgcagatttttcaacaggagtgatgcctaaaggtttaaaagccatacacttgacagcttctggtggtgctttcagagattgggccgttgaggatttaaagcatgtcacagtggaagatgcaacttcacatcctaattgggatatgggtaaaaaaataactgtagattctgcaactcttatgaataaaggattagaagttatagaagctcattatttatttggaacctcttacgaaaatatcgaaatagttatccaccctcaaagtattattcattcaatgattgagatggaagattcttcagtattagctcaattaggttggccagatatgaagctacccattttatatgcgatgagttggcctgaaagatttaaaacaaattggaaaagattaaacctaagtgaaattggaaaattaacttttaaagagccagacgagtttaaatatccatgcatgggac

SEQ ID NO: 206743 - DNA, 893 bp, Unknown
  Bacterial polypeptide expressing nucleotide sequence isolated from the Sargasso Sea
taaagatttatttaaaaaaaaaaaaattaatttacatctaggaatttcattcctaaaaaaaattgtaaaaaaaaaagttgattattgtattaattcaatttctggcataagtggtttagagccaacaattcaatcaatccctttaacaaaaaatatactaattgcaaataaagagtccattattaccggatggccaataattaaaaaaaaattaaatcaacataaaacaaattttatacctattgactctgagcatttttcaatttttcaattaattaaaaatgaaaataataaaaatttaagtagaattattttgactgcttctgggggaccttttttaaaccaaaatataaagaaatctgatgatataaaaattaaagatgtaattaaacatcctaattggaggatgggaaaaaaaatatctgtagactcagctacaatgatgaataaagtttttgaattcattgaagcaaaaaaaatttttaatttaaaaaatgatcaaatttcaattctaattcatcctacgtcctttatacatgcaattgttttttttaaaggtgaaataataaaaatgttagctcacaatacaaaaatgacagttccaattgcttatgctcttgatgcttatagaaaaaatattaagaaaatttatatacaaaatgatttaaagaaactgaataatataaaactaattaatcctgattttgttaaatttcctttattaaatttaattaagacaatacctgaaaaggattcatattttgaaactattttagttactttaaatgatgaacttgttaaaaattacctaaacagtaacattaaatatttttatattgagaaatatttattaaagataataaaaagtcctttttttaagaaaatattataaa

SEQ ID NO: 206744 - DNA, 724 bp, Unknown
  Bacterial polypeptide expressing nucleotide sequence isolated from the Sargasso Sea
attaaataaaaataaaaccaagttcattcctgttgactctgaacatttttcaattttttcattattagaaaacaaggaaattgacgatattgaaaaagtttacattacagcctcaggtggaccatttattaatttaccaaaaaatcagtttaaaaaaattaaacttaatgatgcacttagacatcctaattggagtatgggaaaaaaaataacaattgactcagcaactttaatgaacaaagtttttgaagtaattgaggcaaaaaatattttcaatataagttatgataatatatcaatacttactcatccaaaatcctatgttcatgcaattataaaatttaaaaatggtttaagtaaatttcttatacatgaaccagatatgaaaataccaatctataattcaattttttatgaatctcgtcaaaatttgaaaaccaattctttagatttcaaaattcttaataatttaaatttaaaaaaagtagaaataaataaatttcctttagtgaaattacttcaaaaattaccaaataattcatctttatatgaaacagttttgataacaattaatgactatttagtttataaatttttagataaaaaaatgaattttcaagaacttacaaaatcaatttataaaatttccaatttaaaagaatttcaaaaatttaagaaaatccagcccaaaagcattaaagatatatataatttaagagattat

SEQ ID NO: 206745 - DNA, 589 bp, Unknown
  Bacterial polypeptide expressing nucleotide sequence isolated from the Sargasso Sea
tttgaaaaagatattcattcttggtgcatctgggagtattggagaaaatactctatctgttatcgactcaaataaagaaaagtttgaactagtaggtatttcggtaaataaaaatgttgaaaaggctaataagattatcaaaaagcacaatccaaagtacatttacataaatgataaatcagcaaaagaaaatatactaaagactgaggatgcagttatttatgaagacgataaagagctttccgatatcttcaattcaagtgatgttgatattgtaatctcagccatctcaggttttgctggaattaagtcgactttccatgcagcaaaatcaggtaaaaagatccttcttgctaataaagaaagtattgttgcaggcggatcattgctgatggaaactgcaagagaaaataataccgaactagttccaattgatagcgagcataatgctatttttcaatgcttacctgaatctagatcaacacaagatgttaagcaaatagtcattactgcctcaggagggccctttcatggaaagaatatagatgaactcaataatgttggagttcaagacgcgctaaatcatcct

SEQ ID NO: 206746 - DNA, 452 bp, Unknown
  Bacterial polypeptide expressing nucleotide sequence isolated from the Sargasso Sea
tatgattgatattgttgtacatccacaatcgatcatacattctatggtagagttcaaagatagttctattaaggcacagatgggtgttccagatatgaaggtcccaatacaatatgcattgacatatccagatcatttaagtgctccttgggaaaggttagattttaaatttataggtgatctatcttttgaggctccagactttgatagattcccttgcataaaactcgcctatatgtctttagatagaatgggatcaactcctgctgttttaaatatggcaaatgattattcggtttataaatttttgaattctgaaattaagttcactgaaataccaaaaataatagaagctgcaatgaaaaatcatcaatgggttgaaaagccagatttagactgcattagagagttagataattggactaaggattttgtgaataattttgattaat

SEQ ID NO: 206747 - DNA, 790 bp, Unknown
  Bacterial polypeptide expressing nucleotide sequence isolated from the Sargasso Sea
tggattattaccaacatataagataattaaccgaactaaattaattgcaattgcaaataaagaagcgattatatgtggatggccacttataaagaaagaattaagaaaatataaaactaaattcattcctgttgactcagaacatttttcaattttttcactattacaaaataaggaaatcagtgatattgaaaaagtttacattacagcatcaggtggaccatttattgatttaccaaaaagccagtttgaaaaaattaaattaaatgatgcacttaaacatcctaattggattatgggaaaaaaaataacaattgattcagcaactttaatgaataaagtttttgaggtaattgaggcaaaaaatatttttaatattagttataaaaaaatatcaatactcacacatccaaaatcttacgttcatgcaataataaaatttaaaaatggcttaagcaaatttctaatacatgaacctgacatgaagataccaatctataattcaattttttataaatctcaaaaaaatttgaaaactgattcgttagatttcaaaattttgaataatttaaatttaaaaaaagtagaaaaaaccaaatttcctttagtaagattacttcaaaaattaccagagaattcatctttatatgaaacagttttgattacaattaatgattatttagttaataaatttttaaataaaaaaataaattatcaaaaacttataaaattaatttacaaaatttccaacttaaaagaatttcaaaaatttaagaaaattcagcccaaa

SEQ ID NO: 206748 - DNA, 694 bp, Unknown
  Bacterial polypeptide expressing nucleotide sequence isolated from the Sargasso Sea
aataacgttgaattgctagcccagtttgcgatcgaatttaatgcaaagtatgcggtaatcgcgaattcggacaaatatcaaaaacttaaagagtgtttatttggttcttcggtgattccggtggctggcactgatgagttaataaagttgtgcgaagaacccgttgattggactatgaatgcgattgttggatttgctggtttagctcctagcttggctgttgcaaaaaccggtaaggctcttgcattggcaaataaagagtctttagtctgtggtggtgcgcttttaacaaaagaaataggccaatcgaatggaactttgttacctgttgacagtgaacataatgctatctttcaatgtttgaggcatgaaaacatttctaccgtccataaattaatcttaactgctagtggcggaccatttcgtgactggacaaaggaaaaaatgaataaggtcaccttagaagaagctttacaacatccaaattgggatatgggtgcaaaaatatcgatagatagcgctactatgtttaataaagcattggaagttattgaagctaaacatctttttaatgttaagagctcagaaatagaagtattgattcaccggcagtctattatacattctttggtaagcttttgtgatggatccgtaatagcacaactaggcaacccagatatgcgtggggctatag

SEQ ID NO: 206749 - DNA, 879 bp, Unknown
  Bacterial polypeptide expressing nucleotide sequence isolated from the Sargasso Sea
tttaaaacaagcaaaagaatttaaagttaaaaatataataataagtgatctatccacatatcaaaaagctaaaaaaaaattgaataaatctaaaataagaatttataatgactttaacaactttaataaaatctttaagaagaaaaatgattttataatgagctctattacaggattgagtggtcttgaaccaacattaaggtcaattaaatatacaaaaaaaattttaatagcaaataaagagtcaattatttgtgggtggagtcttatcaataaagaattaaaaaaatataaaacgaaatttatacctgttgattctgaacatttttctatttggtcattattgaaaaattattcaccaaatgatgttgaaaaaatttatattactgcctcaggtggtccttttttaaaattacctaaaaaaagtttttcaaatatttctgtaaaaagagctcttaaacatccaaattggaaaatgggaaaaaaaataactattgattcagctacattgatgaacaaagtttttgaagttattgaagcaaaaaatatatttgatttaccttataataagatctctattttaacacatccaaattcttatattcatgcaattataaaattttataatggtttaactaaaatactcgcacacgatcctgatatgaaaatacctatttctaattctttaaatgatgaaaaatttaaaatgaaaaaaatatccccaataaattttgaaattctaaatgaccttaatttgaaaaaagtagatagaaaaaaatttttatttgtgaatatcttaaatagaatgccaaaatacagtacattattcgaaacagttttaattactatcaatgactattttgtttataaatttttaaa

SEQ ID NO: 206750 - DNA, 593 bp, Unknown
  Bacterial polypeptide expressing nucleotide sequence isolated from the Sargasso Sea
tattgtgcagtcaaagcaggcaaaaaagtttttttagctaataaagaagcgctaattatgtcgggagatttactgttacgcgaagcaaggaaaaccaaatctttgatcataccaattgatagtgagcataatgctcttttacaaataataagtatgtttggtctaaactatatccatggtaaaaaaagcttgccacagaatattgatagcatttcactgactgcctccggaggacctttccttgggtataataatagaatgttatctcaagtaacgcctaaccaggcaataaaacatcctaactggaagatgggtaaaaaaatttcgattgattctgctactatgatgaataagggtctggaagttattgaggcatcccttcttttcaatatcaatccagataaaattaatgtttatattcatcctcagagtctcattcatgcgctcattacattttatgacggatcaactctttcacatttgagctatcatgatatgaagattccaattagttacgcacttaattggcctaacagacagagattagctaagaaaatgaaaactttaaatggcacatatgaacttagaaaaat

SEQ ID NO: 206751 - DNA, 697 bp, Unknown
  Bacterial polypeptide expressing nucleotide sequence isolated from the Sargasso Sea
gccttcctctagagggaatcaaaaagaaaaagcatctagaataatattgacaggctcaggagggccttttttagataaagaaaagagtgatcttgttaatgtaactatggaagaagctattaatcatcctatctggaaaatgggaaagaagatatcagtagattcttcaactttaatgaataagggtttagaactgattgaggctaaatggctatttgaatcagatactcaggaaatagaaataatcatccatccagaaggtatagttcattctttagtagaattcaaagataactctatcatcgcccaaatgggcaatcctgatatgaaaatacctatagcttatggcttaggctttccagatagaatattttcgaatgtcggatctcttaacctttcagaactcggccctttaacttttttagatcctgattttgataaatttccttgcctagggctagcgaaagaagccatgatggttggaggtacagctcctacattattaaatgcagcgaatgaagtagcagtagaagcttttctcaatcagagtataaaatatttggatatctcaaaggtgatctctgaagttttagaaagaaatgagataaagaaagttgataatataagttcaataaaagaagtagattctatagctagaattagcgctgatttgataattaaaggcttagctgcgtaa

SEQ ID NO: 206752 - DNA, 840 bp, Unknown
  Bacterial polypeptide expressing nucleotide sequence isolated from the Sargasso Sea
tacctgcaataacagctttaagatcaggaaatgatattgcaatagccaataaagaaccactagtgatagcaggtgatttttttataagagaaacaaaaattaataatactaaaattcttcctgttgattctgagcataattcaatatttcaatgttttgatgaaagacagagagagaaaattaataatataacattaactgcttcaggtggacctttccttaatttacacaagaaatattttagtaaaataaaacctagcgatgcaattaatcaccctgtatggagaatgggaaaaaaaatttctgttgatagtgctacgttaatcaacaaagctctggaagttatagaggcaggatatttatttaatttaaaacctaatcaaatagatgttttaattcatccacaatctataattcatggaatggttcattatatggatggatctactcttgcaaacttatcttatccaaatatgataagtcctttaagtgtggctttaagttatccagaaaggttaaatttaggattaaaaaaactcgatctatcaaaaataggtgaattaacatttaaaaaacctgatttagataagtttcctggtttaaagcttggatgggaaattttaaagcaaccaaaaccttactcaataataatgaatgccgcaaatgaaattgcggttgaattatttttaaaaaatgtaataagttttaatgaaattgtagatttaatcaattatgctcttcaaagatttgagtttgatatcccgagtaacttagaggatataattgatatagacaaaagaacaaggattcttattaaagaaaattatagaggagtttaaa

SEQ ID NO: 206753 - DNA, 496 bp, Unknown
  Bacterial polypeptide expressing nucleotide sequence isolated from the Sargasso Sea
ctgggatccacgggctccatcggcacccagacccttcagatcgctgaggaattccccgatcagttccgggttgtggcattaacggccggccgcaacctgaatcttctggttcaacaaatccagaggcatcgccctgaggtggtggccctggccgatgccgatctgctgccggatctgcaagagcgtcttaaggatgcgggcgttgcagctagccataagccgaagctggttggaggcgctgacggcctcaatgttgctgccgcatgggacagcgctgacctcgtggtgacgggcattgttggttgcgccggcttgttaccgaccctggcggcggtccgagcaggcaaagacctggccctggccaacaaggagacgctgattgctgccggacccgtggtgttgccggagttgaagaagagcggcagcaggctgctgccggctgattcagaacactcggccattttccagtgcctgcagggaaccccctgggctgaaa

SEQ ID NO: 206754 - DNA, 765 bp, Unknown
  Bacterial polypeptide expressing nucleotide sequence isolated from the Sargasso Sea
tcatgcgcgaggtcgttcggtgtgaagcgacattactgcctgtagattcagaacataatgcaatttaccaagtcttcgattttgaacaaattgaagccatcgaaaaacttattttaacagcttccggtggcccgtttagagatttgcaaattgaagatatgcgtaccgtaacgccttctcaagctgtcgcgcatccgaattgggacatgggtgcgaagatttcggttgattcggcaacaatgatgaacaaaggacttgaagttattgaagcgcatcacatttttggaatgcccagtagtcgaattgatgttctagtacacccacaatcagtcgttcacagcatggtttcgtatgtcgatggatcggtattagcgcagttaggatcaccggatatgcgtactcccatcgcatataccttggcatggccatcacggattgagacgccgagtaaaagactagatctaagtacgatttcgacattgcaatttgaggccccggatgagagaagattccctgcattgcgtctagctcgggaagcacttcaaactggtggcgctgcagcaactattctaaatgccgctaacgaagtggcggtggatgcatttttagcagagcaaataggttttctagaaatcgccaatattgttgaagaaacgatgggaaacgtcaattttgatcgattaaaaacaattgatgatgtcttccatctagatgcgacggctcgcaacgtcgcctatgttgaaactgaaaaacgcgcctcttaag

SEQ ID NO: 206755 - DNA, 904 bp, Unknown
  Bacterial polypeptide expressing nucleotide sequence isolated from the Sargasso Sea
aaatttaatcctaaatcagtagttatgatcaatgaagaagcctctaaagcagtaaaaaaaggcttatcaggctatgatattaatgttttgtcaggccgggagagtcttctaaacatttcgagagataaagagattgatctggttttaaatgcattggtagggtctcctggtatggagccaactttagaagccgtaaaagcgggtgttgatgttgcgctatctaacaaagagagtttagtggttgcaggtgatttgattactactgaaatgaaaaaaacaggagcaaatatttttccggttgatagtgagcattctgcaatatggcaatgcatggttggagaatcattttcggatgtcgaaaaaatcatattaacaggtagcggaggaccatttagaacaaggccaataaatacttttaacgatattgatgtttcagaggcattaaatcatcctaactgggaaatgggtaaaaaaataaccatagattctgctacaatgatgaacaaagggcttgaggttatcgaagcatattggttatttaattttgatgtctctatgattgatattgttgtacatccacaatcgatcatacattctatggtagagttcaaagatagttctattaaggcacagatgggtgttccaaatatgaaggtcccaatacaatatgcattgacatacccagatcatttaagcgctccttgggaaaggttagattttaaatttataggtgatctgtcttttgaggctccagactttgatagattcccttgcataaaactcgcctatatgtctttagatagaatgggatcaactcctgctgttctaaatatggcaaatgattattcggattataaatttttgaattctgaaattaagttcactgaaataccaaaaataatag

SEQ ID NO: 206756 - DNA, 634 bp, Unknown
  Bacterial polypeptide expressing nucleotide sequence isolated from the Sargasso Sea
aattctcacagggagtggaggtccatttctagaaaaaccacttagcgaatttgatttaatttcaccggctcaggctcttaatcaccctaattggaacatgggtaaaaaaatatcaattgactcagctacaatgatgaacaaagctttagagttagtagaggcactatggctttttgatatagatattgaacagattgaaattacaatacatccacaatcaattattcattcaatggttgaatttattgatggttcctacaaagcacatttaggcacacccgatatgaaagtccctatacaatatgcgttaacctacccagcaagaaaaaaattggccatcgatagtttagatttaagtgatttgagtcttgcatttcaatctcctgattataaaagatatcccattctaggccttgtacatgagcttatcaagttaggtggcaatagagtagctgttatgagtattgcgaatgattacatagtacaaaaatttctagatgaaaaaatttcctttaatcaaatattcattcttactaaagaggttgtaagcaaatttggatctgatgatctaccttctttagaagatttacttattttagatgaaaatattaagctatatttagaaccaaattaa

SEQ ID NO: 206757 - DNA, 738 bp, Unknown
  Bacterial polypeptide expressing nucleotide sequence isolated from the Sargasso Sea
tatgtttaaaaaagatgaaataaaaattatttctatttttggagttactgggtcagtagggatgtctactcaggaattattaaaattaaataatgaaaaatttaaagttgatacaattgtagctaataatgatgtaaaaggattaattaaggctgcaaaaaatttaaaacctaatttagtaattattaataatgataaaatgtttacgacacttaaagaaggtttagaaaattataacattgatattgcttcaggtaatgattctattattgaagcatcaaagagaaaagttgatgtctttgtagcagcaatttctggttttgctggcttaaattcaacttttaatgcaataggaaatgctaagtgtattgcattagctaataaggaatctattgtttgtgcaggacctatattattaaataaagttaagaatagtattagtaagattatacctattgattctgagcataatactttatatcaaattttaattaatgctaatatagatagtatatcaaaagtaattattactggttcaggcggcccttttagagggttttcttctatgaaactaaataaagttacattggatgaggcaataaatcatcccatatggaaaatgggtaaaaaaataagtgtagactcagctaccttaatgaataaagggttagaattaatagaagcagcatatttatttaatattaaacaaaataatatagatataaataatccatccca

SEQ ID NO: 206758 - DNA, 522 bp, Unknown
  Bacterial polypeptide expressing nucleotide sequence isolated from the Sargasso Sea
cgtggcgggaattgtggggttcgcggggctcaggcctactctgagtgcggctcgtgccggcaagactattttgttggccaacaaggaagccttggtgagtgctggcgctttattcatagagacggttaagcgcggcggtgcgacgctattacctgtggacagtgagcacaatgcaatgcaccagtgcctgccgattgacacgtttggcaggcctgatatgaccaacgtggaaaaaattattttgacagcttccggggggccgttccgcgggcgagctcgcgagtctcttcactcggtcacaccagacgaggcctgcgcccaccccaactggtccatgggtgccaaaatatcggtcgattcggcgacgctggcgaataagggtctcgaattagccgaagcctgctggttgtttacccgtacgcctgaccaaatagaaatcgttgtgcacccgcaaagtatcgtgcattcaatgattcgctatcaggacggatctgttttggctcaattgggtcagcctgacat

SEQ ID NO: 206759 - DNA, 703 bp, Unknown
  Bacterial polypeptide expressing nucleotide sequence isolated from the Sargasso Sea
ctgggatacgctgacctggagcagaatggcgtgatgtccgttttgcttaccgggtctggtggcccgttccgggaaacgccgctgcatgagctggtgtcgatgacgcccgatcaggcatgccgtcatccgaactggtcgatgggacgtaagatctccgtcgactcagccactatgatgaataaaggtctggaatacattgaagcgcgttggttgtttaacgccagtgcacgccagatggaagtgctgattcacccgcagtcggtgattcactcgatggtgcgttatcaggacggcagcgttctggcgcaattgggtgagccggacatgcgcacgcctatcgctcatacgatggcctggccgaatcgcgtaacctccggcgtgaagccgctcgacttctgcaaactcagcgcgttgacgttcagcgcgccggattaccaacgttacccatgcctgaagctggcgatggaggcgtttgagcaggggcaagctgccacaaccgcgctgaatgcagccaatgaagttgtcgttgctgcatttcttgctgaagaaatacgctttaccgatatcgccgatctcaatttagctgtgctggagcagatggatctggaggaaccccagagcgttgatgacgtactgagggtggatgcgattgcgcgagaagtcgccagaaaacaagtgatgcgactcgcaagcttaggataat

SEQ ID NO: 206760 - DNA, 631 bp, Unknown
  Bacterial polypeptide expressing nucleotide sequence isolated from the Sargasso Sea
aatgaaaaaaaaaatttcaattttaggttcaactggttcaattggagaaagtactctaaagatcattaaaaaggataaaaaaaattttgaaataaatttactttcaacaaatagaaatgttaaaaaaatctttaaacaagcaaaagaatttaaagttaaaaatataattattacagacttagcatcttttaaaaaagcacaaataaaatttaaaaaatctaaaataaagatttataatgattttaataattttaataaaatatttaaaaaaaaaaatgattttataatgagttcaattactggcttaagcggtcttgaaccaacgttaaaatcaatcaaatttacaagaaaaattttagttgcaaacaaagaagcaattatttgtggatggaatctaattttaaaagaattaaaaaaatataaaacagattttatacctgttgattcagagcatttttcaatttattcattacttaattcagttaataaaaaagaaatcaatagaatttatataacagcatctggtggtccatttttgaattttccaaaaaaaaagtttttcaaaattaaacttagtcaagcactgaaacatccaaactggaaaatgggtaaaaaaattacaattgactcc

SEQ ID NO: 206761 - DNA, 766 bp, Unknown
  Bacterial polypeptide expressing nucleotide sequence isolated from the Sargasso Sea
aagaagggcggtgccgagctgcttccgatcgacagtgaacacaacgctattttccagtctatgccggctgactatgcaggatgtctggatgcgagcgggattcgtaagatactgctgacggcatccggcgggcctttccgcggacgtcagtcttctgaactgaacgatgtgacgccttctcaggctgttgctcacccgaactggtcgatgggtgccaaaatatccgtcgactctgccacccttatgaacaaaggcctcgagctgattgaagcctgcttcctgtttaattgtgacgctgacgatgttgaagtcgtcgttcacccagaaagcgttattcactcgatggttcagtattgcgatggttcagtgttggcgcagttaggtcagcctgatatgcgtacacccattgcgtatggcatggcctggccggagcgtattgaggccggcgtcgagtcactgaatctttttgatatcgcgcgactcaactttgaagcgccggacgaagagaattttccttgtctggctctcgccaggatggcttttgcgcaaggcggtaccatgcctgcggttctgaatgcagcgaatgaagtcgctgtagcagctttcctgcgtgaagacatccgatttacgacgattcctatgttaattaagaaagtgatggatcagcattctgttaccgatgcggattcactggatgctgtattatcagcagacagctgggcgcgtaaggctgctgatcgccttcttcaggaggagagcttttgac

SEQ ID NO: 206762 - DNA, 817 bp, Unknown
  Bacterial polypeptide expressing nucleotide sequence isolated from the Sargasso Sea
tattgcaatagcaaataaagaatcaattatttgtgcatggaacataattgaaaaaaaattaaaaaagcataaaacaaagttcatacctgttgactcagaacatttttctatttggtcactactacagaatgagtcaattcaaaatgtagaaaagatttttattacagcttccggtggtccttttttaaattcaaaattaaataaattgaaaaatgttaaggtaaaaaaagcaatcaaacatccaaattggagcatgggaaaaaaaatttctgttgattcagctacgttaatgaacaaagtttttgaaattattgaggcacaaagaatttttaaagtagatattaaaaaatttgaaatcttaattcatccgaattcatatgttcattccataattaaattttataatggccagataaaaattttagctcatgatactgatatgaaaatcccaatctttaactccatatatcaaaaaaaaattaaaaaaattcgaacaaaaaaagttgatatcagtttattaaataatttaaatttaagagatatcaatccagaaagatttggttctattaaaattttaaaaaaaattaacaataataacactctatttgagactgtattaatttcagcaaatgatgagttagtcgacttgtttattagaaataaaataagttttttggatattactaaaaatttaattaaaattttaaaaaacaaaaaatatctaaatctaattaagaaaaaacctaaaaaaatatctgatataataactttatcagaagaagttaggttgaaaaccaaaaatctatgtatacagtaa

SEQ ID NO: 206763 - DNA, 745 bp, Unknown
  Bacterial polypeptide expressing nucleotide sequence isolated from the Sargasso Sea
gcatcaaacacgatttgtaccggttgattcagaacattccgtcttgtttcagtgtttggcggccgttgattttaaaccggagtttgttaaacatgtcacattaacagcatcgggggggccattttttaagcgtgacccagacacatttgcatcgattgcacctgcagatgcgttacagcatccgaattgggacatgggggctaaaatcaccattgattcggccacaatgatgaacaaagggctggaagtcattgaagcgcatcatttgtttggtcttgattttgatgacattcatgtggtggtgcacccaaaaagcattgtgcatgcctttgttgaaaccattgatggggccattttatctcatatggggcgtccagatatgcgttaccccattcaatatgcgttaacgtatccggaccgttttgagaccccatttactcaagatccgctaacccaattgtcaggtttggaattttttgagcccaatcgggacgcgtttcctttgttggatttggccatagagtgtggtcgaaagggaggggtgtaccccattgtgtttaatgccgccaatgaagtggcggttcaattgtttttaaatcatgacatttcttatttggagattcattcctacattgttcagatgttggatcatttttcgtcgcgatgtgtgtcgacgattgaggatattattgccttggatgcagaagtaaagtccaaccggtccattgcttttgaaggagcataa

SEQ ID NO: 206764 - DNA, 985 bp, Unknown
  Bacterial polypeptide expressing nucleotide sequence isolated from the Sargasso Sea
gatgtcatcaggaattttcctgagcaattccggataatatccttatcctgccgtagttcgattgacaagcttatgaacaaaattagggagtttcatcccaagattgtatgtgttgaaaaagatacacaggctgctgaactaaggcagatattttcagatatggaattcgtatccggcctgaaaggtcttgaaaagattgctgaagaccctgaaacagatctgatgatgtctggaattgtcggagctgcaggattaaagccaacatttgcagctataaaagcaggcaagactgttgcaatcgcaaacaaagaacctcttgtgatggctggcgaattatttatgcaaactgcaaccaaaaccggagcaaaactgctgcctgcagacagcgagcacaacgctatttttcaggcacttaaaaatgagcctcccgaaagtatagcaagacttattctaactgcttcaggaggttctttaagggataagccgcttaatgaatttgagactataactcttgcgcaagcactggatcatccgaactgggaaatgggaaaaaaaataactatcgactctgcaacaatgatgaacaaaggattagaagttatcgaagctcattggctattcgatactccagtccaaaacatagaggtagtgatgcatcgtgagagtatcattcattcaatggttgaatttgttgatggttctttcttggcgcagatgggactgcctgacatgagagtcccgctggcccactgccttggatggccgaataggctccccatgaaaattccacgtatcgatcccatatcacttaaagcacttcattttgagccaattaattctaatcgattcccatgcctttcaatttcaataaaagctgctaagcatggtggtggcgcacctgcagttcttaatggtgcaaacgaaaaagtggtcacttcttttcttgaggaagacatcaatttttcaaatatctctaaaactctta

SEQ ID NO: 206765 - DNA, 873 bp, Unknown
  Bacterial polypeptide expressing nucleotide sequence isolated from the Sargasso Sea
aatgcagttatttgtgaagatgagaaagagcttttcgacatcttcaattctagtgatgttgatattgtaatctcagccatctcaggttttgctggaattaagtcgactttccatgcagcaaaatcaggtaaaaagattcttcttgccaataaagaaagtattgttgcaggtggatcattgttgatggaaacagtaagagaaaataattccgaactagttccaattgatagcgagcataatgctattttccaatgcttacctgaatctagatcaacacaagatgttaagcaaatagtcattaccgcctcaggagggccctttcacggaaagagtattgatgaactcaacaatgttggagtccaagatgcgctaaatcaccctaactgggaaatgggatcgaagatttctatagattcagctactctcgtaaataaatgtttggaactcattgaagcatgctatttatttgatatggatgaaagcttctttgagcttgtaatccatcctgagagcattgttcattcaatagttacatttaatgatggatcttcaatttgccaaatgagtaatccggacatgcgtgtacctattgctaatgcaatgtcagatgataaaagactttcaattccgttcgagcccattgattttaataatctcaagcttaactttgaaagctttccaaatgacagagctgaaattgttcatctggcgagagaggctgttcgagaagatagctcaaagggaatttattttaatgctgccaatgagatcgcagtagaaaattttctaaagaaaaggattacatttagacaaatatatgaggtaattttgcgaacttttgacacaaaagagatgtcaaaaagttcaactagt

SEQ ID NO: 206766 - DNA, 947 bp, Unknown
  Bacterial polypeptide expressing nucleotide sequence isolated from the Sargasso Sea
gatgcaagctatagaggttgttaaaaagtttaaagactatcaaatagagtatctttcttgccttagtaatgcagataaaattatagagcaagctaaggaaattagacctaaaaaagtttgtattgttaattctgatttagagaaaaaagtttgtagcgcgcttaaaggtgagaatattcaggttttgtcaggatatcaggggatacatgaacttgcaaagcaaaaagtcagtctacttcttaattcgattgttggggcagatggaatggagccttcaatattggcattagaaagcaatatcccccttgctcttgcgaataaagaaagtatcgttatggctggttggattatgaatgatattaaaaagaaaaaaaatagcacccttcttcctgttgatagtgagcatagtgctatatttcagtgtctaatgggtgaagattataaaaatattaaaagaattattttaacagggtcaggtggcccttttagagtaagaaaattagatacatttaaaagtattacattgcaggaggcattaaaacatcctaattggagtatgggtaataagattactattgattctgctaccatgatgaataaaggattggagtttattgaggcttattggctatttgaggtaaaacaaagtcaaattgatattgttatccacccacaatcagtgatacattcaatggttgagttctctgatgggtcaattaaagcgcaaatgggagaaccagatatgaaagttcctatccagttttcattatcttatccagatagatatactgataaaattaattcttttaattttatagataataatgaattaacttttgagtctgtagattttgagaaatttccttgtataagaattgctaaagaggctttgtctgcaggcggttctcatcaggttgtgcttaatgtcgctaatgatcaagttgttg

SEQ ID NO: 206767 - DNA, 875 bp, Unknown
  Bacterial polypeptide expressing nucleotide sequence isolated from the Sargasso Sea
tgattcatttaaaagtctttgcagcaaagacaaggaaagatatttaaatggtgatgaggagcttgaaagacttattaatagagatgacgtcgacattattgtatgtgctacatctggatttgcgggcttaaaaactgcatatattgcatccaagacaggaaaaaagattttattagcaaataaagaaagtattgttgcaggtggagatttaattttatccttagcaaaagagaataatactaaaattatcccaattgatagcgagcacaatgcaatttttcaatgtttatccggtgagaagggtactgaagatgtaaagagtattactattactgcatctggcgggccttttattaatgcctctattaaagagttacagcatgttactgtagaagatgctcttaagcatcctaattggaagatgggaagcaaagttacgatcgattctgctactttagttaataaatgcttagagcttattgaagcgagatatttatttgatttagatgaaaaatattttgatttagttattcatccacaaagcataatacactcaatagtcacatatatagatggctcaagtatatgccagatgagttcccctgacatgagggttccaattgctcatgctctttctgaagagaacagaataccaatagattttaaagacttagactttagtaacttaaatctatcttttcaagagtttccgtccgacagatcgaagattcaagatattgcaagagaagtatgtaataaaggtggatttctaggaactgtatttaatgctgctaatgaaattgctgtggaaagttttttaaataaaaaaataaactttaatgagatttatgaagttatctatcgaacttttgata

SEQ ID NO: 206768 - DNA, 585 bp, Unknown
  Bacterial polypeptide expressing nucleotide sequence isolated from the Sargasso Sea
actctggatgtcgtcgcggcgcgccccgacgagtttgatgtggtggccctcggggcggcccggtccgttgacctcctcgtcgagcaggctcgggtcttcgatccagaggtggtggccatcgctgacccattgttgggttcggcggtcgaggctgctgttcctgcgggcacaacagtgcttgctggccccagtgctatggctgaagcggccgtcgctgccgaggttgccatcaacggcgtggtgggctttgccggtttaccggtcaccctcgccgtgttggctgcaggccggaggttgggcctcgccaacaaggagtcgttgatcgctgcgggccctgtcgtccagcaggtccggtccacgcccggcgctgaacttctaccggtcgacagtgagcactgcgccatccaccagtgcctaagggccaacgagagcgatgagcgggtcgagcgcatcgtgttgactgcctccggggggccgttccggggccgaacacgggccgacttggcgatggtgaccgtcgaggaggcgctagaccacccgacgtggtcaatgggaccgaaggtcacggtggactcgtcgacactc

SEQ ID NO: 206769 - DNA, 820 bp, Unknown
  Bacterial polypeptide expressing nucleotide sequence isolated from the Sargasso Sea
aatgaaaaaaaaaatgcaaattcttggatcgactggatctattggcaaaactttattagacattgtaaataaagatcgtaaaaactttgaaattacacttttaacagcaaatataaattataagttattatatgaacaggcaaaaaaatttaatgtaaaaaatttaataattgcaaatacaaaaaaatacaatttactaaaaaaaattaacaaaaaaaaagatttaaatatttataatgattttaaaagcttaaacagaatatttaaaagtaaagttgattactcaatgagttcaattacaggaattgatggtttagagccaacttttaatataataaaatattcgaaaaaaattgctatcgctaataaagagtcaattatatgtgggtggaatttaattgataaagagttaaaaaaaaataaaacacaatttgtacctgttgattcagaacatttctctttatggtatgggttacaaaatttaagaattaaaaatattgaaaatatttatttaactgcatccggtggaccatttatcaatatttccttaaatcgatttaaaaatataaaaattaatcaagctttaaaacatcctaattggaaaatgggtaaaaaaatttctatagattcagcaactatgattaataaagtttatgaagttattgaagctagaaatatatttaatattaattatcaaaagattaaaattttaattcatccaaaatcatatattcatgcaattttaaaatttgataatggtttaacaaaaattattgcacatgatacgactatgaaaataccaatatttaatactctttat

SEQ ID NO: 206770 - DNA, 806 bp, Unknown
  Bacterial polypeptide expressing nucleotide sequence isolated from the Sargasso Sea
attgggaaaaaatttattagatataattaataaagataaaaaaaattttgaaattttattattaacagcacacaaaaatcatattgaattatttaaacaagcaaagaaatttaaagtaaaaaatttaattataactgatccaaaaagttttcagattttaagagaaaaaataaaaaataacaaaattaatatatttaataatttttctaaactttcattaatattatcaaaaaaaactgattatttgatgagttcaattacaggcattgatggattaaatcctactttaaagagcattaaatatacaaatacaattgcaattgcaaataaagagtcaataatatgtggatggaacttgatcaagagagaattagataaaaataaaactagatttatacctgttgattcagaacatttttcattatggtatggtttgagaccttttaaatcagagactatagaaaaaatttatttaactgcttcaggaggtcctttatttaatttgccattaaataaattcaaaaatgtttcaataaatcaagctttaaaacatcctaattggtctatgggtaaaaaaatttcaattgattcggcaactatgatgaacaaagtttatgaagttattgaggctaaaaatatttttaatctaagctatgataaaattaaaattttaattcatcctcaatcatatgttcacacattgattaaatttcaaaatggcttaattaaaattattgctcacgatacaacaatgaaaataccaatttttaatacaatatacttaaactcaagcaaatattttaaaa

SEQ ID NO: 206771 - DNA, 847 bp, Unknown
  Bacterial polypeptide expressing nucleotide sequence isolated from the Sargasso Sea
gcggcacgagccgggaaacgcgtgatgctggcgaacaaagagtcactggtgatgtcgggccatctgttcatggaggcagtttcgagcgcgggggcggaattgctgccgatcgacagcgaacacaacgcgatttttcaatgcatgccggccgatttcgagcgcggcttgaatagcgtcggggtctccaagatcttactgaccgcatccggtgggccgtttcgcacaatgcctatagacaggctgagttcggtcacacccaatgaggccgttgcgcatccgaattgggttatggggcgtaaaatttcggtcgattcagcaacgatgatgaataaggggctggaggtgatcgaggcctgttggctgttcgatactagtccggaatcaatcgaggtggtcgtccacccgcaaagcgttgttcattcaatggtgcaatacgttgacggttcggtgcttgctcagcttggaaaccccgatatgcgaacgccaatcgcttattccttggcttggcctgaacggatcgacgccggtgtggatacgctggacatgttcgagatcgggcggctcgattttgaacgaccggattacgatcgattcccgtgcttgcgtctcgcccgtgacgcagtcaatgcgggcggaacggcgcccgctatattgaatgcagccaatgaaatagcggtagaggcgtttctcaacagtgaaataggatttatgcaaattccggaactcgtcgaggcagcgttgtcagaagttgatacacgagtcgccgacagccttgatacgattctggaggcggattctgcggcgcggcagagtgttcgcctaaagatcgcgggaacagttcaataat

SEQ ID NO: 206772 - DNA, 937 bp, Unknown
  Bacterial polypeptide expressing nucleotide sequence isolated from the Sargasso Sea
tgccgaatccatcagccagcccatgcggtaatgggagatctagacgccgctgcggtactcggggagaggcttgccgatctgccggcggtgagggtcgagtccgacgcatcggtcctggatgatcttgtggcggcgcccaccgttgatacggttgtcgccgggatcgtgggttttacggggctgcgcccgacactgagcgcggccagagcgggaaaaacgattctgctcgccaacaaggaggcgctggtgagtgctggtagcctgttcatggaggcggtccgccagggcgaggccaccttgttgcccgtagacagtgagcacaatgccatgcatcagtgtttgccggtcgcgtcagacggacgccctgatatgaccgatgtcgagaaaattctgctcacggcgtctggaggacccttccgcggtcgatccagatcgtcactggacgctgtcacgcctgaggaggcctgcgcgcaccccaattggtcgatgggtccgaagatttcagtcgattccgccacgctgtcgaacaagggtttggagttggccgaggcgtgctggttgtttgatcgacgtccggatgagatcgagattgtggtgcatcctcaaagcatcgtgcactcgatgattcgatatcgcgatggctcggtactggcgcaattaggccaaccggatatgcgcacgcccatcgcctattgtctcgcctggcccgagcgcgtcgatgcaggcgtggcagcactggatatcgtcagtgcaggccgcctggatttcgaggcgcccgatctggaggcttttccctgcctagcgctggcgcaatgggccattacccagccaggcggtatgtgcgtcttcagcgctgccaatgaaattgcggtggcagcgttcctatccggggaaatccgttttacagacatcgacagagtgatgacgctgcgtgaaa

SEQ ID NO: 206773 - DNA, 637 bp, Unknown
  Bacterial polypeptide expressing nucleotide sequence isolated from the Sargasso Sea
aaaaattgtaaaaaaaagaatagatttcacaatgtgcgcaatttctggactagcaggtttgaaaccaactgtagatgcaattaaatttagtaaatcaataggtattgcaaataaagagtcaattatatgtggatggcaatttattaataaagctttaaaaaaaaataaaactaattttattccaattgattcagaacatttttctatttggacattgcttaaaaatcaaaatttaaataatgtaaaaaaaatttatctgactgcttcgggtggaccttttttacataaaaaaaaatctgaaataattaatataaaaccttattatgctttaaaacatcctaattggaaaatgggaaaaaaaatttctatagattcagctacattgatgaacaaaatttttgaagttatagaagcaaaaaaaatttttaatttagacataaaaaaatttaagataataattcatccaaagtcttatgttcacgcgattgtgcattttaacaatggtttagttaaatttttagcacacgatactaatatggctgtccccataatgaattcactttatatgaatggaaaatcatttaaatataaggatagtaatgtaaaatttgaattattaaatggattgaattttata

SEQ ID NO: 206774 - DNA, 853 bp, Unknown
  Bacterial polypeptide expressing nucleotide sequence isolated from the Sargasso Sea
tatgaaaaatattgtgttacttggagctactggcagcatcggaaaaagctgcttaagtgtaatcaggcaaaataaagaagatttccatctatatggtattggatttgggagtaacgtagataaggctcaggaaattattcaagaatttaatccaaattatatttttgctgctcaatctcaagctgatagatctcataatttttggcaagttaattcaaatatattaagcaacgaggatgaattgcaagggcttattcaagatccaaatgtagatatagtaatttcagcaatttcaggatttgctggattgaaagcaagtttctttgccatcgaagctggcagaacaatcctaatcgctaataaagagagtattgtagcggccggtgatattctaatgccccttgccaaaaagaaaaatgcagaaatcatccctgtagatagtgagcataatgctttatatcaatgccttcctcttgaaaaaaatcttaatgaaatttctaaaattctgattactgcctcaggtggaccttttagagaagactctttgagcgatttaagaggggtatcactaaatgatgctttgaaacatccaacatggagcatgggcgccaaaattacaattgattcagcaactcttgtaaataaatgtttagaattaattgaagcacattatctttttaatatcccagaatctcaaattgagattgtagttcatcctcaaagcattattcattcaatgattacatttattgatgggtcaaccattgcgcagatgagcaatccaagcatggaagtacctatatcgaatgctttaggaatgggtaaaagacttccaataaatttaaggagattg

SEQ ID NO: 206775 - DNA, 724 bp, Unknown
  Bacterial polypeptide expressing nucleotide sequence isolated from the Sargasso Sea
atgaaagatttaattatattaggttcaactggttcaataggaatttcaactctaaacttaatcagaaaagataaaaaaaattttaatgtaaaattactgactacaaataataatattcataaaatttacaaacaagcagttgaatttaaagtaaaagaaatagtaatttttaataaacaaaagtacattaaatttagcaaaagatttaaaaagaaaaaaattaaagttttttttagcattgaagaggtatacaaaaaaagaaataataaggttttcctcactattaatgctatttctggtatagatggactagagccaactttaaatataattaaatattcaaaaaatattgcaatagcaaacaaggagtcaattatttgcggttggaaatttataaaaaaagaattaaaaaaaaataaatctaatttcatacctctagactctgaacatttttcaatatggtccttgcttaatggagataatgttaacaatattaagaaaatctatcttacagcatcagggggaccatttttaagaaaaaaattgagtcaagttaaaaatattcagccaaaatatgctttgaagcacccaaactggaaaatgggaaaaaaaatttcaatagactccgcaactatgatgaacaaaatctttgagattatagaagctgtaaatatatttaatttaaatacaaaaaaatttgatatattaatacatcctaaatcct

SEQ ID NO: 206776 - DNA, 691 bp, Unknown
  Bacterial polypeptide expressing nucleotide sequence isolated from the Sargasso Sea
ggagccactggctcaattggtgccagcactctgcgggttatggaacataatccggcagatttccatctttatggtttggtcgcaaatgccagcgtagataaaatgctcgccctttgtgtgagataccagcctgactatgctcatatggtcgatgagcgtgcggctatgcagcttaaagcacaattaccttctcactgtattacgcaggttaccactggcgctgcagcgctcaatgcgctagtaacagacagtaaaacagacactgtgatggccgccattgtgggggctgctggcttagtccctacctttgatgccgtaaaagccggtaaacgtgtgttattggccaataaagaagcgcttgtcatgtctggcgagttgtttatgaataccgctaaatcgtcaggtgcaacagtattacctgtcgatagcgagcataatgccatttttcagtgtttgcccttacaagttcaaacagagcttgggtattgcgatcttaatgaacatggcatttcgcatattttattaacgggttcaggtgggccgtttttacaggcagatcttaagttgctaagcacaatgactccggcccaggcgtgtaatcatcctaactggtctatgggacctaaaatttcagttgattcagccaccatgatgaacaaaggcctggagtttattgaagcaagatggttgt

SEQ ID NO: 206777 - DNA, 850 bp, Unknown
  Bacterial polypeptide expressing nucleotide sequence isolated from the Sargasso Sea
atgaaaaaacttgccctccttggatcaacaggttcgattggattaaatacactggatgttgtccgggattttcctgagcaattgcggattgaagcattgtcttgccgcagttcaattgagcagcttactgaacaaattacggagtttcagcccaaaacggtgtgtgtggacaaagatgaacaggctcgagaattaagggaaatattccctgataagaagttcgtctgcggaatgaaaggcctaatacagatctcctcagacccaggagcagacatggtagtttccggaattgtcggtgctgcaggtttaaagccaacattttcagctttaaaagcaggtaagactgttgctttagcaaacaaagaacctctggtgatggctggtgaattattcatgcaaacggccatcaaagctggggcaaaactgttgcctgccgacagcgagcataatgctattttccaggcacttaacaatgagcctactgaaagtattgccagacttattcttaccgcatccggtggatcattaagggaccaccctctaaatgattttaagcatattactcctgcccaggccctggatcatcctaactgggaaatgggtagaaaaataactatcgactccgcaacaatgatgaacaagggactggaaataatcgaagcgcattggctgttcgatactcctgttcaaaacatagaagtggtgatgcatcgcgagagcattatccactcaatggtagaatttatcgatggctctttcctggcacagatggggctccctgacatgagggtccctttggcccattgtctgggatggccggagagactgcccttgaaaattccacgtatgg

SEQ ID NO: 206778 - DNA, 538 bp, Unknown
  Bacterial polypeptide expressing nucleotide sequence isolated from the Sargasso Sea
aaaaagataactattgattcagcgacgatgatgaataagggtttagaagtcattgaagcacattggttgtttaatatggactatcccaatatagaaattgttgtccatccccaatcaataatccattcaatggttcagtttaaagatggttcggttaaagcacaattaggtgtgcctgatatgaaaattccaatacaatatgctttaacgtaccccagacattttccatcaaattgggaaaggttagattttaagaaagttggtgacctaacatttgaagctccaaactttgagagatttccttgtctttcactagcctatgatgctttagaacaaaaaggttcttccccagcagttttgaattttgccaatgactatagtgtatttaaatttcttaaagatgaaattaaatttacagatattccaaaaataatagcgttagctataaaaaatcatgaatggaatgaaaatcctaatttaagtgatcttagagatcttgatttttggacgaaagattttgtaaagaattttgattaat

SEQ ID NO: 206779 - DNA, 854 bp, Unknown
  Bacterial polypeptide expressing nucleotide sequence isolated from the Sargasso Sea
cctaaaattaattagatatacaaaaaaaattgctattgctaacaaggagtcaataatatgcggatggaatctgatcaataaagaattaacaaaaaataaaactttatttatacctgtagattctgaacacttttcaatttaccaattaattggagagaaacacgctatcttaaaaaaaattataattactgcatcaggtggaccctttttaaataaaaaaaacaaaaaaaaaatcagagtatcagaagctttaaagcatcctaattggaggatgggaaaaaaaattacaatagattctgctacattaatgaataaagtttttgaagttattgaagctaaaaaaatatttaatattaaatacaataatatagatatagttataaatcctaattcatatgttcatgcaatattaatttttaataatggtataattaaaatattagctcatgagccaaatatgaagataccactttttaattctatatatgaaaataaatcaattattgattttaataacaatcttgatttgaataaaattaataatctaaatttttcaaaacctgatattaaaagatttaaatcattaaaaattctaagacaactacctcataaagacagtttatttgaaacaattttaattactacaaatgatgagttggttcatatgtttttaaacaaacaaattgagtatgaaaaactagtattatatttgataaaaattattaattttaaaatttttaaaaagtactataaaattcgacccaaatcagttaaacaaatactagaaattaggtatttagtaaaaaaacttgtacatgagtatattagaaaaacaaaaaaaaaattttattagt

SEQ ID NO: 206780 - DNA, 652 bp, Unknown
  Bacterial polypeptide expressing nucleotide sequence isolated from the Sargasso Sea
atgaaaaatattcttttgctaggtgcaacaggaagtataggaaccagcgttttaagcgtcattaaacagaataaagaaaaattaaatctttatggaattgcccaagaatcaaatatagacaaagcgcttgcgatttcaaaagacttctcaccaaagtatatatactttaatgagaaacataatttacctgattgtgaattcttagataagaaaacaaaattactatttgaaaaagaggaacttgagacattaattaatgacccaaacattgattatatagtttcagctatttctggttttgctggtcttgaaagcacactcatggcagctaaaaccggcaaaaagatattgcttgccaacaaagaaagtattgtagttgctggtgaattaattattccaatagctgaacattatcaatcaaaaattattccaattgatagcgaacacaatgctatctttcaatgtttagatgatgataaaaatattgatgatgtttcgaaaataatcataacagcatctggaggaccatttgtttataaagatctaaaagatcttgtaaatgttactaagagtgaggctttaaaacaccctaattggaatatggggtctaaaatttctattgattcagcaacactcgtaaataaatgctaga

SEQ ID NO: 206781 - DNA, 745 bp, Unknown
  Bacterial polypeptide expressing nucleotide sequence isolated from the Sargasso Sea
atgaaaaaaaatatttctatcttaggttctacaggttcaattggaataaattctttaaaaatttttagcaaaaaaaaaaaattatttaaaatttatattttagcagctaataaaaattataaattaatttgcaaacaaatttatcaatttaatcctgaaatattttttgttaatgacttaaaagtctacgaaaaagtgaaaaaaaaatttaaaaattataaagttagaataattaaagatattgataccaaaaaaaattattttaaaaaatcagatattactattgccgcgatacctggtattgcaggattaaaaccaacagttgagctaataaaaaaaagcaagaaaattttaattgcaaataaagaatcggtaatttgtggatggagcttaataaaaaaaactgcttcaaaacataatactcacattatacctgttgactcagaacatttttcaataatgaaactattagaaaatgaaaaaaaaaataacgttaaaaaaatttatcttacggcatcaggagggccctttttaaaccttaatatttctaaattaaaaagcgttaaaccacatgaagctattaaacatcctaaatggaaaatgggaaaaaaaatctcaatagactcagctactttaatgaataaaatgcttgaagttatcgaagcccataaattattcagtatcgaaatagataaatttgaaattgttattcatccccgagtcattaattcatgcaattattgaa

SEQ ID NO: 206782 - DNA, 663 bp, Unknown
  Bacterial polypeptide expressing nucleotide sequence isolated from the Sargasso Sea
attgaaatacattactgtgctaggttctactggttcaattgggactcaaactctcgaaatagctagtgagcagcctgataagtttaaagccgtagctctttctgcaggaagaaatattaatttattaactgaacaagttaaaacacataaaccagaggtagttgcaattgaggatgaaagtcttatagaagatttaaaagataatattaataacttagatttggataatgctccgttggttttaggtggaaagcaggggattaacgcagttgcagcatgggataaggcagatactgtggtaacagggatagtaggctgtgcaggcttaattccaacaatgtcagcaattaatgcggggaaaaatattgcacttgctaacaaagaaactttaattgcggcaggaccaattgttattcctgcattaaagaaaaataatagtaggcttttacctgctgattcagaacactctgctatctttcaatgtttacaaggattacctaattatgaaaatgcagatttttcaacaggagagatgcctaagggtttaaaagccatacatttaacagcttctggtggtgctttcagagattgggccgttgaggatttaaagcatgtcacagtggaagatgcgacttcacatcctaattgggatatggggaaaaa

SEQ ID NO: 206783 - DNA, 739 bp, Unknown
  Bacterial polypeptide expressing nucleotide sequence isolated from the Sargasso Sea
cttgcaaaaaattgtaaaaaaaaaaatagattacacaatgtgtgcaatttctggactagctggtttaaaaccaactgtagatgcaattaaatttagtaaaacaataggaattgcaaataaagagtcaattatatgtggatggcaatttattaataaagctttaaaaaaaaataaaactaattttataccaattgattcagaacatttttctatctggacattgcttaaagatcaaaatttaaataatataaaaagaatttatctgactgcttcaggtggaccctttttatataaaaaaaaatctgaaataattaatataaaaccttattatgctttaaaacatcctaattggaaaatgggaaaaaaaatttctatagattcagctacattgatgaacaaaatttttgaagttatagaagcaaaaaaaatttttaatttagacataaaaaaatttaaaataatcattcatccaaagtcttatgttcacgcgattgttcattttaacaatggtttagttaaatttttagcacacgatactagtatggctgttcccataatgaattcactttatataaatggaaaaccatttaaatataaggatggtaatgtaaaatttgaatcattaaatggattgaattttatcaatccaaatgttaaaaaatttcctgtagtaaaattattaaatttaatcaaaaataaaccaagttattttgaaacaatattgatttcaatcaatgat

SEQ ID NO: 206784 - DNA, 898 bp, Unknown
  Bacterial polypeptide expressing nucleotide sequence isolated from the Sargasso Sea
tttgatattgattttgaccttgttgtaaatggtatctctggttttgcgggtattaagccaacttttgtagtcattgaaaagggaaaagacattgcaatagcaaataaagaaacaatagtatctggtggcaaccttattatcgataaatcaaaattatcaggttcaaaaattatacctatagactcagagcacaatgcacttttccaattaatgaaaaattatgagttacatgaaatagataaaattacaattacagcatctggtggtccttttagaagagatacatataaggagttatctaacagaaagtattctgaggcacttaatcatccaacttggaatatgggtacaaaaaatactattgatagtgcatctttaatgaataaaggattagaagttatagaagcatcagttttattttctcttccttcaaataaaataagtgtcctagttcatcctgagtctattatccatggtatcctacatttaattgatggtggtattatatcttatatgtcacagccagatatgagggtgccaatatataatgcaatgaattttccttatacctttaaacattttttaccaagttataaatttggtaatttaagtttccatgatttaaacgaaaatattttcccatctataaaaattgctagatacgctttagaaaaagggtttatagcaactaacttctttaatgcagcaaacgaaattgcagttgagagttttataaaaaatgaaattaattttacgactattttttcaattgtagaaaatgtcacaaaattatcaaagcctggagatcccaaaagtattgaagatgttttcgaatatgataaattagcacgagaatatgctcttaatgaagtaataaaatattcaaatgatagataac

SEQ ID NO: 206785 - DNA, 748 bp, Unknown
  Bacterial polypeptide expressing nucleotide sequence isolated from the Sargasso Sea
atgagtcataaaaaaaatattattttactaggtgcaacaggttcaataggtcaatcttctttacgtttaataagaaaaaataaagaaaaatttaatcttttaggtgtgtctgctcataataatgtaaaattactaagccaaattgttaatgaattcgatgttcctaatgttgttttgtctaatccaaaaaatgctttagattattttggtaaaaatgaattgcagctaggtccatctagcttgattgaattagcaaaaattaaatgcgatgtagtaatatctggcataatcggaatgactggcttacattctgcatttgcagcaataaatgttggtaatgatcttgctattgcaaataaagaaacattagtatctgcaggtaatttctttttggataatagcaataaaaatagaggtaaaatattaccagttgactcagagcatagtgcaatttttcaatgcttagataaaaataatttttctaacgtagattacattacacttactgcttctggtggcccatttttgaatactccactttcagaatttaaaaatattcagataaaagatgcaataaagcatcccgtttggaaaatgggaaagaaaatttctgttgatagtgctacaatgtttaataaagcattagaaataattgaagcatctgttttatttaatattgagagtgataaaattgaagttataattcatccagagcatataattcatggattagttcattataaagatg

SEQ ID NO: 206786 - DNA, 490 bp, Unknown
  Bacterial polypeptide expressing nucleotide sequence isolated from the Sargasso Sea
aagatggttgtttaatactaaaaaagatcagcttaaagtggtgattcaccctcaaagtgttatccattccatggtgcaatatcgagacggttctgtgattgcacaaatgggtaaccctgatatgcgcacaccaattgctcattgtatgagctatccgcaaagaattgacgccggcgttgaacctttggactttttcaaagtcggacaattaagcttttgtgaacctgactttgttcgttttccttgtttgcgcctagccatgcaagcctgtgagaaaggacaagaagctaccacagtgttaaatgcggcaaatgaaatcgccgttgatgcttttttaaaaggtcagatacgttttaccgacatcgctgatgtaaatcatcattgtttagactcggtacaacaaactcgtttagccacaatagacgatattttacagcttgatgatcaagctcgtaataccgctaaatcgtttattaacgtgcttaattaa

SEQ ID NO: 206787 - DNA, 547 bp, Unknown
  Bacterial polypeptide expressing nucleotide sequence isolated from the Sargasso Sea
aaaaatcatattaacaggcagtggaggcccattcagaacaaggccaattaatactttcatggatattgaagtttcagaagcattaaatcatcctaactgggagatgggtaaaaaaataaccatagattctgctacaatgatgaacaaaggtttagaggttattgaggcattttggttatttaacattgaagttaatatgattgatattgttgtacatccacaatcgattatacattctatggtagagttcaaagatagttctattaaggcacagatgggtgttccagatatgaaggttccaatacaatatgcattgacatatccaaatcatataagtgcaccttgggaaaggttagatttaaaattaataggtgatctgtcttttgaagctccagattttgacagattcccttgcataaaactcgcctatatgtctttagatagaatgggatcaactcctgctattctaaatatggcaaatgattattctgtttataaatttttgaattctgaaattaagttcactgaaataccaaaaataatagaa

SEQ ID NO: 206788 - DNA, 907 bp, Unknown
  Bacterial polypeptide expressing nucleotide sequence isolated from the Sargasso Sea
gagttaaaactgtgctcttctggtattgtgggtgctgcagcattaaagcctacacttgctgcgattgaatcagggaagaaaattttactcgctaataaagagtcacttataatgtcaggtccattaatgattaatgcagctaaaaaaagtggagccatcattattccagttgatagcgaacataatgcgattctccaaattatgacgacgatgggcttagactttaataatatacagaactccaaacaaaatgaaagaatcaataaaataacgcttactgcttctggaggcccttttttagatttcacaaagaatcaactatcaagagtaacaccagcacaagctattaaacatccaaaatggaaaatgggtaagaaaatatctgttgactcagcatcaatgatgaataaaggattggaaataatcgaggcagcaatactatttaacttacaaccaagtcagattaacatactcattcatcctcaaagtgttgtacatgcacttgtttcgttttctgatggatcagttatttcccatatgagcaatcatgatatgcgtgtagcaattagttatgcattatcgtggcccaagagatatgatattgatttagatgaattaaatttagatactgttaataatctttcatttaaaaaagtgagaaaaaatcaatttaaatgcctagatttatgcctgaaagcactaaaacttggaaataatgctccaaccgtcttaaatgcagcaaacgaagttgctgttgaaaaatttcttgaaaataagattaaatttatcgatataccagttataattgaacatgcattaagtaatatgagatgtatgaggaataacacactgaagtcaattttagcatgcgaccaattaacaagagatcaagtatcagaatatataa

SEQ ID NO: 206789 - DNA, 799 bp, Unknown
  Bacterial polypeptide expressing nucleotide sequence isolated from the Sargasso Sea
gcggatgaattctccgtacctttcgcctgtctcgagcatccccctccgtacgaagcttcctttcccgaaaacaccgaactcctctgcgggcaggaaggaatccaagccatggcagcgcttcccgaagccgatcttatcgtcgtcgcagtggtcggggcagctggtctggtccctaccctctcggcagtaaaagaaggcaaggacgtcgtcctggcgaacaaggaagctctcgtggttggtggtgaactggtcacgcaaacggcagcccggcatggggccaggctcatacctgcagatagcgagcacaacgccgtattccaatgccttcatgggcagcctgaaaaatcccttgattccataatacttactgcgtccggcggaccgttcagggatttgcctgaagaagatttccagagcattacccccgaacgagcgctcagccacccgaattggtccatgggtaagaagatcagcatcgactcggccaccatggcgaacaaggcgcttgaattgatcgaggctcactggcttttcggccttcctccggaaaaattggaggttgtcgttcatccgtccagcctggttcacgcgatcgtccggtttgtcgatggttgttgtctcgcccagctctcccctccctccatgacctttgccctgcaaaacgccctgctttatcccgaacgcgttcccggggttgatgaatctatggatttatcgaaccctctcgatctctcctttacacctccttgctacaaaaagtttccctgcctgcgactcgggacggacgccctgctcaagg

SEQ ID NO: 206790 - DNA, 703 bp, Unknown
  Bacterial polypeptide expressing nucleotide sequence isolated from the Sargasso Sea
aagaaaaaaaaatctagagtatttcctgttgattcagaaccatcagcaatctggcaatgtattgaaggagaagaacgtaaaatatctaagattatattaacagcttctggaggaatatttagagataaaaaatttgatgaattgaaaaatattactccaaaagatgcaacttctcatccaaactggaatatgggtaaaaaaattactgtcgattcctctacaatgatgaacaaaattttcgaaatagtcgaaacatcttatatgttcaacataccatttgaaaatatagatgttttgattcataggcaaagcatagttcattcgatggtagaattttttgatggttctataaaggctcagctatcaaaagcagatatgaaactccctattcaatatgcattggattttccaaactttaatctaaactatgaaaataaattagatttttcagagataaaaaatctaactttttcccctgtagatagaagcaagtatccttgttatgatttttccattgattacataaagaaaggtaaattatacatatcagctttatctatcttagatgaaattttagtaaatctatttctagatgaaaaaatttcttatgtttcaattcctttatacttagaaaaatttttagatgatgaaaaatttgatcaaaatttcacaatagataatataattgaagttagagaataaa

SEQ ID NO: 206791 - DNA, 659 bp, Unknown
  Bacterial polypeptide expressing nucleotide sequence isolated from the Sargasso Sea
tatgaaaaaatttatttcaattcttggctcaaccggatcaattggtgttacatcccttaatatattaaataaaaaaaaaaaattatttaagattaatattcttgctgcggataaaaattttaatactatatgtaaacaaataaaaaaatataagccaataatattcgctataaataataaaaaaattttatttaaagttaaaaaaaaatttaaaaattctaattgtaaaattattcatttaaatgaaattaacaaatataattttttaaattctgatattctaatttctgcaatacccggtattgccggattgactccaacaattaatgttttaaaaaaaagtaagaaacttttaattgctaacaaagaatcagtaatttgtggctggaaatttatttataaaatagtaaaaaaaaaaaaaataaaagttatacctattgactctgaacattatggaataatgagtcttattcggggacaaaatattaactcgataagtaagatttacctaactgcatccggaggaccctttttaaactataaaatttcaaagattaaaaacgtgagcccacaaaaagccttaaagcacccaagatggaaaatgggcaaaaaaatttcaatagactcagcaactttgatgaataaaatactagaattag

SEQ ID NO: 206792 - DNA, 850 bp, Unknown
  Bacterial polypeptide expressing nucleotide sequence isolated from the Sargasso Sea
aaaaaatattacgctgcttagcagccaaatagatgagttttcgccagaatatgtagttgttcatcatgaagaagatgcgattagtctaaataaaaaatatccaaaactaacagtgttatatggccaagatggactaaattcccttgctgcagtcaatgctgatatgatcttagtggctatatctggcacaacagccattgaacctacatatactgcaatacaagcaaagaccccaattgccttagcatgtaaggaagttcttgtatcagctggtcatattattatggaaaaagcgaaatcactgaactgtcccatacttcctgttgactccgaacatgccgctcttaaacaatgtctatctagtgttaatgagtcgctcgatgatgtacggcaagtaatactcactgcatctgggggccccttttggactaaagatgtgaaagagtttgacgctattactcctgaaatggctcttaagcaccctaattgggatatgggaaaaaagatttcaatcgattcagcaacactgatgaataaaggacttgaaattattgaggcccaccatttatttaatattccatatgataaaattaatgcccttattcatcctcaaagtatagttcatgccattgtcgagtttaatgacggaacgatgctaagccaaatgagcagtgctgacatgagacttcctattcaatatgcgttaagctacccacaaaagtggagcaacccctggccacctttatcattaacagaaatgaacgatctaagttttcatccagtaaacacagatgcgtttccattatttcaactggccattgactgcggaaaagagggaggcttacttcca

SEQ ID NO: 206793 - DNA, 772 bp, Unknown
  Bacterial polypeptide expressing nucleotide sequence isolated from the Sargasso Sea
tatgaaaaaaaaaattgctattttaggatcaacaggctctattggcaaacaaacgttagatattataaaaaataacaaaaattattttgatattattcttttatctactaataaaaatgttaaagagatttcaaaacaagtaaaattatttaaaccgaaaaatttaattataaatgatacaaaaaaatttaatttatttaaaaaaaaaaataaaaaaataaatatatttaataattacaagtgtttcaaaaaaatttttaaaaaaaaggttgattatgctatgagctctataagcgggttcagtggtttacaacctacaatagatattattaagtatacgaggactatagctattgcaaataaagagtctattatttgtggttggaatttaatagatagacaattaaaaaaaaataaaactcaatttgttccaatagactctgaacacttttcaatttggtcacttctttataacaaaaaggaaaatatcgataaaatttatataactgcatcaggtggaccctttttaaataaaaaaattaatactttaaaaaatataaaaccgatgcacgcaattaatcatccaagatggaaaatgggtaaaaaaatatcggttgattctgctacaatgattaacaaagtttttgaaattcttgaagcaaaaaaaatatttaatattagcttaaaaaaattaaaaatcctgctacatccagactcttatgttcatgctattgttaaatttaaaaatggtcttacaaaaatgtttatacat

SEQ ID NO: 206794 - DNA, 784 bp, Unknown
  Bacterial polypeptide expressing nucleotide sequence isolated from the Sargasso Sea
gttaaaagtagaaaatattttagttagtaataaaaaaaaatttttaaaattaaaagataaactcaaaaaaagtaacattaaaatatttaacaattttaaagattttaataagattattaaaaaaaaattagattatacaatgtgtgcaatttctggtttagacggcttaaatccaacgataaatattatcaaatctacaaaaaatatagcaattgctaacaaagaatccataatttgtggatggaacttaatagataaggaattaaaaaaatacaaaactaaatttattcctgttgattctgaacatttttctatttggtcaagtataaacaaaatcaatcaaaatttaattgatcaagttatacttacagcttcaggaggccctttcttaaaaaaaaataataaatttttaaaaaaggcaactattaaaagtgctttaaaacacccaaattggaaaatgggaaaaaaaatttcaatagactcggctactttaatgaataaagtttttgaatttattgaggctatgagaatctttgatttaaagaaggaaaagttaagtatattgattcatccaaaatcctacgtacattcaattgtaaaatttagtaacggattaataaatattactgcacacgatacaaatatgaaaatacctatatttaattcaatttattttccaaattttaaaaaaattattactaagaatatagattatgaagtgctcaacaatttgtcactatttacaccatcatataaaaaattcccatcactaaagcttataaat

SEQ ID NO: 206795 - DNA, 769 bp, Unknown
  Bacterial polypeptide expressing nucleotide sequence isolated from the Sargasso Sea
aatgaataaaaaaaaaaatattatcttgttaggagcaactggttcaattggtgaaacttctttgcggttgctaagaaaaaataaagaaaaattcaatctcattggcgtttctgctcatgataatgtagaatcgttaagcaaaatagttaatgaatttgatgttcctaatgttgtattatctaatcctaaaaatgctaaattatattttggtaaatatgagttaaatgtaggtcagtattgtttagttgaactagcaaagttaagctgtgatgttgtaatttctggaataattggaatgtcaggtctatatccagcatttgccgcaattagtgctggaaataatcttgctatggcaaataaagaaactttagtgtcagctggtaaaatttttatggaaaaaagttgtgaaaaaaaagttaaaatctttcctgtagactctgaacatagtgcaatatttcaatgcttagaaaaaaataatatatctaatatagactttatcacactgactgcatcaggtggtccttttttaaatactccattaggaaactttgaaaatattaaaccaaaagatgcaataaaacatcctgtttggaaaatgggtaaaaaaatttctatagatagtgcaactatgtttaataaagctttagaaattattgaagcatctgtgttatttaatattagatatgataaaatcgaagttatagttcatcctgaacatattattcatggcttagttcattataaagatggttcaattttagcaaattta

SEQ ID NO: 206796 - DNA, 523 bp, Unknown
  Bacterial polypeptide expressing nucleotide sequence isolated from the Sargasso Sea
gatgaataagggtttagaaataatcgaggctgcaattttgtttaatttactgcctaatcaaattaatgttttgatacatcctcaaagtattgttcatgctcttgtatcattcagtgatggatctgtaatttctcatatgagtaaccatgatatgcgtgttgccattagttatgcgctttcatggcctaaaagatacgatatcgatatagagaaattaaaacataagagtttctcaaacctttcttttgaaaaagtaaaaaagaatcaattcaaatgtcttgatttatgtactaaggctctgaaattgggccataatgctccaactgtattaaatgcagcaaatgaggtcgcagttgaaaaatttcttgaaaataagattaaatttattgatataccagttataattgaacatgcattgaataatatgaaacttacgaaaaataacacgttaaagtctattctggcatgtgataaattaactagagatcaaatctcagattatataaaaattagatggaaataa

SEQ ID NO: 206797 - DNA, 583 bp, Unknown
  Bacterial polypeptide expressing nucleotide sequence isolated from the Sargasso Sea
ttgaaatacattactgtgctcggttctactggttcaatagggactcaaactctcgaaatagctagtgagctgcctggaaaatttaaagccgtagctctttctgcaggaagaaatattaatttattaactgaacaagttaaaacacataggccagaagtagttgcaattgaggatgaaaatctcatagaagatttaaaagataatattaaaaacttaaatttagatagtgctcccttggttctgggtggtaaggaggggattaacgaagttgcagcatgggataaggcagatactgtagtaacaggaatagtaggttgtgcaggcttaattccaacaatgtcagcaattaatgccgggaaaaatattgcacttgccaataaagaaactttaattgcggcaggaccaattgttattcctgcattaaagaaaaataatagtaggcttttacctgctgattcagaacactctgctatctttcaatgtttacaaggattacctaattatgaacatgcagatttttcaacaggagagatgcctaagggtttaaaagcgatacatttaacagcttcaggtggtgcttcag

SEQ ID NO: 206798 - DNA, 800 bp, Unknown
  Bacterial polypeptide expressing nucleotide sequence isolated from the Sargasso Sea
aattggaaaatctttactacgtatagttgaaaaagataagaaaaattttaagatagagttattaacagctaatacaaattacaaagatttaattaatcaagctaaaaaatttaaggttaaaaatataatcataactgatctagaaagttttaataaggcaaaacttatcataaaaaataaacagtttaatatttttcaaaattttgattacttaaaaaaaattttacccaagaaagttgattatgtaatgagcgctatttctggtattggtgggttattaccaacacataaaataattaatcgaacaaaagtaattgctatagcaaacaaagaggcaattatttgtggatggccgcttataaaaaaagaacttaaaaaaaacaaaacaaaatttatacctgttgactctgaacatttttcaattttttcacttcttgataataatattaaaagtgaagttgaaaaaatttatattactgcatctggtgggccatttataaatctacctaaaagtcattttaaaaaaattaaaattagtgaagcattaaaacatcctaattggaatatgggaaaaaaaattacaattgactcagcaactcttatgaataaagtttttgaagtaattgaggccaagaatatatttgatattggatatgataaaatttcaatacttactcatcccaagtcatatgttcacacaataattaaatttaaaaatggtttaagcaaattattaattcacgaaccagacatgacaatacctatttataattctgtttatttacaagaaaataaaaatt

SEQ ID NO: 206799 - DNA, 508 bp, Unknown
  Bacterial polypeptide expressing nucleotide sequence isolated from the Sargasso Sea
gatgaacaagggattagaggttatcgaagcatattggttatttaatcttgacgtctctatgattgatattattgtacatccacaatcgatcatacattctatggttgagttcaaagatagttctattaaggcacagataggtgtgccagacatgaaggttccaatacaatatgcattgacatatccaaatcatttaagcgctccttgggaaagattagattttaaattacttggtgatttgtcttttgaagctccagattttgatagattcccttgtatacaactcgcctatatgtctttagatagaatgggttcaactcctgctgttttaaatatggcaaatgattattcggtttataaatttttgaattccgaaattaagttcactgacataccaaaaataatagaagctgcgatgaagtatcatcaatgggttgaaaagccagatttagactatattaaagagttagataattggactaaggattttgtgaataattttgattaa

SEQ ID NO: 206800 - DNA, 757 bp, Unknown
  Bacterial polypeptide expressing nucleotide sequence isolated from the Sargasso Sea
actaatttagcagataaaacagatgtcaaaatttatcctgttgatagtgagcatttttctatttggcaatgccttgttggtgaagacaccaaggaaataaataaaattattttaacaggtagcgggggtccatttagagagctaccaattgaaaaatttaatacaattactcttgatcaggcactaaatcatcctaactgggaaatgggaaaaaaaataaccatcgattcagccaccatgatgaataaaggacttgaagttatagaagcccaatggttatttgatatgcctactgaaaaaataaaaatagttattcaccctcaatcaattattcattctatggtagaattcaaggacaagtctattaaagctcaattaggattaccagatatgaaaatacctatccagtatgccctaacatacccttcgcactgcgaaactgattgggatgaacttgacttaacagaaattcaatctttaacatttgaaaagcctgattttataaagtttccatgtatgagactagcattcgatgttttaaatactggagggacagctccagctgtattgaacgttgcgaatgagcaggcagtttacagatttttaaaccaagaaattaatttcaatgaaattcctagtataattgaaatggcatgtgaaaagcatgactttgtttcagagccatctctagatgatatacttaacattgagaaatggtccacagatttcgtaaaatcatatcatagtaaaagttaaa

SEQ ID NO: 206801 - DNA, 886 bp, Unknown
  Bacterial polypeptide expressing nucleotide sequence isolated from the Sargasso Sea
cacttaaaagatcagtttgaagtgaaatacttatctagcaatacaaactatgagttgcttattgaacaaattgaaatatttaaacccaaagcggtttgtattgttagtaaagaggcgtataaaattgtaaaaaaagaagtaaataatatagatgttaaagttctcgctggacggcagggtctgttagagcttgcaaaaagcgaagatgtagatatcatgcttaatgctttagttggtgctgctgggatggaaccaactttagttgcaatagagtccggtattgatgttgctttggcaaataaagaaagcctagttatggcgggagatattataaataaagcaatgaaaaaaacaggcgcgaagatatttcctgttgatagtgagcattctgcattgtggcaatgtatggtgggagaacaattatctgatattgatcgtataattttgacaggtagtggtggtccattcagaatgagagcaattaatacttttggagatatcacaattgaagatgcgttaaaccatcccaattgggacatggggaataaaatcacaattgatagtgcgaccatgatgaataaaggtttagaggtaatcgaagcctattggttatttggttttaaacctgaaaacatagatattgtcgtacatcctcaatctattattcactctatgattgaaatgaaagatggagcaattaaagcacaaatagggatccccgatatgaaagttcccatccaatatgcattaacttacccaaatcatttgagtgcgccatgggaaaggctaaatttttttaattgcggggatttaacgttcgaagagccagattttgaaaagtttccattgatacaagttgcatatagagcgcttgaaatggctggga

SEQ ID NO: 206802 - DNA, 580 bp, Unknown
  Bacterial polypeptide expressing nucleotide sequence isolated from the Sargasso Sea
atgaaaattataatttttggatcaacagggtcaattggtcaaagcaccctaagtttaattagaattttaaaaaatactcacaattttgaaatactggctttaacgggtaatgataatattgaccaactttgtaaggatgctattgaatttaaggtcaaaagagtagtaactgcaaataaaaattatattttccaacttaagcaaaaattatcttcacataatgttgaaatttatgctggggaggaagcaattttagatacagcaagaatgggagctgattggattatttctgcaatagttggttttgctggtgtcccaccaacaatagaagctgtaaaatattgtaaaatagttgcagttgcaaataaagaatctttagtttgtgctggtaaattattaatagatactgctaatacttataaatcaaaacttttaccggtagatagcgagcataatgctatttttcaatgtataaattctgaaaatccaaaaactataaagaaagtaatattaacagctagtggaggtccatttcgaaattttacactttctgaaatggctaatgttacagtgctcaagc

SEQ ID NO: 206803 - DNA, 586 bp, Unknown
  Bacterial polypeptide expressing nucleotide sequence isolated from the Sargasso Sea
ttacgcgaggcaagaaaaactaaatctttaatcataccaattgacagtgaacataatgcccttctgcaaataataagtatatttggtctaaactatatccatggcaaaaaaagcttaccacaaaatattgatagtatttcattgactgcctctggaggaccttttcttggatataataatagaatgttatctcaagtaacgcctaatcaggctattaagcatcctaattggaaaatgggtaaaaaaatttctattgattctgctactatgatgaacaaaggtttagaagttattgaggcatcccttcttttcaatatcaatccagataaaattaatgtttatatccatccccaaagtctcatccacgcacttattactttttatgatggctcaactctctcacatataagctatcatgatatgaagattccaattagttatgcacttaattggcctaacaggcagagatcatctaagaaaatgaacaatttgaatggtacatacgaacttagaaaaattaaaaaaagcgattatccatgctacgatttatgtattgaggcattaaaaatcggtaaaaatgccacaa

SEQ ID NO: 206804 - DNA, 772 bp, Unknown
  Bacterial polypeptide expressing nucleotide sequence isolated from the Sargasso Sea
atgacaaaaaatatttttttattaggttcaactggttctattggtgatgcagcattaaaagttttaaaaaaagataagaaaaactttaatattaaattgctaacaacaaactcaaatgtaaaaaaaatatatgaccaagctatttccttaaacgtaaaggaaattgtaatatttgataaaaaagaatattataataattataaaaaattcagtcttaaaaatattaaaatttattcatctattaaagaagcatttaaaaaaaaaaaaagaaaatcttatctgacaataaatgcaatatcaggcatagatggtttagaaccaacgctagatataattaaatattcaaggaatttagctatcgctaataaggagtctattatatgtggttggaaatttttaaataaagaattattaaaacataaaactggttttatccctttggactcagagcatttttcaatatggtcattaattaaaaatgagaaaaaaaagaatttaaatagaatttatttgaccgcttcaggaggaccttttttgaattctaaattgaataaaataaaaaatattaaaccaaaatttgcacttaaacaccctaattggaaaatgggtaagaaaatttctatagattctgcaactatgatgaataaaatttttgaagtcattgaagctattaaaatatttgatttaaatccagaacaaatcaaaatattaattcatccaaagtcatatctacatgcaattgtaaattttaaaaatggattaacaaagttgt

SEQ ID NO: 206805 - DNA, 790 bp, Unknown
  Bacterial polypeptide expressing nucleotide sequence isolated from the Sargasso Sea
aattatatgtggatggtcacttattaaaaaagagttaaaaaaacacaaaactaagtttatccctgttgactctgaacatttctcaattttttcacttttagataattcaggtaaaaacgacatcgaagaaatttatattacagcatctggaggcccttttagaaatttgcctaaaaaaaaatttaaaaatataaaattaaaagatgctcttaaacatccgaattggcgtatgggaaaaaaaatcacgatagactctgcaactctcatgaacaaagtttttgaagttattgaggcaaaaaatatttttaatagtagttatgataaaatatcaattttgatacatccaaaatcttatgtccatgcaatagttaaatttaaaaatggcttgattaaattccttatacatgaaccagatatgaaaatacctatttacaattccatttattataaaagaaataaaagtattaaaactagacctttagattttaaaattttaaataatcttgaattaaaaaaagtagaaaaaacaaaattcccacttgtgaaattacttgataaaattccaaatcgatcatcactttttgagacgattttaataaccataaatgattatttagtatataaatttttagaaaaaaaaataaattttcaagaattgaatagacttatttataaaatttcaaattataaagaatttcaaaaatttaagaaaattaaccctaaaaaccttaaagagatatataatttaagagattatgttcgtttaaaaattaagtctttaggtatataa

SEQ ID NO: 206806 - DNA, 775 bp, Unknown
  Bacterial polypeptide expressing nucleotide sequence isolated from the Sargasso Sea
attgaaatacattactgtgctcggttctactggttcaataggaactcaaactctcgaaattgctagtgagcagcctgataagtttaaagccgtagctctttctgcaggaagaaatattaatttattaactgaacaagttaaaacacataaaccagaggtagttgcaattgaggatgaaagccttatagaagatttaaaagataatattaataacttagatttggatgattctcccttgattttaggtggaaagcaggggattaacgcagttgcagcatgggataaggcagatactgtggtaacagggatagtaggctgtgcaggcttaattccaacaatgtcagcaattaatgcggggaaaaatattgcacttgctaacaaagaaactttaattgcggcaggaccaattgttattcctgcattaaagaaaaataatagtaggcttttacctgcagattcagaacactctgctatctttcaatgcttacaaggattacctaattatgaaaatgcagatttttcaacaggagagatgcctaaaggtttaaaagccatacacttaacagcttctggtggtgctttcagagattgggccgttgaggatttaaagcatgtcacagtggaagatgcgacttcacatcctaattgggatatgggaaaaaaaataactgtagattctgcaactcttatgaataaaggattagaagttatagaagctcattatttatttgggacctcttacgaaaatatcgaaatagttattcaccctcaaagt

SEQ ID NO: 206807 - DNA, 529 bp, Unknown
  Bacterial polypeptide expressing nucleotide sequence isolated from the Sargasso Sea
ttgaaatacattactgtgctcggttctactggttcaattgggactcaaaccctagaaatagctagtgagcagcctgataagttcaaagccgtagctctttcagcaggaagaaatattaatttattaaccgaacaagttaaaacacataaaccagaagtagttgcgattgaggatgaaaatcttatagaagatttaaaagataatattaataacttagatttggatagagctcccttagttttgagtggaaaggaagggattaacgcagttgcagcatgggataaggcagatactgtcgttacagggatagtaggatgtgcaggcttaattccaacaatgtcagcaattaatgctgggaaaaatattgcacttgctaacaaagaaactttaattgcggcagggccaattgttattcctgcattaaagaaaaataatagtagacttttacctgctgattcagaacactctgctatctttcaatgtttacaaggattacctaattatgaaaatgcagatttttcaacaggag

SEQ ID NO: 206808 - DNA, 605 bp, Unknown
  Bacterial polypeptide expressing nucleotide sequence isolated from the Sargasso Sea
cctgggcacggtggcgtactcgaccgcatcgacgcattattgccggtgctgccgcttgccatgctgctgctcggctagagaaagagatatgcaaaaacgtctgacattgctcggttccacgggctcgattggagacagcacgctcgacgtcgtcgcgcgtcatccggagcgcttttcggtttacgcgctcactgcgcatcgcaacggcgacaagctcgtcgagcaatgcctgcgctttcagcctgaggtcgcggtagtcggcgatgccgataccgccgcgcaggtcgcggcgaagttgcgagaagccggctgcaagaccgaggttacgtacgggccgcaagcgctcgtcgacgtatcggagagcaatggctgcgatacggtcgtagcggcgatcgtcggcgcggcaggcctcgcgccgagcctcgccgcggcgcgtgccggcaagcgcatcctgctcgccaacaaggaagcgcttgtgatgtccggcgcgatcttcatggacgcggtgcgcgacaacggcgccgtgctgctgccggtcgacagcgaacacaacgcgattttccaatgcctgccgcgcgaagccgctctgcacggcggcgtctcga

SEQ ID NO: 206809 - DNA, 494 bp, Unknown
  Bacterial polypeptide expressing nucleotide sequence isolated from the Sargasso Sea
ttacgaaaatatcgaaatagttattcaccctcaaagtgttattcattcaatgattgagatggaagattcttcagtattagctcaattaggttggccagatatgaaactacccattttatatgcgatgagttggcctgaaagatttaaaacaaattggaaaagattaaacctaagtgaaattggaaaattaacttttaaagagccagacgagtttaaatatccatgcatgggacttgcctatgccgcaggaaaatcttctgggactatgcctgcagtcttgaatgctgctaatgaaatggctgttgaacaattccttaaagaaaaaatctcttttcaagaaattccaacatttataagtaaagcttgtgaatcacatatggagaatttgaatttgagtcccgaattggaggatattcttgaaatagacaattgggccagactttttgttgagcaagaaattaaaaaaggaaaaaaatacgtaagtattggataaa

SEQ ID NO: 206810 - DNA, 907 bp, Unknown
  Bacterial polypeptide expressing nucleotide sequence isolated from the Sargasso Sea
gtctagcagctatgaaaaagattatacaatagcttctatagttggaattgcaggtcttaaatcagcatataatagtattggaaacactaaaaacctagccttagcaaataaagaagcaatagtttgtgctggaaaaatatttatgaatagagcaaaaaaaatgaatactaatattctacctctagactccgaacataatgctctttttcaaataattcaaaacagcaatatcaaagctatcaaaaatattatacttactgcctcaggaggtcctttttggaataaaaagaaaaattttggtaccatctctgttaatgaagctttaaaacaccccaattggaaaatgggtagaaaaatttctattgactctgctacaatgattaataaagtattagaaaaaattgaagcagcaattcttttttcgctagattttgataaaattgatatagttatacatccaagttctatagttcacggagttgtaaattttatagacggtaactctttaatgttacttagtaagccagatatgaaaattcctataagctgtgcattaaattggcctaaaagggtaaaaactaatattaactctatagatttaaaaaaaattaaaaaattagatttctttgatataaattcaaaaacatttccctctcttagcctctttaaatatttatatgataataaaattaatgacggaaaactaattgtattaaacgcttccaacgaagtcgcagtcaaaagttttctcagtaaagatataaagtttttagatattattaaagtaataaaaaattcgctgcttagctttaattgtgcagctccaaaaaatataaatgatgtctttgatattcatgacgaagctagtaaaatatcttatgattatataaacaaattagtaacttaa

SEQ ID NO: 206811 - DNA, 451 bp, Unknown
  Bacterial polypeptide expressing nucleotide sequence isolated from the Sargasso Sea
atgattgatattgttgtacatccacaatcgatcatacattctatggtagagtttaaagatagttctattaaggcacagatgggtgttccagatatgaaggttccaatacaatatgcattgacatatccaaatcatataagcgcaccttgggaaaggttagattttaaattaataggtgatctgtcctttgaagctccagattttgacagattcccttgcataaaactcgcttatatgtctttagatagaatgggatcaactcctgctattctaaatatcgcaaatgattattcggtttataaatttttgaattctgaaattaagttcactgaaataccaaaaataatagaagctgcaatgaaacatcatcagtgggttgaaaagccagatttagactatattagagagttagataattggactaaggattttgtgaataattttgattaat

SEQ ID NO: 206812 - DNA, 873 bp, Unknown
  Bacterial polypeptide expressing nucleotide sequence isolated from the Sargasso Sea
ttcgatcggaaaatctttgataaatataattaaaaaagataaaaaaaaatttgatattgttcttttaactgcagaaaaaaactactctgaactacttaaacaagctaaattatttaaagttaaaaacttaattattagtgataaaaaaaaatatttggatttgataaaaaaaaaaaaagttaaaaatttaaaaatatataacaattttgatcaattaaactcaatattaaaaaaaaaagtagattattcgatgtgtgcgatttctggaattaatggacttgagccgtctttaaaaataataaaatattcaaaaaaattagctttggccaataaagagtcaattatttgtggatggaacttaattaaaaaagaattaaaaaaaaataaaacccagtttttaccagtagactcagaacatttttcaatttggtcactaattgataaagaaagtaaaaatattattgataaagttttcattacagcatcgggagggccatttttgaaatggccattatcaaaaattaaaaacgcttctccaacaaatgcattaaaacacccaaattggtcaatgggaaaaaaaatatctatcgactctgctactatgatgaataaagtttttgaagtgattgaaactcaaaaaatttttaatttaccaaaagaaaaaattgaaattcttgttcatgaaaaatcatatgtacatgcaatagttgaattcaaaaatgggcttaaaaaattacttgcacatgatactaatatgagaattccaatatttaatacactttatcacaatacgacaaaaacaattaaaagcgatagcttagatattaaaaaatttaataacctaaactttagaccagtagataaaaagaaatt

SEQ ID NO: 206813 - DNA, 900 bp, Unknown
  Bacterial polypeptide expressing nucleotide sequence isolated from the Sargasso Sea
ttacaaaaaaataaattatttaataaataaatataaaccaagctattttgttatttttgataatcatacctaccaaaaaataaaaaaaaaaaaatataaaggtaaagttaaaatattaaattctgaacaatattttaaatataattttaaaaaatctgacgtatcaatattagcaataccagggattgcaggcttacaaccaactttaaaatcattaaaaataagtaagaaaattcttatagctaataaagagtcagttatctgcggctgggatttaataaataaatacaaaaaaaaatataaagttaaaatatttcccgtagactcagagcatttttcaataatgaacatgttgaataaaacaaacaaaaagaatattgaaaaaatttatttaacagcttcgggaggtccgtttttaaactatccactaaagatgatgagaaatataaaacctgctcaagcaataaaccatcctaagtggaaaatgggaaaaaaaatatctgtagactctgcaactcttatgaataaaatattcgaagttattgaggcgagtaaattattttcaattgatcttaaaaaaatagatatcttaatacacccacaatctttagttcatgcaattataaaatttaaaaatggattatataaatttttatattttgaaactgacatgtcaataccaattggtaatgcattatttgaagataaatttgaggtaagcaaattttcaaaattaaattataaattaaaaaaaaatgatttaaccgaaaatttgaacttttttaaagttgatcacaaaaagttcccagcaataaaattaaaacctaaattgaaccaatacaattcgacatctattatactaaatgcggctaatgaaatatttgttgatcaatttttgaa

SEQ ID NO: 206814 - DNA, 847 bp, Unknown
  Bacterial polypeptide expressing nucleotide sequence isolated from the Sargasso Sea
aaaaatattaaaatttacaataattttgaaagtttaaataaaatatttaaaaataaagtagattataccattagtgctataactggaatagatggacttttacctacattaaaaataattaaacatacacaaaaaatagcgattgcaaataaagaagcaataatttgtggttggcatatattaaaaaaagaattaaaaaaatatggtactgaatttgtaccagttgattctgaacatttttccacttggtatggtttaaaaaaaaataaagacagtattgataaaatttatcttacagcatcaggtgggccgttcataaattatcccttaaaaaatttttataaaataaatattgaacaagcacttaagcatcctaattggaaaatgggaaaaaaaatatctattgactcggctactatgatgaacaaggtatttgaaataattgaagcaaaacatatttttagtattaaatataagaatttatcaattttaactcatcctgagtcctatatacattcgattataaaatttaataatggtttaattaaattaattgctcataaaacagatatgaaaattccaatatttaattcaatttacactggaaatgataaatttattttaaaacataatgaaattgatttaagtaaattaaatagattaaatttaaaaaagatagatttaaagaaatttccaatagttaatattattaagtacttaccagaatataattcattatttgaaactattattgtgtcagcgaacgatgaacttgttaaattatttttaactaaaaaaataaaatttaccgatatatcaaaaaaattaatgttatttattaaaaaac

SEQ ID NO: 206815 - DNA, 667 bp, Unknown
  Bacterial polypeptide expressing nucleotide sequence isolated from the Sargasso Sea
ttaaaaagcataactctaaccgctagtggtggcccatttagaaattggagtttaaaaaaaatgaggtctgcaacacttaagcaagcactaaaacatccgaattggagtatggggacaagaataaccattgatagcgcatcaatgttcaataaagcattagaattaattgaagcaatgcatttatttggactaaagttttctgaagtagaagtaataattcatccccagtcaataattcattcaatggtaaattttaacgacggaactacattggcacaaatgtccttacccgatatgagaggcccaattagttactcactcaattatccaaaaagattaaaaattgatttagaaagcattgatttcacaagaataaatactcttgaatttcatgaggctgatattgaaaagtttcctgctttggatattgtagaaaaggttggaaaaaatttagatctaggcgttatattcaatgcagcaaaggaagtagctttggataagtttatatcaggagaaataggttttttagacatggctaacttggtagaaaaaacccttgaagaaagttcattgacaactaagttgatggatgcacctcaaagtgtcccagatatcttagaattaaacgaacttacaagggaaattgcaaaaaaattaaagttttagg

SEQ ID NO: 206816 - DNA, 760 bp, Unknown
  Bacterial polypeptide expressing nucleotide sequence isolated from the Sargasso Sea
gctgaaatccttcctatcgacagcgaacacaatgctatattccagtgcctcccgcacgattatgaatacggtaatttggcggcatccggcattcgtaaaattctcttaacgggatctggtggtccgtttagagaaaggtcgcttgatagcttctcgtcaattaccatcgatgaagccagcacacaccctaactggtcaatgggcagaaaaattacaatcgattctgcaactatgatgaacaaggggttggagtttattgaagcctgttggctgttcggtgctggcgcggatgatatcgatgtagtcattcatccgcaaagtattattcactctatggtgcaatatgttgatggttcggtaatcgcacaaatgggtaaccctgacatgcgcacccctatcgcctatggtttggcgcatccagagcgaatcgaggcgggtgtaacgccgctcgacttttctgacattgccaattttagttttcaaaccccgtgttttgagcgttatccgaatttgaagctggctattgatgcgtgtaaggaagggcaatgcgccacaacgcgagtgaacgcgtcaaacgaagtggcagttgaagcctttttagaaggcaagattcagttttgcgatattgccaaagtgaatgacgccacgcttaatgctatgccctatgtgtcagtgaattctattcagcaaatactagagcaagacagcttagcaagagcaaaagctaacgagattattcgaggtaaattccagtgctagc

SEQ ID NO: 206817 - DNA, 767 bp, Unknown
  Bacterial polypeptide expressing nucleotide sequence isolated from the Sargasso Sea
catgattaaaatagctatattaggatctacaggctcaattggtaagtctacattaaatattattagaaaaaataaaaagaaatttaaagtaatattgttatctgctaacgttaatggaaaaactttatttaagcaagcaaaagagtttaaagtcaaaaatgttattatatctaatacagaaaaaaataaatattggattacaaaatttcataataaaaaaattagaacttttgataattttttaaaattcaacaaaatttttaaaaaaaaaattgatcatgtaataaatgggatatcgggattagatggattaaaacctacccttgatataataaagcatactaataaaattgctatagctaacaaagagtctattatttgtggttggaatttaattttaaaagaattaaagcaatataatacaaaatttatacctttagattctgaacatttttcacttaataaacttttaaaaaattatgataataaagatgttaagaaaataataataacagcatctggtggtccttttttaaataaaaagataaataataaaaaaattaaaattaatgaagcgctcaaacatccaaattggaaaatgggaaaaaaaattacaatagactcttcaacattgatgaataaagtttttgaggtaattgaagctaaaaaaatttttaattttgaactaaataaaattcaaattttgataaatccaaattcttacatacatgcaattataattattaataatggaactattaaatttt

SEQ ID NO: 206818 - DNA, 782 bp, Unknown
  Bacterial polypeptide expressing nucleotide sequence isolated from the Sargasso Sea
aatgaaaaaaattataatattagggtcgacaggatcaatcggaaaacaaactttagaaattattaagaaagataagaacaaatttaaaattctcttattatcaacagataaaaacattaaacttttatcaaaacaaatcaaaacttttaaagtcaaaaacatagtagttaccaacaaagaaaaatataaagtattaaaaaaaagattaaaaaaaattcaaatatttccagattttaaaaaaatggataaaaaacttatcgcaaaagctgattatactatgtctgcaatatcaggaattgaaggtttaagaccaacaatagatattattaaaaaaacaaaacgaattgccattgcaaataaagagtctttaatatgtggatggagcctaattcaaaaggaattaaaaaaatacaaaacagaatttataccagtcgactcagaacacttttctatttggtcagtaattaaagattataaaaaatcagatattgaaaaagtaattcttactgcatcaggtggaccatttttaaataagaaaataaaaaaaaatgtctctcttagagatgcaataagtcaccctaattggtcaatgggaaaaaaaatctcaattgactctgcaactatgatgaataaaatttttgaaattatagaggcaaaaaaaatatttgatataggactaaataaatttgaaattttaattcatcctaaatcttatgtacatgcaattgttaagttgaaaaatggattaataaaaatagttgcccatgatacagatatgaaaa

SEQ ID NO: 206819 - DNA, 726 bp, Unknown
  Bacterial polypeptide expressing nucleotide sequence isolated from the Sargasso Sea
tatgaagaatgttcttttactaggagctacaggtagcattggaaaaagtgttcttagtgtcatttctcaaaacaaagaatcattaaatttaattggcatatctttcaacaaaaatgttttaagatatcaagaaatatcagaaaaacattcacctgacttcgtttatattgaagatcatgattcatttaaaagtctttgcagtacagacaaggaaagatatttaaatggtgatgaagagcttgaaagacttattaatagagatgatgtcgatattattgtatgtgctacatctggatttgcaggcttaaaaacagcatatattgcatccaagacaggaaaaaagattttattagcaaataaagaaagcattgttgtaggcggagatttaattttacctctagcaaaagagaataattctgaaattatcccaattgatagcgagcacaatgcaatttttcaatgtttatctggtgagaaaggtactgaagacgtaaaaagtattactattactgcgtctggcggaccttttattgatacctctcttcaaaagttaaagcatgttactgtagaagatgctttaaatcatcccaattggaaaatggggagcaaagttacgattgattctgctactttagttaataaatgcttagagctaattgaagcgaaatatttatttgatttagatgaaaaatattttgatttagtaattcacccacaaagcataat

SEQ ID NO: 206820 - DNA, 826 bp, Unknown
  Bacterial polypeptide expressing nucleotide sequence isolated from the Sargasso Sea
gaactagtaggtatttcggtaaacagaaatgttgaaaaggctaacaagattatcaaaaagcataacccaaagtacatttacataaatgataaatcagcaaaagaaaatttactaaagactgaggatgcagtcttttttgaagatgataaagacctttccgatatcttcaattcgagtgatgttgatattgtaatctcagccatctcaggttttgctggaattaagtcgactttccatgcagcaaaatcaggtaaaaagattcttcttgctaataaagaaagtattgttgcaggcggatcattgctgattgaaactgcaagagaaaataataccgaactagttccaattgatagcgagcataatgctatttttcaatgcttacctgaatctagatcaacacaagatgttaaacaaatagtcattactgcctcaggagggccctttcacggaaagaatatagatgaactcaataatgttggagttcaggacgcgctaaatcatcctaactgggaaatgggatcgaagatttctatagattcagctactcttgtaaataagtgtttagaactcattgaagcatgctatttatttgatatggatgagagcttctttgagctcgtaatccatcctgagagcattgttcattcgatagttacatttaatgatggatcttcaatttgccaaatgagtaatcccgatatgcgtgtacctattgctaatgcaatgtcatatgataagagactttcaattccattccagcccattgattttaataatctcaagcttaactttgaaagctttccaaatgacagagctgaaattgttc

SEQ ID NO: 206821 - DNA, 697 bp, Unknown
  Bacterial polypeptide expressing nucleotide sequence isolated from the Sargasso Sea
gccaaatggtttaaaagctatacatctaacagcttctggtggtgctttcagagattggtccgttgaggatttaaagcatgtcacagtagcagatgccacttctcatcctaattgggatatgggaaaaaaaataaccgtagattctgcaactcttatgaataaaggattagaagttatagaagctcattatttatttgggacatcttacgaaaatattaaaatagttatccatcctcaaagtattattcattcaatgattgagatggaagattcttcagtattagctcaattaggttggccagatatgaagctacctattttatacgctatgagttggcctgaaagattggaaacaaattggaaaagattaaacctaagtgaaattggacaattaacttttaaagaaccagacgagtttaaatatccatgcatgggactagcctatgccgcaggaaaatcttctggtactatgcctgcagtcttaaacgctgctaatgaaatggccgttgaacaattccttaaagagaatatttctttccaagaaattccgacatttataagtaaagcttgtgattcgcatatggagaatttaaatttgagtcctgaattggaggatattcttgaagtggataattgggccagacttttcgttaaacaagaaattaaaaaaggaaaaaaatatgtaagtattggataa

SEQ ID NO: 206822 - DNA, 891 bp, Unknown
  Bacterial polypeptide expressing nucleotide sequence isolated from the Sargasso Sea
atagtaggatgtgcaggcttaattccaacaatgtcagcaattaatgcagggaaaaatattgcacttgctaacaaggaaactttaattgcggcaggccccattgttattcctgctttaaagaaaaacaagagcaggcttttacctgctgattccgaacattcggctatctttcagtgtttacagggattacctaattatgaatatgctgatttttcaacaggagagattcctcagggtttaaaggctatacatttaacagcttctggtggtgctttcagagactgggctgttgaggatttaaaacatgtcacagtagcagatgcaacttcacatcctaattgggacatgggaaaaaaaataacagtagattctgcaactcttatgaataagggattggaggttatagaagctcattatttatttggtacatcttatgaaaatattgaaattgtcatccatcctcaaagtattattcattcaatgattgagatggaagattcttcagtattagctcaattaggttggccagatatgaagctacctattttatatgcaatgagttggcctgaaagatttcaaacaaattggaaaagattagacttaagtgagattggacaattaacttttaaaaagcccgacgagtttaaatacccatgtatgggactagcctatgccgcaggaaaatcttcaggaactatgcctgcagtcttaaatgctgcaaatgaaatagctgttgaacaatttcttaaagaaaaaatttcttttcaagaaattccaacatttataagtaaagcttgtgaatcacatatggagaatttaaatttgagccctgaattggaagatattcttgaagtggacaaatgggccagactttttgttaagcaagaaatt

SEQ ID NO: 206823 - DNA, 772 bp, Unknown
  Bacterial polypeptide expressing nucleotide sequence isolated from the Sargasso Sea
ttgcgagagaccgctgcactcaaatccccgaagcggatcaccgtcttgggctcgaccggttccgtagggaccagcacgctggacttggtggcccggaaccgagagatgttcaccgtcgaggcattgaccgcgaaccaaaacatcaaggcgttagcactccaagcccagcaatttgaagcgaaactagccgtgatcggtgaagaagatctttacgcggatcttaaatctgcgctctctggtacgtcgatcgcgtgcgcggccggacccgaggcccttaaggaagccgcagcgcgaccgtcggaactagtcatggccgccatcgtcggcactgccggactggcaccaacgctcgaagcagtccgacggggcaccaccatcgcccttgcaaataaggaatgccttgtatctgcgggcgatatcttcacccaggcggtcgaagatcacggcgcaatactgctgcccgtggattctgaacatagcgctatatatcaagtatttgatttcgatcaggcaaaacaagttacgcgaataatcctgacggcatcgggcggcccattccgaacacgcgagattgccaatatgcaaaatgtaacgccagcggaggctgttgcgcacccaaattgggaaatgggtgccaagatttccgtggattcagcaactatgatgaacaagggccttgaactgatcgaggtttttcatttgttcccagtggacaagtcgaagattgacattcttgttcatcctcaatccgtaatccatagccttgtcgagt

SEQ ID NO: 206824 - DNA, 830 bp, Unknown
  Bacterial polypeptide expressing nucleotide sequence isolated from the Sargasso Sea
aatgttaaagcgtcgcctttccatatttggctcaactggttcgattggcagaagcactctggcgcttgtcgattcggcagctgatcggttcacaatcgaatgtctggttgccggtggcaattatgcgttgctggctgaacaggcgctgaagtaccggccaaggattgtcggtctgcgcgatgagaccgggctggcggcattgcaggcggcgcttgccggttcgggcattgagattgttgccgggcagcgtgactgtgacggcctcgcgcgcattccggtcgatatcgtcatcgccgggatcaccggccttgccggtcttggctcggtgatggcggcggtggaaacgggccagacgctggcgctggccaataaggaatcgctagtatcggcaggccgcatcgtaatgcaggcagcgctcaagaatggagcgcggattctgccgcttgacagtgaacatagtgccatctttcagtgctgggccgggtggcagtcgcatcaccccgaacttctggtagctacggacaatggtttgcaggagatcagccatatctgcctgacggcgtctggtgggccgttccgcagcctgccgctggccgatttttcggccattaccccggcgcaggcggtcagacacccgaactggagcatggggcagaagatttcggtcgacagcgcaacgatgatgaacaaggggcttgaggtgatcgaggcggcctggctgttcggtcttgccagtgatgcgatcgaggtgctgctccatccgcaggtggcgattcatggactggtttatttccgtgatgggtcggtcatcggacagctggggaccgccg

SEQ ID NO: 206825 - DNA, 704 bp, Unknown
  Bacterial polypeptide expressing nucleotide sequence isolated from the Sargasso Sea
aataaagtatcaaaataaagaaaatattaaaaaaatttatctaaccgcatctggaggtccttttttaaataaaaaaaaatctcaattatataatatcgaacctaaacttgctttaaaacatcctaattggaaaatgggaaaaaaaatatcaatagactccgcaacacttatgaataaaatatttgaggtaatagaagctaaaaaaatatttaatttagatataaataaatttaaaataataattcatcctaaatcttatgttcatgccatagtccattttaataatggtttagttaaatttttagctcatgatacaaatatgtctatacctataatgaactctctttatgcaaataaaatatttcattataaaaataaaagtttaaatatttcaatgttaaacaacctgaatttctcagagccaaataaaaaaaaatttccagtaataaaattaataaatatgcttccaaaaaaaattacatattttgagacaatattaataactataaatgattatttagttgataaatatttaaatgaagaaattaattacaattcgcttaattttggcttaataaaattgattaaaaaacgttattttacaagatattataaatttggtcctaaaaatataactgatgtaaaaattatggtaaaaagagtaactacttatttaaataaaattaaattaaatgaatattaaa

SEQ ID NO: 206826 - DNA, 756 bp, Unknown
  Bacterial polypeptide expressing nucleotide sequence isolated from the Sargasso Sea
ttcaatgtttacaaggattacctaattatgaaaatgcagatttttcaacaggagagatgcctaaaggtttaaaagccatacacttaacagcttctggtggtgctttcagagattgggccgttgaggatttaaagcatgtcacagtggaagatgcgacttcacatcctaattgggatatgggaaaaaaaataactgtagattctgcaactcttatgaataaaggattagaagttatagaagctcattatttatttgggacctcttacgaaaatatcgaaatagttatccaccctcaaagtattattcattcaatgattgagatggaagattcttcagtattagctcaattaggttggccagatatgaaactacccattttatatgcgatgagttggcctgaaagatttaaaacaaattggaaaagattaaacctaagtgaaattggaaaattaacttttaaagagccagacgagtttaaatatccatgcatgggacttgcctatgctgcaggaaaatcttctgggactatgcctgcagtcttaaatgctgctaatgaaatggctgttgaccaattcctaaaagaaaaaatttcttttcaagaaattccaacatttataagtaaagcttgtgaatcacatatggagaatttgaatttgagtccagaattggaggatattcttgaagtagacaattgggccagactttttgttaagcaagaaattaaaaaaggaaaaaaatacgtaagtattggataaa

SEQ ID NO: 206827 - DNA, 841 bp, Unknown
  Bacterial polypeptide expressing nucleotide sequence isolated from the Sargasso Sea
tatgaaaaaaaaaattgcaattttaggttcaacaagctctattggtaaatctttgcttaatataataaacaaagataaaaaaaaatttaagatagaattattaacagctaatacaaattataaagatttaattaatcaagcaacaaaatttgatgttaaaaatatagttattaccgatctaagcagttttaaaaaaactaaaattttatgtaaaaaaaaaaagattaaaatttacaataacttcgaaaatttgaaaaaaattttaccaaaaaaagttgattatgtaatgagtgcaatttctggaataggtggattgttacccacattaagaataattaatagaacaagattaattgcaatagcaaataaagaagcaattatatgtggatggccaattattaagaaagaacttaaaaagcataaaacaaaatttattcctgttgactctgaacatttttcaattttttcacttttaggagatcaaaaaattaatgatgttgaaaaaatctacatcacagcttctggtggaccatttataaatttacctaagagtaaatttaaaaagattaaattgagtgatgctcttaaacatcctaattggattatgggaaaaaaaattacaattgactcagctactctaatgaataaagtttttgaagtaattgaagctaaaaatatttttaatattgattatgataaaatttcaatacttactcatccaaagtcctatgttcacacaatcattaagtataaaagtggtctaagtaaatttttgattcatgaacctgatatgacaataccaatttataattctatttactttgaagaaaaaaaaatataa

SEQ ID NO: 206828 - DNA, 850 bp, Unknown
  Bacterial polypeptide expressing nucleotide sequence isolated from the Sargasso Sea
atgaaaaatattcttttattaggagcaacaggcagtataggaaagagtgttcttagtgttattaatgaaaataaatcaaaattaaatctttttggtatttcattaaataataaccttaatgaagcaaataaaatcatagataaatttaatccttcttttgtttatatcgaggataaagatgcttttgattatcaaaaagaatctaaagaaataatttatttgaatggagatgatgaattaaaagatcttataaatcatcaagatgtcgatattattatttcagccatatcaggttttgcgggacttaaagctactcatttagcagcaagctcaggaaagaaaatcttattagcaaataaagaaagcatagtagctggaggagatttaatcctaccattagcaaaagataataattctgaaattattcctatcgatagtgaacacaatgcaatctttcaatgtttgtctggtgagaaaggaatagatgatgttaagagggtaaccattacagcatctggaggaccttttataaataaaaaacttttagatttaaaaaatgttaaaaaaagtgatgcactaaatcatccaaattggaaaatgggtagcaaaatttcaatagattccgctactttagttaataaatgccttgagttaattgaagcaaagtatttatttgatcttgatgagaaatattttgatctagtagttcatcctcaaagcataattcattcaatagttacctatgtagatggttctagtatatgccaattaagcaaacctgatatgagaataccaattgcacatgcattatataatgagaatagactaattatagattttgattctatag

SEQ ID NO: 206829 - DNA, 913 bp, Unknown
  Bacterial polypeptide expressing nucleotide sequence isolated from the Sargasso Sea
caattcagaattattattagatcaaataaaagaacaccaaccacagatagttgcaattgataagattgactcatcccatgaattgtttgattattgtcatcaaaataatattaaagtttacaatggagaaaattcttcatctaaaattccttttcaaaatatcgacttagcaattaatgcaattgttggaacttcaggcttacaacctacagttgagcttattaaaaatgggatagatattgcattaagcaacaaagagtctttagtgttgggaggacattttataatgcctcttgcaaaaaaaaataatgttaaaattatacctgttgatagtgaacattctgcaatttttcaatgtctacatggtgaaaatcattcagatttaaaaaaaataattctcacggggagtggaggtccatttctagaaaaaccacttagcgaatttgattcaatttcaccagctcaggcgcttaaacaccctaattggaatatgggcaaaaaaatatcaattgactcagctacaatgatgaacaaagctttagaattagtggaggcactatggctttttgatatagatattgaacaaattgaaattacgatacatccacaatcaattattcattcaatggttgaatttatcgatggttcctacaaagcgcatttaggcacacctgatatgaaagttcctatccagtatgcattaacctacccagcaagaaaaaaattatctatcgatagtttagatttaagagatttgactcttgaatttcaatctcctgattataaaagatatcctattttaggtcttgtaagagagctcataaatttgggtggtaatagagtacctgttatgagtattgcaaatgattacatagtgcaaaaatttctagatgaaaaaatttcctttaatcaa

SEQ ID NO: 206830 - DNA, 721 bp, Unknown
  Bacterial polypeptide expressing nucleotide sequence isolated from the Sargasso Sea
aatttatttcctgttgatagtgagcactcagctatatggcagtgtttatttggtgaaaatgaaaaagatatagaaaaaataattctcactggtagtggtggtccatttagaacaagaccaattgatacattttcattaattactaaagatgatgctcttaagcatccaaattgggtaatgggacaaaaaattactattgattcagcgacgatgatgaataagggtttagaagtgattgaagcacattggttgtttaatatagattcttccaatatagaaattgttgttcatccgcaatcaataatccattccatggttcaatttaaagatggttcagttaaagcacaattaggtgtgcctgatatgaaaattcctatacaatatgctttaacgtatcctaggcatttatcatcaaattgggaaaggttagattttaaaaaagttggtgatctaacttttgaagctccaaactttgagcgatttccctgtctttcactagcctatgatgctttagaaaaaaaaggatcttccccagcagttttgaactttgctaatgactatagtgtatttaggtttcttaaagatgaaattaaatttacagatatcccaaagataatagagtcagctatgaaaaatcatgaatgggttgaaaacccaaatctaagtaaccttaaagaccttgatttttgggcaaaagattttgtaaagaattttgattaat

SEQ ID NO: 206831 - DNA, 796 bp, Unknown
  Bacterial polypeptide expressing nucleotide sequence isolated from the Sargasso Sea
tatggaaaataaaaaaaaaataactatatttggtgctactggatcaattggagatagtacccttaaattaattgaaaaaaatagaaataaatttcaaattcacggtattactgctaataaaaatatttcaaaattgatttatatttctaaaaagtttaaaccaaacaatgttgtaattaaagatacagaccaatataaataccttaaaaatcaattgtctggatatgatattaatattgaatgtggtgaaaaaagtattgtagaattatcaaagcagaaagttgattgtgtaattgctggaatctctggtatagcaggattgagttctgtttattctgcagcaaaatcaggacagaatattgcattagctaataaagaagcattaattgttttaggtcatttaataatgccccatttaaaaaaatacaaaagtaaaattataccaatagactctgaacacaatgcaatttttcaatgtttaaaagggtcaaatttaaatgaaatagaccaaatcatactaactgcttcaggtggtccatttttaaatactcctataaagaaattagatgatgttaaagttgaacaagcattaactcatccaaaatggagaatgggaaaaaaaattacaattgatagtgcaactatgatgaataaaggtttagaactaattgaagcttactggttgtttggacaaaaaaaaaaaattattgaagctattattcaccctgaatcaatagttcatggattaattagttatattgatggaagtttgattgcacatttagctaaagcagac

SEQ ID NO: 206832 - DNA, 838 bp, Unknown
  Bacterial polypeptide expressing nucleotide sequence isolated from the Sargasso Sea
ttgtgtgttggggcgattgtgggcatagctggacttgcgcctgtttatgcggcggttcaggctggccagcaaatcgcgctcgcgaataaagaaacgctggtggctgctggccatattatcatgcccttattggctcagacagcggcaacaattctgcctgttgattccgaacatagtgcgatttttcaatgcttaaggggtgaacagcctgaggcagtagaagatatcactctcaccgcttccggcgggccgtttcgccagctgacacgccaacaaatgatcagtgtaagccgagagcaggccttggcgcatccaaactggtcaatgggcccgaaagtcactattgacagtgccacgctgatgaataaagggctggagctgatagaagcaaaatggctgtttgggcttgcgccagaccgcattaaagctgtcattcacccgcagtctgtcattcatggtttggtgaatttcaaagatggcagttgccttgcccatttaggggcagcagatatgcgcatcccgatatcctatgctctggattatcccaaccgtctggcttggcaagccgagacgcttgaccttgtacagctggcacaacttgattttgcggcgattgactttgaccggtttccttgttttgccttggcgcggcaggcgatggcagcagaaccagaagcggctgttattttaaatgccgccaacgaaatcgctgttgcggcctttttggcagatcagattagctacttgcaaattgcagatgtcgtcgatagtgcgctgacccatttttctggctgtgcgcagacgacaaatatcgatgatgttatctgtcttgacccag

SEQ ID NO: 206833 - DNA, 832 bp, Unknown
  Bacterial polypeptide expressing nucleotide sequence isolated from the Sargasso Sea
atggctgttcatactggaaaaaaagttttgttggcaaataaagaaagcattgttgctggaggagatttaatccttccaattgcaaagaaacataataccgagatcgtgcctattgatagtgagcataatgctatttttcaatgtctaaatggcgaaaaaggcatagaagatgttaaggaagttattattactgcatcaggcggtccttttttaaattcttcagttgaagatcttaaaaatgtcactcttcaagatgcattaaatcatccaaattggaaaatgggcactaaggtaactatagattcagcaactttggtgaataaatgcttagaattaattgaagcaaaatatttatttgatcttgatgaaaattactttcatttagtaattcatcctcaaagcataatacattcaatagttacatatgttgatgggtcgagtatttgtcagatgagcaatccagatatgaaggttccaatagctcatgcattgtctgaaaaaaatagacttattattgactttaattcactagatttcacctctctaaacttaacatttcaagaatttccaaaagacagaatgcaaattcaaaatattgctcgtgaggtatgtaataaaggaggcaatcttggaacagttttcaacgcagctaatgaggttgcagttgaaagttttattaatggcgaaataaaatttgatgagatttatgaggttatatatagaacttttagcatagatcatatgtctaaggatttgtctatagaatcaattcacgatattgatacacagacacgcattgaggcaaagaaggtggtaaaatccttcaattaaa

SEQ ID NO: 206834 - DNA, 789 bp, Unknown
  Bacterial polypeptide expressing nucleotide sequence isolated from the Sargasso Sea
aatgtgtgcaatttcaggtttagatggattaaaacctactataaatattatcaaatctactaaaaatatagcaattgcaaacaaagagtccataatttgtgggtggaacctaatagataatgaattaaaaaaaaacaaaactaattttattcccgttgactctgaacatttttctatttggtcaaatataaataaaattaataaaaatttaattaatcaagttatacttacagcttctggtggcccattcttaaaaaaaaataataaatttttaaaaaaggcaactattaaaagtgctttaaaacatccaaattggaagatgggaaaaaaaatttctatagattcagctacattaatgaataaagtttttgaattcattgaggctatgagaatttttaatttagataagcataaattgagtattcttattcatccgaaatcctatgtacattcaattataaaatttaataatggtttaataaatattactgcacacgatacaaatatgaaaatacctatatttaattcaatttatctctcaaattttaagttaataaaaacaaaagatatagattataaagtgcttaataatttatcactatcaaagccatcatataaaaaattcccatcattaaaacttataaattttataggaaacaaaacttcattatatgaaacaattttaataagtgccaatgattgtcttgttgatctatttattaaaaagaaaataaagttcacagaaataatctataatttaaataaaatattaaatatgaaagaatttaa

SEQ ID NO: 206835 - DNA, 688 bp, Unknown
  Bacterial polypeptide expressing nucleotide sequence isolated from the Sargasso Sea
taatgatgcagattactataaagctaaaattaaaaatatcattataactgcatcaggaggaccttttatagattataatttaaatgatcttaagagagttaatgctaatgatgctattcaacaccctacatggaatatgggtaaaaaaatatctgttgactcatcaactatgatgaacaaaggattggaaattatagaggctaaaacactatttaatctcgatgtaaataatatcaaagccataatccatcgtcaaagtaagatacatgcatttgtagaattcttcgatgggacagtaatctcacatatgtctaacccggatatgagaatacccatatcatatgctattacttatcctgaaaggatgtactctgataacaaaggagatttctcatacgaaaatttttcttttgaagaagtaaattatgataaatttccttgttatagattagcgaggaaggttgctgaaatgggtaaaaatactggattaattcttaatgctgctaatgaaattagtgtagaatacttcttaaaggacaagatatccttcttagatattccgaatattattgaggatattcttgattcaagtgatgttgttgatcatgatactcttgattcaattatagaaaatgatagagaaataagagaattaaccaggaattatattaaaacaagatattcataa

SEQ ID NO: 206836 - DNA, 799 bp, Unknown
  Bacterial polypeptide expressing nucleotide sequence isolated from the Sargasso Sea
tatgtataaagatttaatattattagggtcgactggatctattggtatttctactttaaatgtcataaaaaaaaataaaaaaaaaattaagattcacctcctttctacaaatagtaatattaaaaaaatttatgaacaggctgttgaattcaatgttaaaaaaatagtaatttatgatccaagtaaattatataaatattctcaattattaaaaaaaaaaaaaattaaagttttctcttcaatatctaacgcgatgtcaaaaaataaagaaaaagtttatctctcaattagtgccatatctggtatcaatgggttaaaacctacaatggacataataaaatattcccataacttagctattgcaaacaaagaatctattatttgtggatggaaatttatagaaagagagttaaaaaaaaataatgcaaactttattcctttggactctgaacatttttcagtttggaaacttattgaaggtgaaaataaaaaaaatataaaaaaaatatatttaacagcatcgggtggaccgttcttaaacaaaaaacttagagatataaaaaatatacaacctaagttcgctttgaaacatcccaactggaaaatggggaaaaaaatatcaatcgattctgcaacaatgatgaataaaatttttgaaattatagaggctcaaaaaatatttgatttagatatagataaatttgaaatattgattcatccaaagtcatatgttcacgcaattgttcattttacaaatggacttacaaggtttttagcgcatgagactacaatggagatc

SEQ ID NO: 206837 - DNA, 1180 bp, Unknown
  Bacterial polypeptide expressing nucleotide sequence isolated from the Sargasso Sea
aatgaaaaaaaaaattgcaattattggatccacaggttcaataggaaaaaatttactagagataataagtaatgatatcaatgatttcaagatcaatttacttacggcggacaaagatcataaaacattacttagacaagcaaagaaattcaatgttactaatttaattataaaaaacaaaagcagctataaagttttaaaaaaaaaaactagtaatactaatataaaggtttttaattcattcgaacatttaggactaatttttaaaaataaaattgattatgtgatgaactctataatgggtatagatggtttagagccaaccattaaaattatcaaatatacaaaaaatttagcaattgctaacaaagagtcgataatatgtggctggaatataatattaaaagaactaaaaaaaaataatacaaattttatacccgttgattcagagcatttttctatttggtatggtttgcaaaatttaaaagcaacaaatgtagaaaaaatttatcttactgcttctggaggacctttcagaaaattatctcttaataaatttaaaaagattaaaataaatcaagcagtaagtcatcctaattggacaatgggtaaaaaaatatcagtagactccgccacaatgattaataaagtttatgaggttattgaggctaaaaatatttttaatattccatatcaaaatattgaaataattatccacccaaaatcttatatacatgcgttaataaaatttactaatggtttaacaacaattattgcacatgacactacaatgaaaattcctatatttaacagtctatattcaaaatcagacaaaaaaatatttacaaatactataaattttaaaacattgaataatctaaatttgagtaaattgaactctatcagatatcctatgattaaattgttaaaaattttaccaagtaagagttcactatttgaaactgtaatagttgcagctaatgataccctagtggatctctttttaaataaaaaaattaactttataaatatacataaagaattatttaaaattctaaaattaaaagagtttaataaatttaaaaaaatctctccaaaaaagcttgaggacgtaatcaaattaaatgattatgtccgtttaaaagtgttgaaaaaagtgtataaattcactgatgtttaa

SEQ ID NO: 206838 - DNA, 664 bp, Unknown
  Bacterial polypeptide expressing nucleotide sequence isolated from the Sargasso Sea
cttgacaatattaggctccaccggatcaattggcgttaatgctttatcgatcccagcaatagaagaaaatttctcaatgttagcactcgttgctggcaaagatgttaatactttgtcacgccaatgcctaaaattcaaaccaaagtatgcggtaatttcggacacccaaatgtacggagagctgaagaaaaatttatttgggactaaaattgaagtaaaagctgggtacgatgagataaatgaaatagcatcaaagtcttcggatgttgtcctatcagcaatatctggcagtgctggaattgaacctacctatcaagccattaatagaactgaaaaactagcaatagcgaataaagagtcaattgttgttgctggaagtttattatttgataaaaaaataaataaatcaactaatatcattccagttgactccgaacacaatgcaattcacaagctcctaaattacgtaaattataaaaacctgaagacaatcacgttaactgcatcagggggtccatttctgaatgcaagaattaaagatttagaaaatgtaacactggaggatgcattaaaacatccaacatgggttatgggtaaaaaaattacaatcgactcagcagcccttatcaataaaggtttagaattaattgaggctacatattta

SEQ ID NO: 206839 - DNA, 637 bp, Unknown
  Bacterial polypeptide expressing nucleotide sequence isolated from the Sargasso Sea
tcaggcggtccttttagggaaaagactttcaaggatttaagcgaggtgacattgcaagatgctttgaaacatcctacttggagcatgggcaccaaaattacgattgattcagcaactctggttaataaatgtttagagttaatagaagctcattatcttttccaaattcctgagtctcaaatagaagttgtggttcaccctcaaagcataattcactcaatggtcacatatattgatggatctaccatagcccagatgagtaatccaaatatggaagttccaattgcaaatgccctaggtttggatcataggttacccattcacttcgaagcaattaatttttctgaattaaatttatcttttgagcctattgcagatggaagagaaatcatttttgaaatggctagagaggtctgcaataagagaggaaacttaggagttatttttaatgcatcaaatgaaatcgcagtagatgccttcacaactcaaaagatcgattttgttgatatatataaagttattcaaagaacttttgatcacttttcatgttctaacgtaagcacattagaggatatatttgaatatgataaacaagcacgcattcaagcagagaaggtgataaaatccttacactaaa

SEQ ID NO: 206840 - DNA, 1201 bp, Unknown
  Bacterial polypeptide expressing nucleotide sequence isolated from the Sargasso Sea
atgactcgtcaaaaaaatatttctatccttggggcgactggatccattggagacagtactctttccgtcatccgtcaacaccctgatcgattccggattgtctccctgacctgtcacagttctgtggaaaaactctgtgaactggtccatgaattccgtcctgaaaaagtcagtgttcactctacgagtgaagcaaggcatgtccgagaggcattcccggaacttgaagtcttttcaggaaaagaaggattgatcaacatagcagaagacccggatgcacaaatcgttgtcgccggaatcgtcggctcagcaggtttgtttcccactttttcagcagtttcttctggaaaaaacgttgcccttgccaacaaggaaccgctggtcatggcgggtcggcttttcattgaggaagcctcaaaaagcggggccaagatccttcccaccgacagtgagcacaatgcgattttccaggtcttgaacggccgtactcaggataaaatcaggaaattggtgctaaccgcctcaggaggacctttccgcgatctgcctcttgaacaattccctcacatccgtctggaagatgctctttctcatccaaactgggaaatgggaaataaaatcaccattgactcagcaacgatgatgaacaagggtcttgaagtgatcgaggcacgttggctgtttgatatgccggttgaaaagattgaggtcgtcattcaccgggaaagcatcattcactcaatggtggaattttgtgatggctccaccttggcgcagcttggatttcctgacatgcgaatcccgatttcctattgtcttggatggcctgatcgacttgaactggaactcccaaatttagacctgacaaagatcggaagcctgaatttttcatcagtcgaaccgacccggtacccctgtcttgagctagctatcgatgcggccaggatggacaaaagtgttccggccgttttaaacggcgcgaatgaagcggtggttgaatcctacctgaaaggtcatctgcattttgttgaaattgctaaattactccaggatgtaatgtccgaatatcaaaatatctcccaaaaatctgattgcccatcatacctcagagacattcaaaccctggaggatgccgtaaaggcggaccaatggggacgggaggaagtccagcaacggatgcaggaaagagttgctgcctgaa

SEQ ID NO: 206841 - DNA, 523 bp, Unknown
  Bacterial polypeptide expressing nucleotide sequence isolated from the Sargasso Sea
catgcatttacaaaaaaagggaattgcgattttgggatcaaccggatctattggaacgcaagctctcgaggtaatcgagtctaaccccaactattttgatttacaggttttaaccgcaggtagcaatgtctctttattaataaaacaagccaaaaaatataaaccaaatacggttgtcatcgccaatgaagaaaaatatttggagttaagaaatgcacttgaagatttagacatccatgtttatgcaggaagcgatgcattgtcacaggtggtcgaatccaaagaggtacatgtggtattgaccgctttagttggatatgctggattaattccaacgataaaggcgattgaggcgagaaaaacaattgccctagcaaataaagaaacccttgttgtcgcaggagagttgataaaaaaaatagcgcgaaaatatcaatccaacatttaccctgttgattcggaacactctgctatttttcaatgtttgatgggagaatacaaaaatccaatagaaaaaatatat

SEQ ID NO: 206842 - DNA, 694 bp, Unknown
  Bacterial polypeptide expressing nucleotide sequence isolated from the Sargasso Sea
agctatatcgcagtgtattgaggggaataataaagatatttctagaattatattaactgcatctggaggcgcattcagagatataaatttcaatgaatggaaagatattactcctgaacaagctaaaaaacatcctaattgggatatgggggaaaaaataacgatagattcatcgacaatgatgaataaaatttttgaaatagttgaaacaagttatctatttgacgttcctatcgaaaaaattgaagtcttgattcacagagaaagtttggttcattctatggtagaattttctgatggatcagtcaaagctcaaatttctaagactgatatgagactaccaattcaacatgccttaaattatgattcacaaaacttaaattatcaaaacaaattagatttttctaagttaaataatctatcatttagcccagtagatagaaaaaaatatccttgctacgattttgctattgatttcataaaaaaaggccctctctatatatcagcattatctattaccaatgaaatcttagttgatttgtttttgagtgaaaaaatttcttatatttctattccaaaattaatgaattttgcattagatactgaaaaatttgatgatgaaataaactttgataatataattgaaattagagagatgataaagtcaaaaatctctcataaattaaatttatag

SEQ ID NO: 206843 - DNA, 531 bp, Unknown
  Bacterial polypeptide expressing nucleotide sequence isolated from the Sargasso Sea
tcgattcagcaacgatgatgaataaaggcctagaaattatcgaagcgcattacctttttaacgttgaagagtctttgatagatgtagtgattcatcctcaatctattgttcacagtttagtttcttacctggatggatctgttttagctcaattagctgaccctgatatgaaaatacctatcgcttacgcactatcttggccaaaaagaatggatgcaaccataccccgattagacctacttaaaattggttccttagaattcttcaaaccagacactaagaggttccctgctttaaacttggctagggagagtataaaacttggaggtagttcaaaccttgttttaaatgctgcaaacgaagtcgctgtagctgggtttttggcaggaaaaattaaatttacagatattgtggctacagtagaaaaggttttggacaaaaacgttgaaactgctccaaagtctatagaggaggtcatctttatggatactgaaattcgtaaatatacagaatctattcttgagccataga

SEQ ID NO: 206844 - DNA, 1195 bp, Unknown
  Bacterial polypeptide expressing nucleotide sequence isolated from the Sargasso Sea
aatgcggactctagtgatccttggtgctacaggctcaattggctgcaatacgctggacgttgtggccatgcaccccgatgactatcaggtgctgggcttaactggcgccactcaggtcgataagctgtttgcgcaaattcagcaatttacaccacgttatgcggtgatgacagacccgctagccgcagaccaattacgtcaactggtaaaagaggccaatcttccgaccgaagtctgggctggtgctcaggcgctttgtgatttagctgctcacccagatgcagatatggtaatggcggctattgttggcgctgcaggtttattgccgactctggctgcggtagaacaaggcaaaactgttttactggcgaataaagaagcgctggtgatgagtggtgagctgtttatcaataaagtgcagcagcatggtgcgactttgttacctattgatagcgaacataatgctatttttcagtgtctgccttccgccttacagcaaaataccgccacccaaaaattatctgattacggtatcagcaagctattgctaacaggcagtggtggtccgtttttacggaaagacctgaatgagttttctgctatcacaccagctcaggcagtggctcacccaaattgggtgatgggccagaaaatttcagtcgacagtgccactatgatgaataaaggcctggaatttattgaagcgcgatggttgtttaactgtgctgcagacgatattcaagtggttatacatccgcaaagcattatccattcaatggtgcagtacactgacggttctgtgttggcacagttgggccagcctgatatgcgcactcctatagctcatgcgctggcttacccacaccgtattcaaactactgtaaaaccactgaatttttttgagctggcagactttagtttttccaaacctgaacctcaacgttaccctaatttatatctggcgataacagcttgtggttatggtcagggcgcaactacagcactaaatgcagccaacgaaataacggtcgctgcttttttagccggccacattcgctttaccgatatagctctgttaaacgaaaaagcattggagcgttttgccactataaaagcgcctgatttagaaagcattctggatcttgatcaacaagccagagcttatatgcaagaccaactgaaaaaggtgagttaa

SEQ ID NO: 206845 - DNA, 829 bp, Unknown
  Bacterial polypeptide expressing nucleotide sequence isolated from the Sargasso Sea
atgagaaaaagaatagtaattttaggatctacaggttcaatagggaaatcaacaataaatatacttaagaaaaagaaaaaaaattttgaagttgttttattaacaactcacaaaaattataaagaattatataaacaagcaaaatcttttaatgtaaaaaatttaattatctctgatcaaaaaagttatgcaattctaaaagcaaaaaataaagataaaaagattaaaattttcaataattataaagatcttaataaaatcttaaaaaaaaaagttgactacacaatgagttctatttctggccttcaaggcttggaaccaacacttaatttgatcaaatttacaaaaaaaattgctgttgctaacaaagaagcaattatatgtggatggggtttaattaaggatgcattaataaaaaataaaactgaatttatccctgtggactctgagcatttttctatttggtctttaattaaaaaaggtgaaaacaagcttattgataaagtatacatcactgcatctggtggtccattcttgaagttgtctttaaacaaaattaaagatgtatccccaagaaaagccataaaacaccctaattggtcgatgggaaaaaaaatctcaattgactcatctactatgatgaacaaagtttttgaagtcatcgaaacacaaagaatttttgatttacagaaatctaaaattcatattttaatccatgaaaaatcatatgtgcatgccatagtacaatttaagaatggattaaaaaaaattttagcccatgacacaaatatgttaataccaatcttttatacgatttatggcaaatgat

SEQ ID NO: 206846 - DNA, 1189 bp, Unknown
  Bacterial polypeptide expressing nucleotide sequence isolated from the Sargasso Sea
aatggatataattatattaggatctactggaacaattggcaggaatactctaaaagtaatagattcctcggaatcgaaatatgaaatttttggacttaccgctaaatcaagcctaaaattattagcaaaacaaatttgtaaatataagcctagttatgcggttgttgaaaaaaaatctgatatccaaaaaattaaatctctttgtggagattattcaaaaaagttaaaaatcctccatgggaaagagggattatgtagactagcatcttttaaaaagggaaaatgtttagtttcagctatatcaggtgcagcagcattagaaccaacatatagtgcagtcaaagcaggtaaaaaagtattattagctaataaagaagctctcattatgtcaggtgatttactcttacgcgaggcaagaaaaactaaatctttaatcataccaattgacagcgaacataatgcccttttgcaaataataagtatatttggtctaaactatatccatggcaaaaaaagtttaccacaaaatattgatagcatctcattgactgcctccggaggaccttttcttggatataataatagaatgttatctcaagtaacgcctgagcaggctattaagcatcctaattggaaaatgggtaaaaaaatttctattgattctgctactatgatgaacaagggtttagaagttattgaggcatcccttcttttcaatatcaatccagataaaattaatgtttatatccatccccaaagtctcatccacgcacttattactttttatgatggctcaactctctcacatataagctatcatgatatgaagattccaattagttacgcacttaattggcctaacagacagagattatccaagaaaatgaacaatttgaatggtacatacgaacttcgaaaaattaaaaaaagcgagtatccatgctatgatttgtgtattgaggcattaaaaatcggtaaaaatgccacaactataataaatgcagctaatgaagtagctgttgaatattttcttcaaaataagatcaaatttactgacataccagttataattaagtatattttaaaacagtctaaaataaggaatatctcaaatatatcggatattctcaagtatgacatcgaaactaggaatttgactgaacaactaataaagacaaaatggaaataa

SEQ ID NO: 206847 - DNA, 1009 bp, Unknown
  Bacterial polypeptide expressing nucleotide sequence isolated from the Sargasso Sea
gatgttacccgaccgcactgtggcttctgccacttcaatggctgtttcgggtgtggaagtcatgagtgaccaatcagttgactttcaaaagccctcagatgccgttcctcttcgtgtcgcggtcctgggttcaaccggaagtattggcaagaatacccttgaagtcattgctgcctcagaaggtcgtttcaaggtccatctgctgtgcgggcaccgcagcgttgaaacccttgttgaacaggctcatgcatgtcggcctcgctgggtcgttgtgactgattcaactgctgcagaatcacttggaccgggagcgcttccggaaggaacagaactcgtcgttggtccagaacgccttgaagaacttctcggtgctccagaagttgatcgtgttgtgtcagctattgttggggctgctggtttgcggagtacctggtcagcacttgctgccgggaagacggtggcgcttgcgaataaggaaacactggtgacagccgggcctttggtaacgcagttggcagcacgttctggcgggacgattgttccggtcgatagtgagcattctgcgatccatcaggcgttacggagtgggcgtcggcaggaattgcggcgagttgtactcaccgcaagcggtgggccttttcgcactcataccaaagaacagatatctgaggtaacgccagagcaagcgctgaagcacccaacctggtcaatggggccaaagattaccattgattcggcaacgatgatgaacaaggcacttgaactgattgaggcccgctggctcttcgatcttcgagcggagcagttgggtgtggtggtccatccacaatcaataattcattcttttgttgaatttgttgatggttcggtcattgcccagcttggaccaccagatatgaagctcccaatccagtatgcacttgcgtatccggaaaggtacgatggtccagctcagcggtttgattttagtgctgcacagcgcctggaattgagcccccctgattcttga

SEQ ID NO: 206848 - DNA, 715 bp, Unknown
  Bacterial polypeptide expressing nucleotide sequence isolated from the Sargasso Sea
aatgaagagtgtatctatatttggatttactggctcaattggtagccaggcattagaaatacttagaaagcataaagatcaattctcttttgatgtatttgtatgcaattctaatgcagataaagctttagagattattaatgagtttaatccagaatatgtatttttatctgatgttattgcagcagataaattaaaaaaatcattgtcttctcaaactaaaatctttgctgatattagtgatgttataagtcatttaaatacaaatcatagcgatatatatctttcagctatatcgtcttttgactgccttgaattgactgttcttgcagctgaatcaggcaataagcttctattagcaaacaaggaaagcctagttgtacatggggaagctttaataaatatctctaataaggcgggaactcagatagtgccaattgattcagaacattattcattgatgaattcattaaataatgttgaaaaaagtagtatagatagagtttttattactgcatcaggcggaccttttgttgggcaatcacgtcaagaaatagaggataaaaagcctgaagaagctttaaatcacccaaattggaatatgggtgacaaaataactattgattcagcaacacttgttaataagtgttttgagttaattgaagcaaaatatttgtttgatcttgatgtagataaattagaagtattaattcaa

SEQ ID NO: 206849 - DNA, 1090 bp, Unknown
  Bacterial polypeptide expressing nucleotide sequence isolated from the Sargasso Sea
aatgaaaaaaaaaattgcaattcttggttcaacaggttcgattgggaaaactacttttaatattattaaaaaaaataaaaaagattttgaagtagtgctcttaacaactaacaagaatattaaagaaattctaaagcaagcgaaaaaattaaatgtaaataatattataataaggagtaaaaaacattacttaaaggtattaaaaaataaaaaatacaaaaaattaaaaatatataatgatttttatgctgttaataaaattttaaaaaaaaaagtagattattgtatgtgtgcaataactggcttacctggcctagaaccaacattgagttttattaagcatagcaaaaaaatagcaattgcaaataaagagtcaattatctgtgcttggaacttaattcaaaaagaattaatcaaatataaaacagaatttgttccagtagactcagaacacttttcaataatgtctttaataaaaaattctaataatgaaaaaatagataaaatttatattactgcatcaggtggaccatttttaaatttaccaattaacaaatttaaaaaaattagcccaaaaaacgctgtaaaacatccgagatggtcaatggggaaaaaaatttctgtagattcagccacaatgatgaataagctttttgaaattattgaggctaaaaaaatatttaatttaaaatattctcagcttaaaatattaatacatccaaactcttatgtgcacgctataataaaatttaataatggcctaactaaaatgttaatccatgatactgatatgtcagtgccaatatttaattcaatatataataatgcgagtgattattacggttctaaacatttaaattttaaattaatgaataacttaaatttgtcatatgttaataaaactaaatttccatcaataaaacttcttaaaaaaatacctaacaataattcattatttgaaacagttttgattagttcgaatgatgttcttgtagactgctttttaaataaaatgataaaatttactgatataaataataatcttaaaaaaattttaaatttaagtgaatttaagcagcttaaaagagta

SEQ ID NO: 206850 - DNA, 1150 bp, Unknown
  Bacterial polypeptide expressing nucleotide sequence isolated from the Sargasso Sea
ttgaaaaagatattcattcttggtgcatctgggagtattggagaaaatgctctatctgttatcgactcaaacaaagaaaactttgaactagtaggcatttcggtaaacagaaatgttgaaaaggctaacaagattatcaaaaagcataatccaaagtacatttacataaatgataaattagcaaaagaaaatatactaaagactgaagatgtagttatttgtgaagatgagaaagagctttccgatatcttcaattctagtgatgttgatattgtaatctcagccatatcaggttttgctggaattaagtcgactttccatgcagcaaaatcaggtaaaaaaatccttcttgccaataaagagagtattgtggcaggcggatcattgctgatggaaacagtaagagaaaataataccgaactagttccaattgatagcgagcataatgctattttccaatgcttacctgactctagatcaacacaagatgttaagcaaatagtcattaccgcctcaggagggccctttcacggaaagaatatagatgaactcaataatgttggagtccaagatgcgctcaatcaccctaactgggaaatgggatctaagatttctatagattcagctactcttgtaaataagtgtttggaactcattgaagcatgttatttatttgatatggatgagagcttctttgagcttgtagtccatcctgagagcattgttcattctatagttacatttaatgatggatcctcaatttgccaaatgagtaatccggatatgcgtgtacctattgctaatgcaatgtcatatgataaaagactttcaattccgttccagcccattgattttaataatctgaagcttaactttgaaaggtttccaaatgacagagctgaaattgttcatctagctagagaggctgttcgagaagatagctcaaagggaatttattttaatgctgccaatgagatcgcagtagaaaattttctaaagaaaaggattacatttagacaaatatatgaggtaattttgcgaacttttgatacaaaagagatgtcaaagttcaatagtattgaagatatttttgaaattgatcaggaggcacgcaatatatctaatatggtgataaaatcactaacttaaa

SEQ ID NO: 206851 - DNA, 1141 bp, Unknown
  Bacterial polypeptide expressing nucleotide sequence isolated from the Sargasso Sea
tctacaggatctattggaaaaacaacattaaaaataatcagaaaaaataaaaaagattttactgtaaaattactgtcaacaaataataatatctcaacaatttataatcaagctctagaatttaaagtaaaaatcgtagttataaaaaactataaaaaaattaataaaaaagtatttttaaagtttaataaaaaaaaaataaaaatattttctacttatgaacaagctctaaaaaatattagaaaaaaagtttactatactattaatggtatatcaggaataaatggccttgaacctactattcagataattccattcacacaaaatattgcaattgcaaataaagagtcaataatatgtggttggaaatttatatatagatcattaaaaagatacaaaacaaatttcattcctatagactcagaacacttttccatatggtcactgcttaaagatgaaaaaatcaataatgtaaataagatttatttaactgcatctggagggccttttttaaatcaaaaattatctaacttaaaaaatattaaatctcgatatgctattaaacatcctaattggtctatgggaaagaaaatttctgtcgactcagcaacaatgatgaataaaatatttgaagtaattgaggcagtaaatatttttaatttaaaattaaataaatttgaaataattattcatccaagatcatatattcatgctattataaaatttaaaaacggtataagcaaaatccttgttcacgaaactagtatgcaagtaccaatatttaattcactttatttaaacaatgagactaaagtttacgataacaaaaaatttaattttaaaatgttaaatggtataaattttattaagccagataaaattaaatttccatttttaaaactattaaaatatataaatgtaaataatacttatttcgaggtaattctagtttctataaacgatgcattagtaaataaatacttaaaggatgaaataacctttatttctcttcaaaaaaatttgtttaaattaattaaacatccctattttaccaagtattataaatcttctccaaacaatataaatgatattaaaattatggtaaatagagttaatacttatatgaaaaaaaattattaaa

SEQ ID NO: 206852 - DNA, 1183 bp, Unknown
  Bacterial polypeptide expressing nucleotide sequence isolated from the Sargasso Sea
atggctaaaaaaaccatatctatttttggctgtactggatcagttggtacaacaacgcttgatattataagagaaaataaagaacagtttgaagtaaaagttttaacagcaaataaaaatattgatgatcttattttatttgcaaatgaatttaatcccgaagctatatgttttaataatgcgtctgaccttgagaaagtaaagaatgaaattaatacagataaaatggaatattatattggtgatgagggattgttggaatgtgcaaagatttgtacagatatagttgtagctggaatagtgggtttagctggtcttcgtcctttattagaatcaataaagaattcaaaaaaagtttgcattgctaataaagagtgttttgtttcagctgggtcattaattatgtcagaagctaaaaaatatgaagctcaaattttacctttagatagcgaacatagtgctattttccaaattcttaatagctctaataataaattgaaagatatttatcttactgcgtctggcggacctttttatggatacacaaaagaagagctattaaatgtcgaagttcaagatgctattaaaaacccaaattggacaatgggaaaaaaaatttcagttgattctgccacgctaatgaataagggactagagataattgaggcaaaacatctttttaatttgtctgaggataatataaaggttgttattcatagacaatcaatagctcacggaattgtttcttttgaagataatactttttttgctgctttcggacaccccaatatgacgcatccaataaaatacgcaattttttatccaaataattattttagtgttgatcaaaagatgggtattaattctttgaataatttaacatttgaaacaattaatgaagatgaatatcacgctttaaagcttgttagatcagttttaaatgaagatagcaaagacaaatcaattattcttaactcatcaaatgaagttgctgtaaaagcttttcttgataaaaagattagattcatagatattttggttgtagttgaagaatctatagaatatgtttcgaagctaattagtaataactctttaaattatagagataatcttgataatattttaaatttagatagtttaacaaggcaaaaaacagaggaacttataaaattaagattttaaa

SEQ ID NO: 206853 - DNA, 1177 bp, Unknown
  Bacterial polypeptide expressing nucleotide sequence isolated from the Sargasso Sea
aatgaaaaaacttaccctcctaggatcaacaggttcaattggattaaatacactggatgtagtcaggatgtttcccgaacaattcagcattgaagcactgtcctgccgcagttcaattgagcagcttattgaacaaattagggagtttcaccccaaaacggtgtgtgttgacaaagatgaaatggctggtgagttaaagcaaatatttcctaataaggagttcgtctttggaatgcaaggcctcgaaaaaatctctacaaacccagatgcagatctggtggtgtccggaattgtcggggctgcaggattaaaaccaacattttcagctttaaaagctggcaagactgttgtgttagcaaacaaagaacctcttgtgatggctggtgaattattcatgcaaactgcaatcaaagctggggcaaaactactgcctgccgacagcgaacataatgctattttccaagcacttaacaatgaacctgttgaaagtatttccaggcttattcttaccgcatcaggaggatcattaagagacaaaccactaaatgagtttgaaaatataacacctgctcaggcactcgatcatcccaactgggaaatggggagtaaaataactattgactctgcaacaatgatgaacaaaggcttagaagtcatcgaagcacactggctgttcgatactccggtgcaaaacattcaagtggtgatgcatcgagaaagcgttattcattccattgtagaatttgttgacggctctttcctagcacaaatgggacttcctgacatgagggttccgctggcctattgcctgggatggccaaagagactacccttgaaaattccacgtatggacctcatatctttaaaatccctaaattttgaggaaattgaccctaagcgttttccttgcctagcaatatcgataaaagcagccaagcagggaggaggtgcccctgccgttctgaatggtgcaaacgaaacattagtcgattcttttcttgaggaagaaattaattttttggatatttctaaaaatctgcattcagtgatgcagcagttttataaaacaatctcacttaatgaagttccttcatttttgaagcacattagtaccatcgaagacgcagttaaggcagaccagtggggcagagaacaagccctaaggtacatgtcttaa

SEQ ID NO: 206854 - DNA, 1192 bp, Unknown
  Bacterial polypeptide expressing nucleotide sequence isolated from the Sargasso Sea
atgcaaaatatggtgattttgggcgcaacagggtcgattggtgccagcactttaagtgtgatttcggctaatcccgatgcctatcgtgtttacgctttagtggctaatgcgagtgtcgataagatgctcgccctgtgtttgacccatcgcccccaagtcgctcatatggtcgatagtcaggctgcattagcgctacaagctaagcttcccccagagcttaatatccaagtcacaagtggcgaggatgaactcatcgccttagtcacagccaccgaagtggatactgtgatggccgctatcgtcggcgcggcggggctagtgcccaccttggccgctgttaaggcgggtaagcgggtattgcttgccaataaagaagccttggtgatgtcaggtgaactctttattgaggccacgaaagcatcgggtgccactttgttgccggtcgatagtgagcacaatgcgattttccaatgtttacccgaagaggtgcaggctaatttaggccgctgtgacttagccgcatcgggcatttcccatattctactgacaggctctggcggcccatttttgaccgctgagcttgcaagccttgcgtcgatgacgcctgcgcaagcctgtaaacatccaaactggtcgatgggcccaaaaatttcagtcgactccgccactatgatgaataagggcttggagtttattgaagcgcgttggttgtttaatactcagaaagaccaattaaaggtagttatccatccgcagagcgttatccattcgatggtgcaataccgggatggcagcgtgatcgcgcaaatgggtaacccggatatgcgtacaccgattgcacattgtatgtcctatccacaaagaattcgctctggcgttgaacctttggattttttcaaagtcggacagttaagcttttgtgagccagactttaatcgcttcccctgtttggcgttagcgatcgccgcttgtgcccaaggtcaagaagcgactacggtactcaatgccgccaatgaaatcgccgttgaggcatttttgcaggggcagattggttttacccatatcgccaaggtgaatgaagcctgtttatcctctgtgcctaaacgggcgatgaccagcattgatgatattatcgccctcgatgcacaaacgcggatttatgcccgcgaacagttagcaaaatttgcttaat

SEQ ID NO: 206855 - DNA, 841 bp, Unknown
  Bacterial polypeptide expressing nucleotide sequence isolated from the Sargasso Sea
tatgaagaatattcttttacttggtgctacaggaagcattggagaaagtgttctaagtgtcatttctcaaaataaaaaatcattaaatttatttggcatatcattaaacaaaaatattctaaagtctcaagagatattgaaagaatattctcctgattatattttcattgatgatcataattcctttaaaagtctggcaagcgaggattcagaaagatatttaaacgatgagggagatctggaaaaacttatcaataaagaagagattgatattattgtatgtgcaacatctggatttgcaggtctaaaagctgcatatcttgctgtcaagacgggaaagaaaattttattagcaaataaagaaagtattgttgtcggtggagatttaattttacctttagccaaaaaaaataattctgaaattatcccaatagacagtgagcataatgcaatctttcagtgtttatctggtgagaagggtacagaagatgtcaaacgtataactattacagcatctgggggtccatttattaatacccctatcaaagaattaaagcatgttactgttgaagatgctctcaatcatccaaattggaaaatgggtagtaaagttacgattgattctgctactttggttaataagtgtctagaacttattgaagccaaatatttatttgatatgaatgaaaaatattttgaattagtagttcatccacaaagcataattcattcaatagtaacattcatagatggatcaagtctgtgtcaaatgagtgctccagatatgagggttcctattgcccatgcactatctgaagagcaaagattgccaatagatttt

SEQ ID NO: 206856 - DNA, 1147 bp, Unknown
  Bacterial polypeptide expressing nucleotide sequence isolated from the Sargasso Sea
atgaaaaaacatatttcaatactaggctctacagggtctataggtgtaaatgctttgaaaattgctgattctttgaatcaagaaataaatgtacagtatctcaccgcctataaaaattttgatcttttaaccctgcaaaccaaaaaattcaaacctaaatccatttgtctcgtagatgaaaaattttataaagatttgaaatcaggaattaatacaaatcaagtcgagctactaattggccgggaaggtttactggaaatttgtaaaagaaaagatgtcgatgttttgcttaatgggctagttggagcagcgggtatgggaccaactctttttgcattagaagcgggtgttgatgttgctttatcaaataaagagagtttagtaatggctggacaaattattaagagagctatgaaattatctggggcaaaaatattccctgtcgacagtgagcattcagctatttggcaatgtttggttggcgaaaaaaacgaagatataaaaaaaataattttgacgggaagtggtggcccttttcggaataggagtttgaatacttttaataatatatccgttgatgaagctctaaagcatccaaattggagtatgggaaaaaagataacaatagacagcgccacaatgatgaataaatgtttggaggtaattgaagcttattggctttttgaaatagagccaaactccattgatataattattcaccctcaatccatagttcactcaatggttgaatttaatgatggttccataaaagctcaattgggtgtccccgatatgaaagtcccaattcaatatgctctcacatatccttcacatttaaaatcctcatgggaaagattggaccttttaaagtgtggagaccttacctttcaaaaaccagattatgatagattcccttctttgaaattagcttatcaagctctagagaaatcgggtactgcatcagctgcattgaatttatcaaatgattactccgtatctaaatttttgaatgataaaattaaatttacagatatttacaaaatcaatcactcggctcttcatagtcatccctgggttaaggaaccagacttaaatgatttgaccgatttagatagatgggttaagaatcatgttaataatttttgat

SEQ ID NO: 206857 - DNA, 1159 bp, Unknown
  Bacterial polypeptide expressing nucleotide sequence isolated from the Sargasso Sea
atgactagaaaaatttctatacttggctctactggctcaataggtgttaatacccttagtgtaattgatactttaaaagaagactttgatgttgtatatctatctacttttcagaatagcaaattaattatagatcaagcaaaaaaatatcaaccaaaggcaatagttattgtcgatgattctaatataagcgatgttaagaatgctttagaaaaagataatattgaaattctttctggaagagaaggtttattagaaatttcaaaaagagatgatatagatttagtaatgaatggattagttggctcttctggaatggagcccacgctcaacgcattaaaagctagcgtagatgttgctttaagtaataaagaaagcatggttatggcgggagatttgatcaataaaacaatgaatgaaactggagcaaaaatataccctgtagatagtgaacattctgcgatatggcaatgtttggttggagaaaatattaaagatgtaaacagaattattttaacgggaagtggtggcccttttaggacaagggatgttaaaacttttcctgaaataaatttaactgaggctttaaatcatccaaattggagtatgggtaagaaaataactatagattctgcgaccatgatgaataaaggattagaggttattgaagcacgttggttatttaatcttgaggttaatcaaatagatatattgattcaccctcagtcaattatccattctatggttgagtttaaagacagatctattaaagcccaattagggatcccagatatgaagattcctatacaatatgccatcacatatccaagacatgcattagcagaatgggaaaaactcgacttagcaaaaattggtaatctaacttttgaagaaaaagatgtagatagatttccatgtatagatttagcatatcaatcattaagcgttggcggatctgcacccgctgttcttaatgttgcaaatgataatgctgtttatagttttttaaataaaagaattaaattcactgatataccaattataattgagaaggcatgtaatgcacataaattggtaaataatccgagtttagaagaattattagaattggaactttggacacgtgatttcgtaatgaatgaagtagataaaacataag

SEQ ID NO: 206858 - DNA, 1138 bp, Unknown
  Bacterial polypeptide expressing nucleotide sequence isolated from the Sargasso Sea
aatgaaaaaaaatgtttttgttatgggttcaacaggatcaattggggttcaatcattagatgtaatatcaaaaagtaattcacataaagttattggccttagttgttattcaaattcagaattattattagatcaaataaaagaacaccaaccacagatagttgcaattgataagattgactcatcccatgaattatttgactattgtcatcacaataatattaaagtttataatggagaaaattcttcatctaaaattccttttcaaaatatcgatttagcaattaatgcaattgttggaacttcaggtttaaaacctacagtagaacttattaaaaatgggatagatattgcattaagcaacaaagagtctttagtattaggagggcattttataatgcctcttgcaaaaaaaaataatgttaaaattatacccgttgatagtgaacattctgcaatttttcaatgtctacatggtgaaaatcattcagatttaaaaaaaataattctcacggggagtggaggtccatttctagaaaaaccacttagcgaatttgatttaatttcaccagctcaggctcttaaacaccctaattggaacatgggtaaaaaaatatcaattgactcagctacaatgatgaacaaagctttagagttagtagaggcactatggctttttgatatagatattgaacagattgaaattacaatacatccacaatcaattattcattcaatggttgaatttattgatggttcctacaaagcacatttaggcacacccgatatgaaagtccctatacaatatgcgttaacctacccagcaagaaaaacattggccatcgatagtttagatttaagtgatttgagtcttgcatttcaatctcctgattataaaagatatcccattctaggtcttgtacatgagcttataaagttaggtggtaatagagtagctgttatgagtattgcgaatgattacatagtacaaaaatttctagatgaaaaaatttcctttaatcaaatattcattcttactaaagaggttgtaagcgaatttggatctgatgatctaccttctttagaagatttacttattttagatgaaaatattaagctatatttagaaccaaattaa

SEQ ID NO: 206859 - DNA, 1195 bp, Unknown
  Bacterial polypeptide expressing nucleotide sequence isolated from the Sargasso Sea
gatgcataacctggtgattctgggagcctccggctccatcggtcagagtacgctcaaggtactgcggcacaatccgggacgctggcaggtgctggcgctgacggcggcccgcagcgtggaggccatgctgcgcgattgcctcgaattctctccccgtttcgccgtcatggtggacgatgccgccgccagcgagctggccgctcaactcaagacccacggcagcgcgactcgcgtcatggctggcccggccgccctgtgcgaagtggccgctcaccccgatgcccacagcgtgatggccgccatcgtcggcgccgccgggcttgcgcccaccatggctgcggtgcgtgccggcaagcgcatcctgctggccaacaaggaggccctggtgatgtccggcgccttcttcatggaggcggtgcgcgagcacggggccgagctgctgcccatcgacagcgaacacaacgccattttccagtgcctgcccgaggccatccagcgccagccgggcttttgcgacctggcgggagcgggcatcagcaagatcctgctgaccggctccggcggcccgttccgttataccgacatcgctgaactggcccgcgtcaccccggctcaggccatcgcccatcccaactggtccatgggcgccaagatctcggtcgactccgccaccatgatcaacaaggggctggagtatatcgaggcgcgctggctgttcaacgcggcgcccgagcagatccaggtggtgatccatccccagtcggtgattcactccatggtgcagtacaaggacggctccgtgctggcccagctcggcaatccggacatgtgcacccccatcgcccacgcgctggcctatccggctcgaatcgagtccggtgtggaacctttggatttcttcagtgtcggagagttcagctttatccgtcccgactatgagcgctatccctgcctgcagcttgccatgcatgcctgtcagcagggacaggccgcaaccacggccctcaatgccgccaacgaggaggccgtggcggctttccttgcagagcggatcggttttatggatattgccagagtcaatgaggccaccatgctcgccctgggcggcacggcggccggttcgctggacgatttgattgcgctggatggggcggcccgtgcccgtgctcacaatttgattgaggagcttagctga

SEQ ID NO: 206860 - DNA, 1144 bp, Unknown
  Bacterial polypeptide expressing nucleotide sequence isolated from the Sargasso Sea
atgaaacatatttcaattttaggatcaactggttcaattggtgtaaccactttaaaagttattgagaatctcaatgataaaatcaaaataaaatatttatcagcattcaaaaatgctgatttattaattgaacaaatgaaaaaatttaaaccaaaatcagtggcaatagttgatcatattgcttacgaaaaagttaaaagtttttttctttctgattctgttgaaatcctaaaaggtagagaaggacttttaaatttagcgtcaagagacgatattgaccttatgttaaatggattggttggagcaagcgggatggaacctacattaaatgcaattaaggcaggggtaaatgttgcattatcaaataaagaaagtctagtaatggctggggaaattataaacatagaaatgaaaaagactggtgcaaagttattcccggtcgatagtgagcactctgcaatatggcaatgtatgcttggtgaagatatagaagacatagagaatcttgtaattacagctagtgggggtccattcagagaaaggtctattaagtcttttaaagacattacaaaaaaagaagctttaaatcatcctaattgggaaatgggggaaaaaatcacaatagacagtgctactatgatgaataaagggtttgaggtaattgaggcattttggttatttggattttcaccatcaaacattaaggttgttgtacatccgcagtcaatcatacactcgatgattgaatttaaggatggtgcaattaaagctcaattaggtgttccagatatgaaagtccctatacaatatgctcttacgtacccaagacatttaaaagctccgtgggagaggttagattttttttcttgtggtaagctaacatttctagagcctgatttagagaaattcccctgcatttctttagccttcaaatcccttgagaaattagggacaatgccggcagcacttaacttagctaatgactatgcagttctgcggtttctaaaaaatcaaataggttttttagatattcataaaataaataaaacagtaatggaaactcacggttggatagagcaccccaatttggatgatttaagagaattagatatttgggttcgtaaagttgtctttaatttttaat

SEQ ID NO: 206861 - DNA, 898 bp, Unknown
  Bacterial polypeptide expressing nucleotide sequence isolated from the Sargasso Sea
aacgcctcatgtaacatcccatttgataatttagatttagcaattaatgctattgttggcactgcaggtttaaaacctaccatagaattagttaacaatggtatagacattgctttaagcaacaaagagtcgttagtattgggaggtcatattattatgcctttagctcaaaaaaataatgtgaatataatacctgttgatagtgaacattcagcaatttttcaatgtttgaatggagaaaatcataaagaattaaaaaaaataattcttacaggcagtggtggacctttccttgaaacgccgattgataagtttaatactattacacctgatcaagcactcaaacatcctaattgggatatgggcgcaaagatatctattgattctgccacaatgatgaataaagcattagaattaatagaagcattatggctattcaatataaaacttgataagatacaaattactatccatcctcaatccatcgttcattcgatggttgagtttgttgatggttcatataaagctcacttaggtttaccagatatgaaagtaccaattcagtatgctttaacctttccaaacagaacaaactcttctgttggaagtttagattttgaaaatctgaatttagattttagaaaacccgatttagaaagatacccgattttgtcacttgttgaagagcttattaatttaggaggaaatagagtggcagtaatgagcatggcaaatgattatattgtggagaggtttctagatcgaaaaatttcttttaacgaaatattttatctaattcaagaagtggtaaatgaatttgcatctgatgatttaccatctttagaagaattatttatcttagataaaaatattcaattatatttgaactcaaattagg

SEQ ID NO: 206862 - DNA, 1159 bp, Unknown
  Bacterial polypeptide expressing nucleotide sequence isolated from the Sargasso Sea
atgaagaatatacttttattaggtgcaacaggcagtattggaaagagtgttctaagcgttattaatgaaaataaatcagaattaaatctttttggtatttccttaaataacaatattaatgaagcaacaaaaataataaatgaattcgaaccttcctttatttatatagaagatactgcagccttggaagattttattaatcataaccaatcaaaggacataatacatcttaatggagatggggagcttaaagatcttataaatcatcaagatgtagatattattatttcagccatatcaggttttgcaggacttaaagctacttatttagcagcaagctcaggaaagaaaatcttattagcaaataaagaaagcatagtagctggtggagatttaatcctaccattagcaaaagagagtaattctgaaattattcctatcgatagtgagcataatgcaatctttcaatgtttatctggtgagaaaggagtagatgatgttaagagggtaacaatcacagcatctggaggaccttttataaataaaaaacttttagatttaaagaatgttaaaaaaagtgatgcactaaatcatccaaattgggaaatgggtaacaaaatttcaatagattcggctaccttagtaaacaaatgccttgagttaattgaagcaaagtatttatttgatcttgatgagaaatattttgatctagtggttcatcctcaaagcataattcactcaatagttacctatgtagatggttctagtatatgtcagttaagcaagcctgatatgagaattccaatagcacatgcattatctaatgagaacagattaaatatagattttgattctatagattttacaaaccttgaattatcatttcaggaattcccttcagatagaatgggaatacaagatatagctagagaggtttgtaatattggtggctcgcttggaacaatttttaatgcagcaaatgaaatagctgtagagaattttctaaatgaacaaataaactttgatgaaatttatgaagtgatttatcgaacttttgataaaaacaatatgtctaatgatttgtctttggaatcaatcaatgaggttgatatgcttacacgcatagaggcacagaaggtggtaaaatccattgcttagg

SEQ ID NO: 206863 - DNA, 1150 bp, Unknown
  Bacterial polypeptide expressing nucleotide sequence isolated from the Sargasso Sea
atgaaaaatattcttttattaggagctaccggaagtatcgggaagagtgtgctaagcgttattaatgagaatcaatcaaaattaaatctttttggcatttctttaaataataatttaaatacagcaaacaaaatcatagatgattttaatccttcctttattcatattgaagataaagacacttttgataatcaaaaagcatctaaagaaataatttatttgaatggagatgatgaattaaaaggtcttataaatcatcaagatgtagatattattatctcagccatatcaggttttgcaggacttaaagctactcacttagcggcaagctcaggaaagaaaatcttattagctaataaagaaagcatagtagctggaggagatttaatcttaccattagtaaaagagaataattctgaaattattcctattgatagcgaacataatgcaatctttcaatgcttgtctggtgagaaaggagtagatgatgttcagagggtaacaattacagcatctggaggaccttttataaataaaaaactttcagatttaaaaaatgttagaagaagcgacgcactaaatcatccaaattggaaaatgggtagtaaaatttcaatagactcggccaccttagtgaataaatgccttgagttaattgaagcaaagtatttatttgatcttgatgagaaatattttgatctagtagttcatcctcaaagcataattcattcgatagttacatatgtagatggttctagcatatgtcagttaagtaagcctgatatgagaattccaattgcgcatgcattatctaatgagaatagactaaatatagattttgattctatagattttacaaatcttgaattatcatttcaggaattcccctcagatagaatcggaatacaagatatagctagagaggtttgcaatattggtggcttgcttggaacaatttttaatgcagcaaatgagatcgccgtagaaagttttttaaatgagaaaataaaatttgatgaaatatatgaagtaatttatcgaacttttgataaaaataatatgtccaatgaattatctttggaaacaattaatgagattgatatgcttacacgcatagaggcaaagaaggtggtaaaatccattgcttaaa

SEQ ID NO: 206864 - DNA, 1150 bp, Unknown
  Bacterial polypeptide expressing nucleotide sequence isolated from the Sargasso Sea
tatgaagaatgttcttttactaggagctacaggtagcattggaaaaagtgttcttagtgtcatttctcaaaataaagaatcattaaatttaattggcatatctttcaacaaaaatgtttcacgatatcaagaaatattagaaaaacattcacctgaatacgtttatattgaagaccatgattcatttaaaagtctttgcagtaaagataaggaaagatatttaaatggtgatgaggagcttgaaagacttattaatagagatgatgtcgacattattgtatgtgctacatctggatttgcgggcttaaaaactgcatatattgcatccaagacaggaaaaaagattttattagcaaataaagaaagtattgttgcaggcggagacttaattttacctctagcaaaagagaataatactaaaattatcccaattgatagcgagcacaatgcaatttttcaatgtttatccggtgagaagggtactgaagatgtaaagagtattactattactgcatctggcgggccttttattaatgctcctattcaagatttacagcatgttactgtagaggatgctcttaaacatcctaattggaagatgggaagcaaagttacgatcgattctgctactttagttaataagtgcttagagcttattgaagcgagatatttatttgatttagatgaaaaatattttgatttagtcattcatccacaaagcataatacactcaatagtcacatatatagatggctcaagtatatgtcagatgagttcccctgacatgagggttccgattgctcatgctctttctgaagagaacagaataccaatagattttaaagacttagactttagtaacttaaatctatcttttcaagagtttccgtccgacagatcgaagattcaagatattgcaagagatgtatgtaataaaggtggatttctaggaactgtatttaatgctgctaatgaaattgctgtggaaagttttttaaataaaaaaattaactttaatgaaatttatgaagttatatatcgaacttttgataaaaatattgtgtctaatgaagtaacgatagaatcaataaatgaggttgacgttcaaacacgcattcatgctcagaaggtggtaaaatcgtttgcttaa

SEQ ID NO: 206865 - DNA, 458 bp, Unknown
  Bacterial polypeptide expressing nucleotide sequence isolated from the Sargasso Sea
gctgggctccacgggctcgatcggtacccagacccttcagatcgccgaggaattccccgagcagttccgcgttgtggccctgacggcagggcgcaaccttgatctgctggtgcagcaaatccaacgtcaccagcccgagctggtggccctggctaatgctgatcttctgccggagctgcagcagcgactcgacgccctcggcagcgatcgaaagcgtcctcagcttgtgggcggtcccgatggcctgaacatcgcagcctcgtgggagagcgcggatctggtcgtcaccggcattgtgggctgcgcaggtctgctgccgaccctcgccgctgttcgcgctggcaaggacctggccctggccaacaaagaaacactgattgcggccggccccgtggtgctgccggaactgaagaagagcggcagccggctactgccggcggactcggagcactccgcca

SEQ ID NO: 206866 - DNA, 757 bp, Unknown
  Bacterial polypeptide expressing nucleotide sequence isolated from the Sargasso Sea
aatgccgcccgtgaaagccctcagcgtgctgggatccaccggctcgatcggcacccagaccttggagatcgttgcggagttcccgcaacgcttccgcgttgttgcgctcaccgccggccgcaacctggagctgctggtgcagcagatccgccagttccagcccgaggtggtcgccctggccgagccagccctgctgccagagctgcgcgaacgcctgcgtgggctggcgcagccgtgcagccccgaactggtcgcgggccgtgaagggctctgccaggccgcggcatggcccacggcagacctggtggtgacgggcatcgtcggctgcgctggcctgctgcccaccatggcggccattgaggccggcaaggacctggccttggccaacaaggaaaccctgatcgcagcaggccctgtggtgctgccggcgctggagcgcagcggcagccggctgctgcccgccgattccgaacactccgccatcttccagtgccttcagggcaccccctgggcggataatgctcgcctttccaccggcatccccacgccaggcctgcgccggatccaactcaccgcctccgggggtgccttccgcgactgggaagcagctgatctggtcaaggccaccgttgctgacgccaccagccaccccaactggagcatggggcgcaagatcacggtggattcagcctcattgatgaacaagggcctcgaggtgatcgaagcccactacctctacggggggatacgaccacat

SEQ ID NO: 206867 - DNA, 908 bp, Unknown
  Bacterial polypeptide expressing nucleotide sequence isolated from the Sargasso Sea
tatgaccaaaaaaactatatcaatatttggctctacaggatcagttggtaatacaactcttaacattttaagagaaaataaagaaatatttgatgtgaaaattttgacaggatataaaaatattagtgaccttgcttcattggcaaatgaattcaatcctgaagctatatgttttgctaatgaatctgatttggagctaataaaaaacaaaattaattacgatgaagtcgaatactattttggcgatgatggtctgttagagtgtgcaaaagttagtgtagatatagtgatagcaggaatagtgggtttagcaggtcttccaccattacttgagtccattaaaagctcaaaaaaagtttgtattgcaaataaagagtgctttgtttcagctggttctttaataatgaatgaagcaaataaatataaaactcagattttacccctagatagcgaacatagtgctatttttcaaattctcgaaaatacaaataatgttgtaaaggatatatttcttactgcttcgggagggcctttttataagtattctagtgatgaacttttgaaagttaaagttgatgatgctattaaaaacccaaattgggttatgggaaagaaaatatctgtagattcagccactttaatgaataaaggcttagaaataattgaagcaaaacatttatttaatttacatgaaagtaaaataaaagtcgttattcacagacagtcaatagctcatggaatagtttcatttgaagataacacctttttgactgcttttggatatccagatatgactcatcctataaaatacgctatttttcatccaaaaaactataataataaaagtcaaaaaatgaatattgaattactaaataacttatcatttgaattagttaatgaggaagaat

SEQ ID NO: 206868 - DNA, 801 bp, Unknown
  Bacterial polypeptide expressing nucleotide sequence isolated from the Sargasso Sea
ataatagtaggcttttacctgccgattcagaacattctgctatctttcaatgtttacaaggattacccaattatgaaaatgcagatttttcaacaggagagatgcctaagggtttaaaagccatacacttaacagcttctggtggtgctttcagagattggcccgttgaggatttaaagcatgtcacagtggaagatgcgacttcacatcctaattgggatatgggaaaaaaaataactgtagattctgctactcttatgaataaaggattagaagttatagaggctcattatttatttgggacctcttacgaaaatatcgaaatagttatccatcctcaaagtattattcattcaatgattgagatggaagattcttcagtattagctcaattaggttggccagatatgaaactacccattttatttgcgatgagttggcctgaaagatttaaaacaaattggaaaagattaaacctaagtgaaattggaaaattaacttttaaagagccagacgagtttaaatatccatgcatgggacttgcctatgccgcaggaaaatcttctgggactatgcctgcagtcttaaatgctgctaatgaaatggctgttgaacaattcctcaaagaaaaaatttcttttcaagaaattccaacatttataagtaaagcttgtgaatcacatatggagaatttgaatttgagtcccgcattggaggatattcttgaagtagacaattgggccagactttttgttgagcaagaaattaaaaaagggaaaaaatacttaagtataggataaa

SEQ ID NO: 206869 - DNA, 1162 bp, Unknown
  Bacterial polypeptide expressing nucleotide sequence isolated from the Sargasso Sea
atgaaaaaaaatatcgttattttaggatcaactggaagcataggtgtaaatgctatagatgtaattaaacaacatcctgaaaaatttaatgtaattgcaattagcacaaaccaatcgattgatttaataattcaacaagcaaaagagttaaagccaaattacgtttgtgttaaaaataaagaggatttaaataaaatttctaatgaactaagtgatccaaatttagaaattatttttggagaagattctcttgctaaattatctcaaattgaagaagcagattatgtgcttaacgcaattgttggctctgcaggtttaaaaagttctatgaatgctgtcaaatctggaaaaaaattacttttagcaaataaggagccattagtaatgtgtggtgatttattaatgggaattgcaaatgataataatgcaattattcttccaatcgatagtgaacataatgctatccatcaatgtatagaatcaaaaaataaaaaacatattaaaaagatcgttctcacggcaagtggaggaccctttttaaaaagagatcttaatacttttaattcaatatctgttaaagatgctttaaagcatccaacctggaaaatgggtaataaaattacagttgattgtgccacaatggttaataagggtttagaaataatagaggcaatgcatttatttgaaatgcctagtagtaaagttgaagctattattcaccctcaaagcttaattcattcatgtgttttttttaatgataactctgtactaacacagatgagtataagtgatatgagaattcccatagcatattgcttagcatggcccgacaggattgattcaggcgtatcagaattaagtttagaggaatcctctccactgaattttgaacagatcgaagaaaaaagatacccaagcttttttttaactaagaagattgctgaggaaggtggaatttatccatgcgttttaaatgcagcaaatgaaattgcagtaaaatcttttattgaagagaaaatcaaatttttagatatacatactatcattgagaaaactgttagtaattttgaaaactcaaatgcttctaatattgatgaggtcttagaatatgataaaaaagcaaggttattcgctaataatcttgttaatgatataatttaac

SEQ ID NO: 206870 - DNA, 973 bp, Unknown
  Bacterial polypeptide expressing nucleotide sequence isolated from the Sargasso Sea
attaattacgatgaagtcgaatactattttggcgctgatggtctgttagagtgtgcaaaagttagtgtagatatagtgatagcaggaatagtgggtttagcaggtcttcccccattacttgagtccattaaaagctcaaaaaaagtttgtattgcaaataaagagtgctttgtttcagctggttctttaataatgaatgaagcaaataaatataaaactcagattttacctctagatagcgaacatagtgctatttttcaaattctcgaaaatacaaataatgttgtaaaggatatatttcttactgcttcgggaggacctttttataagtattctagtgatgaacttttgaaagttaaagttgatgatgccattaaaaacccaaattgggttatgggaaagaaaatatctgtagattcagccactttaatgaataaaggcttagaaataattgaagcaaaacatttatttaatttagatgaaagtaaaataaaagtcgttattcacagacagtcaatagctcatggaatagtttcatttgaagataacacctttttgactgcttttggatatccagatatgactcatcctgtaaaatacgctatttttcatccaaaaaactataataataaaagtcaaaaaatgaatattgaattactaaataacttatcatttgaattagttaatgaggaagaatatcaagctttaaagcttgttagatcagttttaaaaggtaatgatgaagagaaatctataattctcaattcttctaatgaagttgctgtaaaagcttttcttgataaaaagattagattcatagatattttggttgtagttgaagaatctatagaatatgtttcgaaactattaggaaatgaaactataaattatagcgataatcttgataatattttatatttagatagcctaacaagacaaaaaacagaggaacttattaaattaagaatttaaa

SEQ ID NO: 206871 - DNA, 949 bp, Unknown
  Bacterial polypeptide expressing nucleotide sequence isolated from the Sargasso Sea
catgaaaacactagctattattggatctacaggatccataggtactcagactcttgatgtagtccgacaattccccggtcatctgtcaattacagcgatggctgctggagataatacagaagcctttaacaaacagatcgatgaattcaatcctaaatatgtcaactgtaacaataacgcctctatcactaatacaaatgtttctttcctgaacttagtcgacatgtgttcactacctgaagttgatattgtagtcatggccacgtcaggtctcattggattagaaccaacaatagccgccctcaaatcagggaaaaatgtcgcattatccaacaaagaacctattgttgttgcaggagatctaataaagcaaacagagaaagactctagtggcaacatttacccggtagatagtgaacccagtgcaatatggcagtgtatcgcagggtctactaatgtgaataaactcatcattacgggttctggaggatcagccagagacattccgatcgataaactagattcactaaccccagagatggctctaaaacatcctaattgggctatgggtaggaaaattacgatcgactcagcaactatggttaacaaagcattcgaaataatagaatctcactggttatttgagatgccatgggaaaacatagaagcagtaatacatccacagagcttagtccactctttggtagaatttgatgatgcctctataaaagctcagataagcaatccgaacatgcacattcctatacagtatgcactgttctatcctaataacgtgacgaacccacaatttacacgtcttgatttcagcaaagttatcaacatggatttttatcctatggatcatcaacggtatccagcatttaacattgttctggaagcagctaaattaggaggaagctatcctatagtggttaacactgccgatgaa

SEQ ID NO: 206872 - DNA, 880 bp, Unknown
  Bacterial polypeptide expressing nucleotide sequence isolated from the Sargasso Sea
tatgaagaatgtacttttactaggagctacaggtagcattggaaaaagtgttcttagtgtcatttctcaaaataaagaatcattaaatttaattggcatatctttcaacaaaaatgtttcacgatatcaagaaatattagaaaaacatgcacctgactttgtttatattgaagatcatgattcatttaaaagtctttgcagtaaagacaaggaaagatatttaaatggcgatgaggagcttgaaagacttattaatagagataatgtagatattattgtatgtgctacatctggctttgcgggcttaaaaactgcatatattgcatctaagactgggaaaaagattttattggcaaataaagaaagtattgttgcaggcggagatttaattttacctttagcaaaagaaaataattctgaaattattccaattgatagcgagcacaatgcaatttttcaatgtttatctggtgagaaggggactgaagacgtaaagagtattactattactgcatctggtggaccttttattaatacccctattcaagagttgcagcatgtcactgtagaggatgctcttaatcatcctaattggaaaatgggaagcaaagttacgatcgattctgctactttagttaataaatgcttagagctaattgaagcgagatatttatttgatttagatgaaaaatattttgatttagtcattcatccacaaagcataatacactcaatagttacgtatatagatggctcaagtatatgtcagatgagttctccagacatgagggttccgattgctcatgctctttctgaagagaacagaatatcaatagattttaaagacttggactttagtagcttaaatttatcttttcaa

SEQ ID NO: 206873 - DNA, 1117 bp, Unknown
  Bacterial polypeptide expressing nucleotide sequence isolated from the Sargasso Sea
atgaagaatatttcaattttgggatcaacaggatcgattggaactcaaaccttagatgaaatcaataaaaaaagagaaaattttaggattttaggattaacctgcaattcaaatattaaattgctatctaaacaaataaatcaattccaagcaattcaatttcatgcaaacaaaaatatatcaacaaaagcaaaaaaaacatcgcctaatgcaattgctagtgataataaattacataaattagttgtagcaacggaaggtataaactcactaaacccaacattaaatgctttaaacaattcaaaaattgttggaatagctaataaggaatctttactatgtggttacgaattcatccaaaaatcacttcaaaaatatgaaggtaaattaataccattagacagtgaacctgtaagtgttcaaaacttacttaacgagaacaaaagctttgttgataaaattattattactgcttccggaggaccatttagaaacaaaactgaatctgaattaagcagtatatctccgaaagaagcatcaaatcatccaaattggaaaatggggaaaaaaatatctgtagattctgctactcttatgaataaggcttttgaggtacttgaatgtaatctgctttttgatttccctttagaaaaaattgaagttataatcaatccatcaagtaatatccatgcactaattcagtataaaaataatacaataatagcttctaagtacaaacctgatatgaaaattcctatatctgaatttctcacaggtaaattatctccattttcaactcatgtttattttaaaaaacatgagttgatcaaaccagaatttgaaaattttaatgcatcaaaatttccagcatatcaaattggtttacactatggaaaaagaagggggagttggatcatagcattatgtgcagcagatcaagcagcagtagaattatttattaatcataaaattaatttcattgatattcctaaaatcatagaatctgttttagataatcatatagaatcaaatatatcgaaattggaagatatatatacagtatacaaatcaacaataaacgaaacatacaagttagcaaaaagcaaatggaattaac

SEQ ID NO: 206874 - DNA, 550 bp, Unknown
  Bacterial polypeptide expressing nucleotide sequence isolated from the Sargasso Sea
ttgaaaaagatattcattcttggtgcatctgggagtattggagaaaatgctctatctgttatcgactcaaataaagaaaagtttgaactagtaggtatttcggtaaataaaaatgttgaaaaggctaataagattatcaaaaagcacaatccaaagtacatttacataaatgataaatcagcaaaagaaaatatactaaagactgaggatgcagttatttatgaagacgataaagagctttccgatatcttcaattcaagtgatgttgatattgtaatctcagccatctcaggttttgctggaattaagtcgactttccatgcagcaaaatcaggtaaaaagatccttcttgctaataaagaaagtattgttgcaggcggatcattgctgatggaaactgcaagagaaaataataccgaactagttccaattgatagcgagcataatgctatttttcaatgcttacctgaatctagatcaacacaagatgttaagcaaatagtcattactgcctcaggagggccctttcatggaaagaatatagatgaac

SEQ ID NO: 206875 - DNA, 1231 bp, Unknown
  Bacterial polypeptide expressing nucleotide sequence isolated from the Sargasso Sea
ttgaaatacattactgtgctcggttctactggttcaatagggactcaaactctcgaaattgctagtgagcagcctgataagtttaaagccgtagctctttctgcaggaagaaatattaatttattaactgaacaagttaaaacacataaaccagaggtagttgcaattgaggatgaaagccttatagaagatttaaaagataatattaataacttagatttgaatgattctcccttgattttaggtggaaagcaggggattaacgcagttgcagcatgggataaggcagatactgtggtaacagggatagtaggctgtgcaggcttaattccaacaatgtcagcaattaatgcggggaaaaatattgcacttgctaacaaagaaactttaattgcggcaggaccaattgttattcctgcattaaagaaaaataatagtaggcttttacctgcagattcagaacactctgctatctttcaatgtttacaaggattacctaattatgaaaatgcagatttttcaacaggagagatgcctaaaggtttaaaagccatacacttaacagcttctggtggtgctttcagagattgggccgttgaggatttaaagcatgtcacagtggaagatgcgacttcacatcctaattgggatatgggaaaaaaaataactgtagattctgcaactcttatgaataaaggattagaagttatagaagctcattatttatttgggacctcttacgaaaatatcgaaatagttattcaccctcaaagtattattcattcaatgattgagatggaggattcttcagtattagctcaattaggttggccagatatgaagctacctattttatatgcgatgagttggcctgaaagatttaaaacaaattggaaaagattaaacctaagtgaaattggaaaattaacttttaaagagccagacgagtttaaatatccatgtatgggacttgcctatgccgcaggaaaatcttctggaactatgcctgcagtcttaaatgctgctaatgaaatggctgttgaacaattcctaaaagaaaaaatttcttttcaagaaattccaacatttataagtaaagcttgtgaatcacatatgaagaatttgaatttgagtccagaattagaagatattcttgaagtagacaattgggccagactttttgttaagcaagaaattaaaaaagggaaaaaatacgtaagtattggataaa

SEQ ID NO: 206876 - DNA, 946 bp, Unknown
  Bacterial polypeptide expressing nucleotide sequence isolated from the Sargasso Sea
ctgggctccaccggctcaatcggaacccagactctggaaatcgttgaggagttcccccagcgcttccgggtggtggcgctgaccgctggccgcaatttggcattgctctgccagcaggtgcagcagcatcaaccggaagtggtggccttggccgatccagccctgctgccagaactgcgggaacgactgagtgctttaaatctgccgcgcctaccggagctggtggctggccgtgaggggctctgtcaagcggccgcctggagcagcgccgatcttgtcgtcacagggatcgtcggctgcgctggtctgctgccaaccctggcggccatcgaagccggcaaggatctagccctggccaacaaagaaaccctgattgcagcaggcccggtggtgctgccagcgctggaacggagtggcagccgtctgctacctgcagattccgagcactccgccatcttccagtgcctgcagggcaccccctgggctgacaacgcgcggctttcgacgggtgtacccactccagggctgcgccgtatccaactgaccgcctcaggcggagctttccgcgactggaaagccgctgatctcgccaaggccacggtggctgatgccaccagccaccccaactggagcatggggcgcaagatcacagtggattccgcctcgctgatgaacaaggggctggaagtcatcgaagcccactacctctatggcgtcgattacgaccacatcgaaatcgtgatccacccccaatcgatcatccattcgatggtggagttggccgactcctcggtgctggcccaactgggatggccagacatgaaactgccgatcctctactgcctcagctggcctgagcggctggagaccccctggcgacgcctggatctaaccgaacttggccagctcagcttccgggccccggatcccgccaaatacccctgca

SEQ ID NO: 206877 - DNA, 910 bp, Unknown
  Bacterial polypeptide expressing nucleotide sequence isolated from the Sargasso Sea
tatgaaaaaaaaaatcgctatactaggttcaactggctctgttggtaaaactacatttaatattataagagagaacaaaaaatacttcaatgttatattgcttaccacaaaccaaaatataaatgaaattataaaacaaactaaacaagtaaaagtaaaaaatattatagttactaataaaaaaaaatatttaaaattaaaagataagtttaaaaaaagtaatattaaaatatttaataattttgatgatcttaataagattattaaaaaaaagttagattatacaatgtctgcaatttcaggtttagatgggttaaaaccgactataagtattatcaaatctacaaaaaatatagcaattgcaaacaaagagtccataatttgcggatggaacctgatagataatgaattaaaaaaaaacaaaactaaatttattcccgttgattccgaacatttctctatttggtcaaatataaataaaatcaataaaaatttaattaatcaagttatactcacagcttcaggggggccctttttaaaaaaaaataataaatttctaaaaaaggcaaccattaaaagtgctttaaaacatccaaattggaaaatgggaaaaaaaatttcaatagattccgcaacattaatgaataaagtttttgaattcattgaagctatgagaatctttaatcttgataaggataaattaagtatcttagttcatccaaaatcctatgtacattcaattattaaatttaataatggattaataaatattaccgcacatgatacaaatatgaaaatacctatatttaattcaatttatttcccgaattttaaaagaatttatacaaaaaatatagattacaaagtgcttaataatttatcattatccaaaccatcatttaaaaaattt

SEQ ID NO: 206878 - DNA, 1180 bp, Unknown
  Bacterial polypeptide expressing nucleotide sequence isolated from the Sargasso Sea
tttggattgcaaaatcaattctaaaatgaaaaaaatatcaatattgggatctaccggatctataggaatcaatgctttaagtgttattgataaccacttaaacgattttatagtagtcgctttgagtgcacataaaaacggtaaattattaattgagcaggcaaaaaaatatcagccagaatttgtagcagttgttgatcttgatactgcaaactttgttgaagacgaactgcggtcaacaaatatcaaaattttaaaagggcgagaagggcttttagaactatcatcttatggctctgttgatcttatgctcaatgctctggttggatcatctggtatggagcctacaataaatgccttacaatcagaagttgatgtagcgctaagcaataaagaaagcttggtaatggctggaagtataattaatgaaataaaaaataaatcaggcgctaaaatatttccagtagacagtgagcattcagcaatttggcaatgccttgcaggtgagtctatcaaagaagttaataaaataatattaactggaagcggaggcccatttcgcactttagaaattggtcaatttaattccattaccgtagatcgagcccttaatcaccctaattgggaaatggggaaaaaaataacaattgattcagccaccatgatgaataaaggacttgaagtaattgaagctttctggctttttgatatttccaaagatatgatcgagattatcatacatccccaatccattatacactcaatggttgagtttaaagataaatctgttaaggctcagttaggtttaccagatatgaaaatacccatccaatatgctttgacataccctaatcattcaaatgctgactgggatgagttagacttgacaagtatagaatcacttacctttgaaaagccagattttaataaatttccatgtatgcgtttagcctttgatgctttagagcaagaagggacagttccagctttattgaatgttgtaaatgaatattcagtttaccgatttctaaataacgagataagcttcatagaaataccccagttgatcgaaagggcatttgatgaacatgattttattaaagagccatcaatagatgatgtacttaatattgagatatgggcgcaagaattcgtaaaatcatacacaccaaaaaattaa

SEQ ID NO: 206879 - DNA, 1192 bp, Unknown
  Bacterial polypeptide expressing nucleotide sequence isolated from the Sargasso Sea
tatgcaaaatatggtgattttgggtgcgacaggctcgattggtgccagtaccttaagtgtgatttcggccaacccttcagcctatcgagtgtatgctttagtggcgaatgcgagtgtcgacaagatgctcgccctgtgtttagcccatcgcccgcaggtcgcccatatggtcgatcctaatgctgcattagcactcaagacgcaattacctgcggcgcttaatatccaagtcacaagtggcgaggatgagcttattgccttagtcacttcctcagtggttgataccgtgatggctgcgattgtcggcgcggcgggtttagtcccgactctggcggcggtgaaggcgggtaagcgggtattgctcgccaataaagaggcgctggtgatgtccggcgagctgtttattgaggcaacgaaacgctctggcgccacgttgttgccggttgacagtgaacacaatgcgattttccaatgcttacccgaagaagtgcaggctaatttagggcgctgtgatttagcggcgtcaggtatttcccatattttgctcaccggttctggtggtccatttttaaccgccgagctgtcaagtcttgcggcaatgacgccagcacaggcttgcaaacatccaaattggtcaatggggccgaaaatttcggtcgactccgccacgatgatgaataagggcttggagtttatcgaagcacgctggttgttcaatacccagaaagatcaactaaaggtggttattcatccgcaaagtgttattcattctatggtgcaataccgcgatggcagtgtgatcgcgcagatgggtaacccggatatgcgtacaccgattgcgcattgtatgtcctatccgcaaagaattcgctccggtgttgaacctttggattttttcaaagtcggacagttaagcttttgtgagccagactttaatcgcttcccctgtttggctttagcgattgccgcttgtgcccaagggcaagaagcgactacggtactcaatgcggccaatgaaatcgccgtggaggcgtttttacaaggcaagattgggtttacccatatcgccaaggtgaacgaagcctgtttatcgtcggtgcctaaacgggcgatgaccagcatcgaagatatcattgctctcgatgcacaaacacggatatatgcccgtgaattactagcgaaatttgcttag

SEQ ID NO: 206880 - DNA, 1150 bp, Unknown
  Bacterial polypeptide expressing nucleotide sequence isolated from the Sargasso Sea
atgaagaatattctcctacttggcgcgactggaagtattggcaaaagtgtattaagtgtaatctctgagaataaaaataaatttaatttaatgggtatttcatttaatagtaattattcgaaagctgaagaaatcattaataattttctgcctaagtatgtctacatagatgatcatgattgttatgttaaaaatactactaataatggatgcacatttttaaacggagattcaagcctagaacaactaataaaaaatacagagattgatattattatttgcgctacatcaggcttcgctggattaaaagcagcatctattgctgtaactacagggaaaaaaatattattagccaacaaagaaagtattgttgctggaggagatttaataatacccttagcaaagaaacattcatcggaaattataccgattgatagtgaacataatgcaatctttcaatgtctttctggagaaaatggtatagacgatgtgcagaaagtaattattactgcctctggtggcccatttttaaattcttcaataagggatttaaaaaatgtaactttagatcaagctttaaatcatccaaattgggaaatgggcaataaagttacaattgattcagcaacattagttaataagtgtttagagttaatagaagcaaagtatcttttcaacttggaagagaatatttttgaattagttgttcatccccaaagcattattcactctgtcgttacttacaaagatggttcaagcatttgtcaaatgagctctcctgatatgaaaattcctattgccaacggcctatctgacattaatagagttccaatcagttttgagcaacttgacttcacttcgttaaaactttcttttcatgaatttccaaatgacaggaaaaaaattcaagacattgcccgtgaagtttgtaataaaggtagtaatcttggagctgtttttaatgctgcaaatgaaattgcagtcgagagcttcataaaaggacaaataaactttgataaaatttatgatgtaatttatagaacttttaatgagaataatgtgtctaatgaagtatctattgaatcaattaatgatattgatagacatacacgtattgaggcacagaaagtggtaaaatccatctcttaaa

SEQ ID NO: 206881 - DNA, 1198 bp, Unknown
  Bacterial polypeptide expressing nucleotide sequence isolated from the Sargasso Sea
tatgcaaaatcgcctgacattgctcggttccacgggctcgatcggagacagcacgctcgacgtggtcgcgcgtcatcccgagcgcttctcggtctatgcgctgaccgcacaccgcaacggcgacaagctcgtcgagcaatgcctgcgcttcgcgcccgaggtggcggtggtcggcgatgccgagacggccgcgcacgtcgacgcgaaactgcgcgcggcgggcagcaagacgaccgtgctgtacgggccgcaggcgctcgtcgacgtgtcgaagagcgatggctgcgacacggtggtcgcggcgatcgtcggagcggccggcatggcgccgagcctcgcggccgcgcgcgccggcaagcgcatcctgctcgcgaacaaggaggcgctggtgatgtcgggcgcgattttcatggacgccgtgcgcgaccatggcgcgatcctgctgccggtcgacagcgaacacaacgcgatcttccagtgcatgccgcgcgacgcggccgagcacggcgggatctcgaagatcatcctgaccgcatcgggcggcccgttccgcacgcgcgaaccggccacgctcgtcgacgtgacgccggacgaagcgtgcaagcacccgaactgggtgatgggccgcaagatttcggtcgattccgcgacgatgatgaacaagggcctcgaggtgatcgaggcgcactggatcttcgggctgccgggcgagcgcatcgacgtgctgatccacccgcagagcgtgatccattcgctcgtgtcgtatcgcgacggctcggtgctcgcccagctcggcaaccccgacatgcgcacgccgatcgcgcacgcgctcgcgttccccgagcgtgtcgatgcgggtgtcgagcagctcgatctcgcgcagatcgcccagctgtcgttcgagaagcccgactacgcgcgcttcccgtgcctcgcgctcgcgctgaaggcgcttgacgaaggcggcatcgcgagcgccgcattgaacgcggcgaacgaagtcgcggtcgaagcgtttctcgagcgccgcatcggcttcatggcgattgcggcgacggtcgacgccgtgctcaacacgctgccgaaccgcacgcccgacgggctcgaggatgtcctggcggcggatgccgaggcacgccgcctcgccgccgaaatcattgcgaaagcgcctgcgccacgcgtggagcgtactgtctga

SEQ ID NO: 206882 - DNA, 1023 bp, Unknown
  Bacterial polypeptide expressing nucleotide sequence isolated from the Sargasso Sea
aagcaaaaaaatttaagccaaaaagtataatttttggtgataaatcaaaagaaaaattattaaatgaagagcttaaaaatgaaaatatagaaatttattttggagaagaatcactaaataattttttaaaatattgttcccctgatatagttctcacagcattagttggaaaatcaggacttataccaactattaatgctgtaaaaaaaggtattgatattgcattagctaataaagaaactttagttatagctggagaaattatcagaaaaatatctaaagacaaaaatgtaaatatttaccctgtagactctgaacactcagcaatatttcagtgtttagttggagaagataataataaaattgaaaatattattttaactgcctcaggaggtccatttagaaataaaagtttagatgacctaaaaaaaatatcaaaaaaagaagctttaaatcaccctaactgggaaatgggagaaaaaataactatcgattcctctacattaatgaataagggattagaagttattgaagcaaaatatttatttgatattgatataaaaaaaataaaagtagttattcatccgcaatcaataatccattcaatggttgaatttgtagatggatcaattaaagctcagatgggagaacctgatatgaaattaccaattcaatatgctcttttatcaggaaaaagagttaagaattattttaatagatataattacttaaaaaacaatactttaacttttgaagagccatgcctaaagacattcaataatttaaagttagcatttgatgctgggaatttgggtgggaatgcaccatgtgttctcaatgcatctaatgaaattgttgttgatgcatttttaaaagaaaaaataggttacttagatatgacaaaagttattgaagaatctttgaataaaataccatatattgctagcccaaatttagaacagttaattgaaactgatctattaactagaaagtatacattagaaaaaataaataagatataaa

SEQ ID NO: 206883 - DNA, 1150 bp, Unknown
  Bacterial polypeptide expressing nucleotide sequence isolated from the Sargasso Sea
atgaaaaaaataggcatacttggctctacaggttcaataggtactcaagcattagaattaattaataataataaaaattttaaagtatcctatttatctgcattttctaatgttgaattacttatcaaacaagctcaaaaatttaatcctgatgctgtatgtatagtacaaaattcagagtttaaaaaattaaaagatggattaaaaaattttgatattgaaatattatctggcaataaaggtattgaagaattagcatctagaaataatattgatttattattaaatgcattagttgggtattcaggaatgcttcctacattaagagctcttgaaaatggggtagatgttgctttagctaataaagaaagtttagtagttggtggtaatattatacaaaaagaattagctaagaataatgcaaaattatttcctgtagatagcgagcattcagctatatggcaatgtttgcttggtgaaaataaaagtgaaataaataaaataattttaaccggatctggaggtccatttagaaccttacctttatctgaatttaataatatcacaaaagagcaagctttgaaacatccaaactgggaaatgggttctaaaattacaattgattctgctacaatgatgaataaaggttttgaaataattgaagcatattggttgtttaatttacctattgataagattgaggttattatacatccccaatctattattcattctatggtagaatttattgatggttcaattaaggcacaattaggcacacctaatatgaccatacctattaattttgcattaaattatcctgaaagaacatttaatgatttttatagatttaattttttagaatctaatttattaacttttgaaaaaccagattttaaaaaatttaaatgtattaaattagcttatgaggcattaaaattgggtgggtcatatttaatagtattgaatgtagtgaatgatatttgtgtaaatgcttttttaaataataaaattaatttcattgatattccaaattttattgatgaagctatgcaaaaccataaacctaataatttaacagatatagaatctatttttaatactattagcaatacaacagaatatataaaagataaattaaaattataat

SEQ ID NO: 206884 - DNA, 1156 bp, Unknown
  Bacterial polypeptide expressing nucleotide sequence isolated from the Sargasso Sea
catgaatattgcgatactaggatctacaggctctattggacactcaaccttagaagtaatacgtcaaaataaacacaaattttctgttactttattgacagcaaggcaaaatcacgaattgctatttgaacaatccaaggaatttaacccaaagtttgtttatttagaagacgaacaagctagaaaattatttaaagaaaatgctttacagaaaaaattagaaacgcgcattattcagtcacaggaggaatttgaagaagttctaggttctaatgaaacagaagtagttgttgcaggcatggtcggcatagcaggattaatacctgttcattttgcaatttcaaaagggaaaagagtattactagctaataaggaatcttatgttgttgcaggtgagtatttaaataagctttgcagtcaaacaggcgctactatcttcccaatagatagtgagcatagcgctatacatcaatgtttagccaatacaaaaaatatgtcagatgtctcaaaaattattttgacaggttcaggaggtcctttcttgaataaagatattagcgaatttacttcaattacacctgagcaagctgtaaatcacccagtttggagtatgggaaagaagatttcagttgattcatcaactttgatgaataaaggcttagaagttatagaggcgagatggttgtttggttatgaaaatattgaaatattaattcatccagaaggaattattcattctttagtagagttcagagacaactctgttttagcccaattatcgaatcctgatatgaaggttcccatagcatatggattaagttatccagacaggattccttctggttctactccgctacatttacatgaagttggttctttgaactttcttgaaccggactttaaaaaatttccttgcttaaaactggcgatagatttattacctattggggggacaagcttttctattctaaatgcctcaaatgaaatttgcgttgaggcctttttggatgggcgaataagttatattcaaatttatgaaataatttctaaagttttggatagaattgaaattaaaactgtcgaatctctagacgagatatttgaatctgataagaattctcgtaaggaaacttcttctctaataaataacttataa

SEQ ID NO: 206885 - DNA, 1150 bp, Unknown
  Bacterial polypeptide expressing nucleotide sequence isolated from the Sargasso Sea
tatgaagaatgttcttttactgggagctacaggtagcattggaaaaagtgttcttagtgtcatttctcaaaataaagaatcattaaatttaattggcatatctttcaacaaaaatatttcacgatatcaagaaatattagaaaaacattcacctgactacgtttatattgaagatcatgattcatttaaaagtctttgcagtaaagacaaggaaagatatttaaatggcgatgaggagctggaaagacttattaatagagatgatgtcgatattattgtatgtgctacatctggatttgcgggcttaaaaactgcatatattgcatccaagacaggaaaaaagattttattagcaaataaagaaagtattgttgcaggcggagatttaattttatccttagcaaaagagaataatactaaaattatcccaattgatagcgagcacaatgcaatttttcaatgtttatctggtgggaagggtactgaagacgtaaaaagtattaccattactgcgtctggtggaccatttattaatgcctctattaaagagttacaacatgttactgtagaggatgcacttaatcatcctaattggaaaatgggaagcaaagttacgatcgattctgctactttagttaataaatgcttagagcttatcgaagctagatatttatttaatttagatgaaaaatattttgatttagtcattcatccacaaagcataattcactcaatagtcacgtatatagatggctcaagtatatgtcagatgagctctcctgatatgagggttccaattgcgcatgctctttctgaagagaatagaataccaatagattttaaagacttagactttagtaacctaaatttatcttttcaagagtttccgtccgacagatcgaagattcaagatattgcaagagaagtatgtaataaaggtgggtttctaggaactgtatttaatgctgctaatgaaattgctgtggaaagttttttagataaaaaaataaaatttaatgagatttatgaagttatatatcgaacttttgataaaaatattgtgtctaatgaggtaacgatagaatcaataaatgaggttgatgctcaaacacgcattcatgctcagaaggtggtaaaatcgtttgcttaa

SEQ ID NO: 206886 - DNA, 1150 bp, Unknown
  Bacterial polypeptide expressing nucleotide sequence isolated from the Sargasso Sea
ttgaaaaagatattcattcttggtgcatctgggagtattggagaaaatgctctatctgttatcgactcaaacaaagaaaactatgagcttgtaggtatttcggtaaacagtaatgttgaaaaggttaacaagattatcaaaaagcataatccaaagtacatttacataaatgataaatcagcaaaagaaaatataataaaaactgaagatgcagttatttgtgaggatgagaaagagctttacgatatcttcaattcaagtgatgttgatattgtaatctcagccatatcaggttttgctggaattaagtcgactttccatgcagcaaaatcaggtaagaagatccttcttgccaataaagaaagcattgttgcaggcggatcattactgatggaaacagtaagagaaaataataccgaactagttccaattgatagcgagcataatgctattttccaatgcttacctgaatctagatcaacacaagatgttaagcaaatagtcattaccgcctcaggaggaccctttcacggaaagaatatagatgaactcaataatgttggagtccaagatgcgctcaatcaccctaactgggaaatgggatcgaagatttctatagattcagctactcttgtaaataagtgtttggagctcattgaagcatgttatttatttgatatggatgagagcttctttgagcttgtaatccatcctgagagcattgttcattcgatagttacatttaatgatggatcttcaatttgccaaatgagtaatccggatatgcgtgtgcctattgctaatgcaatgtcatatgataaaagactttcaattccgtttcagcccattgattttaataatctcaagctaaactttgagagctttccaaatgacagagctgaaattgttcgtttggcaagagatgctgtacgagaagatagctcaaagggaatttattttaatgctgccaatgaggttgcagtagaaaattttctaaagaaaaggattacatttagacaaatatatgaggtaattttacgaacttttgatacaaaagagatgtcaaagtttaatagtattgaagatatttttgaaattgatcaggaggcacgcaatatatctaatatggtgataaaatcactaacttaaa

SEQ ID NO: 206887 - DNA, 1147 bp, Unknown
  Bacterial polypeptide expressing nucleotide sequence isolated from the Sargasso Sea
atgaaaagtatatctatatttggatgcactggctccattggtactcaagcattagagataattagacaaaataaggagcaattctcttttgatgttttcgtatgcaactcgaatacagataaagcattagaaattgtgaatgagtttaatcctaagcatatatttatgtcagatgcagttgcttcaaataaacttaaagaatcattgtcttcggggactaatgtacttgaaaatatcagcgatgttatagaccatcttaaggcaagacaaagcgatatatatctttcagccatatcttcttttgattgtatcgaattgactattcttgccgctgaatctggaaataagcttttattagcgaataaagaaagcttagttgtttacggggagcacttagtaaatatatctaatagatctggaactaaaatagttcctatcgattcagaacattattcattaatgaactcgttaaataatatcccaaagaatgatatcgacagaatcttcattacagcatcaggcgggccttttattggtcagtcacttaatgaaatagcgaataaagaacccaaggaagctttagatcatccaaattggagtatgggagataaaattactattgattcagcaacacttgttaataaatgttttgaattaattgaagcaaaatatttatttgatcttgatccaggcaaactaaaagtattgattcaaccacaaagtattattcactcaatggtagaactaaaagatggttcagttgaagctcaaatgtctctaccaagcatgataatacctttatcttttggcttattaggtgaatattctgctaaagcaaaaaataatttttctttagacatgttcaaagaagatattaagctgactattttagatttcccaaaagatagagataaattaatagaaatttcacaagatgttatgagaaatggaggtaatagagggctaatatttgcttcgatcaatgattttgcagttaaaaaatatcttcaaggagaaatcaagtttggagaaatatataatttaattttcaagcattattctgtaatggaaaagaaagaaattttaaatttagaggacttaaaacataatcaaagtgaaatattggaatatttagaaagtatttaaa

SEQ ID NO: 206888 - DNA, 1062 bp, Unknown
  Bacterial polypeptide expressing nucleotide sequence isolated from the Sargasso Sea
attgaaatacattactgtgctcggttctactggttcaattgggactcaaactctcgaaatagctagtgagcagcctgataagtttaaagccgtagctctttcggcaggaagaaatattaatttattaaccgaacaagttaaaacgcataaaccagaagtagttgctattgaggatgaaaatcttatagaagatttaaaagataatattaataacttagatttggatagtgctcccttggttttgagtggaaaggaggggattaacgcagttgcagcatgggataaggcagatactgtggttacagggatagtaggatgtgcaggcttaattccaacaatgtcagcaattaatgcggggaaaaatattgcacttgctaacaaagaaactttaattgcggcagggccaattgttattcctgcattaaagaaaaataatagtaggcttttacctgctgattcagaacactctgctatctttcaatgtttacaaggattacccaattatgaaaatgcagatttttcaacaggagagatacctaaaggtttaaaagccatacatttaacagcttctggtggtgctttcagagattgggccgttgaggatttaaagcatgtcacagtggaagatgcaacttcacatcctaattgggatatgggaaaaaaaataactgtagattctgcaactcttatgaataaaggattagaagttatagaagctcattatttatttgggacctcttacgacaatatcgaaatagttatccaccctcaaagtattattcattcaatgattgagatggaagattcttcagtattagctcaattaggttggccagatatgaaactacccattttatatgccatgagttggcctgaaagatttaaaacaaattggaaaagattaaacctaagtgaaattggaaaattaacttttaaagagccagacgagtttaaatatccatgcatgggacttgcctatgcagcaggaaaatcttctgggactatgcctgcagtcttaaatgctgctaatgaaatagctgttgaacaattccttaaagaaaa

SEQ ID NO: 206889 - DNA, 1100 bp, Unknown
  Bacterial polypeptide expressing nucleotide sequence isolated from the Sargasso Sea
gattgggattcaatcattagatgtaatttcgaaaaataattcccacaaagtgattggtcttacttgccactctaatgctgatcttctttttgaacaaactaaaaaatactcacctgattttgttgcaattgatgtgattgattcttcccataatctttttaatctatgtgaaaaaaataatattgaacttataactggtaatgatgcttcaagcaatataccatttagcaatttagatttagcaattaatgctatcgtcggtacttctggtttacgacctacaattgaattaattaagaacggtgttgatgtcgctttaagtaataaagagtcattagtgcttggaggtcatattattatgccgttggcaaacaaaaaaaatgtaaatataattcctgttgatagtgagcactcagctatttttcaatgcttgaacggtgaaaatcaaaaagaattaaaaaaaattattcttactggcagtggtgggccgtttcttaagaaaccaattcatgaatttgatactattacacctaacgaagcactaaaacaccccaattgggacatgggagcaaagatatcaattgattctgcgacaatgatgaataaagcattagagttggttgaagcattatggctattcaatataaagcttgataagatacaaattactattcatccacagtctattgtacattcaatggttgagtttgttgatggttcttacaaagctcacctaggtttgcctgatatgaaagttcctattcagtatgcattaacttttcctgaaagaaaagattcctctgtaggaagcttagattttgataatttaaatttagattttaaaaaaccagacctagaaaggtatccaattttatcgcttgttgaagagctaattaacttaggtggaaatagagtagcagcaatgagcatggccaatgattatattgttcaaaaatttcttgataaaaaaatttcttttaatgaaatattctctttaattaaagaagttgttgatgaatttgcttccgatgatttaccttctttagaagaattatttattttagataaaaatattcaattatatttggaccctaattaaa

SEQ ID NO: 206890 - DNA, 1150 bp, Unknown
  Bacterial polypeptide expressing nucleotide sequence isolated from the Sargasso Sea
aatgaaaaatattcttttgctaggggcaactggtagcattggagatagtgttctgaatgttatttctcaaaacagagacttgtttaatttatttggtatttcgttaaacaaaaatatatccaaatcaacgaaaataaccaaagaattctctccaaaatacatccacgtcaatgaaaatgaatatttaaaaagcaatcaaaaaaattcttcaaatatttacttaaatggtgatgaagatctcaagaatttaataaatgatcaagatgtagacataattatatgtgctatatcaggatttgctggtttaaatgcgacatacatgtcagcacaaacaggaaagaaaatattactggcaaataaagaaagcattgttgctggaggagacttaattttaccattagcaaaaaaatataatactgaaattgttcccatagatagtgaacataacgcgattttccaatgccttgcaggagagagcggtgtggaagatgtaaaaaaaattacaatcacagcatctggaggaccttttttaaattcaagtatttcggatttaaagaacgtaagacttcaagaagcacttaatcatcctaattggaatatgggatcaaagattactattgattctgcaacgttagtaaataaatgtttagaacttattgaagcaagatacctatttgatcttgatgaaaaatattttgatttagttgttcatccccaaagcataattcactcaattgttacttatttggatggatctagtatctgtcagatgagctctccagatatgagagtacctattgctcatgcattatctgataaaagaagagttccaattaattttgattctcttaatttcagctctttgaatttgtcatttcaggaatttcctttagatagaatgcaagttcagaatattgctagagaagtctgtattagtggaagtaaccttggaacagtttttaatgcatctaatgaaattgctgtagaaagttttataaatggcttaattagttttgataaaatttatgaggtcatatatagaacttttgatataaatattatgtctaaagatatatctatagattcaattaatgatatagataagcagacacgcattgaagcaaagaaggtggtaaaatccttcatttaa

SEQ ID NO: 206891 - DNA, 1135 bp, Unknown
  Bacterial polypeptide expressing nucleotide sequence isolated from the Sargasso Sea
tatgagaggtgtatttattttaggaggaacagggagtattggctccagcgccctaagtgttattcgacaaaatacagatagcctaaaattgataggcttttcgtacaacaataatcatgaaaaggctaagcaaatcatcagtgaatttaaaccaaaatatgtattttcgaatcagtcaaatgatcttgatgtacctaatcaaatatatgaagaagatgacttgttagaagttttttgtttaaaatctatagagtttattatttgtggtgtttcaggctttgaaggtttgaaatctacaatgcttgcctcaagatctggaaaaaagattttattagcaaacaaagaaagcattgttactgcaggtagcatttttttagatagttgcaaaaagcataatagtcaaatatttccaatagacagtgagcataatgcagttttgcaatgtcttgatactaagagcagtaactctgaaataagcaaagtgacgcttactgcttctggtggacccttttatggtatgggtatgggtcagctcaaagaaattacaccagaacaagcagccaatcatcctaattggaaaatgggaacaaaaatttctattgactcagcaactctgatgaataaatgtcttgaagtaatcgaagctgcaatcctttttaatattgagagcgataaaattaatgctgtcatccatcctcaaagtattttgcatgctatggttacctatgttgatgggtcctcaattgcgcatctaagcaatccatccatggaggtgccgatcgcaaacatgctcagaggtgataagaggataagtataaattttgaggagctattaacttctgagagagcattagaattctttcctatacctcatgaaaaagaatccttatttgaaattgcaagagatgtaatcgagcatcaaggaaatagaggcgcaatttttaatgcaataaatgaggtagcagttcagcaatttcgtgattctaaaataagtttccttgaaattgataaggttattaagggaacttatagtgttatgtcaatgtcaaagctggactcgattgaggaagtttatttttatgaccaagaagcacgcataaagtcattggaaatgataaaatctatatcccattaa

SEQ ID NO: 206892 - DNA, 1027 bp, Unknown
  Bacterial polypeptide expressing nucleotide sequence isolated from the Sargasso Sea
taaagctttagagattattaatgagtttaatccagaatatgtatttttatcttatgttattgcagcagataaattaaaaaaatcattgccttctcaaactaaaatctttgctgatattagtgatgttacaagttatttaaatacaaatcatagcgatatatatctttcagctatatcgtcttttgactgccttgaattgactgttcttgcagctgaatcaggcaataaacttctattagcaaacaaggaaagcctagttgtgcatggggaagctttaataaatatctctactaaggcgggaactcagatagtgccaattgattcagaacattattcattgatgaattcattaaataatgttgaaaaaagtagtatagatagagtttttattactgcatcaggcggaccttttgttgggcaatcacgtcaagaaatagaggataaaaagcctgaagaagctttaaatcacccaaattggaatatgggtgacaaaataactattgattcagcaacacttgttaataagtgttttgagttaattgaagcaaaatatttatttgatcttgatgtagataaattagaagtattaattcagcctcaaagcattattcattcaatggtggagttaaaagatggctcagttgaagctcaaatgtctctaccaagcatgataattcctctatctttcggtttattaggtgaatattctgataaaacaaaaaaagatttctctttagacatgttcaaagaagatgtaaagctaacaatttcaaattttccgaaggacagggaagaattattaggtatatcaaaagatgttatgaaaaatggaggcaatagagggcttatatttgcagctgtaaatgattttgcagttaaaaaatacttagaaggagaaatcaattttggagaaatatataatttaatttttcaacattactctgagattgaaaagaaagaaattttaagtttagaggacttgagaaataaccagcgtgaaatattggactatttaggaaacatttaa

SEQ ID NO: 206893 - DNA, 802 bp, Unknown
  Bacterial polypeptide expressing nucleotide sequence isolated from the Sargasso Sea
attagcaaataaagaaagtgttgtagctggcggagacataattttacccattgctaaaaaaaataacactgaaattattccaatagatagtgaacataatgcaattttccaatgcttgtcaggtgagaatgatacaaaagatgtaaaaaaaattatcattactgcttcaggcggccctttcttaaataaaaccatttctgagttaaagaatgttactgtggatgaagccttaaatcatccaaattggaatatgggatcaaaaatttcaattgattctgcaacattggttaacaaatgtttagaattaatcgaagcaaaatacttgtttgatttagacgagaaattttttgatcttgtagtacatcctcaaagtattattcactcaatagtaacttttttagatgggtctagcatttgtcaactttcgatgccagatatgaaagtcccaattgcacatgcattatctgaagacagaagacttgctattgattttaatccaatagaattttcttctttaaatcttagctttcaggagttcccagaggatagatcaaatattgaaaatattgccagagaggtttgtaataaaggaggatttctcggaacagtttttaatgcagccaatgaggttgcagttgcagaatttttgaatggaagaataaattttgacaaaatttatgaggtcatttatcgaacttttgacaaaaatataatgtctaatgatatgtcaattgattctatatactctgttgacaaagagacacgcattgaagcgaagaagatggtaaaatcgattgcttaa

SEQ ID NO: 206894 - DNA, 723 bp, Unknown
  Bacterial polypeptide expressing nucleotide sequence isolated from the Sargasso Sea
ataagtctgaaaagataattttatctaaagtagatgaaatctattcaacaaagtacaaaacgtctaaaaactttttacaaatgatgaatatgagtttaaatgaattaaataagtcgaatgaccctttgattatttttgctaaagaaacttttgaagaatcattaaaatacgaaaaagaatttgaagaaataggtgccaaaaggcagttactcaaatctaagtttattaaacttttaaaacaatactatgaatcattggataaacaaatgtatgcagatgccaatggaactttgagagtaacttatgggaatgtagctggcgtgtctttgaaagatggcatgatttatgagccttttacaagacttgaaggcattattcagaaacatactggagttgaaccatttaatgctagcaataaattgttagatcttattaaagataaagattatggtaaatatgcttatgaaccaataaactctgtaccagtgaattttctagcaacactagatataaccaatggcaactcaggatcggcaactattaattctaaatttgagttagttggtctggcttttgacggaatgctagagacaattattgcagactacaaacatattcctgatgcaagaactatctcagtagattcccgatattttctttggactttagaaaaattagaaaaggcagacaatattcttgaagaattaagtatagttagataat

SEQ ID NO: 206895 - DNA, 772 bp, Unknown
  Bacterial polypeptide expressing nucleotide sequence isolated from the Sargasso Sea
tacacagataaagaagctttagattttcacaaggataaaaaacctggcaagatcgaaataatttcttcaaagaacatgactactaaaagagaccttgctcttgcttattctccaggagttgctgccccagtaaaaaaaataagtgaggatccagaagcagcttatgattatacgagtaaaggaaatttagtagcagtaattagtaatggttctgcaattttaggattgggcaacttaggagcattagcctctaaaccagttatggaaggaaaggcagtactatttaaaaggtttgcagatatagattcgattgatttggaaatagactgtaaagacgctgatgaaattatcaattcaattaaaaactttgctccgagttttggaggaataaatttagaggatatagctgcaccagattgttttatcatagagcaaaaacttaaagaaatattagatattccagtttttcatgatgatcaacatggaacagcaattatcacaacagcagctttactgaatgcactcgacataagtggaaaatcaatcaaagatataaaagttgtggttaatggtgcgggtgcttctgctcaggcttgtacagagttatttattaactcgggtgttaaatctgaaaatgtaataatgctagatcgaaaaggtgtgatttataaaggaagagcggaaggtatagatcaatggaaatcaagatttgcaattaatacagatttaagaactgtaagtgatgcaattaaaggggctgatgtttttttag

SEQ ID NO: 206896 - DNA, 652 bp, Unknown
  Bacterial polypeptide expressing nucleotide sequence isolated from the Sargasso Sea
aatgctcgagatgagcttagatgatttaaataattctcaagatcccttaattgtttttgcaaaagatactttcgatgagtctttagcttatgagaaagaatctgaagaaataggagcaaaaaggcaattacttaaatcaaaatttataggtcttttaaaaaaatattatgaatcatctggcaagcaaatgtatgcagatgccaatggaactcttagagtcacttatggaaatgttgctggtgtgtctttaaaagatggtttaatttatgagccttttacaagactagagggtattgctcaaaaacatacaggcataaaaccatttaatgctagcgaaaaacttctaaatctaatcgaggcaaaagattatggtaaatatttttataagccaattaattcagtaccagttaactttctttcaacgttagatataactaatggcaactcagggtctgcaactattaattcaaaattcgagcttgttggattagcttttgatggcatgcttgaaacaattatcgcagattataaatatatacctgatgcaagaactatttctgtagattccagatatcttctttggacattagaaaagttagatgaggcagaaaatattcttgaagaattaacgataagtaattcaatatattag

SEQ ID NO: 206897 - DNA, 154 bp, Unknown
  Bacterial polypeptide expressing nucleotide sequence isolated from the Sargasso Sea
atgctagtcgattttaaaaggcccacttctcaaattaaatatttatcgtcatttacctcagatgagtggatcaaactcgcattatctaatccagtagatattcttattgaccatgcacattgtgaaaggaaagcagcaggagtagctattcaat

SEQ ID NO: 206898 - DNA, 598 bp, Unknown
  Bacterial polypeptide expressing nucleotide sequence isolated from the Sargasso Sea
atgagtcaaaacaaatctaatattgctttattgctaggagatcctgcggggataggtccagagttaatttcaaaactgttgaatgatgatattactaaaaaagcaaacatagtcatcattggtgaaaaacaagtatttgaaaacggaaataatattactggtatttttcataaattagatgttgttgaaaattttgatgaaatagattttaataaatctaatcgatttttattagatatttcaaaaggaaaaaatcataaatataaattagctttaccttccaaagaatctggtgaaagtgtattagaagctttatatttagctttaacactcgctaaagaaaaaaaaatagatgcgattaattttgcaccaatgaataaaacaagtttaaaacttggaggaaacaagcattcagatgagttgcaattaatggctgaaaagcttggagtagaaagcttttgttgtgaatttaatgtcatagatgatttttggacggcaagagtaacttcccatattccaataaaagaagttgctcaacatattacaaaagaaaatatcatgaagccgataaaacttataaatgaagttatggagttga

SEQ ID NO: 206899 - DNA, 831 bp, Unknown
  Bacterial polypeptide expressing nucleotide sequence isolated from the Sargasso Sea
tttgacagtttaccttagtactgttggtatagagacagataaatttaataatcaaattaaaaaaagaatttcactaataaataaaaatatagatatagatttaaaaaaaattaaattaattctagatccttttgaactaaaaatttacgcaaaaacagttgggaccacagtatattttataaaaagacccttagcattagaaagcattaaaactcaagtttcgctcagttctttgattaaaaatgaaatttcatcttcaaatatagaggtaacaacaaagtctatattgttaaaagatttaattaaatttattagggccacaaataataaaccagaattatttatattagaaaaaattgtaaaaaaaggtcatgtaattatagatctgagttttaatattgatgaaaatggtaaacttaaaaatgattatatcattgaaggcttgataaaagatgcaagttttaattttttaaacaggggtaattttaaaaatataaattttaatttcaattttcaaaaagataattatcggtttgataaaataaattttaaagcagaagaagtaaattttatttcaaaaaaaattaacgttaaaaagagaaaaaatagctttttaattgacgctattattgaaaacgatcaatcaagtttaaattcaaatatattaaaattattaaatttaagctttaaaaatataatagttgatgatgctaaatttaaaacaaataatgaattttctattgaaataaatgaaaaattcaaagttaaaaatattattttaaattctgatataaatattactcagttaaaatataaaaatttaaaaataat

SEQ ID NO: 206900 - DNA, 568 bp, Unknown
  Bacterial polypeptide expressing nucleotide sequence isolated from the Sargasso Sea
aatgaaaaataatattttaaaatactttattccacttctgtcagtgttagttgttttgacagtttacctcagcacagtaggtttagagacagacaaatttaacgaccaaattaaaaaaaaaatttcactaataaataaaaagatagatatagatttaaaaaaaattaaattaattctagatccttttaaattaaaaatttatgcaaaaacggttggtaccacggtatattttttaaaaagacctttatcattagagagcattaaaactgaagtttcgattagttctttaattaaaaataagatttcatcatcaaatatagaagtaaaaactaagtctatattattaaaagatttaattaaatttattcgtacaacaaccaacaaacctgagttatttatattagagaaaattttaaaaaaaggtcatgtaattatagatctgaaattaaatattgatgaaaatggtaaaatcaaaaatgattatgaaattgaaggtttgataaaagatgcaagtattaattttttaaataaggttaattttaagaatataaattttaatttcaatttt

SEQ ID NO: 206901 - DNA, 1065 bp, Unknown
  Bacterial polypeptide expressing nucleotide sequence isolated from the Sargasso Sea
ctacctgaagaaataggtggaggagggatgccaataactctttctggtggtacgttagagattttaagtactgctaatttagcatttggattggctcctggattaagtgccggtgcaatatcagcgatcaattttcatggaaatcaagaacaaaaagataaatttcttccaaagcttgtctcaggacaatggacaggaacgatgaacttaagtgaacctcaatcaggttctgatttgggaactataacaacaaaagcagaaaaacaagatgatggtacatataaggtcactggtacaaaagtttggattacttttggtgaacataatatgactgaaaatataatccacctagttcttgcaaaagtacctggttctccagaaggaactaaaggcatttctatgtttattgttccaaaagttatggttaacgacgatggctcgttgggtgacaataataatgtgtcctgtatatccatagaagaaaaacttggtatacatgctagtcctacatgtgtaatggaatacgatggttcggtaggctatttagttggtgaagaaaatagagggctaaactacatgtttaccatgatgaatgaggcgagagtttgggtaggtggtcaaggtttagcttgtgcatctggtgcactacaaggtgcatctcagtatgctcgagaccgagttcagggaagaccagtcggaatgtctaaagaggatgctaaaaaatcaacaattattgatcatgcggatgtaagaagaatgcttataacaattaaatcttatgtagatgctatgagataccttatgtatgataaccaattaatgcttgacttagagtactttgcagaaggagaactaaaagagtttggtgaagagagatgcggtattcttacgcctataactaaagcctggatatcagatttaggtgttgaattgtcttctattgccattcaagtttatggaggaatgggctatgtagaagagactggtgtggctcaatacttaagagattctcgtattgctccgatttatgaaggaaccaatggtattcaagcattagaccttatg

SEQ ID NO: 206902 - DNA, 1337 bp, Unknown
  Bacterial polypeptide expressing nucleotide sequence isolated from the Sargasso Sea
tttagacgttaatttaaaaaaaattaaattaacacttgatcctttaaattttaagtttaatgcaaaaacaataggcgcaaaagtaatatataaaaaaagaaatatagaacttgagtctattaaaacacaaatctcaataaactcattaataaaaaataaaattgtttcttctaatttaattatttcaactaaatcaatattattgaaggatcttgttggatttttaagggcgacaacaaataaaacagaattgttttttttagaaaaagcgattgataaaggatttgctattatagatttagaggtaaattttgatgaaaatggaaaaataaaaaaagattataaagttaaaggattgttaaaagatggaaaaataaatttgttaaatgattttaatattaagaatataaattttttacttaatattgaaaatgataattttgatttgagcgatataagttttacaacaaataagattgatttattttctaataatctaaaaataaaaagaaaacaggataaattttttataagcggtgatattgaaaataataattctaagctgaataataaatttcttaatctactgagattaagtaatcatgatatcaattttaacaatgtagagatttcctcaaaaaataaattttcttttattgttaataatagatttaattatgaaaatttatttgtaaattcagaaatatcacttgataaagcagagtatgaaaaaccaaaactgctaagcaaatatttaactgaagtaaaaaatgtaattaatttaagaaaacataagataaaagctacattcaaagacaataatttatcacttattggatcaggaaaaattcaactagaaaaagagtatgatgacattgattattctatttctcaatcaggagacaaagtaaatatagactcaaatattaaattaagtggattaaatattaaaagtcaaaaaaatttaaaaacatttttcccaaaaattaatgaagttttaaatttaaaagatcatcaaattaatattaaattcaaagacaataatttatcacttattggatcaggaaaaattcaactagaaaaagagtatgatgacattgattattctatttctcaatcaggagacaaagtaaatatagactcaaatattaaattaagtggattaaatattaaaagtcaaaaaaatttaaaaacatttttcccaaaaattaatgaagttttaaatttaaaagatcatcaaattaatattaaattcaaagacaataatttatcacttattggatcaggaaaaattcaactagaaaaagagtatgatgacattgattattctattctca

SEQ ID NO: 206903 - DNA, 466 bp, Unknown
  Bacterial polypeptide expressing nucleotide sequence isolated from the Sargasso Sea
aatgtatgcagatgccaatgggactcttagagttacttatggaaatgttgccggcgtatctttaaaagatggtttaatttatgagccttttacaagactagagggtattgctcaaaaacatacaggcataaaaccatttaatgctagcggaaaacttctaaatctaatcgaaacaaaagattatggtaaatatttttataagccaattaattcagtaccagttaactttctttcaacgttagatataactaatggcaattcagggtctgcaactattaattcaaaatttgagcttgttggattagcttttgatggcatgcttgaaacaattatcgcagattataaatatatacctgatgcaagaactatttctgtagactctagatatcttctttggacattagaaaagttagatgaggcagaaaatattcttgaagaattaacgataactaattcaatatattag

SEQ ID NO: 206904 - DNA, 1028 bp, Unknown
  Bacterial polypeptide expressing nucleotide sequence isolated from the Sargasso Sea
gctgatcggtgaggcgacgacagccggggctcgtcaggtacgcgcatgtgccgtgctcggactaagcgctcgcaccgtgcagcggtggcaaggtggtggtcctgaagcggtggatgggcgcaccttatgccaccatgatgctgtccacaagctgtcgagagaggagcgcgctgaactgctggcggtggccaactctgtcgaattcggtcatttgccaccgagccagatcgtccctcgcctggccgaccagggccgctacatcgcctcagaatcgacgttctaccgggtgctgcgtgaagagaatcagcttgctcaccggcgcagtgaacgaccggcccgcgcccgcagcaagccacgcgcggtatgtgccgacgcgcctaatcagctgtttagctgggacatcacctacttgccgacgacggttcgtgggcagtatttctatctctatctgttcatggacgtgttcagcaggatggtcgtcggctggcaggtctacgccgaagagagcagcgcccaggccagcgagcttctgaaggatctatgtgcgcgtgaagcgatcaaaccgggccaggtgattttgcattcggataacggcggcccaatgaagggcgccacaatgctcgccaccctgcaggctctcggtgtcatgccgtcattgagtcgaccgggcgtgagcaacgacaacccgttctcggaatcgctgttcaaaacactgaagtatcggccggcctatcctctgcaggcgtttgacaccctgtttgccgcgcgcgcctgggtcaccgggttggtgcgctggtacaaccacgaacatcgtcatagcgcgatccgtttcgtcacgcctgcccagcgccacgccaacctcgaccagaagattctggatcaccgcgcgacgctctatgaggcggcaaggcagcgcaacccgctccgatggaaaggccccacgcgaaactggaagcgcgtacacaccgtccatctgaatcccgaccagaccgacaactctgaactcatccaacgcccccaccaacagg

SEQ ID NO: 206905 - DNA, 566 bp, Unknown
  Bacterial polypeptide expressing nucleotide sequence isolated from the Sargasso Sea
ggcattacaaaaaattacaggaattccccattcccatgtagttggaatggcaggagttttagacacatctagatttaaatttcatttggcagaagcacttggttattcagtacaggatgtttcctcttcagttttaggcgggcatggagatgacatggttgcacttctaagacacacaactatctcaggaattccacttgaagatatgataagaatgaaaaaaattactagaaaaaaagtaaatgaaattgtcaacagaattagaacatgtggaggagaaataatcacatatatgggaacatctgcatattattctccagcggcgtcagcaattgaaatggttgaatgttatttgagagatcaaaaaaaaattcttccttgttctgcatatttgagaggtcaatatggagtgaaaggtatttatgttggtgtccctgtagttttgggagcaaatggagctgaaaaaattgttgaaataaatttaaaaaaagatgaaaagaaagaatttattaaatcagtaaatagcgtttctgatgttttaaaagtcgcaaaaaaacttatttaga

SEQ ID NO: 206906 - DNA, 946 bp, Unknown
  Bacterial polypeptide expressing nucleotide sequence isolated from the Sargasso Sea
atgaataccaaagcacgcaaggtaatgattatcggtgccggcaatgtcggcacgtcggcggcctacgcattgttaaaccagacgatctgcgaggagttgatccttgtggacctcgatacggccagagcacaggcgcatgctcaggatctgagcgatgcagccgcctatatgccgggaatgatgaccatttcaacgcgggacatcagcgagtgtgccgatgtcgatatcgcggtgattaccgtttccggcggagcgctgaaacaaggccagagtcgccttgacgagctgaacgccacggccaaaatcgtgaacagtatcgttccaccgatgatgggcaacggcttcaacggtatctttctggtggccaccaacccctgcgatattattacctggcaggtctggaagctgtccggactcccgcgcagccaggtgataggcaccggcgtctggctggataccacccgcttgcgacgggtgctcgcccaggcactcgatattggcgcccagagcattgacgcttttattctcggcgaacatggcgatacccagtttccggtctggtcgcactcgtcggtttacggttccccgattgccgatgtttacctgaaacataccggtcagcaactggatcgccagcacatcgcggaagaagttcgcacccttggctttgaaatttacgccgggaaaggatgcacggagtacggcgtcgccggcaccatcgccgagatctgtcgcaatatattcaccggcagccatcgtgcgctggctatctcgtgcattcttgacggcgaatacggtatggatgatgtcgcggtcggcgtaccggcggtcctggcgcagagcggcgttcagcagattattgaactgcaattagccgaggatgaggcggcgcaattccgccactctgttgaggtgattaaagccaatatcgcccgtctcgcgtaaa

SEQ ID NO: 206907 - DNA, 226 bp, Unknown
  Bacterial polypeptide expressing nucleotide sequence isolated from the Sargasso Sea
catgaaattcattccccccttcggcctcggcaccttccgcctcaaggatcagatcgccatcgactcggtgcgcacgggtttggaactgggttaccggcacatcgacacggcacagatctacggcaacgaggccgcagtcggccaggccatcgctgccagcaacgtggcgcgcgacgagttgttcgtcaccaccaagatctggaccgagaacctcggcaacggccga

SEQ ID NO: 206908 - DNA, 754 bp, Unknown
  Bacterial polypeptide expressing nucleotide sequence isolated from the Sargasso Sea
ggttatcgcttctgttaaaacggcgcttgagctgggctaccgttttgtcgacactgcgcaaatctatgataatgaagcggctgttggtcaggcgattgccgaaagcggcgtaccgcgtaacgaactgtacatcaccaccaagatctggattgaaaatctcagcaaagaaaaactgctcccaagtctgaaagaaagcctgaagaaactgcgtacagattatgttgatttggcgctgatccactggccatctccaggagatgctgtatctgttgaggaattcatgctggcgctgctcgaagcaaaacagcagggactgactcgtgaaattggtatctcaaacttcactattgcgctgatggaaaaagccattgccgcagtaggcgcagacaatattgcgaccaaccagattgagctttctccgtatcttcagagccgtaaggtggttgactgggcgaaagcacacggtatccacatcacctcttacatgacgctggcttacggtaacgcgctgaaagatgaagtgattgcgcacattgccgctaaatataacgcgaccccggcgcaggttattctggcatgggcaatgggggaaggttactccgtaattccttcttctaccaaacgtgaaaacctggcaagcaacctgctggcgctggaactgcatctggatggcgaagataaaaaaatgatcgcggcactggactgcaacgatcgtctggtcagcccggaaggtctggctcctgcctgggattaa

SEQ ID NO: 206909 - DNA, 616 bp, Unknown
  Bacterial polypeptide expressing nucleotide sequence isolated from the Sargasso Sea
atgacaatccctgcatttggtcttgggaccttccgtctgaaagatgacgtggttattgcatctgtaaaaacggcgcttgagctgggctatcgcaccattgataccgcgcaaatctatgataatgaagctgctgtgggtcaggctattgctgaaagcggcgttgcgcgcgatgaactgttcatcaccaccaagatctggattgaaaatctcagcaaagacaagctgatcgccagcctgaaagagagcctgctgaagctgcgaactgactatgtcgacctgacgttaatccactggccgtcgccaaacgatgccgttgccgtcgaagagtttatggccgcgctgctggaagcgaaaaagcaggggttgacccgtcagattggtatttctaacttcaccattccgctgatggagcgggcaattgccgccgttggcgcagagaatatcgcgaccaaccaggttgaactctctccgtacctgcagaatcgtaaagtggttgattgggcgcgtgaacacggtattcatatcacctcttacatgacgctggcctacggtaaggcgctgaaagatgaagtgattgcacgtattgcgacgaaacataatgccacgccggcacagg

SEQ ID NO: 206910 - DNA, 565 bp, Unknown
  Bacterial polypeptide expressing nucleotide sequence isolated from the Sargasso Sea
ttgctcgaaagcatgggagaaactccagcttgattacctcgatctgtacctgatgcactggccagttccggcgatcgaccactacgttgaagcgtgggaaaacatgatcgacctgcaaaaagaagggctgattaagagcatcggcgtgtgcaactttcagatcaaccatctccagcggctgatggatgaaaccggcgtacctccggtgattaatcaaatagaacttcacccgctcatgcagcagcgccaactgcacgcctggaacgccacacataaaatccagaccgaatcctggagcccgctggcgcagggcggcaaagacgtcttcgatcaaaagataatccgtgacctcgcagagaaatatggcaaatcaccggcgcagattgtcatccgctggcatctggatagcggcctggtggtgattccgaaatcggtcacccctgcgcgtatcgcagaaaactttaacgtctgggacttccgcctggataaagatgaattaggcgaaatcgcgaaactcgatcagggcaagcgtctggggccagacccggaccagttcggcggttaa

SEQ ID NO: 206911 - DNA, 200 bp, Unknown
  Bacterial polypeptide expressing nucleotide sequence isolated from the Sargasso Sea
aatggacgtaactgctaaatatgaactaattggattgatggcctaccctatcagacacagtctgtcgcctgaaatgcaaaataaggcattagaaaaagcgggattgccattcacttatatggcatttgaagtcgataactcaacgtttgctaatgcaattgccgggctgaaggccttaaagatgcgtggtaccggggtct

SEQ ID NO: 206912 - DNA, 888 bp, Unknown
  Bacterial polypeptide expressing nucleotide sequence isolated from the Sargasso Sea
aggacttcttggtcttggaactgttggcggtggaactgttagtgtattaatgcgcaatgcagatgaaattgcaagacgcgcgggtcgtgatattcaaataactttggcagcagctaaagaatatgacgctgacaagattgtcggcttggaccagataggaaaaattacagatgatcctttttcagttgttgataacccagatgtcgaaattattatcgaattgattggcggctattctccagcaaaagaattggttttaaaagcaatcgaaaatggtaaacatgtaattactgcaaataaagcactaatcgctttacatggtaatgagatttttaaagctgctcagaaaaaaggcgtgaccgttgcctttgaagctgctgttgcaggaggcatccctattattaaagcggttcgtgagggtctagcagcaaatcagattgagtggattgccggaattattaatggtaccggtaactttattttgactgaaatgcgggataaaggccgtaattttgaggatgctcttaaagatgcccaatcacttggctacgcagaagccgatccaacatttgatgttgaaggcacagacgccgcacataaattaaccatacttggttcaattgcatttggaatgcctctgcagtttgataaaacatatgtggaaggtattgcaaaaattaagcagcaagatgttttatatgcagaagaattaggctatcgcattaaacatattggtatttcacgcaaagttgataatggaatcgagcaacgtgttcacccgacactaattccagaacgtcgtttgattgctaacgtcgatggtgttatgaatgctgttttagtcaaaagcgatgctgttggggcgactctttattatggcgctggcgc

SEQ ID NO: 206913 - DNA, 508 bp, Unknown
  Bacterial polypeptide expressing nucleotide sequence isolated from the Sargasso Sea
tatgattgggattggcattattggttttgggaatgtaggacaaggtatttataatatttttcgtgaaaaaggttcttttatctcagaacgcctaggcacccatatagaaatccgaaagatcctagtaagatctccagagaaatatcaagatttagtagatgattcgtccttattaacaacagatattaatgatattttaacggattcgaatatccaaattgttattgaagttattggaggagaataccctgcatttgactttatatctaatgctttaaattctaaaaagcatgttgtaactgctaataaagaagtggtttcaaaacataaacaacatttttttaaaacagcaaaagaaaatggcgttgatttttattttgaggcttctgttgggggaggaatccctattattagatctttaaaagttggctttgctgccaataaaattaatgcgttttatggcattgttaatggaacgactaactatattcttacaaaaattaaagaa

SEQ ID NO: 206914 - DNA, 508 bp, Unknown
  Bacterial polypeptide expressing nucleotide sequence isolated from the Sargasso Sea
gatggcagcaaaggtcggcgtgggtctgctgggactgggcacggttggcggtggagtggcttcgatcctccagaaccccagcgaacgtcacccgcttgtgggtgaactggagctgatccgtgttgccgtccgcgatctgaaccgcccccggcccgtggtcctggacgaaagcctgctgaccaccgacccatcggcggtgattcaggacccaaccgtggacgtggtggtggaagtgatcggcggtctagagccggcccgcagcctgattcttcaggcgattgcagccggcaaatccgtggtgaccgccaacaaggccgtgatcgcgcgccacggtcaggaaatcgctgaagccgccgccgccgccggggtgtacgtactgatcgaggccgccgttggtggaggcattcccatcattgagccgctgaagcagtccctggggggcaaccgcatcaaccgcgtcagcggcatcattaacggcaccaccaactacatactcacccgcatggct

SEQ ID NO: 206915 - DNA, 901 bp, Unknown
  Bacterial polypeptide expressing nucleotide sequence isolated from the Sargasso Sea
ttggcttgggccggtgggcggtggagtggcgtcgatcctgctgtcccccgatgagcgacatcctttggtcgcagatctggacctggttcgggtggcggtgagggatctcgaccgtccaagaccggtcgacctatcagcggatcagctcaccacggatcctgaggccgtcgtgaacgatcccagcgtggatgtggtcgtggaggtgatcggagggatcgagccggcgcgcagcctgatcctgaaggccatcggcaatggcaaatccgttgtcacggccaacaaagccgtgatcgcacgtcatggccgcgaaattgccgatgctgcagcagctgccggcgtgtacgtgctgatcgaagccgccgtcggtggtggcatcccgatcatcgaaccgctgaaacagtccctgggagggaaccggatcaacagagtcagcggcatcatcaacggcaccaccaactacatcctcacgcgcatggccaccgagggggtggcctatgacgacgtgcttgccgaggctcagcgtctcgggtatgccgaagccgatccggccgctgatgtcgacggtctcgatgccgccgacaagatcgcaatcctcgccgccctggcattcggaggcgccatcgatcgcagtggggttcccaccgaaggcatcagtagcttgcagggtcgcgacgtggagtacgcctcacagcttggctatggcgtcaagctgctggcggtggctgagcggatgaccgatcagggtgcgactgacgtgctgccactgtcgcttcgggtccagcccacgctggtaccaacggaccatcccctggctggagtgaatggtgtgaacaacgccatcctggtagagggagatcccattggacgcgtgatgttctacggcccggggtgccggtgccgg

SEQ ID NO: 206916 - DNA, 766 bp, Unknown
  Bacterial polypeptide expressing nucleotide sequence isolated from the Sargasso Sea
atgcaacctgttaaaatagggcttctcggtttaggaactgttggcggtggcacggtcagtgtgctcgcacgtaatgcagatgaaatcgcaagacgagcaggtcgtgatattcaaataacttttgctgcggcaaaagaatatgatgcagatgctattgttggtttaaacaagattaaaaatattacaaacgatccttttttagttgttgataatcccgatgttgaaattattattgaattaataggcggttattcgccagcaaaagaattggttttaaaagcgatcgaaaatggtaaacatgttattacagcaaataaagcgttgattgctttacatggcaatgagatttttgcatctgctcagaaaaaaggggtgactgttgcatttgaagcagctgttgctggaggtattcctattattaaggctgttcgcgagggcttagctgcaaatcaaatcgaatggattgccgggattattaacggtactggtaattttatattgacggagatgcgggacaaaggacgtgattttaaagatgttcttaaagaggctcagtcacttggttatgctgaagcagacccaacctttgatattgagggtattgatgccgcacataaattaaccatacttggctcaattgcatttggaatgcctctacaatttgacaaaacctatactgagggtataacaaaaatcgaaaagcaagatgttctatatgcagaagaattgggatatcgtattaaacacccttggtatttcacgtaaa

SEQ ID NO: 206917 - DNA, 739 bp, Unknown
  Bacterial polypeptide expressing nucleotide sequence isolated from the Sargasso Sea
cttgaaagacgtaaatgtcggaatctgcggattgggaaccgttggcggcggtacattcaatgtcctgaaacgcaatgcagcgattattgccggccgtgcaggctgcaacatccgtgttgtccgggtagccagtcgccgcagccgggatgacctggcgctgggcgatgtgcccttcagtaccgacatttttgatgtggtgaatgatcccgccgttgatattgtggttgagctgattggcggctatgacgccgcaaaggagctggtactggccgctattgccaacggcaagcatgtggtaaccgccaacaaggcgctgattgccgttcatggcaacgagattttcgaagccgccgaaaaggccggtgtggttgttgcctacgaagctggcgtggccggcggtattcctgtcatcaaggccgtgcgcgaaggcctggcggccaaccgcatcgacaccattgccggcattatcaatggcaccggtaactacatcctgaccgaaatgcgcgccggacggccctttgaagaggtgctgaaagaagcgcaggcgctgggttacgcggaagctgatccgacctttgatgtggaaggcatcgacgccgcccacaaactgaccatcctggccgcgtccggttttggtgtgcccctgcaattcgacaaggctttcaccgaaggcatttctgcgctgaccccgaacgatattgcccacgctgaactgctgggttaccgggtaaagcacttg

SEQ ID NO: 206918 - DNA, 1330 bp, Unknown
  Bacterial polypeptide expressing nucleotide sequence isolated from the Sargasso Sea
catggaaccgatcaaagttggcctgttgggcttcggcacggtgggcagcggcaccttcacggtgctgggccgcaaccaggaagaaatcaagcgacgcgcggggcgcggcattgaggtgacgcgcattgcggtgcgcaacccggccaaggcgctggcagcgctcggcggcgacgccggcgccgcgcagatcaccgacgatttcaatgcagtcgtcgatgatccgtcgatcgcgatcatcgccgagatgatcggcggcacgggcatcgcgcgcgagctcgtgctgcgcgcgatcgcgaacggcaagcacgtcgtgacagccaacaaggcgctgctcgcggtgcacggcaccgagatcttcgaggccgcgcgcgcgaagggcgtgatggtcgcgttcgaggcggccgtcgccggcggcatcccgatcatcaaggcgctgcgcgaaggcctgaccgcgaaccgcatccagtacatcgcgggcatcatcaacggcacgaccaactacatcctgtcggaaatgcgcgatcgcgggctcgacttcgcgaccgcgctgaaggccgcgcaggagctcggctacgcggaagccgatccgaccttcgacatcgaaggcgtcgacgccgcgcacaaggcgacgatcatgagcgcgatcgcgttcggcgtgccggtgcagttcgagcgtgcgtacgtcgaaggcatcagcaagctcgacgcgaccgacatccgctacgcggaagaactcggctaccggatcaagctgctcggcatcacgcgccgcgccgaaaacggcatcgagctgcgcgtgcacccgacgctgatcccggaaaagcgcctgctcgcgaacgtcgaaggcgcgatgaacgcggtcgtcgtgcatggcgacgcggtcggcacgacgctgtactacggcaagggcgcgggcgcggagccgaccgcatcggccgtggtcgcggatctcgtcgacgtcacgcgcctgcacacggctgacccggagcatcgcgtgccgcatctcgcgttccagccggacagcctgtcgaacacgccgatcctgccgatcgaggaagtgacgagcggctactacctgcgcctgcgcgttgccgaccagaccggcgtgctcgccgcgatcacgcgcatcctcgccgaatcgggcatctcgatcgacgcgctgctgcagaaggagtcggagcaggtcgacggtgcgaacggcgaaaccgacatcatcctgatcacgcacgaaacggtcgagaagaacgtcaatgcggcgatcgcgcaaatcgagagcctcgcgacggtcgtgtcgaaggtgacgaagctgcgcatggaagcgctgaactga

SEQ ID NO: 206919 - DNA, 1012 bp, Unknown
  Bacterial polypeptide expressing nucleotide sequence isolated from the Sargasso Sea
atgagaataatactatgcggatttggagtagttgcacaaagcttttcagagcttttagaatcacgtacacatgatctgtattctaaatttggattaagaccacgaattgtaggagtatttgacagtaaaggatgcgcatatgatgaaaccggtttagatttaaagaaattaaacaaaatcaaaaaacaatcaggcacagtaagaaattacgataaatcaataaaacaaatttcaggtaaagaaatcattgaaaattttgatgcagatgtattaattgaaactactgcaagtaactataaagatgcagaaccaggaatgagccacattatttctgcaatgaaaaagaagatgcatgtcatatcagtcaacaaaggaccgcttgcacttgcatttccatcattaatggaattagcaaattataatcaagttatgttaagatttagtggtactgttggtggaggaacaccaattttggattatgcaaaaaatagtttacgaggagaaaaaatattatcatttcaaggaattcttaatggtacaactaactacatactaacaaacatggcagaaggaatgtcatttgaagacgcattaaacgatgcaaaatcaaaaggatatgttgaagcagatgaagcacttgatctagatggattagacgcagctgcaaaacttgtcattttagcaaattggataatgggtatgaaagtaaccatgccagacattataaaaaaaggcatacgtaaagtaaacacaaatgatatcaaaaatgcagagaaaaatggttctgcagtgaaattaattgcatcatgtaacaaagaattgacagtatctcctgtagaaatcaagattaatgacccattatgcgtgaatggaacattaaacgcaatatcatttacatcagaacattcaggtactcaaacaataattggtagaggggcaggaggaacagaaactgctagttctatacttagagacctgatagatattagaaaagagattacaaaatcttgaa

SEQ ID NO: 206920 - DNA, 1244 bp, Unknown
  Bacterial polypeptide expressing nucleotide sequence isolated from the Sargasso Sea
acgtcgcgcgggccgtggcatcgagattacgcgcattgccgtgcgcaatcccgccaaagcgaccgcggcgctgggcagcgaagccggcacggtggcgctgaccgatgacttcaacgcggtggtcgacgacccgtcgatcgatatcgtcgcggaaatgattggcggtacaggcgtggcacgcgacctcgtcctgcgcgcgatcaggaaccgcaagcatgtggtcaccgccaacaaggcgctgctcgcggtgcacggcacggagattttcgaggcggcgcgcgccaatggcgtgatggtgtcgttcgaggcggcggtggcgggcggcattccgatcatcaaggcgctgcgcgaagggctcacagccaatcgcatccagtacattgccggcatcatcaacggtacgacgaactacatcctttcggagatgcgcgaccgcgggctcgacttcgcgaccgcgttgaaagccgcgcaggaactgggttacgccgaagccgatccgaccttcgacatcgaaggcgtggacgccgctcacaaggcgacgatcatgagcgcgatcgcgttcggcgtgccggtgcaattcgacaaggcatacgtcgaaggcatcagcaagctggccgccatcgacatcaaatacgctgaagaacttggctaccgcatcaagctgctcggcatctcgcgccgcacggataagggcatcgaattgcgcgtgcatcccacgctgattccggaaaaacgcctgctggcgaatgtggaaggcgcgatgaacgcggtcgtcgtgcacggcgacgcggtgggctccacgctgtactacggcaagggcgcgggcgctgagccgacggcctccgccgtggtggccgatctggtcgacgtgacgcgtctgcacacggcggacccggagcatcgcgtgccgcatctggcgttccagccggacagcctgtcgagcacgccgatcctgccgatcgacgacgtgacgagcggctactacctgcgtctgcgtgtagcggacgtgactggtgtgctggccgacatcacgcgcattctggcggatcggggcatttcgatcgacgcattgctgcagaaggaatcggagcaggtcgacgcgaacggcaagggcgaaaccgacattatcctgattacgcacgaaacggttgaaaagaacgtcaatgcggcgatcaggacgatcgaagcgctgaagaccgttgtctcgcaagtcacgaagctgcgcatggaagcgctgaactagg

SEQ ID NO: 206921 - DNA, 1120 bp, Unknown
  Bacterial polypeptide expressing nucleotide sequence isolated from the Sargasso Sea
atgaacaatagagcaattaaaattggcatagcaggcttaggtactgttggtagtggtgttattaatcttttaaaaaaaaatagtgaagagatttcaaaaagaagtggatttgaaattaaattagaatgtgtttctgcaagcgataaaactaaaaaaagaatttgcgatataagtgggttaagattttattcagacccaatagaaatgttagataaagaaactattgatatttttattgaactcgtcggcggagaaacaatttcaaaagatttggtcacaaaagcattaaaaaataatatacatgtagtgactgctaataaagctttaattgctcttcatggtaatgaaatctctaaaatatctaataataataattctgatatttactatgaagcttcagttgctggtgctgttccaattataagagttattagagaatcccttaatgcaaacgatattaattggatcgctggtattattaatggaacaacaaattatattctaacagagatgttaaaatcgaaaaaagattttgatgtagttttgaaggaagctcaagatcttggttatgcagaggcagatccatcatttgacgttggtggtattgatgctgcacataaattaacaatcttatcttccttatgttttggcataccattggattttagttcaattcatgttgaagggattgaagctattgagctagatgatttaaactatgctcgagaacttgggtactcaataaaacatttagctataggtaggaaaaatgaaaatggaattgagttaagagttcactcatgtttaatacctgaaaaaagattactagcaaatgttgatggtgttaaaaatgctgttgttatatcttctgatgccgctggccctacattgtattatggagccggtgccgggagtttggctacagcctcatcagttgtgtctgacataattgatataggacgaaaaatagtatccaagtcaagtaacaccattccatttttaagctatcaaagcaatgaattgagaaataaaagaattttagatattaatgaaatagtttctagatattatttaaggataagagttacaaataaacctggtgttcttgcagatattacaa

SEQ ID NO: 206922 - DNA, 1309 bp, Unknown
  Bacterial polypeptide expressing nucleotide sequence isolated from the Sargasso Sea
aatgggcgcacggatcggcgtaggtcttttggggctgggcaccgttggcggcggggtggcggagattctgttgaatccagaggagcgtcatcctctggttgccgatctggacctgattcgggtggccgtccgggacgtcaaccgccctcgcacggttgtgttggccgatgccgtgcggaccaccgatcccagcgaggtggtcatcgacccgaatgtggatgtggtggtggaggtgatcggtggcattgaaccggcccgcagcttgatccttcaggccatcgccaatggcaaatctgtggtgaccgccaacaaagcggtgatcgcgcgccatggccccgaaattgccagcgctgccaaagcagcaggggtctacgtgctgattgaagcggcagtcggcggtggcatcccgatcatcgaaccgctgaagcaatccctcggtggcaacaggatcaatcgggtgagcggcatcatcaacggcaccaccaactacatcctcacgcggatggcggatgaaggggcggcctacgccgatgtgctggctgaagcccagcgactcggctatgcggaagccgaccctgcggccgatgtggatggtctcgatgccgcagacaagatcgccatcctgtccgccctcgcctttggcggaaccgtggaccgcgatgccctccccacgactggcatcagtgcactgcagggccgtgatgtggagtacgcgcgacaactgggctacggcgtgaaattgctggccgttgctgaacgccttgcaggccagggggatcccttaccgctgtccctgcgggtgcagccgaccctggtgcccagcgatcacccactggctggagtcaatggcgtcaacaacgccatccttgtggagggggaccccattggacgggtgatgttttacggccccggagcaggggccggaccaacggcatcggctgttgtggccgacatcctcaacatcgccggcatccgccaggccagtggcgatcaggggccagtggacccgctgttggcggcaggcagctggagaccgtgcgttctggcggacagcggagacatccggcagcgccactatgtgcggttcaacacggaagatgctcccggcgtgatcggcaaggtgggtggccgtttcggcgatgcgggagtttccatccagtcgattgttcaattcaatgccagtgaggccggcgcagaaatcgttgtgatcacccatgaagtcactcagcgccaggtgatcgcagcccttgatgccatcactgctctggatgaagtttctggactggcggctcacctgggctgtctctga

SEQ ID NO: 206923 - DNA, 598 bp, Unknown
  Bacterial polypeptide expressing nucleotide sequence isolated from the Sargasso Sea
atgaatattggaaacccattcgctactgttcctgaggtcgtaaaaaaccttcttatcatcaacatattgatgctgttggccacaattgtggcaggaagttttaacatagatttgagcgagtggttggggctacaccattggtcgagtgatttttttctaccacatcaattggtgacctatatgtttatgcatggaggacttactcacctcttttttaacatgtttgcgctctacattttcggaagagtgttggaacaggtatggggatcgaagaagtttttaattttttaccttatttgtggcattggtgcgggtattgttcaattgttggtaactgaattaagaatcaattcaatcatagatcaggtagatcctattctgtatgagaaagtgttgcaagacggctctgcagtcatccacagtggtaaaaactttgtagacgaggctgcaggtcaacttaatcgactcattaacacctcaacggtaggtgcttctgggtctgtttttggaatattacttgcctttggaatgctctttccaaatgtgcagcttatgctcatttttccaccaattccaatgaaagcaaagtattttgtaa

SEQ ID NO: 206924 - DNA, 769 bp, Unknown
  Bacterial polypeptide expressing nucleotide sequence isolated from the Sargasso Sea
catgcgagccatcattcttgcggcaggcctcggcttgcgcctgcaacaaccgcccgaggcgcagtacccgaagtgcctgctgcgcttcgacgacgtttcgctgctcgagcgccatctgcgcgtactcgatgccgcgggcgtcgacgagatcgtgcttgggctcggcttccagcacgagaaggtcgagcaggaattgaagcgcctcggccgccaggccgagatcgtgatcaacgaccgctacgacctcggcagcgtgctgaccgtgcataccgtcgccgatgcgatgacgcgcggcggcgacgtgctgctgatggacgccgacgtgctgtatgacgagaacatcctgcacgcgctggtggccgattccgaccgcgcggtcgaccgcctgctgatcgatcgagacttcgaagccggcgacgagcccgtcaagctgtgcctgaaggacggcgtgccggtcgagctgcgcaagcagctcgcggtcgacctcgagtacgacacgatcggcgaatcggtcggcttcttccgcttcaccgaaggcaccgcgcgccgcctcgcgacgatcgtcgcgggctacgtcgacagcggccgcgcgaacatgccgcacgaagaagccgtgcgcgacctgctgctcgaaggcggtcactcgttcgacgtcgccgacgtcaccggctcgccgtggatcgagatcgacttcccgaacgacgtcgctcgcgccacgcaagaaatcctccccctgattcaacgcaccaccgcaggagtcgcacgatga

SEQ ID NO: 206925 - DNA, 465 bp, Unknown
  Bacterial polypeptide expressing nucleotide sequence isolated from the Sargasso Sea
atgatctggagagcttcgcccgcacggtcagcgtcaacctggtcggcagcttcaacatgctgcgcctggccgccgagtgcatggcccagggccaggccaatgccgatggcgagcgtggcgtgatcatcaacacggcctcggtcgcggccttcgatgggcagatcggccaggctgcgtatgcggcctcgaagggcggcgtggtcggcatgaccctgccgattgcccgcgaactggctcgccacggcatccgcgtgatgtgcatcgcgcccggcatcttcgagaccccgatgatggccggcatgccccaggaggtccgcgatgccctcggcgctgctgtgccgttcccgccgcgccttggccggccggcagagtatgcggcactggtgcgccatatcgtcgagaacgccatgctcaacggcgaggtgattcgcctcgacggcgccatacgcatggccgcgaagtgag

SEQ ID NO: 206926 - DNA, 474 bp, Unknown
  Bacterial polypeptide expressing nucleotide sequence isolated from the Sargasso Sea
acggtgcacatggcctggacagtttccgccgtaccgtcgagatcaatctgatcggcagcttcaacctgttgcgcctggctgccgaggccatggcgcagaacacgccgaacgccggcggcgagcgtggggtcatcatcaataccgcctcggtggcggcgttcgacgggcagatgggccaagtcgcttacgctgcgtccaagggcggcgtcgcggcactgacgctgccggcggcgcgcgatctggcgcgctcgggtatccgtgtgatgtgcgttgcccccggcgtgttcgagacgccaatgatggccggtatgccgcaggaggtacgtgattcgctggcggccaacgtgccgttcccgccgcggctgggtcggccggacgaatacgccgcgctggtacggcatatcgtcgagaacccgatgctcaacggcgaggtgatccgtctcgatggcgcgttgcgcatggcggcgaagtaac

SEQ ID NO: 206927 - DNA, 680 bp, Unknown
  Bacterial polypeptide expressing nucleotide sequence isolated from the Sargasso Sea
caaggtagccgtgtttgatctaaataaagatatggccgaacaaaccgctgttgaacttgtagaagccaaagcctatcaagtcaatgtgatagatgatgactcagtcaaagtcgcaattgaagctgtcaaaaatgatttcgggtccatacacatcaacgttaattgtgcgggtattggagcttcatcgagaacagtaggcaaagacggtgctcatgatataaacaaattcaatttcattgttcaggttaatctcgtcggtaccttctcagtattaagcaagtgtgctgctatcatgcaattaaatgagcccgagggagaagcccttgaaaagggggtgattataaacaccgcctcggttgctgcgttcgagggccaaattggggatgtcgcttactcagctagcaaggcaggtgtccttggcatgacgcttcccatagctcgagatctttctaggcagggtgtcagagtatgtaccatctcacctggtgtctttgacacaagaatgatggccgcctctcccgatcaggatcgagattcgctgatagatatggtccagcaccctacaaggatgggtttgccacttgaatttgcgttactgagcgaacagatagtggaaaacccgtatttgaatggcgaaaccattcggcttgatggtggtattcgtgtaggcccaaagtaat

SEQ ID NO: 206928 - DNA, 769 bp, Unknown
  Bacterial polypeptide expressing nucleotide sequence isolated from the Sargasso Sea
atggaaataaatggaaaagtatcagctgtagttaccggtggcgcctccggtttgggtgaagcaacttcgcgtatgttgtcatccatgggtgcaaaggtagctatttttgacttagacgctgataaaggtttagcgatttcgaaagaaataaattcagatttttacaaagtcgatgtatcggatattaattctgtaaaacaagcagttttatctttttcgaagcaaaatgaaggaattcagattgttgtaaattgtgctggtataggcccagcagcaaaaactgtttcacgaggtgaagcccatccaaacgaactatttggcaaagtgattaatattaatttaattggttcattcaatgtcgcttctgtatgtgcggctgaaatggtcaaaaatagggagtattcggaggatggttttaggggtgtcatagtaaatacagcatcggttgcggcttttgatgggcagataggtcaagttgcttacgcagcttccaaaggtggtattgtaggaatgacacttcctatggcgagagatctttcggataagggcattcgcgtctgttcgatcgcgccaggattatttttgacaccacttttagaaagtttacctgaagaagttcaagaatctttgggaaaacaggttccatttccttcacgactaggaagaccaacagaattttctaagttagtggttcagattattgaaaatgacatgctgaacggagaggtaatacgtttagatggagccatcagaatggctccacgttagg

SEQ ID NO: 206929 - DNA, 769 bp, Unknown
  Bacterial polypeptide expressing nucleotide sequence isolated from the Sargasso Sea
aatggaaatttcaaataaagttgctctaattaccggtggagcctcaggtttaggccttgctaccgctgaagcattagtaggatcaggctcaaaagtaatgttgctagacctgaatgaagacaacgcgaaagctgctgtagaaaaattgggatctgattcttcgtatgttattgccaatgtaacagatgaatcatctgttcaatctgcaatcgataaaacagttgaagaatttggtagcttacacatagtagtaaactgtgcaggaataggtagcgctagtaaaactgtaggaaggaacggtgcacatccattagattattttaaaacagtagtagatattaatctgaatggcacctttaatgttctgaggttagctgcggtagtcatgggaaataatgagcccaatgaagatggagaatgtggagtgattataaatactgcttctgtagctgcatttgatggtcaaattggacaagctgcatatagtgcaagtaagggtggggttgttggcatgactttacctatagcaagagatttggcaagaatgggaattaggatcaatactattgctccagggatatttgatactcctttaatggctatggcaccagatactgtgagaaaccctttgattgaaatgactcaatttcctaaaagattgggtttacccaatgaatatgcttcattaactaagcacatagttgagaatccctttttaaatggcgaaaccattagattggatggcggcatcaggatgcaaccaaagtaa

SEQ ID NO: 206930 - DNA, 769 bp, Unknown
  Bacterial polypeptide expressing nucleotide sequence isolated from the Sargasso Sea
gatggaaatttcgaataaggtggcgttaataactggaggagcttcagggttaggtctagctaccgctaagacacttgttgaatcaggagcaaatgtaatgcttgtggatttaaacgaagataatgtaaaaaatgcagttgagagcttgggagacaaatctagctatgtagttgcaaacgttacggaagaagagtcagtccaaaacgcagtggatgaaacagttaaaaaatttggcggaatccatatagctgttaattgtgcaggtataggtagcgcaagcaaaactgttggacgtgatggtgctcatcctctagattattttaagacagtagtagatatcaatttaaatggaactttcaatgttcttaggttggcagcggttgagatgggtaagaatgaaccaaattccgatggagagtgtggtgtcattattaatactgcatctgtcgcagcttttgatggacaagtagggcaagcagcttacagtgcaagcaaaggaggcgtagttggaatgactttacctattgctagagatctggcacgaatggggattagaattaatacaatagctccaggaatatttgatacccctctattcagtatggcacctgattctgtcaaaaatccattaatagaaatgacacagtttccaaaaagacttgggattccatcagaatatgcagctttatctaagcacataattgaaaatgcttttcttaatggtgaaacaattagattggatggtgcaataagaatgcagccaaaataa

SEQ ID NO: 206931 - DNA, 397 bp, Unknown
  Bacterial polypeptide expressing nucleotide sequence isolated from the Sargasso Sea
taacgcactaatagcaggtcaaagtgctgcagatatcataaatgatgaaaatttgattgagaatgactatctgcctctagttcagcaaagaggaaaggcagtaattgatgccagaggagcttcttctgctgcctcagctgctaatgctgctatagatactgtaaaatcggtagaatcaaaaactcctgaaggagactggtttagcgcagcagtagctagtgatgggagctacggtattccagaaggaataatatttggatacccattaagatcagacggcaatggaaatgtagagatcgttcagggtgtagagttgaatgaatttgcgaaatcaaaaatagaagttacaactcaagagctcaaagaagaaaaagaagcagttaaagacttactttaa

SEQ ID NO: 206932 - DNA, 333 bp, Unknown
  Bacterial polypeptide expressing nucleotide sequence isolated from the Sargasso Sea
catgagcgcaaagaagatcaccgttgttggagccggacacgtcggtgcgacgtgttcgcagcttctctctcagaaagaacttgccaaggaagtagtcctcgtggacatcgcagacggtataccgcaaggcaagggactcgatcagtgggagagtgccccgattgagggttttgattcccgtgtctttggggccagcgactatcagtcctcggtggactcggaaatttttatcgtcacggctggtatcgcacgtaagccggggatgagtcgtgatgacctactgaagacgaacgctaatgttatcccgttcagtctctcggggaaattgcaagg

SEQ ID NO: 206933 - DNA, 403 bp, Unknown
  Bacterial polypeptide expressing nucleotide sequence isolated from the Sargasso Sea
atgactagacctaaaatatcattaattggcggcggtcaagttggtggaaatatcgcattgctttctgcacagaaagaactcggcgatatcgtcattgttgatatacctgaagcagaaaacttcatgaaaggaaaagctttagatatttcacagcttcttcctcatgatggttacgacgctaaattatcaggtacttcaaagtttgaagatattaaagattccgatgttgtagtaataaccgcaggatttccaagacagcctggaatggatagagaagatttacttcaaaaaaatctggatataatgaccaatgttgctaatcaagtcaaaaattttgctccagatgcttttgtaattgttgtttctaatcctttagacgacaatggtttatgcttttcataaa

SEQ ID NO: 206934 - DNA, 292 bp, Unknown
  Bacterial polypeptide expressing nucleotide sequence isolated from the Sargasso Sea
atttagaaaaggatcagcattttatgcaccagctgcatcaggggttcaaatggcagaagcttatttgaatgatgagaaaaaattattaccttgcgctgtacaattaaatggagaatacggtgtacaaaatgtatacgctggtgttcctgttatcattggaaaagatggtgtagaaaaaattgaggagattgatttagatgaaaaagaaaaaaaagaatttatacattcaatagacgctgtaaaagctctatgggaagctgcatctaaaatagatcctgatttatctaaataa

SEQ ID NO: 206935 - DNA, 688 bp, Unknown
  Bacterial polypeptide expressing nucleotide sequence isolated from the Sargasso Sea
atggagagatctgacttgatactggataatgcgaatatatttaggtcacaggctgagataattaacaatgtttgctctcagaaaacaaagattattgtagtaggtaaccccgcaaatacaaatgccttaatactcaactacaatactcctgatataccgaatggcaatataacttctttgatgaaactcgaccagaatagagcaaaaagtattctagcctctaagctaaacgataaagttgaaaaagtaaataatatgataatctggggcaatcactctacaacacaggtacctgatttatataattgtaaagtcgattctaaagttatctctttagatgattcctggatacatgatacttttatcccaaaagtacaaaaaagaggtggtgaaataatagagtatagaggactatcaagtgctgcttcagctgcatctgcaatatacgaccatgttcatgctctagagaatggttcaaatgatattgaagcaattggaactttatcttcgggtgaatataatattacgccagatttaatgttctcactaccattaactgtttcaccaggtcaatacagcgttaataaagatattaaaattaatcctagtctagtcgatttaataaaagcatcagaagatgaacttattaaagaaagagatattgtcaaacagtatctcccattgtaac

SEQ ID NO: 206936 - DNA, 448 bp, Unknown
  Bacterial polypeptide expressing nucleotide sequence isolated from the Sargasso Sea
tctgggtggccatggagatactatggttcctgttcctaatagaacaactatagcaggtaaacctttattagatttcataaatgaaggtattatctctcaatctagattagatgaaatcataaatcgaactcgaaatggtggagcagaaattgtcaaactgttagagaaaggctcagcattttatggtcctgcagcttcaggaatagaaatggcacaatcttatcttaaagatgaaaagaaaactctaccatgcgctgcttatcttaatggtgaatatggatttaaagatatttatgctggcgttccagttgttataggatctaatggaatagaaaaagtaattgaattagatttagatgatgaagaaaagaagtcatttgaaacttcaattgcagcagtgactgaactatttgatgcggctaaaaacatagatcctctgctaaaatag

SEQ ID NO: 206937 - DNA, 298 bp, Unknown
  Bacterial polypeptide expressing nucleotide sequence isolated from the Sargasso Sea
attcgctggtggagaaatagtgaaattatttgggaatggatctgcgtattatgcaccagctcaatctgctatagaaatggctgaatcctatcttaaagataaaaaacgtgttataccctgtgcgtcactttgtgagggtgaatttggtattaatggatattttattggcgtaccttctgttattggctcagagggagtagaaaaaattctagaatttgatttaaaagacgaagaaaaagctgccttagataatacattagaggcagtaaaaaatacagttaaagaaactgggttataa

SEQ ID NO: 206938 - DNA, 672 bp, Unknown
  Bacterial polypeptide expressing nucleotide sequence isolated from the Sargasso Sea
tatgaagattgtcgtaactggagccgctggacaaattgcttattcacttattcccttcctttgtgaaagaggaatattccaatcagaagagaaaattgacttacatttagttgagattcctgcagcaatggaaagattaaatggttttgttaaagaattagaagattcggcttattcaactgttaattctattaatacacatgacagtattgatgctgctgtagagcatgctgattggtgtttattggttggttcaattcctcggggaattgtttttcaaggcaaagaaatcaaagaaaggtctgatcttctacagataaatggtggaattttcacagaacaaggcaaagccataggttcaaaagctaaagataattgcaaaattttagtggttggtaaccctgctaacactaatgctcttattggttatcataatgcaggaaataaaaatcaaacctggatggcaatgaccatgcttgatgctttaagagcaaaagctcagttatccataaaattaggctgtcatgttgatgagatttatcgattggcagtgtttggtaaccatagcccaaccatgttcccagatttagaaaataccattgttaatggtcaaaatgcatatgaagcaatcaatgatcccgcttgggttgagaatgaatttttaccgaaaat

SEQ ID NO: 206939 - DNA, 730 bp, Unknown
  Bacterial polypeptide expressing nucleotide sequence isolated from the Sargasso Sea
aatgaaagaaattaatgtggcagttacaggaggagcaggacaaatttcttattccttattgcctagattaattagtggagaaacttttggaccggataccaaagttaatctcagattggtagaaatacctcaagtagtggataaacttgaaggcacaataatggaactaattgactgtggatttgatcaaacaggttctctgttggcaacggcggatataaaagaaggcgtggatggagctaattgggttctattagtcggcagtatacctagaggaatagtcgttgatggaaagaaaatagaagaaagaagtgatctgctaaggattaatggaggaatattcaccgaccaaggttcagccattggggaactggccaataaagatgcaaaaatattagttgtgggaaatcctgctaacaccaatgctcttatagggaagcaacatgcaaataacgcttctcagcaatggtttgctatgacagccttggacgcaaacagagctaaagctcaactggccttaaaagcagaaacagatatcacttcagttaccaacatgacaatttggggcaatcacagtcctactatgtaccctgatccctataacgctaagattaatggaaccagcgctgcggaagtaatcaatgatgaaaaatggattgaaaacgaatatctacctcttgttcaacaaagaggtaaagcggttatcgatgcaagaggtgcttcgtccgca

SEQ ID NO: 206940 - DNA, 346 bp, Unknown
  Bacterial polypeptide expressing nucleotide sequence isolated from the Sargasso Sea
ttagatgatattataaaaagaacaaaaaacggaggtgccgagattgttaaatacttggaaaaagggtctgcattctatgcacctgccgcatccggtgttgaaatggcagaatgttatttgaaagatcttaaaaaacaattgccatgtgcagtttatttaaatggagaatacggtgttagagatttatacgctggcgtaccagttataataggtaaagatggtgtagaaaaagtaatagaattagaactatcaggagacgaaaaagtaaattttgaaaaatcaataaaagctgttcaggaattgttttcagctgctaaaaaaattgataaagatttaaatttataat

SEQ ID NO: 206941 - DNA, 790 bp, Unknown
  Bacterial polypeptide expressing nucleotide sequence isolated from the Sargasso Sea
actactccatcagttgttgcatttacagataaaaatgatattttggttggtcaggctgcaaaaaggcaagctgtaactaatcctgtaaatacaatttattcagcgaaaagattaattggaaggctatttgatgaagtaaataaagagagtaaggatttaccttataaaataaaaaaaggtaaaaataatgaggtagttatttcttcatttgataaagattatgcattgccacagataagcgctatgattcttcaaaaaataaaaaaaacagcagaatcttatcttggagaagaagttaaggatgcggttattactgttccagcctattttaatgatagtcaacgccaagctacaaaagatgctggagaaatagcaggttttaatgtaaaaaggattattaatgagcctacggcagcagcattagcatatggtctagataataaaaaagatcaaaaaattgctgtttttgatttaggcggaggcacttttgatgtttctatattagagattggagatggtataatagaagtaaaatcaactaatggtgatacggcattgggtggtgatgattttgatcaatctattgtagattggttaatagctgaatttaagaaaagtgatggaattgatttaagtaaagatcctatggctatacaaagattaaaagaggctggagaaaaagctaaatgtgaattatcttcaacaaaacaaacagatattaatttaccttttattactgccgatgcttcaggtcctaagcacttcaatatttctttaactagagcaaaat

SEQ ID NO: 206942 - DNA, 406 bp, Unknown
  Bacterial polypeptide expressing nucleotide sequence isolated from the Sargasso Sea
tatgaaagttactgtagttggagctggagcggtaggtgcaagctgcgcagaatatatagcaattaagaattttgcatcacaagttgtaatattagatattaaagatggttttgcagagggaaaagctatggatttaatgcaaaccgcttctttgaataattttgatactaagattgtcggaactactaatgattattctaaaactgctgacagtgatatttgtgttataacatctggtattccaagaaaacctggaatgaccagagaggaactaattggaattaatgcgggaattgttaaggaggttagtgccaaactaatcgaaaaatcacccaataccatcataatagtagtaagtaatcctatggatacgatgacttattttagtcataaaacaactggtata

SEQ ID NO: 206943 - DNA, 428 bp, Unknown
  Bacterial polypeptide expressing nucleotide sequence isolated from the Sargasso Sea
tgacacaatggttccagttataagatatgcgactgtgccaggtatacctgttccagaactgattaaattaaaatggtctaacactaaaagaataaatgcaattataaatagaacaagagatggtggtggtgaaataggccgattgatgaaaacagcttctgctttttatgctccagcttcatcagctattgctatggctgaatccttcttaaaagaccaaaaaagagttttaccatgtgctgcttatttaaacggacagtatggtgttaaaggattgtacgtaggtgttcctgttatcataggcaaaaaaggtgtagaaaaagttatcgagttgaaattgagtgcaaaagagaaaaaacaatttaataactctgtaaaggcagtaaaaaatttaactgtattagcaaaaaaactaatatcaaaataag

SEQ ID NO: 206944 - DNA, 333 bp, Unknown
  Bacterial polypeptide expressing nucleotide sequence isolated from the Sargasso Sea
agatcacagagaggactaaaaaagggggtgcagaaattgttaaatatttaggaaatggttcagcgttttatgctcctgcagcatcaggtgtgcaaatggcagaaagttatttaaaagataaaaaaatgcaactcccgtgtgctgcttatcttaatggagagtacggcataaaagaagtttatgctggggtgccggtgataattggtaacaaaggtgttgagaaaataattgaaattaagttaagcaaagaggaagaagataacttcaaaaaatctgttcaatcagttaaagatttatattctgctgcaaaaaatatagactcagagttataat

SEQ ID NO: 206945 - DNA, 293 bp, Unknown
  Bacterial polypeptide expressing nucleotide sequence isolated from the Sargasso Sea
aatgagaagaaaaaaaatatcccttattggtggaggtcaaataggtggaaaccttgcactaattgcatcacaaaaagaattgggagatgttgttatatttgatatcccgcaatcagaggggatggtaaaagggaaagctctggatattatgcaattacgacctcatgatggttatgatacaaatattactggcacctcagactataatgatatagcagactctgacgtaataattattactgctggtataccaaggaaacccggaatggaccgtgaagatttaatgtcaataa

SEQ ID NO: 206946 - DNA, 580 bp, Unknown
  Bacterial polypeptide expressing nucleotide sequence isolated from the Sargasso Sea
tatgagcattaagaaagtgactataactggcgcagctggaaatattgcttattcacttattttcagaattctttctaaacttccatttaaggctactgataaaattgatttaacattgcttgatattgagctgtcacagaaatccttaacaggtcttcgttttgaaattgaggattgtgcattttcatcattaaacgaaattgctattactgctgattctgaaaaagccttcgatgattctgattatattattatggttggcgctaaaccaagatcaaaaggtatggagaggtcagatttgatactggacaatgctggtatcttcaaatctcaagcggaaactatcaataacgtatgctcatcatcgacaaaaattattgtggtaggaaatccagctaacacgaatgctttaatccttaattataatacccctaagattccaaatgaaaatgtaacttctttgatgaaattagatcaaaatagagcaaaaagtattttagcctctaagcttgataagcaagttgaagaaattcatcaaatgataatatggggaaatcattcaactacgcaagttccagat

SEQ ID NO: 206947 - DNA, 453 bp, Unknown
  Bacterial polypeptide expressing nucleotide sequence isolated from the Sargasso Sea
tatgaaagacagaatcaaggttgttgttactggagccgcgggtcaaataagttactctcttattcccagactgattgatggacacacctttggagataagatagttgatttagagctagttgaaatccctcaagtggttgataaattacagggtctgataatggagctagaagactctaattttccaaatatgggaaatgtgaattacacatctgattttgagtcagcagctaaagatgctgattggttcctgctagttggaagcatcccaagaggaattgtttttaatggtaaaaaaattgaagaacgagccgacctccttcaaatcaacggtgggatatttgttgggcaaggacaagcaattggtaaatatggtaagtccgatgccaaaatcttagtagtaggcaatcctgcgaatactaatgcgttaattggaagacatgcagctggaaa

SEQ ID NO: 206948 - DNA, 349 bp, Unknown
  Bacterial polypeptide expressing nucleotide sequence isolated from the Sargasso Sea
ttctctttacttagcaaagaggaaattgcagctatcgaagatagaaccagatttggtggtggagaaatagtgaaactttttggaaaaggttcagctttttatgcaccagctcaatctgctgttgaaatgattgaaagttttgtaagagataaaaaaagagttattccctgtgcttcactttgtgaaggagaatttggtattgatggatactttataggagtacccacagtcataggttgtggtggtgtagaaaaaattctgacctttgatttaaatgaagaagaaaagaatgccttaaataatacacttaccgaagttgaaaaaactgttttagaaacaaaactttaat

SEQ ID NO: 206949 - DNA, 428 bp, Unknown
  Bacterial polypeptide expressing nucleotide sequence isolated from the Sargasso Sea
tcaaggtaaggcgattggaagatatggtggggagaatgctaagattttagtagttggtaatcctgccaatacaaatgcatttattggaaaacatgcagcaaataatgatagccaactttggatggctatgacaatgctcgacgctaatagagcaaaatcaattcttgcaaaaaaaacaaataataatgtttctgatattaaaaatatgattatttggggaaatcatagtcctacgatgtatccagattcagaaaatgttcaaatattaggagaattaggcagttcagtagtaaatgatatcaattgggtagaatctgatttcattccaaaagttcaacaaagaggaaaggcagtaattgatgcaagaggcgcctcctctgctacatctgctgcaaaagcacgcaatagatactgtgattgcttgtgag

SEQ ID NO: 206950 - DNA, 313 bp, Unknown
  Bacterial polypeptide expressing nucleotide sequence isolated from the Sargasso Sea
tcttgatggaggagctgaaatagttggattattaaaaacaggctctgccttctacgcccctgcatcatctgccattgagatggctgattcatatttaaaagataagaaaaaattattaccatgtgcagcttatgttgatggacactataatttaaatggattgtatgtaggtgttccagttattattggtaaaaatggcgtggaaaggattgttgaaataagttttacgtcagatgaaaaaaatatgtttgatcattctgttttgaccgtaaaacaattaaatgaagttgcttcaaaatttgaagcatcataa

SEQ ID NO: 206951 - DNA, 846 bp, Unknown
  Bacterial polypeptide expressing nucleotide sequence isolated from the Sargasso Sea
gcgcttgttgaaatacctcaagttgtagataagcttaaaggtctagtaatggagttggaggactcatattttccttccatgggtaaagttacctatactgataatttttctgaagctgcaaaggatgctgattggtttcttcttgttggcagcattcccagaggaatagtttataacggtagaaagattgaggagagatcagatcttctaagtattaatggtggcatctttgttgatcagggcaaagcaataggaagttttggaaaagataaggcaaaaattcttgtcgttggtaatcccgcaaacactaacgcttttattggaaaaaacgcagcagataatgaaagtcagctgtggatggcaatgacaatgcttgattcaaatagagctaaatcagtcatttctaaaaagactgatgtgaatatttctgagattaaaaacatgattatctggggaaatcatagtccaacaatgtaccctgactctgaaaatgtgattattaataatcaattaggcagtacagtaattaatgacatgaattgggtagaaaaagactttattccttcagttcagcaaagaggaaaagcagtaattgatgccagaggggcatcttcagcaacatctgcagcaaaagcagctattgacactgtgatggcttgtgagagccctacagaagaaggaaattcatttagtgcagcgattgctagtgatgggtcatatgacgtgcctgagggtattatatgtggttttcctctggtaacactaggtgatggaactgttgatataaaaagagatattgcattatcagatttgcaaaggcaaagtttcaggtttcaattgatgaac

SEQ ID NO: 206952 - DNA, 617 bp, Unknown
  Bacterial polypeptide expressing nucleotide sequence isolated from the Sargasso Sea
gatgaaagaaattaatgtggcagttacaggaggagcaggacaaatatcttattccttgttgcctagattaattagtggagaaacttttggaccggataccaaagtaaatctcagattggtagaaatacctcaagtagttgataaactcgaaggaacgataatggagttagttgattgcggttttgatcaaactggttctatgttagcaactgcggatattaaagaaggtgtagacggagctgattgggtgctattagttggcagtatacctagaggaatagtcgttgatggaaagaaaatagaagaaagaagtgatctgctaaggattaatggaggaatattcacggaccaaggctcagctattggagagttagccaataaagaagcaaagatattagttgtaggaaatcccgctaataccaatgcccttattggtaagcggcatgcaaataatgattctcaacaatggtttgctatgactgccctggacgcgaatagagctaaagctcaacttgctttaaaagctgaaacagatatcacttcagttaccaatatgacaatttggggcaatcacagtcctactatgtaccctgatccatataacgctaagattaatg

SEQ ID NO: 206953 - DNA, 489 bp, Unknown
  Bacterial polypeptide expressing nucleotide sequence isolated from the Sargasso Sea
tatgagctcatcagtaaaagtagttgtaacaggcgcagcaggtcaaatagcatactctttaataccaaggttggtcgatggaagaacctttggagataagaaggtagatttaacactagtagaaattcctcaggttgtagaaaaacttaaaggcttggtaatggaattagaagactcatattttccaaatatgggtgaagtaacttttacagataacttcgaagaagcgtcaaaagatggagattggtttttgcttgttggaagtatcccaagaggaattgtttacaacggcaaaaaaatagaagaaagatcggatcttttaagtataaatggtggaatctttgttgatcaaggcaaagcaattggtcagcatggtaaagatgatgcaaaaatacttgtggttggaaatccagctaatacaaacgcttttattggaagaaatgctgctaataaagattcgcagctttggatgggcatgacaatgctggg

SEQ ID NO: 206954 - DNA, 286 bp, Unknown
  Bacterial polypeptide expressing nucleotide sequence isolated from the Sargasso Sea
catgagttaccagcacattcacctgccagaacagggagagaagatttccgtcaaggaaggtcggctgcatatcccggacaacccgattgtgggctacgtcgagggtgacggtatcggtcccgatattacccgcgccatgctgcgggtactggattcggcagtggagaaagcctacggcggcgcgcggcagattcactggtgtgagctctatctgggtgagaaagcgggccgtatctacggtggcaattattttcctgatgaaaccctggaggcgatacgggaactc

SEQ ID NO: 206955 - DNA, 881 bp, Unknown
  Bacterial polypeptide expressing nucleotide sequence isolated from the Sargasso Sea
gagatacccagagcattcaataaaagcagttatccaaatcttaaaaactgtttcattatcacaacttaaatggtctaatactaatttagattttaggttatcatgtcttgaacagcttataggagtattaaaagataagaagagagaatttgcatccttaatatcacttgaaatgggaaaacctatttcacaatcagaaggtgaaatagaaaaatgtatatggctttgtgaatattattttgagaattcaagaaaaattctttcaagaaaattaatagatgatgaaaaagaaaagtgctatgtgacattccaaccaataggaaatgttttaggggtaatgccttggaattttcctttttggcaagtttttagatttgctgttcccactattgtagctggtaatggcgctattttaaaacattcatctaatgttcaaggctgcgcatatgcaatagaatcttgtttccaacttgcaggatttccttcaaatatatttcgcaatatatcaattaagggtaaggatgttaaatatgtaattgaaagcccttttattaatgcggtttctttaactggtagtacttcagttggtcaatcagttgctcaaactgctggtaaatatatcaaaaaaaccgttttggaattaggaggaagtgatccatacataatattggaagatgcaaatttgaatcttgctttagaggcttgtattaatggaagaattttaaatactggtcaaagttgtatttcagcaaaaagaattattgtagtagataaattatatgatgaatttttaattaaattagaaaaaaagttgtctgaaaaaatcatgggagacccaatggacaatgtagatataggtcctatggtaacaaaaaatgcaa

SEQ ID NO: 206956 - DNA, 535 bp, Unknown
  Bacterial polypeptide expressing nucleotide sequence isolated from the Sargasso Sea
aatgaaagaaattaatgttgctgtaactggtggagctggacaaatagcttactctctccttcctagattaattagtggagagacttttggagctgacataaaggtaaacttaagattaattgagatacctcaagtggtggagaaacttgaaggcacaatcatggaacttatagattgcggattcagtcaaactggaaaactaatagctacttcaaatatagacgaaggagttgaggatgctgattgggttcttttggtaggcagtatcccaagaggaattgttattgatggaaagaaaattgaggaaagaagtgatcttctaaagatcaatggaggtatcttcacaaatcaaggaaaggctataggagaattagcgaagcctgatgcaaaggtcctagttgtaggcaatcctgctaataccaatgctcttattggaagaaactcagccaaaaatgatggtcaacattggtatgctatgacagcacttgatgctaatagagcaaaggcacaactggccgaaaaaagccggtactga

SEQ ID NO: 206957 - DNA, 247 bp, Unknown
  Bacterial polypeptide expressing nucleotide sequence isolated from the Sargasso Sea
atgaaatcacctgtaagagtcgcggtcactggggctgcgggccaaattagttactcacttatttttcggatagcagctggagagatgttagggccagaccaaccggtaatacttcagttattagagattacacctgctttagaagcattgaaggggactgtaatggagatcgaggactgtgcttttcctttggtacagggcataactcaatcggatgacccaaaggttgctttccaagatgctgact

SEQ ID NO: 206958 - DNA, 181 bp, Unknown
  Bacterial polypeptide expressing nucleotide sequence isolated from the Sargasso Sea
gttggagttgttgcagcgttggtgccctggaattttcccttagttttatcatctagaaaaatctcaacaggattggcagcaggatgttcggtaattgtaaaacctgatgttataacaccaggtgtagttatggagcttgtcgaaatatgtagagagtgtggggtacctccaaggggtgatt

SEQ ID NO: 206959 - DNA, 554 bp, Unknown
  Bacterial polypeptide expressing nucleotide sequence isolated from the Sargasso Sea
aatgagtaaatctataaaagttgttgttactggagctgcagggcaaattgcctattctttaataccaagattagtcgatggaaatacatttggagataaaatcgttgatcttgcattagttgaaattcctcaagttgttgataagttaaagggtttagtcatggagcttgaagattcctattttccaaaaatgggtaaagttacatataccgataattttgaagaggcatcaaaagatgctgactggttcttactagttggaagtattcctaggggtattgtctacaaaggaaagaagattgaagaaagatcagatcttttaagtattaatggtggcatttttgttcaacaaggtgaagcaattggaaaatatggaaaagatgatgctaagatcttagttgttggtaatcctgcaaatacaaatgctttcattggaaaagatgctgctaacaatgacaatcagctttggatggcaatgacaatgctagattctaatagagccaagtctattcttgcgaaaaaaacaaacaataatgtttctgatgttaaaaata

SEQ ID NO: 206960 - DNA, 295 bp, Unknown
  Bacterial polypeptide expressing nucleotide sequence isolated from the Sargasso Sea
aggtctacttaaaaccggatcagctttctatgcacctgcgtcatctgctttattaatggctgaggcatacattaagaataaaaaaagaattctccctagtgcagcttttctaaaaggcgagtacggagtaaaaaatttgtatgttggtgtacctgtaattattggtagtaagggggtagaaaaagtgatagaaattaaattggaaccatcagaaaagaagatgtttaaaaaatcagtgcagtcagtagagaaacttgtaaatgtagtaaagaaaataaagttgagattaaactag

SEQ ID NO: 206961 - DNA, 741 bp, Unknown
  Bacterial polypeptide expressing nucleotide sequence isolated from the Sargasso Sea
gaagtattcctaggggtattgtctacaaagaaaagaagatggaagaaagatcagatcttttaagtattaatggtggtatttttgttcagcaaggtgaagcaattggaaaatatggaaaagatgatgctaagatcttagttgttggtaatcctgcaaatacaaatgctttcattggaaaagatgctgctaacaatgacaatcaactttggatggcaatgacaatgctagattctaatagagccaagtctattcttgcgaaaaaaacaaacaataatgtttctgatgttaaaaatatgattatttggggaaatcatagtccaactatgtatcctgactcagaaaatgcactaatctctggaaagctaggtagcgaagtaataaatgatataaattggatggaatctgaattcattcccaaagtccagcaaagaggaaaagcggttatagatgccagaggcgcatcttctgcaacatctgctgcaaaagcagcaatagatactgttattgcttgcgaaaacccaactgattcaggtgattgttttagtgcagcaattgcaagtgatggcgcatatgatgttcctgagggcattatatgtggttatcccttaattactttggataatggatcaatagaaattaaaagagatatctcattatcagaatttgcaaaatctaaatttaagatatctatagatgaacttttatcagaaagagaagctgtaaaacatctcttaaaatgac

SEQ ID NO: 206962 - DNA, 921 bp, Unknown
  Bacterial polypeptide expressing nucleotide sequence isolated from the Sargasso Sea
gttcttcgcgctgatgaacgaggtcgagtcggaagagatggtgttcaccctggagacgatcgtggagaagttcggcgaggagattgcaccgtacgccatgggcatgacccagaacctggttgccgcgttttggaaactgaacaggtcgcaagaccagactgacgaagacgacttcaccggcgcgctcgcttccgtggggtgcctacgcgcgatagccaccatcctcgaatccctctccgcgttgccccacatgtacgcgcagctcgagccggcgctgatgcccatcatgaggaagatgctcggcgccgacggatacgacgtgtacgaggaggttttggagattttgtcttacatgacgtactacgcccccgccgtgtccccggcgatgtgggagctgtggcccgtgctcatcagcgcgctcgacggcgagtacggcgtgcagtacttcgagaacatcctggttccgatggacaactacatctcgcgcggcaccgaaacgttcctggcgcaccccacctgcaaaggcgactgcctcagggtcgcatccggcgtgctcctgaataacgacatccccgagccggagatgctccccgcgcccaagctgctcgagtgcgtcctccagaactgcaagggtcgggtggacgattgcgtggctccttatctggctgtcgcgctggagaggctcaagacgtgcgagctgacctacctgaaggaccttctcatccagatcgtggccaactgcctgtggtacaacgcggcgctgaccctggatatactggtcaagaacggcgccctgggaaccgcgctgcagacctggttcggcatgctcggcgatcgaaccagaaaaggtggaaacaagcgcaagcaccacaggagggagcacgacaagaaggtttgcatcctcgggctggtggcgttgat

SEQ ID NO: 206963 - DNA, 610 bp, Unknown
  Bacterial polypeptide expressing nucleotide sequence isolated from the Sargasso Sea
aatacaaatgcatttatcggaaagcacgctggttgtaatgataaacaactatggatggcgatgacaatgcttgattcaaatagagctaagtcaattttagcaaaaaagacaaataataatgtttctgatattaaaaatatgattatatggggaaatcatagtcctacgatgtatcctgacatagaaaatgcacttgtgtctggagaactaggaagttcagcaattaatgatatgagttgggtagaatctgagttcttaccaacagtgcaacaaagaggaaaagcggtaatagatgcaagaggagcttcttctgcaacatcagctgcaaaagctgcaatagatactgtaatagcatgtgaaactccaactgaagaaggtgattcttttagtgctgctattgcaagtgatggagcttatgatgttccagagggtctaatatgtggttaccctttaatttgtcttgatggtggaaaaattgagataaaaagagatattgcattgtccgaatttgcaaaatcaaaatttaagctgtccatagatgaattagtttcagaaagagaggctgtaaagcatttaatgtatgataaaaaaagaaaaaattcttcatagc

SEQ ID NO: 206964 - DNA, 322 bp, Unknown
  Bacterial polypeptide expressing nucleotide sequence isolated from the Sargasso Sea
agagatggtggagctgaaatagtaaaatatttagaaaaaggttctgcattttatgctcctgcagcatctggaattgaaatggcatccgcatatataaatgatgaaaaaaaacttttaccctgtgcagcgtatatgaatggagaatatggtgtaaatgaaatttatgcaggtgttccagttattataggaaaaaatggaatagaaaaaattgaagaagtaaagttggacgataaagaaaaattggaatttaatcattctatagaagctgtcaaaaagttatgggaggcagcgtctgcaattgatccagatttaaaaagataaa

SEQ ID NO: 206965 - DNA, 622 bp, Unknown
  Bacterial polypeptide expressing nucleotide sequence isolated from the Sargasso Sea
tcttttaagtattaatggtggtatttttgttcaacaaggtgaagcaattggaaaatatggaaaagatgatgctaagatcttagttgttggtaatcctgcaaatacaaatgctttcattggaaaagatgctgctaacaatgacaatcaactttggatggcaatgacaatgctagattctaatagagccaagtctattcttgcgaaaaaaacaaacaataatgtttctgatgttaaaaatatgattatttggggaaatcatagtccaactatgtatcctgactcagaaaatgcactaatctctggaaagctaggtagcgaagtaataaatgatatgaattggatggaatctgaattcattcccaaagtccaacaaagaggaaaagcggttatagatgccagaggcgcatcttctgcaacatctgctgcaaaagcagcaatagatactgttattgcttgcgaaaacccaactgattcaggtgattgttttagtgcagcaattgcaagtgatggcgcatatgatgttcctgagggcattatatgtggttatcccttaattactttggataatggatcaatagaaattaaaagagatatctcattatcagaatttgcaaaaatctaa

SEQ ID NO: 206966 - DNA, 820 bp, Unknown
  Bacterial polypeptide expressing nucleotide sequence isolated from the Sargasso Sea
atgtcaaagattataggaatagatttaggaacaacgaattcatgtgtatcggttatggaggctggcaagcctactgttataactaattcagagggaggtcgaacaacaccttcaatagtagcattttcatcagatggagacacccttattggatcacctgcaaaaagacaggctgttacaaatcctgtaaatactattttctctgcaaaaagatttattggaagaacttatgatgaaattgaaaatgatgcttcaactattccatacaaaattaaaaaaggtaaaaattcagaagtgagaattttagcagaagataaggattatgcccctgagcaaataagtgcaatgttgcttcaaaagctaaaacaaactgcagaagaacatttaggtgaaaaagtattagatgcagtaattacggttcctgcatattttaatgattctcaaagacagtctacaaaagatgcaggtgcaatagcaggtttgaatgttaagcgaattattaatgaacctactgctgcggcattggcatatggattagattctaaaaaagatgaaaaaatagctgtctttgatttagggggtggtacatttgatatatcaattttagatataggggatggtgtttttgaagtaaaatcaactaacggagacacacatttaggtggagacgattttgatcaaattattgttgattatttgatagatgagtttaaaaaaaatgaatcaattgatttaagagaagaccctatggcattacagcgattaagagatgctgctgaaaaagcgaaatgcgagttgtctagttcaaagcaaacagata

SEQ ID NO: 206967 - DNA, 907 bp, Unknown
  Bacterial polypeptide expressing nucleotide sequence isolated from the Sargasso Sea
atgaacaaatgttcaattgctattactggtgctgctggaaatatagcttattcactgatattcagaatactctctggaaatatttttatgcctgataccaagattgacttgagacttttagatataccaaatgcaaagaaaattcttcatggggtaaaacttgaaattgaggactgtgcattcaatagtttagattctatcaccgtgactgataaaccagatgtagcatttgcagattgtgattatatacttctggttggggctaaaccaaggtctaaaggtatgcaaagatctgatttgatattggacaatgcacatatttttagtgatcaaggaaaaataataaataaggtttcaaagaaatcagctaaaataattgttgtaggaaatccagcaaatactaatgcacttattgtctgtagtaacacaccagatattcccaatgaaaatatttcatcattaatgcgtctagatcaaaacagagcaaaaagtattttatcctcaaaggtaggccaacatgtaagcagtgttactaagttggtggtttggggaaatcattcaacaactcaatatccagacatatctcatgcacaaattaatagtagtaataattttttagatactattgatgaacaatggatatatgatgattttattccacgagtacaaaaaagaggtgcagaaataatagagcatagaggcctctcgagtgctgcctctgctgcttcagctgtgtatgatcatttcaatgttcttgtaaacggctcagatgattgggagtcaatgggaatattaacgtcaaataattattcaataacatcaaatttattttattctcttccactcaaaatatcaaaaaatagttttaatgtcattgaatctcttgaagtgtcagaaaaaatgcgag

SEQ ID NO: 206968 - DNA, 973 bp, Unknown
  Bacterial polypeptide expressing nucleotide sequence isolated from the Sargasso Sea
atgaacaaatgttcaattgctattactggagctgctggtaatatagcctattcactgatatttagaatactctcggggaatatttttatgcctgataccaagattgacttgagacttttagatataccagatacaaagaaaattcttcatggggtaaaacttgaaattgaggactgtgcattcaatagtttagatactattacagtgactgataaaccggatgtagcatttgcagattgtgattatatacttctggttggggctaaaccaagatctaaaggtatgcaaagatctgatttgatattggataatgcacatattttttgtgatcaaggaaaaataatcaataaggtttcaaagaaatcagctaaaataattgtcgtaggaaatccagcaaatactaatgcacttattgtctgtagcaacacaccggatattcccaatgaaaatatttcatcattaatgcgtctagatcaaaatagggcaaaaagtattttatcctcaaaggtcggtcagcacgtaagtagtgttactaagttggtggtgtggggaaatcattcaacaactcaatatccagatatatctcatgcgcaaattaataatagtaataattttttagatactattgatgaacaatggatacatgatgattttattccacgagtacaaaaaagaggtgcagaaataatagagcatagaggcctctcgagtgccgcctctgctgcttcagctgtttatgatcatttcaacgttcttgtgaatggctcagatgattgggagtcaatgggaatattaacgtcaaataactattcaataacatcaaatttattttattctctgccactcaagatatcaaaaaatagttttgatgtaattgagtctattgaagtgtcaaaaaaaatgcgaacttatttatctgctaccgagaaggagttgattgacgagagggatactgtaaaggaatttctctaga

SEQ ID NO: 206969 - DNA, 340 bp, Unknown
  Bacterial polypeptide expressing nucleotide sequence isolated from the Sargasso Sea
aggcgctcacgaagcgcattcaaacggaggcaccgaggtcgtcgaggcgaagggtggggcgggtagcgccacgctctccatggccgccgccgccgctgagttcgccgacgcatgtctccgcggtctgagcggtgaatcgggcatttgggcgtgcgcgtacgtggagagttcggcgacgagcgcgcccttcttcgccaccaaggtgctcctcgggaagaacggcgtcgagcgcgtcgcgggagtcggcgcgatgtcggcgtacgaaaagcaatctctgaagcaaatgttaccggaactcaaagctagcattcaaaaagggtacgatttcgcgcgctcgtga

SEQ ID NO: 206970 - DNA, 542 bp, Unknown
  Bacterial polypeptide expressing nucleotide sequence isolated from the Sargasso Sea
aatgagtgcatcagttaaagtaatagtaaccggagcggccggccaaatagcttattcgttaattccaagattagttaatggaagaacatttggagataaaaaagttgacttggtcttagttgaaataccccaggtcgttgataagcttaaaggattgataatggaattagaggattcttattttcctaatatgggaaatgttacatatacagacaattttgatgaggctgcctcagatggagattggtttttgcttgttggcagtattcctagaggtattgtatttaacggaaaaaaaattgaagaaagatctgaccttttaagtataaatggaggaatttttgttgatcagggccaagcaataggtaagcatggtaaagatgatgcaaaaatattagttgttggaaatcctgcaaacacaaatgcgtttattggaaaaaatgctgccaataaagattcacaactttggatggcaatgacaatgttggactcaaacagagctaaatcaattatctctaaaaaacaaataaaaatatttcaga

SEQ ID NO: 206971 - DNA, 451 bp, Unknown
  Bacterial polypeptide expressing nucleotide sequence isolated from the Sargasso Sea
aatgagtaaatctataaaagttgttgttactggagctgcagggcaaattgcctattctttaataccaagattagtcgatggaaatacatttggagataaaatcgttgatcttgcattagttgaaattcctcaagttgttgataagttaaagggtttagtcatggagcttgaagattcctattttccaaaaatgggtaaagttacatatacagataattttgaagaggcatcaaaagatgctgactggttcttactagttggaagtattcctaggggtattgtctacaaaggaaagaagattgaagaaagatcagatcttttaagtattaatggtggtatttttgttcaacaaggtgaagcaattggaaaatatggaaaagatgatgctaagatcttagttgttggtaatcctgcaaatacaaatgctttcattggaaaagatgctgctaac

SEQ ID NO: 206972 - DNA, 154 bp, Unknown
  Bacterial polypeptide expressing nucleotide sequence isolated from the Sargasso Sea
aatggctggtattttagatagttcacgttttaaactttttttatcagaggaattaaatgtacctgtaaaagaaattgatgctatggttatgggtgggcatggagatacaatggtacctcttccacgatttactaagtttctggtaaacctttga

SEQ ID NO: 206973 - DNA, 969 bp, Unknown
  Bacterial polypeptide expressing nucleotide sequence isolated from the Sargasso Sea
gagctgctggacaaatatcttattcacttattccgtttctttgtgaaaatggaatttttaagagtaatgagaaaattgacttctcacttgtagaaattccctcagcaatggagaaactatcaggttttgttaaagagcttgaagactccgcttattcaaatattagttccatttcagtgcatgacaacatcaactctgcagttgaagatgctgattggtgtttacttgttggctcaattccgagagggatagtcctaaatggtaaggagataaaagaaagggcagatcttctaaaaataaatggagggatttttacggaacaaggaaaagctataggttcaaaagcaaaagattcatgtaaaattcttgttgttggcaatccagcaaatacaaatgctcttatcggctgcactaatgcaaataatccatcacaaaaatggatggcaatgactatgctcgatgcattaagagcaaaagctcaagttgctttgaaacttcaagtgcatgtggatgatatatataggcttgccatttttggtaatcatagccctactatgtttccagatttagagaatgctttgctagatggagaaattatttataaaaaaataaatgatcatgattgggttgaacataagttccttccaaaaattcagcaaaggggtgcagaaattataaaatcccgaggagcctcatctgcctcatccgctgcacgagctgcatgtgaaacagtttcttcagtagagaacccaaccagatctggtgatgtttttaatgctgcaatacttagtgatggttcatatggagtggctgaaggagttttttctggattccctcttacatcagatggcatgggaaatattaatattgtaagagatttctctttaagtgaatttgccaaatcaagaatagccttgacttcaaatgaattagttgaagaaagagagcttgttaaagatttactttaaa

SEQ ID NO: 206974 - DNA, 988 bp, Unknown
  Bacterial polypeptide expressing nucleotide sequence isolated from the Sargasso Sea
tatgaagatagtcgtaacaggagccgctggacaaattgcttattcgcttgttcctttcctttgtgaaagaggaatatttaaatcagaagaaaaaatagacctacatttagtcgaaattccagcagcaatggaaaggttagatggttttgttaaagagctagaagattcagcttattcaactgttaattctattaatacccatgacaatattgacgctgctgtagaaaatgctgattggtgtttactagttggttcaattccccgtggaattgtttttcagggtaaagaaattaaagaaagatctgatctactgcaaataaatggtggaatctttacagaacaaggtaaggcaataggatcaaaagctaaagataattgtaaagttttagtagtgggtaatcctgcaaatactaacgcgcttattggctaccataatgcaaataatgctaatcaaaactggatggctatgacaatgcttgatgctcttcgcgcaaaagcacagctctctatgaaattagattgtcatgtagatgatatttaccgtttggcagtatttggcaatcatagtcctactatgtttccagatttagaaaatactattgttaatggtcaaaatgcttatgagaaaattaatgatcgttcctgggttgaagataaattcttaccaaaaatacaaaaaagaggcgcagaaattattgaagcgagaggtgcctcatctgcttcatctgcagctagagctgcatgcgatacagtaaaagcagttgaacatccaacaaggtcaggtgatgtatttaatgcggctattatgagtgatggtagttatgatataccagcaggaattttctctggctttccattgctatcagatggtaatggaaaaatagaaattgtaagagacttcagcttaagtgaatttgcaaaatcaaagattgctatcactgcgaacgaacttctagaagagaaagatctcgtgaaagatctaatttaa

SEQ ID NO: 206975 - DNA, 971 bp, Unknown
  Bacterial polypeptide expressing nucleotide sequence isolated from the Sargasso Sea
tggagccgcgggtcaaataagttactctcttattcccagactgattgatggacacacctttggagataagatagttgatttagagctagttgaaatccctcaagtggttgataaattacagggtctgataatggagctagaggactctaattttccaaatatgggaaatgtgaattacacatctgattttgagtcagcagctaaagatgctgattggttcctgctagttggaagcatcccaagaggaattgtttttaatggtaaaaaaattgaagaacgagccgacctccttcaaatcaacggtgggatatttgttgggcaaggacaagcaattggtaaatatggtaagtccgatgccaaaatcttagtagtaggcaatcctgcgaatactaatgcgttaattggaagacatgcagctggaaatgattctcagctatggatggcaatgacaatgcttgattcaagcagagcaaggtctgtgctgtcaaagaaacttaatgtaggaattgaagatatcggtaaaatgattatttggggtaatcatagtccaaccatgtaccctgactttgaaaatatcatctcaaatggagaattaggcaaaaatcttatcgatgacatgaattgggttaacaatgattttctaccaatcgttcagcaaaggggtaaagctgtaattgattcacgaggagcttcttcagcaacctctgcagcaaaagcagcattagatacagtcattgcttgtgaaaatccttcaaagtcaggagaatgttttagtgccgctgttattacagatgggagctatgatcttccgcacggaattatttgcggaatgcccctgatgactacatcagaaggcagtgtagaaattgttagagatattgtcctatctgattttgctaaagaaaaaataaaaatctcaactaatgaattgattgaagagagatctgctgttgaagatctattaaaataaa

SEQ ID NO: 206976 - DNA, 511 bp, Unknown
  Bacterial polypeptide expressing nucleotide sequence isolated from the Sargasso Sea
aatgagttcaacaataaaagtagttgttacaggtgcagctggtcaaatagcatattcattgataccaagattggtagatggaaaaacttttggcgacaaaacagttgatttatgtctagtagaaataccgcaagtagttgataagttaaaaggtttagtaatggaactggaagattcatattttccaaatatgggagaggtttcatataccagtaactttgaagaagcatctgttgatggagattggtttctattagtaggaagtattcccagaggcattgtatataatggtaaaaaaattgaggaaagatcagatcttctaagcataaatggcggcatttttgtagatcaaggaaaggctattggaaaaaatggaaatgataacgcaaaggttttggttgtgggtaatccagctaatacaaatgctttaataggcaaaaatgctgcaaataataattctcaaatatggatggctatgaccatgcttgatttcaatcgcgccaaatcaatt

SEQ ID NO: 206977 - DNA, 606 bp, Unknown
  Bacterial polypeptide expressing nucleotide sequence isolated from the Sargasso Sea
tagtagtgggtaatcctgccaatacaaatgcatttattggaaaacatgcagcaaataatgatagccaactttggatggctatgacgatgcttgatgctaatagagcaaaatcaattcttgcaaagaaaacaaataataatgtttctgatattaaaaatatgataatttggggaaatcatagtcctacgatgtatccagattcagaaaatgttcaaatattaggagaattaggcagtttagtaataaatgatatcaattgggtggaatctgatttcattccaaaagttcaacaaagaggaaaggcagtaattgatgcaagaggcgcctcctctgctacatctgctgcaaaagcagcaattgatactgtaattgcttgtgagaatccaacagaccctggcgattgctttagtgcagctatagcaagtgatggttcgtataatgtgcctaaaggaataatatgcggctatcctttaatgaccttagaagatggttcaatagaaataaaaagagatatctctttatcagaatttgcaaaaaataaatttcaaatatctatagatgagcttctttcagaaagagaagctgtgaaacatcttatgcaatgat

SEQ ID NO: 206978 - DNA, 376 bp, Unknown
  Bacterial polypeptide expressing nucleotide sequence isolated from the Sargasso Sea
ggtaacggaagtcattcaggatgtaggctggcttcagggagattttatcaaatccgtccagcagcgtggtgcagccatcatcaaagcccgtggagcttcatcagcagcatctgctgccaatgcagtcatcgataccatacaacggctcaacaaccccacccctgacggagaatggttcagtactgccatccccagtaatggaagttacgggattcctgatggaatcatgttcagctatcctttaagaagtctgggtaattacgagtacgaagttgctcaaagtctggaactgaatgaatttgggcagcaaaaaattcaagcaacccgggaagaacttgaaatggaacgcgaagccgtcagtgatataatgggctga

SEQ ID NO: 206979 - DNA, 205 bp, Unknown
  Bacterial polypeptide expressing nucleotide sequence isolated from the Sargasso Sea
atgaataaacctgttcgtgtaactataactggagcagcaggacaaataggttaccaattggcatttcgaattgcttctgggcaaatgctaggctcaaataagcaaatcatactgcaattacttgagattactccagcacttcctgcccttcaaggtgtccttatggagcttgaagattgtgcttttcctacacttgctggtgtca

SEQ ID NO: 206980 - DNA, 361 bp, Unknown
  Bacterial polypeptide expressing nucleotide sequence isolated from the Sargasso Sea
aatgataacctatggatcgaagatagttatttacctttagttcaacaaaggggtaaggccgtaatagacgccagaggagcatcatctgctgcttcagctgctaatgctgcgatagatacggtcaaggcagtaatcaatcccaccaaagaaggtgactgttttagcgctgctgttgttagtgatggaagttatggagttccaaagggattaatatttggatttcctttaagaactaattcaaatggaaaaatcgagattattcaggggatagagctgaatgagtttgctcaaaccaagataaaagtcactaccgaagaattagagtctgaaagggaagctgtttcagatctaataggctaat

SEQ ID NO: 206981 - DNA, 818 bp, Unknown
  Bacterial polypeptide expressing nucleotide sequence isolated from the Sargasso Sea
tatggcaattaaaaatatatcaattactggtgctgctggaaatatagcatactcgcttatttttagaatcttacctaatttaccgtttaaagcgacagataagataaatcttagacttctagatatacctgaatcacaaaaatcactcgagggattgaaatttgagattgaagattgcgcatttgaatctttaaatgatttagtaacaactgataatgctgagttagctttttctgatgcagactatattttaatggtaggagcaaaacctagatcaaaaggcatggaaagatcagatttgattttagataacgcatacatatttaaatctcaggcggagataataaataatgtgtgttcaaaaaagactaatattattgttgtaggcaaccccgcaaataccaatgctttgataattaatcataatacaccaaatatcccaaatagaaatatcacctctttaatgaagcttgatcataatagagcaagaagtatattagctgcaaaactaaatgaaaaagttgaagatatagaaaatatagtaatttggggtaatcactctacaacacaagttccagacttgtataattgtaaagttagttcaaaagagataaatctagatcatagttggattcatgagacatttatacctagagttcaaaaaagaggaggggagataattgaatttaggggtttatcaagtgcggcttcagcagcctcagcaatatatgatcacatcaatgtcctagagaatggatcagaagactgggaagcgcttggtgtactgtcaagtggagaatacaatatcacacctgata

SEQ ID NO: 206982 - DNA, 759 bp, Unknown
  Bacterial polypeptide expressing nucleotide sequence isolated from the Sargasso Sea
attggtttcttcttgttggcagcattcccagaggaatagtttataacggtaaaaagattgaggagagatcggatcttctaagtattaatggtggtatctttgttgatcagggcaaagcaataggaagttttggaaaagataaggcaaaaattcttgtcgttggcaatcccgcaaacactaacgcttttattggaaaaaacgcagcagataatgaaagtcagctgtggatggcaatgacaatgcttgattcaaatagagctaaatcagtcatttctaaaaagactggtgtgaatatttctgagattaaaaacatgattatctggggaaatcatagcccaacaatgtaccctgactctgaaaatgtgattattaataatcaattaggtagtacagtaattaatgatatgagttgggtagaaaaagactttattccttcagttcagcaaagaggaaaagcagtaattgatgccagaggggcatcttcagcaacatctgcagcaaaagcagctattgacactgtgatggcttgtgagagccccacagaggaaggaaattcatttagtgcagcgattgctagtgatggctcatatgacgtgcctgagggtattatatgtggttttcctctagtaacactaagtgatggaactattgatataaaaagagatattgcattgtcagattttgcgaagtcaaagtttcagatttcaattgatgaacttctttctgaaagagatgctgtgaaacatctgatgaaatgac

SEQ ID NO: 206983 - DNA, 473 bp, Unknown
  Bacterial polypeptide expressing nucleotide sequence isolated from the Sargasso Sea
agaaattgatgcaatggttatgggtgggcatggagatacaatggtaccccttccaagatttaccaaggtctctggaaaacctttaatggatttattaaaagatggaaaaatttctgaagaaaaattagagagtattaatcaacgaacaagagatggtggtgctgagattgttaaatatttggaaaagggatctgcattttatgcaccagcggcttccggagtagagatggcagaagcatttttaaaagatcaaaaaaaacttttaccatgtgcagcacatctacatggagaatatgggattaataatgtttatgctggtgttcctgttatcatcggaaaagaaggtgttgaaaggattgatgaaattgatcttaatgagaatgaaaaaacagaatttaataattctgtggaagcagtcatcaaattgtgggatgcagcatcaaaaatagatcctgatttgaataaagactaaa

SEQ ID NO: 206984 - DNA, 355 bp, Unknown
  Bacterial polypeptide expressing nucleotide sequence isolated from the Sargasso Sea
gatggccttcaggtgtccgatcaaatgcggaatttgttatgcctacaatgaaataaaggaaataaatgacaaaaatatctttaattggtgcaggccaaataggcggaacacttgcacatttaacaggaacgaaagaactagtgatgaagtagttttatttgatgtagctagtggtattgcaaaaggaaaagcattagatattgcacaatcttcatctgtagatggtttcaatgttaggttttcaggaactgataactatgaggacataaaagattcagatgtaataataattacagcaggcattccaagaaaacctggaatgagccgagacgatcttcttggaataaatttaaaa

SEQ ID NO: 206985 - DNA, 481 bp, Unknown
  Bacterial polypeptide expressing nucleotide sequence isolated from the Sargasso Sea
tgtgcctgtaagagaaattgaggcaatggttatgggtggtcatggtgacaccatggttcctatgccaagatttacaaaaatttcaggtaaaccattgttagatcttgtaaaggatggaaagatttcttcagaaagagttgaggaaattaatcaaagaacacgagatggtggtgcggaaatagttaaatatttagaaaaaggatcagccttttatgcaccagcagcttcaggtgttcaaatggcagaagcatatttaaatgatcagaaaaaattattaccctgcgctgtacaattaaatggagaatatggtgtgaaaaatgtttatgcaggtgttcctgttgtcattggaaaagatggtgtagaaaaaattgaagagattgatttagatgaaaaagaaaaaaaagaatttatgcattcaatagatgctgtaaaagctttatgggaagctgcatctaaaatagatcctgatttatctaaataa

SEQ ID NO: 206986 - DNA, 364 bp, Unknown
  Bacterial polypeptide expressing nucleotide sequence isolated from the Sargasso Sea
gaaattatcagaagaaagattagaagaaattaatcaaagaaccagagacggcggtgccgaaattgttaaatatttagaaaaaggttcagcattttatgctccagcagcatcaggagttcaaatggctgaagcatacttaaaagatgaaaaaaaattacttccatgtgctgtacagcttaatggagagtatggtgttaaaaatatttttgcaggagttccggttataattggaaaaaatggcgtggagaagattgaagaaataaatttagatgaaaaagaaaaaagtcaatttatgcattcaatagatgcagttaaaaaattatgggaatcagcttcggcaatagataatgatctttctaaataa

SEQ ID NO: 206987 - DNA, 367 bp, Unknown
  Bacterial polypeptide expressing nucleotide sequence isolated from the Sargasso Sea
ggagtaataagctttgaaaaacttgagagtataaatcaaagaacaagagatggaggagccgaaattgttaagtttttagaaaaaggatcagctttttatgcaccagcagcatcaggtgtagaaatggcatcatcatatttaaacgacagtaaaaaattattaccatgcgccgcatatttaaatggcgaatatggaattaaagatatatttgcaggagttcctgtaattataggcaaaaatggagtggaaaaagttgacgaaattgaattagacggcaaagaaagtaaagaatttttaaactcaatatcagcagtaaaaaaattatgggaagtagctacaaaaattgatccatctttgttagcataaa

SEQ ID NO: 206988 - DNA, 439 bp, Unknown
  Bacterial polypeptide expressing nucleotide sequence isolated from the Sargasso Sea
atgtctagacctaaaatatcattaattggcggcggtcaagttggtggaaatatcgcactgctttctgcacagaaagaacttggcgatatcgtcattgttgatattcctgaagcagaaaacttcatgaaaggaaaagctttagatatttctcagcttcttcctcatgatggctatgactctaaattatcaggtacttcaaagtttgaagatattaaagattctgatgttgtagtaataaccgcaggatttccaagacagcctggaatggatagagaagatttacttcaaaaaaatctggatataatgactaatgttgctaatcaagtcaaaaattttgctccagatgcttttgtaatcgttgtttctaatcctttagacgcaatggtttatgcttttcataaaatttctgggttttcaaaaaataaagtggtgggaatgg

SEQ ID NO: 206989 - DNA, 136 bp, Unknown
  Bacterial polypeptide expressing nucleotide sequence isolated from the Sargasso Sea
ttgagaaaaaaaattaccttgataggagccggacaaatcggaggaactcttgcacatttaatcgctttaaaagaattaggcgatgtagttttatttgatgtcgcagcaaggtatagcaaaaggcaaagcattagat

SEQ ID NO: 206990 - DNA, 515 bp, Unknown
  Bacterial polypeptide expressing nucleotide sequence isolated from the Sargasso Sea
atttaaactctttttatctgaagaattaaaagttcctgtaagagaaatgaaagctatggttatgggaggtcacggtgatacaatggtgcctcttccaagatttacaaaaatttcaggcaaaccattaatggatttattaaaagagggtagaatttcttctgaaagattagaaagtattaatcaaagaacaagggatggaggtgctgaaattgtaaaatatttagagaaaggctcagcattttatgctccagctgcttcaggagtagaaatggcggaggcgtatttaaaagataagaagaaaattttaccatgtgcagcttacttacatggcgaatatggaattaataatgtttatgctggtgtccctgttgttatcggcaaagatggtgttgaaaaaattgaagagatagatctaaacgaaaatgaaaaaaatgaatttaataattcagtggaggcagtaatcaaattatgggatgcggcatcaaaaatagaccctagtttgaataaagactaaa

SEQ ID NO: 206991 - DNA, 466 bp, Unknown
  Bacterial polypeptide expressing nucleotide sequence isolated from the Sargasso Sea
tatgaaggttactattgttggagcaggtaatgttggtgcatcctgcgcagaatacattttaataaaggaaattgtagatgaaatagtcctactagacataaaagatggttttgctgaaggtaaggctcttgatttaacacaaacaacctcaacattaggattcaaatcaaaggttataggagtcacaaatgattataagagtacatcaaacagtgatgttgtggtaattacctcaggtatcccaagaaagccaggtatgactagagaggaattaattggaattaatgcaggaattgtaaaatctgtgtcagagaacttattaatgcactctcctgatgcaataataattgtagtatctaatcctatggatacaatgacatacctagttaacaagtcattcaatatcagtaaaaatagagttattggaatgggtggtattcttgatagttctaggtttaaaacttat

SEQ ID NO: 206992 - DNA, 897 bp, Unknown
  Bacterial polypeptide expressing nucleotide sequence isolated from the Sargasso Sea
aatgaaagtaactgtcattggtgctggaaacgttggtagttcatgtgttgaatatattgctatcaagtctattgccagtgatattgttcttttggacatcaaaaaaggtcttgctgagggaaaagcattagacttgatgcaaacatctactacattaggattcaattccagaattttaggagtaacaaatgattataaagctacttcaaatagtgatgttgtagttattacatctggagttcctagaaaacctggcatgacaagagaggaacttatcggaattaatgctggaattgttgaatctgtagtatcaggtgttttaatacattctccaaatgcaattattgttatggtttcaaatcccatggacacgatgacttatttaactctaaaactttcaaaactttctaaaaataaagttataggaatgggcggcgcattagatagttcaagatttaagacatatttgtcaattgctttaaataagcctgctaatcaaattgaaggtatggtaattggaggtcatggagatactaccatgattccattgacaagattggccacttataatggtatcccagtttcacattttctctctgaaaaagaattagataaaatttcatcagatacaatggttggtggcgcaacattaactaagctacttggaacatcagcttggtatgctcctggcgcctcagtttcttatctagtagatagtattttaaacgatcgacatttgcttattccttgttcggttttacttgaaggtgagtatgatcaaaaagatatttgtatgggagttccttgtgttattggtaaaaatggtgttgaaagcgttttagatttaaaacttaattttgatgagatgaaaaagtttcaaaatagttctgcttcagt

SEQ ID NO: 206993 - DNA, 601 bp, Unknown
  Bacterial polypeptide expressing nucleotide sequence isolated from the Sargasso Sea
tatgaaagatagagttaaggttgttgttactggtgctgccggtcaaataagctactcactaattcccagattagtcgatgggtatacctttggggagaaaattgttgatctagagttagtagaaatacctcaggtagttgataaattaaagggtcttattatggagcttgaagattctaattttccaaatatgggaaatgtaaattacacatctgattttgattcagcagctaaggatgctgattggttcctcctagtgggaagcattccaaggggcatcgtttttaatggaaaaaaaattgaggaacgatctgatctattgcaaataaatggtggaatttttgtcgggcaagggcaagcgattggtaaatatgctaaatcaaatgccaaaatcttggtcgtaggcaatcctgcaaatactaacgcgttaattggaagacatgcagctggtaatgactctcaactgtggatggctatgacaatgcttgattcaagtagagcaaggtccgtgttgtcaaagaagcttaatgtaggaattgaagatatcagtaaaatgattatatggggtaatcatagcccaaccatgtatcctgatttttga

SEQ ID NO: 206994 - DNA, 481 bp, Unknown
  Bacterial polypeptide expressing nucleotide sequence isolated from the Sargasso Sea
aatgagacgagccaagatttcaattattggtgccggaaatgttggggccacgaccgcacattggtgtgcagctgcagagttaggcgatgttgtccttcttgatatcccagcaacagagggaatgccagcaggcaaagctcttgatctctttcaggcttcaccaatcatgggttttgattcgaagatcacaggaacaaccgattggtctgatacggctgcaagtgatgtcatcgtggtcacggccggaattgctcgaaagcctggaatgagcagggacgacctcttgtccacaaatgcaaaaattgtaggtgatgttgctgggcagatcaaaaataccagtcccgatgcgattgtcatcgttgtatccaacccactcgacgccatggtgcaacgaacatttcaggtacttggttttccaccatcgcgtgtgctaggccaggcaggcatccttgacacggcacggtaccgagcttttctggct

SEQ ID NO: 206995 - DNA, 789 bp, Unknown
  Bacterial polypeptide expressing nucleotide sequence isolated from the Sargasso Sea
tatgaaagaaataaacgtactagttactggagctgcaggtcagatctcttattctttacttcctaggttaatcagtggagaaacctttggttcaaatacaaaggtaaaccttaagttagtcgaaattcctccagtattggataaattacaagggaccgtttttgagcttgtggattgtggattttcaaattgtggatcaattatgtctacgtctgatataaatgaagcggctgaagattgtgactgggctttgctagtgggcagcataccgagagggataacaattaacggcaaaaagattgaagaaagaggagatcttttacacgttaacggaggtattttcacagatcaaggaaaagccattggaactaaagggaaagaagacgcaaaaatccttgttgttggaaatccagcaaatacgaatgcgcttataggaaaatctaactcgaataataactcacagttgtggatggcaatgaccgcattggatgcaaatagagcaaaagcccaagtttctatcaaaactaatcgatccatagaggatataaaaggaatgaccatatggggaaaccatagtccaactatgtatcccgatctagataatgcatctattgatgggaaatcagtttcagagatcataaatgatagcaattggatagagaatgacttcttagtcagagttcaacaaaggggaaaagaaatcatagatgctagaggagcttcttcagcagcatctgctgcaaatgctgctatagatacagtgaaaaatgtagaaaatgatactgagga

SEQ ID NO: 206996 - DNA, 382 bp, Unknown
  Bacterial polypeptide expressing nucleotide sequence isolated from the Sargasso Sea
aatgaataaggttacagttgtcggagctggaaagtatggatcgatgacagcattaagaatagctgagtacgatattgtacaagaagtcgtaatgacagatattgttgaaggccttcctcaagggcttgccctagatatcaatcagtcacgatttgttgaacaattcaacacaaaactaataggaactaatgattataaggatacagaaggaagtgatgtagtcgttataactgctggtttaccacgtaagccaggaatgtctcgaatggatttgttagaggtaaatgcaaaaattgttgaaggcgtgactgaggaaatattaaagtattctgacaatccttcgatcattgttgtgacgaatccacttgatcaaatgactact

SEQ ID NO: 206997 - DNA, 330 bp, Unknown
  Bacterial polypeptide expressing nucleotide sequence isolated from the Sargasso Sea
aaaacgatttcatacctgtaatacaacaacgcggcgcctcaatcatcgaagcgcgcggagcttcaagtgctgcttccgcagcaaatgcagcaatagatcatatgcacgattgggttctcggcacttcggaaatcgtgagtatgggcgtctgctctgatggaagttatggcattgaagaaggtttaatctattcataccccgcaacttgctcaaatggagagtggagtatcgtccagggacaacagattaatgcctttagccaggaaaaaatgacaaccacggaaaacgagctaaaagaggagcgagatgcagtcgctcacctcttatagg

SEQ ID NO: 206998 - DNA, 375 bp, Unknown
  Bacterial polypeptide expressing nucleotide sequence isolated from the Sargasso Sea
agcttgtaaaagaaaaaaaaattactcatgaaaaactcgatcaaatagtcgaaagaactaaaaaaggtggagcagagatagttaagtacttagaaaaaggatctgcattttacgcaccagcagcatctggagtagaaatggcagaaagttatctaaaagatttgaaaaaacaattaccatgtgcagcatatttagatgggcaatacggagtcaaagatctttatgcaggcgtacctgtaattatcggttccaatggagttgagaaaattatagaattaaatcttcatgaacaagaaaaaaaaaattttgaaaattcaataaaatcagtgaaggacttgtttgttgctgctcaaaagatagataaaaatttataga

SEQ ID NO: 206999 - DNA, 364 bp, Unknown
  Bacterial polypeptide expressing nucleotide sequence isolated from the Sargasso Sea
ataaaggatgaggaatggctaaagggggatttcataaaaacggttcagcagcgcggatccgagatcattaaggcccgtggagcgtcttctgcagcttctgcagccaatgccgcactggatacaatcacaaaaatcatcgcaccgaccaataaaatggactggtttagtgcagcaattccaagtgatggaagctacggagttacccagggactaattttcagctacccacttagaagttcaggaaacggtgactacgaggtggttcagggaatcgaacttgataatttttctcaacaaaaaatcaaggccactcgagaagaacttgaaatggagcgtgatgcagtaaagggaatgctgaactgaa

SEQ ID NO: 207000 - DNA, 457 bp, Unknown
  Bacterial polypeptide expressing nucleotide sequence isolated from the Sargasso Sea
aatggttatgggtggacatggcgacaccatggtcccaatgccaagatttacaaaaatctcaggcaaaccattgttagatcttgtaaaggaaggaaagatttctttagaaagagttgaagaaattaatcaaagaacaagagatggtggagctgagatagttaaatatcttgaaaaaggatcagccttttatgcaccagcagcatctggtgttcaaatggcggaggcttatttaaaagaccagaaaaaaatgttgccttgtgctgtccaattaaacggagaatacggtgtgcaaaatgtttatgcgggcgttcctgttgtaattggaaaagatggtgcagaaaaaattgaacagattgatttagatgaaaaagaaaaaaatgaatttatgcattcaatagatgctgtaaaagctttatgggaagctgcatgtaaaatagatcctgatttatctaaataa

SEQ ID NO: 207001 - DNA, 106 bp, Unknown
  Bacterial polypeptide expressing nucleotide sequence isolated from the Sargasso Sea
attgagaaaaaaaattaccttgataggtgctggacaaataggtggaacattagcacatttaattgctctaaaggaattaggcgatgtagtattgtttgatgttgct

SEQ ID NO: 207002 - DNA, 433 bp, Unknown
  Bacterial polypeptide expressing nucleotide sequence isolated from the Sargasso Sea
catggtaccacttccaagactaacaaaagtttcaggaaaaccactcctagatcttgttgaagaaggaaaaatttctagtaaaaaattggaaagtattaatcaaagaaccagagatggtggagctgaaatagtcaaatttttagaaaaaggatctgctttttatgcgccagcagcttcgggagtagaaatggcagaatcctatattaaagatcttaaaaaagtattgccttgtgcagcatatttagatggccaatatggtataaaagatttgtatgctggtgttccagttttaattggaaaaaatggtgtcgaaaaaatagaagaaataaatttggatgataaagaaaaatcagaatttatgaactcagtaaatgcggtaaaaaaactttgggaagcggcttccaaaattgatcctgatttaaaaaatagatga

SEQ ID NO: 207003 - DNA, 455 bp, Unknown
  Bacterial polypeptide expressing nucleotide sequence isolated from the Sargasso Sea
ggttatgggtggtcatggcgatacaatggttcctatgcctagatttacaaaaatttcaggtaaaccattattggatcttgttaaggaaggaaaaatttctttagaaagagtagaggaaattaaccaaagaacaagagatggtggggctgagatagttaaatatttagaaaaaggatcagccttttatgcaccagcagcttcaggtgttcaaatggcagaagcatatttgaatgataagaaaaaattattaccctgtgctgtacaattaaatggagaatacggtgtgaataatgtttatgcaggtgttcccgttgttattggaaaagatggtgtagaaaaaattgagcagattgatttagatgaaaaagaaaaaaaagaatttatgcattcaatagatgctgtaaaagctttatgggaagctgcatctaaaatagatcctgatttatctaaataat

SEQ ID NO: 207004 - DNA, 614 bp, Unknown
  Bacterial polypeptide expressing nucleotide sequence isolated from the Sargasso Sea
tatgaaagtaagtgtaattggagctggtaatgttggagcatcatgtgccgagtatattgcgattagtaaaatcgcaaatgaagttattttattagatattaaagaggggttatctgaaggtaaagctttggatttgacacaaacctcatctactctcggttttgatactgttattaaaggagtaactaatgactacaaaattactcaagacagcgacgttgttgtaattacttcaggtattccaagaaaacctggaatgactagggaggaattgattgatattaatgcaggcatagttaactcagttactgaaaacatactaaagttttctcctaatacaattatagttgtcgtttcaaatcccatggatacgatgacttatttaaccttgaaatcgaacaaattagaaaaaaataaggtgattggaatgggaggagctcttgatagctctagatttaaaacttacctatcaaaagcattaaataaacctcaatcagatattcacgctatggttattggtggacatggtgacacgaccatgatcccccttacaagattagcgtcgtataatggaattcctatttccaatttactatccgatgaaaaacagaaag

SEQ ID NO: 207005 - DNA, 535 bp, Unknown
  Bacterial polypeptide expressing nucleotide sequence isolated from the Sargasso Sea
atgaaagttactattgtaggagctggtaatgttggttcaacttgtgctgatgttattgcgtataaaagaatagctagtgaattagttttgttggacattaaaaaagattttgctgaggggaaagctttagatatgaatcaaacttcttctttacttggatttaacactaagattgtaggaaccacaaataactattctttaacttctaatagtgatgtggttgttattactagtggtatcccaagaaaaccgggaatgactagagaggaattgattggagtaaatgctaatatagttaaaactgtaataagaaatattctgaaattctctccaagcacggttatagttattgtttctaacccaatggatactatgacttatttagctattaaagaaagtggattgccaaaaaataaaattattggaatgggtggggctttagacagtgcaagatttagaacttatttatctttagcaataaataaaccttcgaatgatattcatgcaatggttatcggtggtcatggagatacta

SEQ ID NO: 207006 - DNA, 367 bp, Unknown
  Bacterial polypeptide expressing nucleotide sequence isolated from the Sargasso Sea
gaaaaatttccaaagaaagactttgaagaaataaatcaacgaacgagagatggaggagctgagatagttaaattcttagagaaaggttcagcgttttatgctcctgcagcatctggtgtccaaatggcagaagcatatttgaatgatcaaaaaaaattattaccgtgtgcggttcaattaaatggagagtatggggtaaataacgtttttgctggagttccagttatcattggaaaaagtggtgttgaaaaaattgaggaagtcaatttagatgataatgagaaaaaagagtttatgcattcaatagatgcggtaaaagctctttgggaagctgcatcaaaaatagatcctgatctttcgaagtaaa

SEQ ID NO: 207007 - DNA, 466 bp, Unknown
  Bacterial polypeptide expressing nucleotide sequence isolated from the Sargasso Sea
agttcctgtaaaaaatatagagagcttagtatgggaggtcatggtgatactatggtaccaatgcctaatcataccagagtagatggaaaaccattaaaagaaattataaacaaagaaaaattagaaaaaattattgatagaactcgcaaaggtggggctgaaataattaaatttttagaaaaaggttctgcattttatgctcctgcagcctcaggagtagagatggctgaatcctatataaaaaacatgaaaaaaactttaccttgtgcagcatatcttaatggtgaatatggttataaagatatatatgctggtgtaccagttgtcattggcgaaaatggtgttgaaaaaataattgaaattaaattagataatgtagaaaaaaaaaattttgatgtatcaataaaagctgtcagagaactttttgatgccgcaaaaaatatagacaaagatttaaaaaaataat

SEQ ID NO: 207008 - DNA, 504 bp, Unknown
  Bacterial polypeptide expressing nucleotide sequence isolated from the Sargasso Sea
tatattttctatctcaagaattaaaagttccagtgcaaaaaataaaatcatttgtattaggtggacatggagatagcatggtagccatgttgggattaacagaagtgaatggaaaaaaaattagtgaactagtaaaagaaggtcaaataaaaaaagaaaaacttgatcagatagttgaaagaacaaaaaaaggtggagctgaaattgtaaaatatctagagaagggatctgcattttatgccccagctgcttctggtgtagagatggcagagagctatttaaaagatttaaagaagcaacttccttgtgccgcttatctcaacggagaatataacaccaaaggtttatatgctggagtcccagtaattattggatctggaggtgtagaaaaagtccttgaattagaactagataaagacgaaaagaaaaattttgaaaattctataaaatcagtacaagctctttttagtgcagcacaaaaaattgatccaaatttaaagtaaa

SEQ ID NO: 207009 - DNA, 721 bp, Unknown
  Bacterial polypeptide expressing nucleotide sequence isolated from the Sargasso Sea
aatgaaaaatgaaattaaagtggtggttactggggcagctggtcagatcggttattcgttgattcctagattaattgatggaaatacttttggagataaaactgtcaatctttcattagtagaaatacctcaagttgtatcaaaacttgaagggttagctatggagcttgatgattcatattttccaaatcttgggactattaactacacggataacttctcagaagctgcagatggtgctgattggtttttacttgtaggaagtattccaagaggcattgtttacaatggaaaaaagattgaagaacgttcagacttactccaaattaatggaggaatttttgttgatcaaggaaaatcaatcggagaatttggcaatgaaaatgcaaaaatacttgttgttggaaatccagcaaatacaaatgctttgataggaagaaaggctgcaaataattcatctcaaatctggatggctatgaccatgcttgattcaaatagagctaaatcaatgttggcaaaaaagctttcgtgcaacgtatcggagattaagaagatgatcatttggggaaatcatagtcctactatgtatccagattttgaaaatgcgttaaaagataatcagtctgtagcaaacttaattgaagatacaaattggatagattctcactttataccaaatgttcaacaaagaggaaaagcggtgattgatgcaaggggagcc

SEQ ID NO: 207010 - DNA, 268 bp, Unknown
  Bacterial polypeptide expressing nucleotide sequence isolated from the Sargasso Sea
atggcaaaaatatctttaattggtgctggccaaataggcggaactcttgcacatttaataggaacaaaagaattagtaaatgaagtggttttatttgatgtagctagtggtattgcaaaaggaaaagcattagatattgcacaatcttcatctgtagatggtttcaatgttaggttttcaggaaccgataactatgaggacataaaagattcagatgtaataataattacagcaggcgttccaagaaaacctggaatgagccgagaca

SEQ ID NO: 207011 - DNA, 513 bp, Unknown
  Bacterial polypeptide expressing nucleotide sequence isolated from the Sargasso Sea
tttgatatgtatcacattttatcaaaataaacatacatgtaataattctgttttatgtaaatttatcaatcattttttatataaatatttagcaatttcaaaaagaaggcatattatgaaaagaaaaaaaatatcactcgtaggtggtggacaaattggtgggaacttagcacttttagcatcacaaaaagagctgggagatattgttatatatgacatcccaaatgcagaaggaatgatcaaaggaaaagctttggacatatctcaattaaatccactcgatggatacgatgctaatatatccggatcttcaaaccctgaagacttaaaagattctgatgttgttattattacagcaggcattcctcgtaaacctggcatgaatagagaagatttattagaaatcaatataaaaataataacagatgttgctaataatgtcaaaaaatatgcaccaaatgcatttgtaatagttttatccaatccattagatgctattgtatactcttttta

SEQ ID NO: 207012 - DNA, 396 bp, Unknown
  Bacterial polypeptide expressing nucleotide sequence isolated from the Sargasso Sea
ctggcaaacctcttttagatttagttaaagaaggtaaaatttcatctgaaaaacttgagagcattaaccaaagaactagagatggtggagcagagatagtcaagtatttagaaaaaggatcagcattttatgctccagcggcctcaggagttcagatggcagaagcttatttacaggataaaaaactaacattaccctgtgctgtcaaattagatggtcaatatggatttaaagatgtctatgcgggtgttccagtaataattggaagcaaaggtgttgaaaaaattgtggaaatagaattaaacgatcaagaaaaaaaagaatttattcactcagtagactcagttaagaaattatgggatgccgccactaaaatagatcccgatttaaaataat

SEQ ID NO: 207013 - DNA, 326 bp, Unknown
  Bacterial polypeptide expressing nucleotide sequence isolated from the Sargasso Sea
gcgtatccaaaacgcgggtactgaagtggttgaagctaaagccggtggcggaagcgcgactctgtctatgggtcaagcggcttgccgtttcggtatgtctctggttcgtggtctgcaaggcgaagctaacatcgttgaatgtgcttacgttgatggcggcagcgagcacgctgaattcttcgctcaaccagtgctgttaggcaaaaacggtatcgaaaaagtacagccttacggtgaagtgagcgcattcgaagctaacgcccgtgattctatgttagatacgctgaaaggcgatatcaaactaggcgttgatttcgttaagtaat

SEQ ID NO: 207014 - DNA, 460 bp, Unknown
  Bacterial polypeptide expressing nucleotide sequence isolated from the Sargasso Sea
tatggttatgggagggcatggggatacaatggtgcctcttccaagatttaccaaggtttctggaaaacctttaatggatttattaaaagaaggaaaaatttctgaagaaaaattagagagtattaatcaacgaacaagagatggtggtgctgagattgttaaatatttggaaaaaggatctgcattttatgcaccagcggcttctggagttgagatggcagaagcatttttaaaagatcaaaaaaaacttttaccatgtgcagcacatctgcatggagaatatgggattaataatgtttatgctggtgtacctgttgtcatcggaaaagaaggcgttgaaaggattgatgaaattgatcttaatgagaatgaaaaaacagaatttaataattctgtggaagcagtcatcaaattgtgggatgcagcatccaaaatagatcctgatttgaataaagattaa

SEQ ID NO: 207015 - DNA, 523 bp, Unknown
  Bacterial polypeptide expressing nucleotide sequence isolated from the Sargasso Sea
tttggatacatcaatatttaaatattttttgtcaaaagaaatgaatgttccgattaatcaaatccaatctttagttttggggggtcatggtgatacaatggtagcaatgattaatcatacaaaaattaatggaaaattacttagcgagcttacttccgcgggcaaaattaaaaaggagaaactagacactataattgaaagaacaaaaacaggtggggcagaaattgtaaaacatcttcaaaaaggttcagctttttacgcaccagcagcatcaggagtcgaaatggctgaaagttatttaaaagatttaaaaaaagaattgccttgtgctgcatttttgaatggagaatatggagtaaaaaatctatatgcaggagttccaaccataataggcaaaaatggagttgaaaaaattattgaaataaatcttactgaagatgagaaaaaaaattttaaaaaatcaattaattctgtgcaggaattatttgatgcagcaaaaaaaatagataaaactcttagttaa

SEQ ID NO: 207016 - DNA, 594 bp, Unknown
  Bacterial polypeptide expressing nucleotide sequence isolated from the Sargasso Sea
taggtaacccagcaaatacaaatgccctaatcgctatgtcaaatgcaccagatatcgatcaaaatgcatttactgcaatgatgagacttgatcacaatcgagcacttgcccagctagcatcaaaactagattgccattcaagcatgcttacaaatatgactatttggggcaatcattcgacaactcaatatccagatataaccaatttaaaactctcaggcgaagatgcatcaaaaagactcgatgaaacatggataaagggtgagtttattccaagagttcaaaatagaggtgcagaaattattaaagcaagaggcttatcgagtgcagcttcagctgcatctgctgcgattgatcacatgagagactgggcattggggacagaagataatgattgggtcagtatggccattcccagcgatggatcttatggtattagtgaaggcatcatctattcatttcctgtgacatgtcaaaatggatcctattcgattgttcaagatcttgaaatcgatgatttcagcaaggaatgcatggagataactgaaaaagagctactcgaggaaaaggcagcaattgagcacctcctgtaaa

SEQ ID NO: 207017 - DNA, 412 bp, Unknown
  Bacterial polypeptide expressing nucleotide sequence isolated from the Sargasso Sea
tttacaaaagtttcaggaaaacctttgttagatttagttaaagaaggaaaaatttctcaagaaagattagaagaaataaatcagagaactagagatggtggagcagaaattgttaaatttttagagaaaggttctgctttttatgcaccagcagcctccggtgttgaaatggcaaaggcttatcttaaagatgaaaaaaaaatgcttccgtgtgctgcctatatgaatggtgaatatggaattaaagacatttatgcaggtgttccaattattattggtaaaaatggtgttgagaaaatagaggaaattaatttagatgaaaaggaaaaatctgaatttcttcactccattgatgctgttaaaaaactatgggaagcagcttctaaaatagatccagacttaacaaaataat

SEQ ID NO: 207018 - DNA, 292 bp, Unknown
  Bacterial polypeptide expressing nucleotide sequence isolated from the Sargasso Sea
ggtaaatgaagtagttttgtttgatgtagcaagcggaattgcaaaaggaaaagggcttgatatagcccactcttcctctgttgatggttttaacgtaaaattttcaggcactgatgactataaagatttcaaagattctgatgtgatcattattaccgctggtgttcctagaaaaccaggtatgagcagagatgatttattaggtataaatttaaaaataataaaacaggtagcagaaggaattaagcaaaatgctcctaaagcttttgttatatgtattacctatccattc

SEQ ID NO: 207019 - DNA, 228 bp, Unknown
  Bacterial polypeptide expressing nucleotide sequence isolated from the Sargasso Sea
catgaaagatccagtacgtgtaaccattaccggcgctgcaggccaaatcggctacgcactgctatttcgcgtggcgtccggcgccatgctaggtaacgatcagccggtcagcttacagctgcttgaaatcacttctgcactagatgccgtgaagggcgtggtcatggaactggacgactgtgcttttcacttcttcaggatgttgtgtacaccgatgacgccaatgtg

SEQ ID NO: 207020 - DNA, 427 bp, Unknown
  Bacterial polypeptide expressing nucleotide sequence isolated from the Sargasso Sea
agtatctggaaaacctttattagatttggttaacgatggaaaaatttcaaaagaaagattagaagaaataaatcaacgaactcgagatggtggagctgaaatagttaaatttttagaaaagggttctgctttttatgcacctgcagcctcgggaattgaaatggctaaagcttatctcaatgatgaaaaaaaaatgcttccgtgcgcagctcatttagatggtgagtatggaataaaagatatttatgctggtgtgccgattatcattggaaaaagtggagttgaaaaaatagaagaaattaacttagatgaaaaagaaaagtctgaatttttacattcagttgaggcagtaaaaaaactatgggaagcagcttctaaaatcgatccagatttagttaaaaatgaatattcacgaacaccaagctaa

SEQ ID NO: 207021 - DNA, 381 bp, Unknown
  Bacterial polypeptide expressing nucleotide sequence isolated from the Sargasso Sea
attaaagaaaattctccaaatgcatttgtaatttgtataaccaatccgcttgatgtaatggttatggcattccaaaaatactctaaattaaatccaaaaaaagttgtagggatggcggggaaattagatagttcaagaattaagttatttttatctttagaattaaatgtggctgtaaaagaaatagaaactacggtcatgggtggtcatggggatacaatggttccattgccaagacttacaacaattaagggaaaacctttattcgaattagtaaaagagggaaaaattacaaacgataggataaattcgattgttcaaagaacaagagatggtggtgctgaaattgtaaggttgttagagaaaggatccgcgtattat

SEQ ID NO: 207022 - DNA, 364 bp, Unknown
  Bacterial polypeptide expressing nucleotide sequence isolated from the Sargasso Sea
atttcttctgaaagattagaaagcattaatcaaagaacaagagatggaggtgctgaaattgtaaaatatttagagaaagggtcagcattttatgctccagcagcttcaggggtagaaatggcggaggcatatttaaaagacaagaagacaattttaccatgtgcagcttatttgcatggtgaatacggaatcaataatgtttatgctggtgtccctgttgttattggaaaagatggtgttgaaaaaattgaagagatagacttaaacgaaaatgagaaaactgaatttaataattcagtagaggcagtaattaaactatgggatgtggcatcaaaaatagatcctagtttgaataaagactaaa

SEQ ID NO: 207023 - DNA, 682 bp, Unknown
  Bacterial polypeptide expressing nucleotide sequence isolated from the Sargasso Sea
tatgaaagtaacagttgtaggggcaggtgccgtgggcgcgagctgtgccgagtacattgccatcaagaattttgcaagcgaagtagttttgttggacatcaaggaaggatttgccgaaggaaaggcgatggacttgatgcagaccgcttccctaaacggtttcgataccaaaatcacaggagtaaccaacgattattcaaaaactgccgatagcgatatttgcataataactagcggtattccgcgtaaaccaggaatgacgcgtgaagaactgataggtattaacgctggaattgtgaaggatgtttcctcaaatcttgtaaaacactctcctaaaactattataatcgtagtgagcaacccgatggatactatgacctatttggtgcataaaacctctgggctcgacaaaaataaaatcataggaatgggcggggccttggacagtgcgcgtttcaaataccgtttggccgaagctttgggtgcacccattagcgacgtggacggaatggtaatcggtggccatagcgataccggaatggttcctttaacgcgtttggctactagaaacagtattcccgtaacaaaatttatttcagaggaaagaatgaaccaggtaatggaagacactaaagtaggcggcgctacgctaaccaaacttttgggaacttcagcttggtac

SEQ ID NO: 207024 - DNA, 362 bp, Unknown
  Bacterial polypeptide expressing nucleotide sequence isolated from the Sargasso Sea
aatatcttcagaaaaattagaaagtataaatcaaagaactagagatggaggtgctgagatagttaagtatttagagaaaggctcagcgttttatgcaccagcagcttcaggagttgagatggctgctgcatatttaaatgatgaaaaaaaacttttaccatgtgcagcatatatgaatggcgagtatggagttgaaaaaatttatgctggtgttccagtaattattggaaaaaatggaattgaaaaaattgaagaagtagaattggatgataaagaaaaagcagaatttaatcattctattgacgccgtgaaaaaattatgggaggcagcatctgctattgatccagaattaaaaaaataat

SEQ ID NO: 207025 - DNA, 739 bp, Unknown
  Bacterial polypeptide expressing nucleotide sequence isolated from the Sargasso Sea
atgaaggttacaattgttggagcaggtagtgttggttcatcttgtgcagagtatatagctataaaggatatagcagatgaaattgttttattagatattaaagagggttttgctgaaggaaaaagtcttgatttaatgcaaacatcaagttcccttggttttaatgcgcaaatctttggtgttacttctgattatgaaaaaactaaatctagcgatgtcgttgtaattacatctggtattcctagaaaacctggtatgactagagaggagttaataggtattaatgcaggaatagttgattcagttaccgagaatctattgatacactctcctgatgcaataatcattgttgtatctaatcctatggatacaatgacctatttagttgtaaagaaaacaggattacctaggaatagggtaataggtatgggtggcattctagatagctcgagatttaaaacttacatttctatagcacttaataatgagcctcaaaagaatattgatgctatggtaataggtggtcatggtgataccaccatgattcctttaacagataatgcaaaggtaaatgatatacccttatctgatttactatcaactgatgagatttctaagatttcatcagatacaatggtaggaggtgcaacattaacaaaattgttaggtacctcagcttggtatgcgccaggagcatccgtcgcattccttgttaaatcaatacttaatgatcaaaaga

SEQ ID NO: 207026 - DNA, 382 bp, Unknown
  Bacterial polypeptide expressing nucleotide sequence isolated from the Sargasso Sea
ctgtctcaagtgaaaggcgtgactttctctgatgaagaagtcgcttctctgaccaagcgtatccaaaacgcgggtactgaagtggttgaagctaaagccggtggcggaagcgcgactctgtctatgggtcaagcggcttgccgtttcggtatgtctctggttcgtggtctgcaaggcgaagctaacatcgttgaatgtgcttacgttgatggcggcagcgagcacgctgaattcttcgctcaaccagtgctgttaggcaaaaacggtatcgaaaaagtacagccttacggtgaagtgagcgcattcgaagctaacgcccgtgattctatgttagatacgctgaaaggcgatatcaaactaggcgttgatttcgttaagtaat

SEQ ID NO: 207027 - DNA, 922 bp, Unknown
  Bacterial polypeptide expressing nucleotide sequence isolated from the Sargasso Sea
tcagtaaaagtagttgtacagggtgcagcaggtcaaatagcatactctttaataccaagacttgttgatggaagaacatttggcaataaaaaagtaaatttaacattagtagaaattcctcaagtggttgaaaaactcaagggcctagttatggaattagaggattcttattttccaaatatgggtgaagttaaatacacagataacttcgaagaggcctcaaaagatgctgattggtttcttcttgttggaagtattccacgaggtattgtttataacgggaaaaaaattgaagaaagatcagatttgttaagcatcaacggaggaatttttgtagatcaaggtaaggcaattggcgagcacggtaaagctagtgcaaaaatacttgttgttggtaaccctgctaatacaaatgcatttattggaaaaaatgctgctaataatgactctcaactttggatggcgatgacaatgttggattctaatagagcaaaatctgtaatttctaaaaaaaccaatactgatatatctgatgtaacgaatatgataatttggggtaatcatagtccgactatgtatcctgactctgaaaatgtatgtatcaatggagtccttggtagcgaagcaattaatgatatgacttgggtagagtctgaatttattcccacagttcaacaaagaggaaaagcagtaatcgatgctagaggagcatcatcagcaacatctgcagcaaaagctgcaattgatacagtcatagcatgtgaaaatccgaccccatctggtgtctgttttagcgcagcaatagctagcgatggctcttacgatgtgccagagggaattatatgtggatatcctttgatgactctagaagatggtactgtcgatattaaaagagatatagcgctgtctgacttgcaaagtc

SEQ ID NO: 207028 - DNA, 169 bp, Unknown
  Bacterial polypeptide expressing nucleotide sequence isolated from the Sargasso Sea
atgagaaaaaaaattgctctcattggagcaggcaatatcggtgggactcttgcacaacatgttagtttaaaagaattaggtgatgtagttttattagatatttttgaaggaatgcctaaaggtaaatctttagatcttgctcagtcatcttccattgaaggatttcatg

SEQ ID NO: 207029 - DNA, 369 bp, Unknown
  Bacterial polypeptide expressing nucleotide sequence isolated from the Sargasso Sea
aacaggtaaaatcacaaaaagaaacacttaatctaatagttgaaagaacaaaaaaaggtggagctgaaattgtaaaatacttagagaaaggatcagctttctatgccccagcagcttcaggggtagagatggcagaaagttatttaaaagatctaaaaaaacaaatgccatgtgctgcttatttagatggagaatatggagttaaagatttatatgttggagttccagtaataattggatcaaatggagtcgaaaaagttatcgaattaaaattgtcagaagtagaaaaaaaggattttcataaatctatcgattcagtaaaagaattgtttaaagcagcaaaaaaaatagatcctagcattgaataaa

SEQ ID NO: 207030 - DNA, 137 bp, Unknown
  Bacterial polypeptide expressing nucleotide sequence isolated from the Sargasso Sea
catgacaaacaaaaaaatatcacttataggagctggacaaattggaggcacacttgctcatttagctgccatgaaagagcttggagatgtagttctttttgatctgatgtctggacttgcaaaaggtaaagctcttg

SEQ ID NO: 207031 - DNA, 447 bp, Unknown
  Bacterial polypeptide expressing nucleotide sequence isolated from the Sargasso Sea
ggtggtcatggcgatacaatgttcctatgcctagatttacaaaaatttcaggtaaaccattattggatcttgttaaggaaggaaaaatttctttagaaagagtagaggaaattaaccaaagaacaagagatggtggggctgagatagttaaatatttagaaaaaggatcagccttttatgcaccagcagcttcaggtgttcaaatggcagaagcatatttgaatgataagaaaaaattattaccctgtgctgtacaattaaatggagaatacggtgtgaataatgtttatgcaggtgttcccgttgttattggaaaagatggtgtagaaaaaattgagcagattgatttagatgaaaaagaaaaaaaagaatttatgcattcaatagatgctgtaaaagctttatgggaagctgcatctaaaatagatcctgatttatctaaataat

SEQ ID NO: 207032 - DNA, 424 bp, Unknown
  Bacterial polypeptide expressing nucleotide sequence isolated from the Sargasso Sea
ttcctctcccagatttacaaaaatttctggtaaacctttactagacttagtcaaagaaggaaaaatatcaacaaaaagattagaagaaattaatcaaagaacaagagaaggtggcgcagaaattgttaaatatttagaaaaaggttcagcattttatgcaccagcggcatcaggagttgagatggcagcatcatatttaaatgatgaaaaaaaactccttccatgtgcagttcatcttgatggagaatatggagtcagtaatatttatgctggtgtaccagttataataggtaaagatggagttgaaaaaatagaagaaataaatctagatgataaagaaaaaaaagaatttatgtcttccatagattcagttagaaagttgtggaaggctgctttagtaattgataaagatctttccaagtaa

SEQ ID NO: 207033 - DNA, 487 bp, Unknown
  Bacterial polypeptide expressing nucleotide sequence isolated from the Sargasso Sea
tgatagcgcaagatttagagcttttattgcagaagctacaaatttatcatcacaagatgttaactgtatggttcttgggggccatggagatacaatggttcctgttagtaggttggcaacagtaggcggtgtaccattatcatctttattaagtagtgaagaaattattgcaatagaaaatagaacgcgtgttggtggtggagaaattgttaaactttttgggaaaggttctgcattttatgctcctgctcaatctgctgtagaaatgattgaaagttttataagagataaaaaaagagttataccctgtgcctcattatgtgaaggcgaatttgatgtagaaggttatttcattggagtcccaacagtcattggttcaggaggtgttgaaaaaatacttacttttgatcttgataaagatgaaaaaatagctttaagcaatacacttattgaggtaaaaaaaacggttagtgaaactggtttataa

SEQ ID NO: 207034 - DNA, 364 bp, Unknown
  Bacterial polypeptide expressing nucleotide sequence isolated from the Sargasso Sea
aatgaataaggttacagttgttggagctggaaagtatggatcgatgacagcgttaagaatagctgagtacaatattgtacaagaagttgtaatgacagatattgttgaaggccttcctcaagggcttgcccttgatatcaatcagtcacgatttgttgaacaattcaacacaaaactaataggaactaatgattataaggacacagaaggaagtgatgtagtcgttataactgctggtttaccacgtaagccaggaatgtctcgaatggatttgttagaggtaaatgcaaaaattgttgaaggtgtgactgaggaaatattaaagtattctgacaatccttcaatcgttgttgtgacgaatcca

SEQ ID NO: 207035 - DNA, 343 bp, Unknown
  Bacterial polypeptide expressing nucleotide sequence isolated from the Sargasso Sea
tcaggagattttatcaaatccgtccagcagcgtggtgcagccatcataaaagcccgtggagcttcatcagcagcatctgctgccaatgcagtcatcgataccatacaacggctcaacaaccccacccctgacggagagtggttcagtactgcaatccccagtgatggaagttacgggattcctgatggaatcatgttcagctatcctttgagaagtctgggtaattacgagtacgaagttgttcaaagtctggaactgaatgaatttgggcaacaaaaagttcaagctacccgggaagaacttgaaatggaacgcgaagccgtcagtgatataatgggctgaa

SEQ ID NO: 207036 - DNA, 433 bp, Unknown
  Bacterial polypeptide expressing nucleotide sequence isolated from the Sargasso Sea
ggacatggagatactatggtgccgcttgtgagatattctgctgttgcaggaataccagttccagatcttattgaaatgggctggagcacaaaagataagattgacaaaattgttcaaagaacaagagatggtggggctgaaatagttggtttattgaagacgggatctgcattttatgctcctgccgaatctgctatacaaatggcggaagcatttttaaaagataaaaagaaacttttaccatgtgcagcgcatgttgaaaaagcttatggacttaatggattgtatgtaggcgtacctgtgataattggcaaaaatggtgtagaaagaatagttgaaattaatttaactgatgatgaaaagaaaatgtttgatcattctgttgaatccgttaaaaaattaaatcaacttgctaaaaaatttgagaattaaa

SEQ ID NO: 207037 - DNA, 523 bp, Unknown
  Bacterial polypeptide expressing nucleotide sequence isolated from the Sargasso Sea
tatgactgctttagatgcaaatagagctaaagctcaactggctctaaaagcaggatcagacataacttcagttagtaacatgaccatttggggtaatcacagtcctaccatgtaccctgatccgtataacgctaagattaatggaatcagtgctacggaagtaatcaatgatgataaatggattgaaaatgaatatctgccacttgtacaacaaagaggtaaagcggttatcgatgcaagaggtgcgtcatctgcagcttctgcagctaatgctgcaattgataccgtaaaagcggttgaaaatgtaacccctgaaaatgattctttcagtgcagccattgccagtgatggaagctatggggttccagaaggattaatcttcggatacccgttaagaactacttccccaggaaaagtagaaattattcaaggtttagaattaaatgaatttgctgaatccaagataaaggcaacaacagaagagcttatttctgagaaagaagctgttgcagatctcttatag

SEQ ID NO: 207038 - DNA, 367 bp, Unknown
  Bacterial polypeptide expressing nucleotide sequence isolated from the Sargasso Sea
ggtgttcctgttgaggatatgattgaaaaaaataaattagcatcaatagttcaaagaactagagatggtggagctgaaattgttgctctactgaaaacaggatctgcattctatgcaccatccgcttcaattgttcaaatggttgaagcaatcttattagataagcaacagatactaccatgtgcagcattattaaatggagaatatggatttaatgatgtttatgcaggtgtacctgttaagcttggtgcaaatggtattgaagaagtgatcgaagttgacttaaataaagatgaacattcagctctttctaaatctgttgattcagtaattgaactgttagatattatgaaaaaaaacagctaat

SEQ ID NO: 207039 - DNA, 373 bp, Unknown
  Bacterial polypeptide expressing nucleotide sequence isolated from the Sargasso Sea
aaagaaaataaaatttccaaaagtaaattagatgaaattgtaaaccgaactagaaaaggtggtgcagaaattgttaaattgttggaaaaaggttcggcattttatgctcctgctgcttcaggtgtggaaatggcagaggcttacataaaagatcaaaaaaaaacattaccttgtgcagcatatttaaatggcgagtatggttacaaagatatatacgcaggtgtccctgtaatgattggaaaaaatggagtagaaaagattttagagatcgaacttgaaaataatgaaaaatcaaattttgatgtttcaataaatgctgtaaaagagttatgtagtgccgcagcaaaaattgatccagtcttgggaaaataat

SEQ ID NO: 207040 - DNA, 352 bp, Unknown
  Bacterial polypeptide expressing nucleotide sequence isolated from the Sargasso Sea
aaaattagagagtattaatcaacgaacaagagatggtggtgctgagattgttaaatatttggaaaaaggatctgcattttatgcaccagcggcttctggagttgagatggcagaagcatttttaaaagatcaaaaaaaacttttaccatgtgcagcacatctgcatggagaatatgggattaataatgtttatgctggtgtacctgttgtcattggaaaagaaggcgttgaaaggattgatgaaattgatcttaatgagaatgaaaaaaaagaatttaataattctgtggaagcagtcatcaaattgtgggatgcagcatcgaaaatagatcctgatttgaataaagattaa

SEQ ID NO: 207041 - DNA, 799 bp, Unknown
  Bacterial polypeptide expressing nucleotide sequence isolated from the Sargasso Sea
aatgaaagaaattaatgttgctgttactggaggagcgggtcaaattgcttattccttacttcctagattggttagtggagaaacttttggggttgatacaaaagtaaatcttagactgatagaaattcctcaagttgtagacaagcttgaaggaaccatcatggaactgattgattgtggatttgaacaaacaggaaccttgatagcgacagcggatattaaagaaggagttaaagatgcacattgggtccttttagtcggcagcattccacgagggatagtcgtcgatgggaaaaaaattgaagaaagaagtgatctactaaagatcaatggaggtattttcactgaccaaggcgaagcaataggtaaattagcgcaaaaagatgcaaaaattttagtagtaggcaatccagccaatacaaatgcgctaattggaagaacaaagtctgaaaaccctacacagagttggtttgccatgactgcgctagatgccaatagggccaaagcacaattagctgaaaaagcgggtgcagaaataagttccgtgactaacatgacagtttggggaaatcatagccctaccatgtatcctgatccttacaatgcccaaattgatggggtaagtgcagttgaagttataagtgacctggattgggttgaaaacaaatatttacctcttgtacaacaaagaggtaaggcagtaattgatgcaaggggtgcctcctctgcagcttcagcagctaatgctgctatagatactgttaaggctgttgataatcagactaaggaaggagattgg

SEQ ID NO: 207042 - DNA, 427 bp, Unknown
  Bacterial polypeptide expressing nucleotide sequence isolated from the Sargasso Sea
atggcaagaaaaaaaatcacacttatagggggcgggcaaataggtggaaatctcgcactgctagcaactcaaaaagaattaggcgatgtagtgatttttgatattcctcaatcagaaggtatggtcaaaggtaaggcattagacataatgcaattaagaccacatgaaggctatgattctaatattactggatcagctgactggaaggatgtgaaagggacagatgtctttattatcactgcaggcatccccagaaagcctggcatgaatagagaagatttattagaaataaacctaggaattatgaaagatgttgcaaaaaacataaaagaaaacgcgcccaaagctttcgtaattgtcatatcaaatcctcttgatgctatggtatatgcttttcataaagtttctgggttcaaaaaaaatcagg

SEQ ID NO: 207043 - DNA, 306 bp, Unknown
  Bacterial polypeptide expressing nucleotide sequence isolated from the Sargasso Sea
aatgggataccgaagaaataaaatatcacttattggtgccggacaaattggtggcacactcgcacttttatctggtctaaaaaaccttggcgacctagttttgtttgacattgttgatggggttccacagggaaaaggtcttgatatagcgcaggctagcacagtagagatgtttgactcaaagattgaaggcgcatctgattatagcgctatagaagactcggatgtgataatagtaacagcaggtgttccaagaaagccaggtatgagtagagatgacttgctggagataaatcttaaagtgat

SEQ ID NO: 207044 - DNA, 103 bp, Unknown
  Bacterial polypeptide expressing nucleotide sequence isolated from the Sargasso Sea
tatatcattacagctggtgtaccaagaaaaccaggtatgagtcgagatgatttacttggtattaacttaaagattataaaacaaagttgcagaagggaataaa

SEQ ID NO: 207045 - DNA, 281 bp, Unknown
  Bacterial polypeptide expressing nucleotide sequence isolated from the Sargasso Sea
gatgtctaaatctaaaattgcacttgttggctctggagctattggtggtacattagcacatttgattggtttaaaagaattaggagatgtagttcttttagatattgcaaaaggaattcctgaaggtaaaagcttagatatagctcaatcttctcctgtagagggctttgatgtaagtatgcgaggtggaagtaattacagccttttaaaaaattcgaatgttgtgatagttacagcaggtattccaagaaaaccgggaatgagtagagatgatttattag

SEQ ID NO: 207046 - DNA, 673 bp, Unknown
  Bacterial polypeptide expressing nucleotide sequence isolated from the Sargasso Sea
aatgagtgaatcaattaaagtagtagtgactggtgcggctggacagattgcctactcactaattccaagattagtaaacggaagaactttcggagataaaaaagttgacttggtcttagtggaaataccccaggtcgttaataagcttaaaggattgataatggaattagaggattcttattttcccaatatgggaaatgttacctatacagataattttgaggaggctgcattagatggagattggtttttgcttgttggcagcattccaagaggtattgtatataacggaaaaaaaattgaagaaagatccgatcttttgagtattaatggaggaatttttgttgatcaaggccaagcaatagggaggtatggtaaagatgatgcaaaaatattagttgttggaaatcctgcaaatacaaatgcatttattggaagaaatgccgctaataaagaatcacaactttggatggcaatgacaatgttagactcaaacagagctaaatcaattatatctaaaaaaacaaataaaaatatttcagatatcaagaatatgattatctggggtaatcatagtccaacaatgtatccagatgctgaaaacacgattatctcagacgaattaggaaatagcgttattaatgatatgaattggatagagtctgactttatt

SEQ ID NO: 207047 - DNA, 988 bp, Unknown
  Bacterial polypeptide expressing nucleotide sequence isolated from the Sargasso Sea
tatgaagatagtcgtaactggagccgctggacaaattgcttattcgcttgttcccttcctttgtgaaaaaggaatatttcaatcagaagaaaaaatagacttgcatttagtcgaaattccatcagcaatggaaagattagatggttttgttaaagaattagaagattcggcttattcaactgtaaattccatcaacacacatgacaatattactgctgctgtagaaaatgctgattggtgtttactggttggttcaattcctcgtggaattgtttttcaaggcaaagaaattaaagaaagatctgatctactacaaataaatggtggaatttttacagaacaaggtaaagcgataggatcaaaagctaaagataactgtaaaattttagtggtaggtaaccctgcaaataccaatgctcttattggccatcataatgcaaataatgctaatcaaacttggatggctatgacaatgcttgatgctctaagagcaaaagctcagctatcgattaaattaaattgccatgtagatgatatttatcgtttagcagtatttggtaaccatagtccgactatgtttccagatttagaaaatactattgttaatggaaaaaatgcttatgaatcgattaatgatcattcttgggttgagaaagagttcttgccaaaaatacaacaaagaggcgcagaaattattgaagcaagaggtgcctcctctgcttcatctgcagctagagcagcatgcgatacggttaaagcggtagaacatccaactaggtcaggcgatgtttttaatgctgccataatgagcgatggaagttatggtgttccagcaggaattttctctggctttccattattatctgatggtagtggaaacatagagattgttagagattacaatttaagtgaatttgcaaaatcaaagattgcaatcactgcgaatgagcttctagaagagaaggatctcgttaaagatctaatttaa

SEQ ID NO: 207048 - DNA, 820 bp, Unknown
  Bacterial polypeptide expressing nucleotide sequence isolated from the Sargasso Sea
aatgagctcatcaattaaagtagttgttactggagcagcaggtcaaattgcatattcacttattccaagattagtcaatggcagaacttttggtgataaaaaggttgatttagcgcttgttgaaatacctcaagttgtagacaaacttaaaggtctagtaatggagttggaggactcatattttccttccatgggtaaagttacctatactgataatttttctgaagctgcaaaggatgctgattggtttcttcttgttggcagcattcccagaggaatagtttataacggtaaaaagattgaggagagatcagatcttctaagtattaatggtggcatctttgttgatcagggcaaagcaataggaagttttggaaaagataaggcaaaaattcttgtcgttggtaatcccgcaaacactaacgcttttattggaaaaaacgcagcagataatgaaagtcagctttggatggcaatgacaatgcttgattcaaatagagctaaatcagtcatttctaaaaagactgatgtgaatatttctgagattaaaaacatgattatctggggaaatcatagtccaacaatgtaccctgactcagaaaatgtgattattaataatcaattaggcagtacagtaattaatgacatgaattgggtagaaaaagactttattccttcagttcagcaaagaggaaaagcagtaattgatgccagaggggcatcttcagcaacatctgcagcaaaagcagctattgacactgtgatggcttgtgagagccctacagaagaaggaaattcattcagtgcagcgattgctagt

SEQ ID NO: 207049 - DNA, 760 bp, Unknown
  Bacterial polypeptide expressing nucleotide sequence isolated from the Sargasso Sea
aatgaaaaatgaaattaaagtggtggttactggtgcagctggtcagattggctattcgttgattcctagattaattgatggaaatacttttggagatgcgaccgttaatctttcgttagtagaaattcctcaagttgtatcaaaacttgaaggattagctatggagcttgatgattcatactttccaaatcttggaactattgactacacggataacttctcagaagctgcagatggcgctgattggtttttgcttgtaggaagtattcctagaggtattgtttacaacggaaaaaagattgaagagcgttcagacttactccaaattaatggggggatctttgttgatcaaggaaaagcgatcggagaatttggtaatgaaaatgcaaaaattcttgttgttggaaatccagcaaatacaaatgctttgataggaagaaaggcggcaaataattcatctcaaacctggatggccatgactatgcttgattcaaatagagctaaatcaatgttagctaaaaaactttcatgcaacgtttcggaaataaagaagatgatcatctggggtaatcatagccctactatgtatccagattttgaaaatgcagtaaaagataatcagtccgtagcaaacttaattgaagatacaaattggatagattctcactttataccaaatgttcagcaaagaggaaaagcagtgattgatgcaaggggagcttcttcagcaacttctgctgcaaaggctgcacttgataca

SEQ ID NO: 207050 - DNA, 520 bp, Unknown
  Bacterial polypeptide expressing nucleotide sequence isolated from the Sargasso Sea
atgaaagtaactatagttggtgcgggtaatgttggagccacagcagcagatgttattgcatctaaaggaattgcagatcacgttgtattattagatattaaagatggttttgctgagggaaaagcattagacttaatgcaaacagctacgaccaaaggttttgactccattattacaggaactacaggtgattactctctcactaaggacagtgatgttgttgtgatcacatcaggaattcctcgaaaaccgggtatgactcgagaagaactaattggaattaatgcaaatattgttaaagatgtttcctccagtattctcaaatataataaggaaccaatcatcgtaatggtttcaaatccaatggataccatgacatatctttcattaaaatctactggtctaaatccaaaaaaagtcattggtatgggtggagcattagatagctctagatttaaaacatacctttctttggctttaaataagccacaaaaagggttggatgctatggttattggag

SEQ ID NO: 207051 - DNA, 997 bp, Unknown
  Bacterial polypeptide expressing nucleotide sequence isolated from the Sargasso Sea
aatgaaaaaagaaattaaagtagtggttactggagcagctggtcaaatcggctattcattgattcctagattagttgatggaaacacctttggcgataaaactgtaaatctttcattagtggaaatacctcaagttgtatcaaaacttgaagggttggcaatggagcttgatgattcatactttccgaatcttggaactgttgactatacggataacttctcagaagctgcaaaaagtgctgattggtttttgcttgtaggaagtataccaagaggcattgtttacaatgggaaaaagatagaagagcgttcagacttactccaaattaatgggggtatttttgttgatcaaggcagggcaatcggagaacttggtaatgaaaatgcaaaaatccttgttgtgggaaatccagcaaatacaaatgctttgataggaagaagtgctgcaaataatccatctcaaacctggatggctatgactatgcttgattcaaatagagctaaatctatgttagcaaaaaaactttcttgcaatgtttcagaaattaaaaagatgatcatctggggcaatcatagtcctactatgtatccagattatgaaaatgcattaaaagacgatcaatcaatagctaacctaattgaagatacaaattggatagattctcactttataccgaatgttcaacaaagaggaaaagcagtcatcgatgcaagaggagcttcttcagcaacctctgctgcaaaggctgctcttgatacagttattgcttgtgaaaatgaaacttcatcagatgattgctttagtgcagcagtttatagcgatggagcatatgatgttcctgaaggaattatgtgcggctttcctttaatgacaacacctagtggagagattgaaatcatcagggatttaacactttctgataatgcaagatctagattgagtttgtcagttgatgaattactttctgaaagagaggccgtaaaagatcttttgtga

SEQ ID NO: 207052 - DNA, 785 bp, Unknown
  Bacterial polypeptide expressing nucleotide sequence isolated from the Sargasso Sea
aatgaaaaacgaaattaaagtggtggttactggagcagctggtcaaatcggctattcgttgattcctagattaattgatggaaacacctttggagataagactgtaaatctttcattagtagagatacctcaagttgtatcaaaacttgaaggattagctatggagcttgatgattcatactttccaaatcttggaactattgactacacggataacttctcagaagctgcagatggtgctgattggtttttgcttgtaggaagtattccgagaggcattgtttacaacggaaaaaagattgaagagcgttcagacttacttcaaattaatggggggatctttgttgatcaaggaaaagcaatcggagaatttggtaatgaaaatgcaaaaattcttgttgttggaaatccagcaaatacaaatgctttgataggaagaaaggctgcaaataattcatctcaaacctggatggccatgactatgcttgattcaaatagagctaaatcgatgttagcaaaaaaactttcatgcaacgtttcggaaattaagaagatgatcatctggggtaatcatagccctactatgtatccagactttgaaaatgcattaaaagataatcagtctgtagcaaacttaattgaagatacaaattggatagattctcactttataccaaatgttcagcaaagaggaaaagcagtgattgatgcaaggggagcttcttcagcaacttctgctgcaaaggctacacttgatacagtgattgcttgtgaaaatgcaactt

SEQ ID NO: 207053 - DNA, 937 bp, Unknown
  Bacterial polypeptide expressing nucleotide sequence isolated from the Sargasso Sea
atgaaagttacagttgttggagcaggtagtgtaggttcttcatgtgcagagtatttagctataaaagatatagctgatgatatcgttcttctggatattaaggaaggttttgcagaaggaaaaagtctagaccttatccaaacttcaagttctttgggatttaatgccaaaatctctggtgttacttctgattatgaaaaaactaaatccagtgatgttactgtaatcacatctggtatacctagaaaaccgggtatgacaagagaagagcttataggtattaatgcaggaatagttgattctgtaactgagaatctgctgaaatattctcctaatgcaataattattgttgtctccaaccctatggatactatgacatatttagttttaaagaaaacgggattacctagaaatagggtaataggtatgggaggtattttagacagttctagatttaaaacatatatttctttagctcttaataatgaaccacaaaaaaatattgatgctatggtaataggaggtcatggagataccactatgatccctttgacggatcatgcaaaagttaacgataagcctttagctagtttattatcagttgatgaaattgagaagatcgcatcagatacaatggtaggaggggcaactttaacaagattattaggcacttcagcttggtatgctccaggtgcttcggttgcatatcttgttcaatctatacttaatgattcgaaaaaaatattaccatgttctgttatgttaaatggagaatatcattctaaagacatatgtataggggttccttgtataattggatctaatggattagaagaaattattgaaattaatctgaataatattgttagagaaaggtttcaaaaaagtgtagaagctgttaagaataccaatcttttacttaaaggtttaacataga

SEQ ID NO: 207054 - DNA, 259 bp, Unknown
  Bacterial polypeptide expressing nucleotide sequence isolated from the Sargasso Sea
catgacaaaaatttctttaataggagctggtcaaattggaggaactttagcacatttaataggcttaaaagaattagttaatgaagttgtattatttgatgttgctagtggtattgcaaaaggcaaaggattagatattgctcagtcttcttcgatagatggttttgatgttaagttctcaggatcagataattataaagatataaaaggatcagacgtaataataattactgcaggcgttccacgaaaaccaggaatg

SEQ ID NO: 207055 - DNA, 292 bp, Unknown
  Bacterial polypeptide expressing nucleotide sequence isolated from the Sargasso Sea
atgacaaaagtaacagtagttggatcaggaaagtatggatcaatgacagctcttagagttgcagaatatgatatagctgatacggtagtcatgacagatatagttgaaggccttcctcaaggtcttgctttagacatgaatcaatcaagatttgtagaaaaattctcatcaaaaattattggaactaataattatgaagatacttctgatagtgatgtagtagtcatcactgcaggcttaccacgaaagccaggaatgtcgcgcatggatttattagaggttaatgcaaata

SEQ ID NO: 207056 - DNA, 997 bp, Unknown
  Bacterial polypeptide expressing nucleotide sequence isolated from the Sargasso Sea
atgagcaaatctataaaagttgttgttaccggagcagcgggtcaaatcgcatattctttaataccaagacttgtagatggtaagacatttggagataagattgtcaatcttgcattggttgaaatacctcaagtagttgataagttagaaggtttagtaatggagttagaagactcatattttccaaacatgggtgaggttacttatacagataactttgaagaagcctctaaagacgctgattggtttttattagtagggagtattccgagaggaattgtttataacggtaaaaagattgaagaaagatcagatcttttaagtattaacggtggtatttttgttgaccaaggtatagcgattggaagatatgggaggaagaatgctaagattttagtagttggtaatcctgccaatacaaatgcatttattggaaaacatgcagcaaataatgatagccaactttggatggctatgacaatgctcgatgctaatagagcaaaatcaattcttgctaagaaaacaaataataatgtttctgatattaaaaatatgattatttgggggaatcatagtcctacgatgtatccagattcggaaaatgttcaaatattaggagaattaggcagttcagtaataaatgatatcaattgggtagaatctgatttcattccaaaagttcaacaaagaggaaaggcagtaattgatgcaagaggcgcctcctctgctacatcagctgcaaaagctgcaatagatactgtaattgcttgtgagaatccaacagaccccggcgattgctttagtgcagctatagcaagtgatggttcatatgatgtacctaaaggaattatatgcggctatcctttaatgaccttagaagatggttcaatagaaataaaaagagatatctctttatcagagtttgcaaaaaataagtttcaaatatctatagatgagcttctttcagaaagagaagctgtgaaacatcttatgcaat

SEQ ID NO: 207057 - DNA, 1000 bp, Unknown
  Bacterial polypeptide expressing nucleotide sequence isolated from the Sargasso Sea
atgagtaaatctataaaagttgttgttactggagctgcaggacaaattgcctattctctaataccaagattggtagatggaaatacatttggagataaaattgttgatcttgcattagtggaaattcctcaagttgttgataagttaaagggtttagtcatggagcttgaagattcttattttccaaaaatgggaaaggttacttataccgataattttgaagaagcatcaaaagatgctgactggttcttgctagttggaagtatacctagaggcattgtctataacggtaagaagattgaagaaagatcagatcttttaagtattaatggtggtatttttgttcaacaaggtgaagcaattggaaaatatggaaaggatgacgctaagatcttagttgttggcaatcccgcaaatacaaatgcttttattggaaaagatgctgctaacaatgacaatcaactttggatggcaatgacaatgctagattctaatagagctaagtctattcttgcaaaaaaaacaaacaataatgtttcggatattaaaaatatgattatttggggaaatcatagtccaactatgtatcctgactcagaaaatgcgctaatctctggaaagcttggtagcgaagtaataaatgatatgaattggatagaatctgaatttattcccacagtgcaacaaagaggaaaagcggttatagatgccaggggtgcatcttctgcgacatctgcagcaaaagcagcaatagatactgttattgcttgcgaaaacccaactgattcaggtgattgttttagtgcagcaattgcaagtgatggtgcatatgatgttcctgagggaattatctgtggttatcccttaattactttggatgatggatcaatagaaattaaaagagacatatcattatctgactttgcgaaatctaaatttaagatatctatagatgaacttttatcagaaagagaagccgtaaaacatctcttaaaatgac

SEQ ID NO: 207058 - DNA, 532 bp, Unknown
  Bacterial polypeptide expressing nucleotide sequence isolated from the Sargasso Sea
agggatattggatagttcaagatttaaattatttctatcacttgaacttaaagttccagtaaaagaaatagaagcattggttatgggtggtcatggagattcaatggttccattgccaaggtttacaaaggtttcaggtaaaccattattagatatagttaaatctggaaaattaactttaaaaagattagaagaaattaatcaaagaactagagatggaggcgccgaaattgttaagcatttagaaaaaggctctgcattttatgcaccagcagcatcaggagtgcaaatggctgaatcatatctaaaagatgaaaaaaaattacttccttgtgcagtttatctcaatggagaatatggtgtaaaaaatatttttgcaggagttccggtcataattggaaagaacggcgtagaaaaggttgaagaaataatcttagatgaaaaggaaaaaagtgaatttttgcattcaatagatgcagttaaaaaattatgggatgcagcttcttcaattgataaagatctttctaaataa

SEQ ID NO: 207059 - DNA, 346 bp, Unknown
  Bacterial polypeptide expressing nucleotide sequence isolated from the Sargasso Sea
ttagaaagtataaatcaaagaactagagatggaggtgctgagatagttaagtatttagagaaaggctcagcgttttatgctccagcagcttcaggagttgaaatggcagcagcatatttaaatgatgaaaaaaaacttttaccttgtgcagcatatataaatggtgaatatggagttgaaaaaatttatgctggtgttcctgtaattataggaaaaaatggaattgaaaaaatagaagaagtagaattagacgataaagaaaaagcagaatttaatcattctatagacgccgtgaaaaaattatgggaggcagcatctgctattgatccagatttaaaaagataat

SEQ ID NO: 207060 - DNA, 309 bp, Unknown
  Bacterial polypeptide expressing nucleotide sequence isolated from the Sargasso Sea
catgaaaaccgtaaaagtagctgttacaggtgcagctggacagatcggctatgctatgcttttccgcctggcttctggagcagttttcggccaagacactgctgttgaacttagactgcttgagttggagcaggcacttcctgctctggaaggagtaaaaatggaattggacgactgcgcctttcccttgctggaaaatattgttactacttcagatacagatcacgcttttaaaggtgttgactgggcactgctggtaggatcagttccacgaaaagctgatatggaacgcaatgatcttttgaaggt

SEQ ID NO: 207061 - DNA, 507 bp, Unknown
  Bacterial polypeptide expressing nucleotide sequence isolated from the Sargasso Sea
aattatttctatctttagaattaaatgtacctgttaaagaaattgaagctatggttatgggcggtcatggagataccatggtaccaatgcctagatttaccaaagtttcaggtaagccattgatagacttagttaaagagggaaaaatttcacaagaaagattagaggagataaatcagagaactagagatggaggagctgagattgttaaatttttagaaaaaggatcagcgttttatgctcccgctgcttcaggagttcaaatggctgaagcatacttaaatgatgaaaaaaaattattgccatgtgcagtgcaattgaatggagagtatggagtagaaaatgtttatgcaggtgttccagtaacaataggaaaagatggggttgaaaaaattgaagagattaatttaaacgaaaaagaaaaaaaagaatttttacactctatagatgcagtaaaaactctttgggaagctgcatctaaaatagacccagatctttctaaataat

SEQ ID NO: 207062 - DNA, 934 bp, Unknown
  Bacterial polypeptide expressing nucleotide sequence isolated from the Sargasso Sea
atgaaagttaccattgtaggagctggtaacgttggtgctactgcagcagacgtaatcgcttccaaagatattgctgaaaatgttgttttattagatattaaagaaggttttgccgagggaaaagctcttgatttgatgcaaactgcctctacaaaaggttttgactcagttattactggaacaactggtgattattctttgactgaaggaagtgatgttgttgtaatcacatctggaatacccagaaaaccaggtatgacaagggaagaattaataggaattaatgcaaatattgttaaggatgtttctaaaaatattttagaatacactcctaatccaatcattgttatggtttcaaatccaatggatacaatgacttatctcgctcttaaatcgacaggattagatccaaaaagagtcatagggatgggtggagcactagatagctcaagatttaaaacttatatttctcttgcaataaataagcctcaaaaaaatattgatgcaatggttattggtggtcatggtgatacaacaatgattcccttacatagatttgcaaaacacaatgataatttgcttaatgaactactaaataatgatgaaattgagaaagttgtaaaatcaacaatggttggtggtgccacattaactaagttattgggaacatctgcttggtatgctccaggatcttcaatagcatatttagttgattcaatattaaacgatcgtaagaatattattccatgttccgtttatcttgagggtgaatatgatcaaagtgatatttgtataggagttccatgtgtgattggaaaaaatggattagaggaagtaattcaactagatttaaatgatgatgaaattaccaagttcaatgaatctgcagatgctgttagatcaatgaattcaactttagtagatcacacctaat

SEQ ID NO: 207063 - DNA, 934 bp, Unknown
  Bacterial polypeptide expressing nucleotide sequence isolated from the Sargasso Sea
atgaaagttacaatagtaggagctggtaatgtcggagcttcttgtgctgaatatatagcaattaagcaaattgcagaagaagtaattctgcttgatattaaggaaggatttgctgaaggaaaagcccttgatcttactcaaactacaagtactttaggatttacatccagaatattaggtgttacaaatcaatatgaaaagacttctaatagtgatgtagtcgttataacttcaggaattccaagaaaaccaggtatgacaagagaagagcttatagggataaacgctggtattgttaaatctgtatctgaaaatcttctcaaattttctccagatgcagttatcattgtcgtttctaatcctatggatacaatgacatatcttgtaaacaagtcttttaatttatctaaaaataaaataataggtatgggggggattcttgatagttctagattcaaaacatacatttcaaaatcaacaaaatattctcagcatgaaattgatgctatggtaattggtggacatggagataccactatgataccagttacttctaatgcaaaatgtagtgatattttactttctgaaattctcaccaaagaagagattttaaatataactacaaataccatggttgggggtgctacactgactaagcttctaggaacttctgcttggtatgctccaggagcctctgtatcatatttagttaatgcaattgtaaatgatacaaaagaaattcttccatgttcggtattattaaacggagagtatggtgccaaagatctatgtattggtgtacctgttattattggtaaaaatggttttgaagatataatcgaaatagatctaaataatattgaagtagaaatgttcaaaaagagcgttgaagcagtaaaacaaactaattcagcattagatggtttaatttaga

SEQ ID NO: 207064 - DNA, 988 bp, Unknown
  Bacterial polypeptide expressing nucleotide sequence isolated from the Sargasso Sea
atgaagatagtcgtaactggagccgctggacaaattgcttattcgcttgttcccttcctttgtgaaaaaggaatatttcaatcagaagaaaaaatagacttacatttagtcgagattccatcagcaatggaaagattagatggttttgttaaagaattagaagattcggcttattcaactgtcaattctattagcacacatgacaatattactgctgctgcagaaaatgctgattggtgtttattggtcggttcaattcctcgtggaattgtttttcaaggcaaagaaattaaggaaagatctgatctgctgcaaataaatggtggaatctttacagaacaaggtagagctataggctcaaaagctaaagataactgtaaaattttagtggtaggcaatcctgcaaataccaatgctcttattggccatcataatgcaaataatgctaatcaaacttggatggctatgacaatgcttgatgctctaagagcaaaagctcagctatcgattaaattaaattgccatatagatgatatttatcgtttagcagtatttggcaaccatagtccgactatgtttccagatttagaaaacactattgttgatggaaaaaatgcttatgaatcgattaatgatcattcttgggttgagaaagagttcttgccaaaaatacaacaaagaggtgcagaaattattgaagcaagaggtgcctcctctgcttcatctgcagctagagcagcatgcgatacggttaaagcggtagaacatccaactagatcaggtgatgtttttaatgctgccatcatgagcgatggaagttatggtattccagcaggaatcttctctggctttccattattatctgatggtagtggaaacatagagattgttagagattacaatttaagtgaatttgcaaaatcaaagattgcaatcactgcgaatgagcttttagaagagaaggatctcgttaaagatctaatttaag

SEQ ID NO: 207065 - DNA, 475 bp, Unknown
  Bacterial polypeptide expressing nucleotide sequence isolated from the Sargasso Sea
aaaagaaatcgatgctatggtaatgggtggacatggagatacaatggtacctcttccacgatttactaaagtctctggtcaaccattgatggagttagtgaaagagggaaagatttctgaggaaaaattagagagcattaatcagcgaactagagatggtggtgcagaaattgtaaaatatttagaaaaaggatcagcattttatgcacctgcagcatctggagttgagatggccgaggcatttttaaaagatcaaaaaaaacttttaccatgcgcagcatatttacatggagagtatggaattaataatgtatatgcaggcgttcctgttatcattggaaatgaaggtgttgaaaaaattgaggaaatcgaccttaatgaaaatgaaaaaactgagtttaataattcagtagaagcagtaataaaattatgggatgcagcatctaaaatagaccctgacttaaacaaagattaa

SEQ ID NO: 207066 - DNA, 997 bp, Unknown
  Bacterial polypeptide expressing nucleotide sequence isolated from the Sargasso Sea
atgaaaaatgaaattaaagtggtggttaccggggcagctggtcaaattggctattcgttgattcctagattaattgatggaaacacctttggcgataaaactgtaaatctttcattagtagaaatacctcaagttgtatcaaaacttgaagggttagcaatggagcttgatgattcatactttccgaatcttggaactattgactacacggataacttctcggaagctgcagaaggcgctgattggtttttgcttgttggaagcattccaagaggcattgtttacaacggaaaaaagattgaagagcgttcagacttactccaaataaatggaggcatttttgttgatcaaggtaaagcaattggagaatttggtaatcaagatgcaaaaatccttgttgtgggcaatccagcaaatacaaatgctttaataggaagaaatgctgcaaacaattcatctcaaacttggatggcaatgaccatgcttgattcaaatagagctaaatcgatgttagctaaaaaactttcatgcaacgtttcagaaattaaaaagatgattatttggggaaaccatagccctactatgttcccagattttgaaaatgcgttaaaagataatcggtctgtagcaagcttaattgaagatacaaattggatagattctcacttcatacctaatgtgcagcaaagaggcaaagcagtgattgatgcaaggggggcttcttcagcaacttctgctgcaaaggctgcacttgatacggtaattgcatgcgaaaatataacttcatcagatgattgctttagtgcagcggtttatagtgacggagcatatggtgttcctgaaggaattatgtgcggctttcctttaatgacaacacctagtggagagattgaaattatcagagatttaacactttctgatagtgcaaggtctagattgaatttatctattgatgagttactttctgaaagagaagccgtagaagatcttttgtgaa

SEQ ID NO: 207067 - DNA, 343 bp, Unknown
  Bacterial polypeptide expressing nucleotide sequence isolated from the Sargasso Sea
gaagaaataaatcagagaactagagatggtggagctgaaatagttaaatatcttgaaaaaggatcagcattttatgcaccggctgcatctggggttcagaaggcagaagcttatttaaatgatgaaaagaaactattaccatgtgctattcaattaaatggagagtatggtgtaaacaatgtttatgcgggtgttccagtcatgattggaaaaaatggtgtagaaaagatagaagaaatagacttggacgaaaaagaaaaaaaagaattcatgcactctatcgatgcagtgaaagcactttgggaagcagcatctaaaatagatcctgatctttctaaataat

SEQ ID NO: 207068 - DNA, 196 bp, Unknown
  Bacterial polypeptide expressing nucleotide sequence isolated from the Sargasso Sea
tatgaaaaaaaaaatatcattaataggagcaggtcaaattggaggtaccttagcccatcttataagcataaaagaacttggtgatgttgttctttttgatgtaatggaaggcattgcaaaaggtaaagcgttagacatagctcaatcaacttctattgatggatacaatattaatattttggggacaaataaatat

SEQ ID NO: 207069 - DNA, 316 bp, Unknown
  Bacterial polypeptide expressing nucleotide sequence isolated from the Sargasso Sea
aatgagaaaaaaaattgctcttattggagcaggcaatatcggtgggactttagcacaacttgttagtttaaaagaattaggtgatgtagttttattagatatttttgaagggatgcctaagggcaaatctttagatcttgctcagtcatcttccattgagggatttcatgcaaattttaaaggtacttcaagttttagagatatcaaaaattctgatgtagtaatagttactgcaggttttccaagaaaaccaggtatgtcccgagatgatcttttagaaaaaaattctattatcattcaagaatgtagggaaaaa

SEQ ID NO: 207070 - DNA, 859 bp, Unknown
  Bacterial polypeptide expressing nucleotide sequence isolated from the Sargasso Sea
tcgctttccctgtacgatctccgcggcaccgcgggcgtcgcggcggatctttcccacaccaacaccgcgtgctcggtcgaaggtttcgagggccccgagaacctcgccgccgcgctgaccgggtgcgttctcgtgatcatccccgccggcgtcccgcgcaagcccggcatgtcccgcgatgatctcttctccatcaacgccggcatcgtcaaggacctctgcgtcgccgtctccgagaactgccccgacgcgctcgtgaacatcatctccaaccccgtcaactccaccgtccccatcgcggcggaggtcttcaaggcggcgggcacgtacgacccgaagaaggtcttcggtgtcaccactctcgacgtcgtccgctccaacaccttcgtcgccgaggcccagggcctggacgtcaacgacgtggacgtccccgtcgtcggcgggcacgcgggaatcaccatcctccccctcctctcccaggcgtacccctccgtggagttcagcgcggacgagctcgagaagctcacggtgcggatccagaatgcgggcaccgaagtggtcgaggcgaaggctggcgcgggctccgcgacgctctccatggcgtacgccgccgcgcgcatggcggaggcgtgcctccgcggcctctcgggcgagcccgacgtctacgagtgcgcctacgtcgcctcgagcgtgacggacctccccttcttcgccaccaaggtcaagctcgggcccggcggcgccgaagaagtcctcccggtgggtgacatcaccgactacgagcgcggctggctcgagaagctcatcccggagctcaaggcgagcatcgacaagggcatcgagttcgcgggcaagtgaa

SEQ ID NO: 207071 - DNA, 788 bp, Unknown
  Bacterial polypeptide expressing nucleotide sequence isolated from the Sargasso Sea
attcaaaggaacatctagttacaaagatattaaaaattcagatgttgtaatagtgacagcaggttttccaagaaaacctggtatgactagagatgacttagtagaaaaaaattcctctataattcaaaatgttggattaaatattaggaaatattgtcctagagcatttgtaatttgcataacaaatccacttgatgcaatggttagtgttcttcaaaaatcatctggattaaaaactaatatgtgtgtgggaatggcaggggttcttgatagtgctagattaaaatattttttatcagaggaatttaatgtttctgtaaaagatataagtgcttttgtactaggaggccatggagatacaatggtcccagtaattcgatatgcaactgtttcaggtctaccagtgcctgagttgattaagatgaaatggactactcaaaaaagaatagacacaattattcaaaggacacgtgaaggtggaggtgaaattggaaaactaatgaaagttgcatctgcatattacgcacctgcttcatcagctattttaatggcagaatcatatcttaaagaccataaaagagttcttccatgtgcagcatatttaaatggtgagtatggtataaaaggactctatgttggggttccagtaattataggaaaaagaggtgtagaaaaaataatagaattaaaacttaatagtaaggagaaaaaagactttaatcattctgttaatgcagttaaagatttaacaaaacttgcaaataactttttaaaaaagaaaaaataag

SEQ ID NO: 207072 - DNA, 484 bp, Unknown
  Bacterial polypeptide expressing nucleotide sequence isolated from the Sargasso Sea
atgagaaataaaatagctttaataggatctggtaatattggtggtaccctggctcatttagcagctattagagagttaggagatgttgctttatttgatattgcagaaggaattccacaagggaaggctcttgacttggctcaatcaggacctgtagagggatttgattgtaatatttcaggttctaatgaatattcggcactttcagaaagtgatgtggtgatagttactgcaggcgttgcaagaaaacctggtatgagcagagatgacttagtagaaattaatacaaaagttatgaagcaggtaggtgaaggcattaaggaaaattgccccaacgcttttgtcatatgtataacaaacccactcgatgccatggttggggttttacagagagcttcggggttgccaacaaatatggttgtaggaatggctggtgttttagattcagcaaggtttagacgttttttagctgatgaatttgatg

SEQ ID NO: 207073 - DNA, 904 bp, Unknown
  Bacterial polypeptide expressing nucleotide sequence isolated from the Sargasso Sea
tgttagtttaaaagaattaggtgatgtagttttattagatatttttgaagggatgcctaagggtaaatctttagatcttgctcagtcatcttccattgagggatttcatgcagattttaaaggtacttcaaattttagagatatcaaaaattctgatgtagtaatagttactgcaggttttccaagaaaaccaggcatgtcacgagatgatcttgtagaaaaaaattctattattattcaaaatgtagggaaaaatattaaaaaatattgtccgaaagcatttgttatatgcattactaatccactcgacgcaatggtaagtgtccttcagaaatcatcaggccttaaaacaaatatgtgtattggtatggcaggtgttttggatagtgcaagattaaaatactttttatccaaggagtttaatgtgtcaattaacgatatcagcgcttttgtcttaggcggtcatggagacacgatggttccgcttatgcgatactcaacagtatcaggtattcctgtacctgaattaataaagatgaagtggacaacaaaaaaaaatatcgacaaaattattcaaaggacacgtgatggtggtgctgaaattgtaaaactcatgaacacatctgcctattatgcaccagcttcttcagctatacaaatggcagagtcatttttgttagatcaaaaaagattattaccatgtgctgcatatcttaatggtgaatatggagtaaaaggactatatgttggagttccagttatcattggcaaaaaaggtgttgaaaaaattattgaattaaaacttaataataatgaaaagaaagaatttaatcattccgttaaagcagtaaaatcattaactacattgtctaacaagcttctaaataagaaaaataaaaaataa

SEQ ID NO: 207074 - DNA, 898 bp, Unknown
  Bacterial polypeptide expressing nucleotide sequence isolated from the Sargasso Sea
aaagaattagtaaatgaagtggttttatttgatgtagctagtggtattgcaaaaagaaaagcattagatattgcacaatcttcatctgtagatggtttcaatgttaggctttcaggaactgataactatgaggatataaaagattcagatgtaattataattacagcaggtgttccaagaaaacctggaatgagccgagacgatcttcttggaattaatttaaaaattattaaacaagttgctgagggggtaaagaaaaatgctcctgacgcctttgtgatctgtatcaccaatcctttagatgttatggttatggcatttcaaaaattttcaggtttgccatcaaataaagttgttggtatggcaggtattttagatagttcgagatttaaattatttttatcattagaactaaatgtgccagtaagagaaattgaggcaatggttatgggtggtcatggtgacaccatggttcctatgccaagatttacaaaaatttcaggtaaaccattgttgaatcttgtaaaggatggaaagatttctttagaaagagttgaggaaattaatcaaagaacacgagatggtggtgcggaaatagttaaatatttagaaaaaggatcagctttttatgcaccagcagcttcaggcgttcaaatggcagaagcatatttaaatgatcagaaaaaattattaccctgcgctgtacaattaaatggagaatatggtgtgaaaaatgtttatgcaggtgttcctgttgtcattggaaaagatggtgtagaaaaaattgaagagattgatttagatgaaaaagaaaaaaaagaatttatgcattcaatagatgctgtaaaagctttatgggaagctgcatctaaaatagatcctgatttatcaaaataat

SEQ ID NO: 207075 - DNA, 632 bp, Unknown
  Bacterial polypeptide expressing nucleotide sequence isolated from the Sargasso Sea
taaagcttttgtgatctgtatcaccaatcctttagacgttatggttatggcatttcaaaaattttcaggtttgccatcaaataaagtcgttggtatggcagggattttagatagttcgagatttaaattatttttatcattagaacttaatgtgccagtaagagaaattgaggcaatggttatgggtggtcatggtgacaccatggttcctatgccaagatttacaaaaatttcgggcaaaccattgttggatcttgtaaaggatggaaagatttctttagaaagagttgaggaaattaatcaaagaacgcgagatggtggtgcggaaatagttaaatatttggaaaaaggatcagccttttatgcgccagcagcctcaggtgttcaaatggcagaagcatatttgaatgatcagaaaaaattattaccctgcgctgtacaattaaatggagaatatggtgtgaaaaatgtttatgcaggtgttcctgttgtcattggaaaagatggtgtagaaaaaattgaagagattgatttagatgaaaaagaaaaaaatgaatttatgcattcaatagatgctgtaaaagctttatgggaagctgcatctaaaatagatcctgatttatctaaataat

SEQ ID NO: 207076 - DNA, 905 bp, Unknown
  Bacterial polypeptide expressing nucleotide sequence isolated from the Sargasso Sea
tatgtcaaaaaaaatatcattaattggtgccggacaaattggtggaacactcgcacacttaattggtttaaaggaactagtagatgaagttgtaatgtttgatgttgcaagcggtatcgctaaagggaaagcattagatatagctcaatcatcatcagtcgatggttttaatgttaaattatctggaacagataattatgaagatattaaagactccgatgtaattattataactgcaggagttccaagaaaacctggcatgagtagagatgatttattaggaataaatttaaaaattataaaacaagtagcagagggtataaaaaaaaatgcacctaatgcatttgtaatatgtattactaatccattagatgttatggtgatggcttttcaaaaatactcaggacttccaacaaataaagtcgttggtatggcagggatattagacagctcaagattcaaattgtttttgtcacttgaatttaaaattcccgttaaagaaatagaagcaacggttatgggcggccatggagatacaatggttccattaccaagatttacaaaagtttcaggaaaacctttattggatttagttaaagagggaaaattatcagcagaaagattagaggaaattaatcaaagaactagagatggtggcgctgaaattgttaaatatttagaaaaaggctcagcattttatgctccagcagcatcaggagttcaaatggctgaagcatacttaaaagacgaaaaaaaattacttccttgcgctgtacagcttaatggagagtatggtgttaaaaatatttttgcaggagttccggtcataattggaaagaatggtgtagagaagatcgaagaaataaatttagatgaaaaagaaaaaagtcaatttatgcattcaa

SEQ ID NO: 207077 - DNA, 522 bp, Unknown
  Bacterial polypeptide expressing nucleotide sequence isolated from the Sargasso Sea
gacggctcttgagaaatagggctaagagccagcttgcttggaaagctggtgttccagtgaaagacgttaccaatatgacaatctggggcaatcacagtgccacccaatatcctgattatacaaatgcactgatcaaagggatgccagccagtcatataataaaggatgaggaatggcttaagggggatttcataaaaactgttcagcagcgcggatcagagatcattaaggcccgtggagcttcttctgcagcgtctgccgccaatgccgcactggatacaatcacaagagtcatcacaccgaccaaaaaagtggactggtttagtgcagcaattccaagcgatggaagctacggagttaacccgggactaattttcagctacccacttagaagttcaggaaacggcgactacgaggtggtgcagggaatcgaacttgatgagttttctaaacaaaaaatcaaggccactcgagaagagcttgaaatggagcgtgctgcagtaaaggaaatgctgaactgaa

SEQ ID NO: 207078 - DNA, 697 bp, Unknown
  Bacterial polypeptide expressing nucleotide sequence isolated from the Sargasso Sea
agatgatttgttaggaataaatttgaaaataattaaagaagttgctcatggtattaaaaaacattcaccaaatgcatttgttatttgtataactaatccattggatgtaatggtcatggctttacaaaagtattctagattgccagaaaaaaaagtagttggtatggctggcatattagacagttctagatttaagttatttttatctttagaactcaatgtaccagttaaagatatagaggctatggttatgggagggcatggagatacaatggttcctcttcctagatttacaaaagtttcaggaaaaactttattagacttagttaaagagggaaaaatttcagaggagagattagaaagtatcaatcaaagaactaaagatggtggtgctgaaattgttaaatatctcgaaaagggctcggcattttacgctcctgcagcttctggcgttcaaatggcagaagcttatttaaaaaatactaaacaaatattaccatgtgcagctttcttaaatggccagtacggatttaaagacatatatgctggagtgccagtagttataggaaaagatggtgtagaaaaaattcaagaaatcgatcttgatgaaaaagaaaagaaagaattcaataattccgttgaagctgtaaaaaaactttgggatgcagcaatagctattgatccagatctaaagtaa

SEQ ID NO: 207079 - DNA, 901 bp, Unknown
  Bacterial polypeptide expressing nucleotide sequence isolated from the Sargasso Sea
tcttatagctttaaaagaaattgcagacgtaattttattcgatgtagcagaaggtcttgctaaaggaaaagctttggatattgctcaatcttcgcctgttaacggttttaatatcaatttaataggtacaagtagttatgaagacactaaaaattctgatgtcattataattaccgctggagttccaagaaaaccaggtatgacaagagatgatttattaggtattaatttaaagattataaaacaagttggtgaaggaataaaaaaaagttctcctaatgctttcgtaatatgtatcacaaatccactagatgtgattgtaatggctcttcaaaaatattctggtttaccaaaaaataaagttgtcggtatggctggcattttagattcatctagatttatatattttttatcacaagaacttaaagtgcctgtacaaaagattaaatcatttgttctcggaggccatggtgacactatggttgctatgttaggatcaactgagataaatggaaaaaaaattcttgatttagttaaagaaggtaagataacaaaagaaagattagatgcaatagttgatagaacaaagagaggtggtgctgaaatagtcaagtatttagaaaaagggtcagccttttatgcaccagctgcttcaggagtagaaatggctgaagcctatttaaaagatcaaaaaaaacagctaccatgtgcttgttacctcaatggcgagtatggagtaaaagacatttatgccggtgtaccagtcataataggaaaaaatggggtggaaaaagttatagagataattttaagtgatgaggaaaaaaataattttattaaatcagttaactctgtaaaagagttatttaacgcagctaaaaaaattgacccgtctctttaa

SEQ ID NO: 207080 - DNA, 721 bp, Unknown
  Bacterial polypeptide expressing nucleotide sequence isolated from the Sargasso Sea
atgaaaaaaatatctttgattggcgcaggccaaataggtggaactttagctcatttaattggtttaaaagaattagttgatgaggtcgttttgtttgatgttgcaagtggaatggcaaaaggaaaagctttagatatcgctcaatcatcctcagttgatggatttaatgttaagttttcaggaacagacaattatgaagatataaaaaactcagatgtaataattattacagcaggtgttccaagaaaaccaggtatgagcagagatgacctactaggaataaacttaaaaataataaaacaagttgctgaaggaattaaaactaatgctcctaacgcttttgtaatatgtattaccaatcccttagatgtcatggtaatggcttttcaaaaattttcaggtttgccaactaataaagtagttggtatggcaggaattttagatacctcaagatttaaacttttcttatctttagagttaaatgttccagtaaaagaaatagaggcaatggtaatgggaggacatggagatactatggttcctctcccaagatttacaaaagtttcaggtaaaccattattagacatagttaaagaaggaaaaatttctttagaaaaattagaaagtataaatcagagaacaagagatggtggcgcagaaatagtaaaaatatttagaaaaaggatctgcattttatgctcctgccgcatcaggagttgaa

SEQ ID NO: 207081 - DNA, 745 bp, Unknown
  Bacterial polypeptide expressing nucleotide sequence isolated from the Sargasso Sea
atgacaaaaatatctttaattggtgcaggccaaataggcggaactcttgcacatttaataggaacaaaagaattagtaaatgaagtggttttatttgatgtagctagtggtattgcaaaaggaaaagcattagatattgcacaatcttcatctgtagatggtttcaatgttaggttttcaggaactgataactatgaggatataaaagattcagatgtaattataattacagcaggtgttccaagaaaacctggaatgagccgagacgatcttcttggaattaatttaaaaattattaaacaagttgctgagggggtaaagaaaaatgctcctaacgcttttgtgatctgtatcaccaatcctttagacgttatggttatggcatttcaaaaattttcaggtttgccatcaaataaagttgttggtatggcaggtattttagatagttcgagatttaaattatttttatcattagaacttaatgtgccagtaagagaaattgaggcaatggttatgggtggtcatggtgacaccatggttcctatgccaagatttacaaaaatttcaggcaaaccattgttggatcttgtaaaggatggaaagatttctttagaaagagttgaggaaattaatcaaagaacacgagatggtggcgcggaaatagttaaatatttagaaaaaggatcagccttttatgcgccagcagcctcaggtgttcaaatggcagaagcatatttaaatgatc

SEQ ID NO: 207082 - DNA, 439 bp, Unknown
  Bacterial polypeptide expressing nucleotide sequence isolated from the Sargasso Sea
atgagcaaaatatctttaataggtgctggacaaataggtggaactttagcacacttaattgggttaaaagaattagttaatgagattgttttatttgatgttgcaagtggagtagcaaaaggtaaagctttagatatagcacaatcctcatctgtagatggattcaatgtaaaactaagtggaacagataattatgaaaatattaaaaattctgatgtaattataattactgcaggagttccaagaaaaccgggtatgagcagagatgatttgttagggataaacttgaaaataattaaacaagttgcccagggtattaaacaacactctcccaatgcatttgttatttgtataactaatccattggatgtaatggtcatggctttacaaaaatattctggattgccagaaaaaaaagtggttggtatggctggtatat

SEQ ID NO: 207083 - DNA, 583 bp, Unknown
  Bacterial polypeptide expressing nucleotide sequence isolated from the Sargasso Sea
aatgagcaaaatatctttaataggagctggtcaaataggtggaactttagcacatctaatcggaataaaagaattagttaaagaagttgtgttgtttgatgtagctagtggtatagcaaaaggaaaagctttggatattgcacaatcttcatctgtagatggtttcaatgtcaaattaagcggaaccgataattatgaggatattaaaaattctgatgttattataattacagctggagtgcctagaaaacctggaatgagcagagatgacttattaggaattaatttaaaaataataaaacaagttgcacaaggtataaaaaaacactccccaaatgcctttgtaatctgcataacaaacccattagatgtaatggtgatggcattacaaaaatattctggattagcagcgaataaagtagttggcatggctggtatattagatagctctagatttaaattatttttatctttagaacttaatgttcctgtaaaagatatagaggcaatggttatgggtggacatggagataccatggttcctcttccaggtttacaaaagtttcaggtaaaccattattag

SEQ ID NO: 207084 - DNA, 931 bp, Unknown
  Bacterial polypeptide expressing nucleotide sequence isolated from the Sargasso Sea
gtggccgtcctcggcgccgcgggtgggatcggccaaccgtgcgggttgctcatgaagatgaacccgctcgtcacggaattgtcgctgtatgacatcgcgggcacgcccggtgtcgccgcggacgtcggacacgtgaacacggcggcgcagacgaaggggtacgccggtgagggtgagttggcggaggcgttgaaggatgcggacgtggtcatcgtcccggcgggcgtcccgcggaaacccggaatgacgcgggacgatttgttcgccatcaacggaggaatcgtcaagggattggtggaagcgatcgcggataattgcccgaaggcgatgatcaacatgatctctaacccggtgaactcgacggtgccgatcgcggcggaggtgttgaaggcgaaggggaagtacgacgcgaagaagctcttcggggtgacgacgctggacgtcgtgcgcgccaagacgttttacgcggaaaaggcgggtctcgagacggcgcgcgtcgacgtgccggtcgtcggtggtcacgcgggtatcacgattttgccgttgttctcccaagcgacgcccaaggcgaacaacttgtccgcggacgacatcgacgcgttgaccaagcgcacgcaagacggcggcacggaggtcgtcgccgccaaggctggtaagggttctgccacgctctccatggcgtacgccggcgctctcttcgccgacgcgtgcttgcgcgccaagaatggcgaggcgaacatcgtcgagtgcacgtacgtcgagtccaaggtgaccgaggcgccgttcttctcctccaaggttacgctcggccgcgacggcgtcgacaccgtccacggtctcggcgcgctcagcgactacgagcaagccgcgctcgacgccatgatgccgcaactccaaggcgagatcaagaagggtgtcgacttcgtcaagg

SEQ ID NO: 207085 - DNA, 778 bp, Unknown
  Bacterial polypeptide expressing nucleotide sequence isolated from the Sargasso Sea
atgacaaaaatatctttaattggtgcaggccaaataggcggaactcttgcacatttaataggaacaaaagaattagtaaatgaagtggttttatttgatgtagctagtggtattgcaaaaggaaaagcattagatattgcacaatcttcatctgtagatggtttcaatgttaggttttcaggaactgataactatgaggatataaaagattcagatgtaattataattacagcaggtgttccaagaaaacctggaatgagccgagacgatcttcttggaattaatttaaaaattattaaacaagttgctgagggggtaaagaaaaatgctcctaacgcttttgtgatctgtattaccaatcctttagacgttatggttatggcatttcaaaaattttcaggtttgccatcaaataaagttgttggtatggcgggtattttagatagttcgagatttaaattatttttatcattagaactaaatgtgccagttagagaaattgaggcaatggttatgggtggtcatggtgacaccatggttcctatgccaaggtttacaaaaatttcaggcaaaccattgttagatcttgtaaaggatggaaagatttctttagaaagagttgaggaaattaatcaaagaacacgagatggtggtgcggaaatagttaaatatttagaaaaaggatcagccttttatgcaccagcagcttcaggcgttcaaatggcagaagcgtatttaaatgatcagaaaaaatattaccctgcgctgtacaattgaa

SEQ ID NO: 207086 - DNA, 910 bp, Unknown
  Bacterial polypeptide expressing nucleotide sequence isolated from the Sargasso Sea
attgaaaaaaatatctttatttggtgctggtcagattggtggaactttagctcatctaattggtttaaaagaattcgttgatgaagtagttttatttgatgttgttagtggtgttgcgaaaggaaaagccttagatattgcccaatcttcttcggttgatggttttaatgttaaattttctggaacagataattataaagatataaaaaattctgatgtaattattataacagcgggtgttcctagaaaacccggaatgagtagagatgatttgcttggaattaatttaaaaattattaaacaagtagctgaaggtataaaaaaaaatgcacctagtgcgtttgttatttgtataaccaatcctttagatgtcatggttatggcgtttcaaaaatattcaggattaccaactaacaaagttgttggaatggcaggaatacttgatagctcaagatttaaattatttttatctcaagagcttaaagttccagtaaaagaaattgaagcaatggttatgggtggtcatggagataccatggttcctttgccaagatttacaaaagtttcaggtaaaccactattagatcttgtaaaagagggaaagctgtcgagtgaaagattggaagaaattaatcaaaggacaagggatggtggagctgagattgttaaatatttagaaaagggttcagcattttacgcaccagcagcatcaggagttcaaatggctgaagcgtatttaaaagatgaaaaaaaattacttccttgtgctgttcaactaaatggagaatatggtgtaaaaaatatttttgcaggtgttccagttataattggaaagaatggtgtagaacaaattgaagaagttagtctagatgaaaaagaaaaaagtcaattcatgcattctatatatgca

SEQ ID NO: 207087 - DNA, 964 bp, Unknown
  Bacterial polypeptide expressing nucleotide sequence isolated from the Sargasso Sea
catgacaaataaaaaaatatcacttataggagctggacaaattggaggtacacttgctcatttagctgccatgaaagagctcggagatgtagttctttttgatctgatgtctggacttgcaaaaggtaaagctcttgatatagcacagtcttcagccatagatggttttaacgtttcattgtctggtactgataattatgaggatacaagtgactctgatgttataattataacagctggagttcctcgaaaaccaggaatgaccagagatgaccttttgggaacaaacttgaaaattatcaagcaagtagctgagggtataaaatcaacttctcctaatgcctttgttatttgtattacaaatccattggatgtaatcgttatggctcttcaaaaatattcagggtttccaaaaaataaagttgttggtatggctggagttttagatacttcacgttttaaatatttcttatcacaagaattgaatgttccaattagcgatgtagactcatttgttcttggtggccatggtgatacaatggtaccagttccaaatagaactatgattagtggtgaaaacctgactgatttagtcaataaaggagaaatttcaaaggctaggcttgacgagatcattgataggacgagaaaaggtggagccgaagtagttaagttattggaaaccggatccgctttttatgggccggcagcctcaggaattgaaatggccgattcatatctaaatgataagaaaaaaacgttaccatgcgcagcatatttaaatggtgaatacggtgtttcagatttatatgttggagttcctgttgttatcggctcagcaggaattgaaaaagttgttgaacttgatttagatgaagaagaaaaaaaattttttaaaacttcaatcgaagcagtcagtgagctatttgaagctgcaaaaaatattgatccttcacttaaataa

SEQ ID NO: 207088 - DNA, 553 bp, Unknown
  Bacterial polypeptide expressing nucleotide sequence isolated from the Sargasso Sea
atgactaaaatatcattaataggagctggacaaataggtggtacattagcacatttaattggattaaaagaacttgttgatgaagtattattattcgatgtagctagcggaatagctaaaggtaaagcactggatatagcacaatcatcatctatagacggatttaacgttaaattttcaggtactgataattatgaggatataaaaaattcagacgtaattattattacagctggcgttccaagaaaacctggaatgagtagagatgatttattaggaattaatttaaatattataaagcaagttgctaagggtataaaacatcatgcaccaaatgcctttgttatttgtattacaaatccattagacgtaatggttatggcattccaaaaattttctggtttattgccaaacaaagttgttggaatggcaggaatattagatacctctagatttaaattatttttatctttagaattaaatgtaccagtaagagaaattgaagccatggtgatgggaggtcacggagatactatggtgcctcttccctagg

SEQ ID NO: 207089 - DNA, 747 bp, Unknown
  Bacterial polypeptide expressing nucleotide sequence isolated from the Sargasso Sea
aaaggatccgatgttattataattacagcaggtgttcctagaaaacctggaatgagtagagacgatctattaggaattaatttaaaaattattaaacaagttgcagaaggaataaaaaataatgcgcctagtgcctttgtaatttgtattacaaatccattggatgtaatggtaatggcatttcaaaaatattcaggactccctgttcataaggttgtagggatggcaggtatattggatagttcaagatttaaactatttttatctgaagaattaaatgtgcctgtaaaagaaatcgatgctatggtaatgggtggacatggagatacaatggtacctcttccacgatttacaaaagtttctggtcaaccattgatggagttagtgaaagagggaaagatttctgaggaaaaattagagagtattaatcagcgaactagagatggtggtgcagaaattgtaaaatatttagaaaaaggatcagcattttatgcacctgcagcatctggagttgagatggctgaagcatttttaaaagatcaaaaaaaacttttaccatgtgctgcatatttacatggggagtatggaattaataatgtatatgcaggcgttcctgttatcattggaaatgaaggtgttgaaaaaattgaggaaatcgaccttaatgaaaatgaaaaaacggagtttaataattcagtagaggcagtaataaaattatgggatgcagcatctaaaatagaccctgac

SEQ ID NO: 207090 - DNA, 460 bp, Unknown
  Bacterial polypeptide expressing nucleotide sequence isolated from the Sargasso Sea
gagttaaaaggcttaaacgttgctgacgttaaagtgaacgtcatcggcggccacagcggcgtgactattctgccattactgtctcaagtggaaggcgtgactttctctgatgaagaagtcgcttctctgaccaagcgtatccaaaacgcgggtactgaagtggttgaagctaaagccggtggcggaagcgcgactctgtctatgggtcaagcggcttgccgtttcggtatgtctctggttcgtggtctacaaggcgaagctaacatcgttgaatgtgcttacgttgacggcggcagcgagcacgcagaattcttcgctcaaccagtgctgttaggcaaaaacggtatcgaaaaagtactgccttacggtgaagtgagcgcattcgaagctaacgcccgtgattctatgttagatacgctgaaaggcgatatcaaactaggcgttgatttcgttaagtaat

SEQ ID NO: 207091 - DNA, 562 bp, Unknown
  Bacterial polypeptide expressing nucleotide sequence isolated from the Sargasso Sea
aatgacaaaaatatctttaattggcgcaggccaaataggtggaactcttgcacatttgataggaacaaaagaattagttaatgaagtagttttgtttgatgtggcaagtggtatcgcaaaaggaaaagcattggatattgcccaatcatcatcggtagatggttttaatgtaaaattttatggaactgacaattatgaagatattaaagattcagatgtgataataataacagcgggtgtcccaagaaagccaggaatgagtagagatgacttgttaggtatcaatttaaaaataatcaaacaggtagcagaaggagtaaagaaaaatgctccaaatgcctttgtaatttgtattacaaatcctttggatgttatggttatggcatttcaaaaattttcaggtttaccagcaaacaaggttgttgggatggctggtattttagatagttctaggtttaaattatttttatctttagaattaaatgtgccagttagagaaattgatgctatggttatgggtggtcatggtgacacccatggtaccaatgccccaagatttaca

SEQ ID NO: 207092 - DNA, 403 bp, Unknown
  Bacterial polypeptide expressing nucleotide sequence isolated from the Sargasso Sea
aatgaaaaaaatatctcttataggagcaggtcaaataggtggaacattagcacatttaattggaataaaagaattagttaatgaagttgtattgtttgatgtagcgagcggtatagctaaaggaaaagctttggatattgctcaatcttcatctgtagatggttttaacgttaaactaagtggaactgataaatatgaggatattaaaaaatcagatgtaattataattacagctggagtgcctagaaaacctggtatgagtagagacgacttactagggattaatttaaaaattattaaacaagttgcacaaggtataaaaaagcactctccagatgcatttgtaatctgtataacaaaccctctagatgtaatggttatggcattacaaaaatattctgga

SEQ ID NO: 207093 - DNA, 514 bp, Unknown
  Bacterial polypeptide expressing nucleotide sequence isolated from the Sargasso Sea
tgctcgttttcgatactttttagctcaagaattcaatgtctccgttaaagacgtgtcagcatttgttcttggtggacacggagacactatggtgccattggcaaggtactctaccgtagggggaatcccgcttcccgatcttgtagaaatgggatggacaacccaagaaaagctcgatgcgattattcaaaggacccgagatggtggagctgaagtggttggcttgttaaaaactggttctgctttttacgcacctgctgcatcggcgatacaaatggctgagtcatacctcaaagatcaaaaccgagtagtgccatgtgcagcttatgtagacggaccttatggtttaagcggcatttacgtaggagtaccaaccgtgattggacagaacggagtcgaaaaaatagtagaaataaaattggacaaggatgaacgattagagtttgaaaaatcagtcgattcagttcacagtttaatcagtgcttgcaaaaatatagataacgccctctcttaa

SEQ ID NO: 207094 - DNA, 340 bp, Unknown
  Bacterial polypeptide expressing nucleotide sequence isolated from the Sargasso Sea
tatgaaaaaaaaaattacattaattggggctggacaaattggaggcactttagctcacctaatagctataaaagatttagcagatgttgttttatttgatgttgctgagggacttgcaaaaggaaaagctttagatatctctcaatcttctcctattaatggttttggtaaaaaattaatcggcactagtgattatgaagatacaaaagattctgatgtaataataatcacagcaggtgtgcctagaaaacctggtatgacaagagatgatcttctaggaataaatttaaaaattataaaacaagtggcagaaggaataaaaaaaacatcacctaatgca

SEQ ID NO: 207095 - DNA, 464 bp, Unknown
  Bacterial polypeptide expressing nucleotide sequence isolated from the Sargasso Sea
ttcagttagagatgtttcagcttttgttttaggtggtcatggggacagcatggttccgttaatacgttattctactgtttcaggaattcctgttcctgaccttatcgagatgaattggacttcacaggagagaattgacgctattgttcaaagaacacgtgatggtggagcagaaattgtaggtttgttaaaaactggctctgctttttatgcaccagcatcctcagctatagaaatggctgaatcttatttaaaggaccaaagaaggcttttaccttgtgctgcttggtgtgatggtgagtatggtcttgacggtatttttgttggtgttccggcaattataggcaaaggtggaattgaaaaagttgttgaaataaatatgaacgatgaagaaaaagagatgttcaataaatcagttgaagctgtaagacagttaaattccattgcagctaaaatggaatgaa

SEQ ID NO: 207096 - DNA, 467 bp, Unknown
  Bacterial polypeptide expressing nucleotide sequence isolated from the Sargasso Sea
tgtagaagatgtaagtgcatttgttcttggtggtcatggtgataccatggtaccacttataaggtttgcgagtgttgcaggcgttcctatttcagagttaattaaattaaaatggtcaacgaagaaaagaatagattcaattattgagagaactagagatggtggcggtgagattggcaggttaatgaaaacagcttctgcattttatgctcctgcatcctcagcaatagcgatggcagagtcttttctaaaagatcaaaaaagagttcttccatgtgctgcctatttaaatggacaatatggtgtcaaaggtttgtatgttggtgttccagttatcattggtaaaaaaggtgtggagaaagttttagatttgaaattaaattctgatgaaaagaaacaatttaataattcagtaaaagccgttaaaaaccttacagctttagcaaaaaaactaacatcaaaataag

SEQ ID NO: 207097 - DNA, 880 bp, Unknown
  Bacterial polypeptide expressing nucleotide sequence isolated from the Sargasso Sea
aaggaattagtagatgaagttgtaatgtttgatgttgcaagcggtattgctaaagggaaagcattagatatagctcaatcatcatcaattgatggttttaatgttaaattatctggaacagataattacgacgatattaaagactctgacgtaattattataactgcaggagttccaagaaaacctgggatgagtagagatgatttattaggaataaatttaaaaattataaaacaggttgcagaaggtattaaaaaaaattcacccaatgcatttgtaatatgtattacaaatccattagatgttatggttatggcttttcaaaaatattcaggacttccaataaataaagttgttggtatggcgggaatattggatagttcaagatttaaattgtttttgtcacttgaacttaaaataccagtaaaagaaatagaagcaatggttatgggcggacatggagatacaatggttccattaccaagatttacaaaagtttcaggcaaacctttattggatttagttaaagagggaaaaatatcagcagaaagattagaggaaatcaaccaaagaaccagagatggtggtgctgaaattgttaaatatttagaaaaaggttcagcattttatgctccagcagcatcaggaatacaaatggctgaagcatacttaaaagatgaaaaaaaattacttccatgtgctgttcagcttaatggagagtatggtgttaaaaatatttttgcaggagctccagtaataattggaaaaaatggtgtagaaaaaatcgaagaaataaatttagatgaaaaagaaaaaattcaatttatgcattcaatagatgcagttaaaaaattatgggaagcagcttcagcaatagata

SEQ ID NO: 207098 - DNA, 709 bp, Unknown
  Bacterial polypeptide expressing nucleotide sequence isolated from the Sargasso Sea
gatgtcgcgtgatgatttattaggcactaatctcaaaattataaaacaggtttcagacggaattaaagatacatcacctaacgcttttgtgatttgtattactaacccattagatgtaattgtgatggcactccaaaaatattctaaattttcaaccaataaagtagttggtatggcaggaattttagattcttctagatttaaatattttttatctagggaattaaaggagccagtaaaaaacatcgagtctttagttctaggaggacatggagacaccatggtacctatgccaaaacaaacaaaaataaataacaaaactcttatagaattagttaatgaaaacaaaatatcaaagagtaagttggaagaaatcatagctagaacaagaaaaggtggagcagaaatagtcaagttattggaaaaagggtcagctttttatgccccagcagcctctggcgttgaaatggccgagtcctatctaaaagatttaaaaaaaacactaccttgcgcagcatatttaaacggagaatatggctacaaaaatatttatgcaggtgtgccagttgttattagtaaaaaaggagtagagaaaatagttgaaatagaactagataagagtgaaaaattaaattttgatacttcaattaaagctgtaaaagaattatttcaatcagcagttaagattgacccgactttaacaaaataa

SEQ ID NO: 207099 - DNA, 800 bp, Unknown
  Bacterial polypeptide expressing nucleotide sequence isolated from the Sargasso Sea
gatgaaaaataaaaaaatatcacttattggagctggtcaaattgggggcactttagctcatcttgcagcgatgaaagaattaggtgatgttgttctttttgatttaatggctggtctagctaaaggaaaagctttagatatttcgcagtcatctgcaattgatggttttaatgtttccttatcaggaactgataattatgaagatacgcgagactctgatgtcataatcattaccgctggtgtgccaagaaaaccagggatgacaagagatgatctcttgggtaccaacttaaaaatcattaaacaagttgctgagggcattaaatctacatcacccgacgcttttgtgatttgcattacaaatcctctggatgttatcgtaatggcgctacaaaaatattctggcttaccaaaaaataaagtgattggtatggcaggcgttcttgatacttcaaggtttaaatatttcttatcacaagagctaaatgtacctataagtgaggtaaactcatttgttttaggtggacacggtgacaccatggttcccgtccccaatagaacaacagttagtggtaagcccttgatggatttagtaaaccaaggtcaaatatcccaatcaagacttgatgaaattattgacagaacacggaaaggtggggctgaggtagtaaaattgttagaagttggatcggcattttatggtcctgcagcatctggaattgaaatggctgactcttatctaaatgacaaaaagaaaactctgccgtgtgctgcacatttaaatggggaatacggagtta

SEQ ID NO: 207100 - DNA, 608 bp, Unknown
  Bacterial polypeptide expressing nucleotide sequence isolated from the Sargasso Sea
catgacaaataatgtaaaaaatatatcaattacaggtgcagcaggaaatattgcctactctgccctatttagaattgcgtcaggagagctttatggtaaagatacaaaaataaattttaaattaattgacataagtgactttgaaaataaaatgtttggagtaaagcttgaattactagattgtgcattcccactgttaaattcggttgaggttacttctgatttgaataaaggctttggcgatgctgattgtatttttttatttggagcaaagcctagaggaaaaggtatggaaagaaaagatttattagaatcaaatgctaatatcttttctattcaaggaaaagcaattaatgataatgcaaataaaaatgttaaagttattgtggtaggtaatccagctaacaccaacgcacttatactttcaaaaaatgcaagaaatattaatccatcacaaattacatcaatgatgagattagaccatgacagagcgaaagcactagtagcagaaaaaacaggcatagaatgcagtaacgttaaaaatagctttgtttggggtaatcattcatccacacaagtaccagacataacaaatataattaatgcag

SEQ ID NO: 207101 - DNA, 778 bp, Unknown
  Bacterial polypeptide expressing nucleotide sequence isolated from the Sargasso Sea
aactaatgaagatattaaaagatcagatgttattataattacagcatgtgttcctagaaaacctggaatgagtagagacgatttattaggaattaatttaaaaattattaaacaagttgcagaaggaataaaaaataattcgcctaatgcatttgtaatttgtattacaaatccattggatgtaatggtaatggcatttcaaaaatattcaggactccctactcataaagttgtagggatggcgggtatattggatagttcaagatttaaactattcttgtcagaggaattaaatgtgcctgttaaagaaattgatgctatggtaatgggtgggcatggagatacaatggtacctcttccaagatttacaaaagtctctggacaaccattgatggagttagtgaaagaaggaaagatttctgaagaaaaattagaaagtattaatcagcgaactagagacggtggtgcagaaattgtaaaatatttagaaaaaggatcagcattttatgcacctgcagcatctggagttgaaatggctgaatcatttttaaaagatcaaaaaaaacttttaccatgcgcagcatatttacatggggagtatggaattaataatgtatatgcaggtgttcctgttatcattggaaatgaaggtgttgaaaaaattgaggaaatcgaccttaatgaaaatgaaaaaacagagtttaataattcagtggaagcagtaataaaattatgggatgcagcatctaaaatagaccctgacttaaacaaagattaa

SEQ ID NO: 207102 - DNA, 637 bp, Unknown
  Bacterial polypeptide expressing nucleotide sequence isolated from the Sargasso Sea
catgaaaaaaaaaatttctttaattggtgcaggtcaaataggtggaacattagcacatttgattggaacaaaagaattggtaagtgaggtagtgttgtttgatgtagcaagtggaattgcaaaaggtaaagcgcttgatatagctcaatcttcttcagtagacggttttaatgtaaaattttcaggcacagataactatgaagatattaaagactcagatgtaattattattacagctggtgtccctagaaagccgggaatgagtagagacgacttacttggtatcaacttaaaaattattaaacaagtagctgaaggtataaaacaaaatgcacctaatgcatttgtgatatgtattactaacccattagatgtaatggtcatggctttccaaaaattttcaggattaccctcaaataaagtagttggaatggcaggaattttagacagctctagatttaaattatttttatcattagaactaaatgttcctgttagagaaatagatgcgatggttatgggaggacatggagatacaatggtcccaatgcccagatttacaaaagtttctggcaaaccattgttagatatagtgaaagaaggtaaaatttctcaagaaagattagaagaaataaat

SEQ ID NO: 207103 - DNA, 859 bp, Unknown
  Bacterial polypeptide expressing nucleotide sequence isolated from the Sargasso Sea
ggctagtggtattgcaaaaggtaaagcattagatattgcacaatcttcatctgtagatggtttcaatgttaggttttcaggaactgataactatgaaagcataaaagattcagatgtaattataattacagcaggcgttccaagaaagcctggcatgagtcgagatgatctccttggaataaatttaaaaattattaaacaagttgctgaaggtgtaaagaaaaatgctcctaatgcttttgtgatctgtatcaccaatcctttagatgttatggtaatggcatttcaaaaattttcaggtatgccatcaaataaagtagttggtatggcaggtattttagatagttcgagatttaaattatttttatcattagaactaaatgtgcctgtaagagaaattgaggcaatggttatgggtggtcatggtgacaccatggttcctatgccaagatttacaaaaatttcaggtaaaccattgttagatcttgtaaaggatggaaagatttctttagaaagagttgaggaaattaatcaaagaacacgagatggtggtgcggaaatagttaaatatttagaaaaaggatcagccttttatgcaccagcagcttcaggtgttcaaatggcagaagcatatttgaatgatcagaaaaaattattaccctgcgctgtacaattaaatggagaatatggtgtgaaaaatgtttatgcaggtgttccagttgtcattggaaaagatggtgtagaaaaaattgaagagattaatttagatgaaaaagaaaaaaaagaatttatgcattcaatagatgctgtaaaagctttatgggaagctgcatctaaaatagatcctgatttatctaaa

SEQ ID NO: 207104 - DNA, 602 bp, Unknown
  Bacterial polypeptide expressing nucleotide sequence isolated from the Sargasso Sea
tcccttagatgttatggttatggcttttcagaaattttcaggtttaccaacaaacaaagtagttggaatggcaggtatacttgatagttcaagatttaaattatttttatctttagagcttaatgttcctgtaaaagaaatagaggccatggttatgggtggccatggagataccatggttcctttgccaagatttacaaaagtttctggcaaacctctattggatttagtcaaagaaggaaaaatatcgaaagaaaaattagaaaatattaaccaaagaaccagagatggtggagcggagattgtaaaatatcttgagaaaggatcagcattttatgcaccggcagcttcaggtgtccaaatggccgaagcttatttaaatgatacaaaaaaaatattaccgtgtgcagtttttttaaatggtcaatatggatttaaagatgtttatgcgggggttccggtagtaattggtaaaaatggtgtagaaaaaattaatgaaattgatcttgatgaaaaagagaagaaagaatttagtaactctgttgaagctgtaaaaaaactttggaattcagcagctactattgatccagatttaaagtaaa

SEQ ID NO: 207105 - DNA, 702 bp, Unknown
  Bacterial polypeptide expressing nucleotide sequence isolated from the Sargasso Sea
cttctggttttcctaggcaacccggtatgacaagggaggatctgattggaaagaatgcagacatagtctcacaggtaggcgaaggcataaggcagcacgcccccaattctattgttgtgatggtgaccaatcccttggatctgatgacttatcatatgcagaaagtaaccggatttgaacatagtagagtagttggccaagcaggaatattggacagcgcgagaatgacgcacttcatcgcacaggctgtcggatgcagtaatgaggatgtccaggcaatggttcttggcggtcatggcgatactatggtcccacttccgagatacacgacggtgaacgggattccagtgagtcagctactgagcgatgaagaagtggaggaaatctgccaaaggacagccagcggtggaggagaaatagtgaagttactggagaagggtagtgcattctatgctccgggtagcgcagctgcaataatggccgaagcaattcttgatgataggaaaagagttctgccatgtagcacttatcttacaggagaatatggaatggatgacatatacattggggtaccagtggttcttggtagaaatggagtagagaggatcatagagctcgaactagccgagaatgagttgaacagtttacagggttcaggctccttctacaaagagcagctttctgaaatcctcggatactgaa

SEQ ID NO: 207106 - DNA, 868 bp, Unknown
  Bacterial polypeptide expressing nucleotide sequence isolated from the Sargasso Sea
tgatgttgcaagtggcatagcaaaaggtaaggcattagacattgctcaatcatcatctgtagacggatttaatgttaatttctctggcacagataattatgaagatattaaaaattcagatgtaataatcattaccgcaggtgttcccagaaaaccaggaatgagtagagatgatttattgggaataaatcttaaaataataaagcaggttgccgaaggagtaaaaactcactccccagatgcttttgtgatttgtataacaaatcctcttgatgttatggttatggcattccaaaagtattcaagtttaccagtaaataaagtagttggtatggcaggaattttagacagttcaaggtttaagttatttttatcaagagagttaaacgttcctgttaaagagattgatgcaattgtaatgggaggacatggagatacgatggtacctttaccaagatttacaaaagtctcaaaaaaacctttactagatcttgtaaaagatggaaaaatatcttcagaaaaattagaaagtataaatcaaagaactagagatggaggtgctgagatagttaagtatttagagaaaggctcagcattttatgcaccagcagcttcaggagttgaaatggctgcagcatatttaaatgatgaaaaaaaacttttaccttgtgctgcatatatgaatggtgagtatggagttgaaaaaatttatgcaggtgttccagtaattataggaaaaaatggaatagaaaaaattgaagaagtagaattggatgataaagaaaaaacagaatttaatcattctatagaagccgtgaaaaaattatgggaggcggcatctgccattgatccagatttaaaaagataa

SEQ ID NO: 207107 - DNA, 731 bp, Unknown
  Bacterial polypeptide expressing nucleotide sequence isolated from the Sargasso Sea
ggtcatcatccccgcgggcgttccccgcaagcccggcatgacccgtgacgatctcttcaagatcaacgcgggaatcgtcgcgggcctcacccaggcgtgcgccgagaactgtcccaaggccatgatcaacatgatctccaaccccgtcaactccaccgtgcccatcgccgcggaggtgctcaagaagaagggagtgtacgaccccaagaagctcttcggcgtcaccaccctcgacgtcgtccgcgccaagaccttctacgccgagaagaacggtctggagacagccaaggttgacgtgcccgtcgtgggcggccacgcgggcatcaccatcctcccgctcctctcgcaggcgacgcccgcggtggcgatgaccgacgacgtcatcgacgcgctcaccaagcgcacccaggacggaggtaccgaggtcgtcgccgccaaggccggcaagggctccgcgactctctccatggcgtacgccggagcgctcttcgcggatgcgtgccttcgcgctaaaaacggcgaggcgaacgtggtggagtgcacctacgtcgagagcaaggtcaccgaggcgcccttcttcgcgaccaaggtgacgctcggcaaggagggcgtggagaagatccacggcctcggcgagctctccgcgtacgagcagaaggcgctcgacgcgatgatgcccgagctcaaggattccatcaacaagggtgtcgagttcgccaagagcatgtaaa

SEQ ID NO: 207108 - DNA, 756 bp, Unknown
  Bacterial polypeptide expressing nucleotide sequence isolated from the Sargasso Sea
ccggcgccgatgtctgcatcgtcaccgccggcgtgccgcgcaagcccggcatgagccgcgacgacctgctcggcatcaacctcaaggtcatggaagccgttggcgcgggcatcgcgcagcacgcgccgaatgccttcgtcatctgcatcaccaacccgctcgacgccatggtctgggcgctgcagaagttctccggtcttcctgccaacaaggtcgtcggcatggccggcgttctcgactcggcccggttccgctacttcctcgccgaagagttcaacgtttcggttgaagatgtcaccgccttcgttctcggcggccacggcgacaccatggtgcccgtcgcgcagtattcgacggttgccggcattccgctgcccgatctggtcaagatgggctggaccacccaggaaaagctcgacgcgatcatcacccgcacccgcggcggcggcggtgaaatcgttgccctgctgaagaacggctcggcctattacgcgcctgccgcttccgccatcgccatggccgaaagctacctcaaggacaagaagcgcgtcatgccggccgctgcccacctcaccggagaatacggcgtcgacggcatgtatgtcggtgttccgatcgtcatcggcgagggcggtgtcgagcgcatcgtcgagattccgctggaaggcgaggacaaggccggcttcgacaagtcggtggacgccgtgaagggcctttgcgatgcctgcaaggaaatcgcgccctcgctgaaataag

SEQ ID NO: 207109 - DNA, 679 bp, Unknown
  Bacterial polypeptide expressing nucleotide sequence isolated from the Sargasso Sea
tatgtcaaaaaaaatatcattaattggtgccggacaaattggtggaacactcgcacacttaattggtttaaaggaactagtagatgaagttgtaatgtttgatgttgcaagcggtattgcaaaaggtaaagcattagatatagctcaatcatcatcagtcgatggttttaatgttaaattatctggaacagataattatgaagatattaaagactccgatgtaattattataactgcaggtgttccaagaaaacctggtatgagtagagatgatttattaggaataaatttaaaaattataaaacaggtagcagaaggtataaaaaaaaaagcacccaatgcatttgtaatatgtattactaatcctttagatgttatggtgatggcgtttcaaaaatactcaggacttccagcaaataaagttgttggcatggcgggaatattggacagctcaagattcaaattgtttttgtcacttgaacttaaaattcccgttaaagaaatagaagcaatggttatgggtggccacggagatacaatggttccattaccaagatttacaaaagtatcaggcaaaccattattggatttagttaaagagggaaaattatcgtcagaaagattagaagaaattaatcaaagaaccagagatggtggtgctgaaattgttaatatttag

SEQ ID NO: 207110 - DNA, 919 bp, Unknown
  Bacterial polypeptide expressing nucleotide sequence isolated from the Sargasso Sea
ggaggaacattagctcacttaataggaacaaaagaattggttgatgaagtagttttattcgatgtagcaagtggaattgccaaaggaaaagctttggatattgcccagtcctcatctgtagatggatttaatgtgaaattttcaggaactgataattacaaagatattgagggatcagatgtagtaataattactgctggagttccgagaaaacctggtatgagtagagacgatttattaggtattaatttaaagataattaaacaagttgcaaatggagtaaaagaaaatgctcctgatgcctttgtaatttgtataactaatccacttgatgtaatggtaatggcattccaaaaattttcgggtttaccatctaacaaagttgttggaatggctggtattttagatagttcgagattcaaattatttttatctttagaatttgatgtaccagtaaaagagatagacgcgatggttatgggaggacatggagatacaatggttcctcttccaagatttaccaaagtatctggaaaacctttattagatttggttaatgatggaaaaatttcaaaagaaagattagaagaaataaatcaacgaactcgagatggtggagctgaaatagtaaaatttttagaaaaaggttctgccttttatgcacctgcagcctcgggaattgaaatggctaaagcttatctcaatgatgaaaaaaaaatgcttccgtgcgcagcccatttaaatggtgagtatggaataaaagatatttatgctggtgtgccaattatcatcggaaaaagtggagttgaaaaaatagaagaaattaacttagatgaaaaagaaaagtctgaatttttacattcagttgaagcggtaaaaaaactatgggaagcagcttctaaatcgatcctgatttagc

SEQ ID NO: 207111 - DNA, 484 bp, Unknown
  Bacterial polypeptide expressing nucleotide sequence isolated from the Sargasso Sea
atgaaaaagaaaatctctttaataggtgctggacaaattggaggtaccttggcgcatctaatagcaataaaagaaatagcagatattgttttatttgatgtagccgagggtatagcaaaaggtaaggccttggatatcgcacaatcctctggtgtaagtggctcaaatgtaaatttgataggaaccgataaatataaagagataaaagactccgatgtaataataattactgcgggagtgccacgaaaaccaggcatgagtcgagatgatcttttgggaataaatttaaaaattataaagcaagttgccgatggtataaaagaaaattctccacaatcattcgtaatttgtataactaatcccctggatgttattgttatggctttacaaaaatattcaggtttaccaaccaaaaaaattgtgggcatggcaggaataatagactcatcaagatttaaatattttatatctccaggaacttaat

SEQ ID NO: 207112 - DNA, 550 bp, Unknown
  Bacterial polypeptide expressing nucleotide sequence isolated from the Sargasso Sea
tatgtcaaaaaaaatatcattaattggtgctggacaaattggtggaacacttgcacatttaattggtttaaaggaactagtagatgaagttttaatgtttgacgttgcaagcggtattgcaaaagggaaagctttagatatagctcagtcatcatcggtcgatggttttaatgttaaattatctggaacagataattacgaagatattaaagactccgatgtaattattataactgcaggagttccaagaaaacctggcatgagtagagatgatttattaggaataaatttaaaaattataaaacaggtagcggaaggtataaaaaaaaatgcacccaatgcatttgtaatatgtattactaatcctttagatgttatggtgatggcgtttcaaaaatactccggacatccagcaaataaagtcgttggtatggcaggaatattggacagctcaagattcaaattgtttttgtcacttgaacttaaaataccggtaaaagaaatagaagcaatggttatgggtggccatggagatacaatggttccatta

SEQ ID NO: 207113 - DNA, 824 bp, Unknown
  Bacterial polypeptide expressing nucleotide sequence isolated from the Sargasso Sea
tttgatattcctaaagcggaaggtatggtaaaaggtaaagctctagaccttatgcaacttcgaccacatgatggctatgattcaaatatatctgggacatcaaattggaatgatttgaaaaatacagatgtatttattattactgcaggaatacctaggaagccaggcatgaatcgagaggatctccttggaattaatttagggataatgaaggatgttgctaaaaatataaaggaacaagcacctaattcatttgtgattgttatatctaatcctttagatgcaatggtatacactttttataaagtatctggctttagtaagaataaagttgttggaatggccggagctttagatagtgctagatttagaacatttatagctatggaaactggctgctccgtgcaagatataacttgcatggtccttggcggtcatggtgatacaatggtaccagttacgcgtttagcaaccgtagggggagttcctttagaaggattaatttcatcagaacgcttagaagaaattgttgataggacaagatttgctggtggagaaattgtaaaattatttggtaatggatctgcatattatgcaccagctcaatctgctattgaaatggctgaatcatatttgaaagataaaaaacgtgttatcccctgtgcttctctatgtgaaggtgaatttggtattgatggatactttattggagttccaagtattattggctcaggaggagtagaaaaaattcttgaatttgatttaaaagacgaagaaaaattagctttaaataatacattagaagctgtaaaaaacactgttaa

SEQ ID NO: 207114 - DNA, 703 bp, Unknown
  Bacterial polypeptide expressing nucleotide sequence isolated from the Sargasso Sea
atgagtaaatctataaaagttgttgttactggagctgcagggcaaattgcttattctttaataccaagattagtcgatggaaatacatttggagataaaatcgttgatcttgcattagttgaaattcctcaagttgttgataagttaaagggtgtagtcatggagcttgaagattcttattttccaaaaatgggtaaagttacatataccgataattttgaagaagcatcaaaagatgctgactggttcttactagttggaagtatacctagaggtattgtctataacggaaagaagattgaagaaagatcagatcttttaagtattaatggcggtatttttgttcaacaaggtgaagcaattggaaaatatggaaaagatgatgctaagatattagttgttggtaatcctgcaaatacaaatgctttcattggaaaagatgctgctaacaatgacaatcaactttggatggcaatgacaatgctagattctaatagagctaagtctattcttgcgaaaaaaacaaacaataatgtttctgatgttaaaaatatgattatttggggaaatcatagtccaactatgtatcctgactcagaaaatgcactaatctctggaaagcttggtagcgaaataataaatgacatgaattggatagaatctgaattcgtacccacagtgcaacaaagaggaaaagccggtt

SEQ ID NO: 207115 - DNA, 538 bp, Unknown
  Bacterial polypeptide expressing nucleotide sequence isolated from the Sargasso Sea
atggcaggaatattagatagctctagatttaaattatttttatctattgagctcaaagttcctgtaaaagaaatagaagcaatggttatgggtggtcatggagatactatggtcccattaccaagatttacaaaagtttcaggtaaaccgttattggatttagtcaaagagggaaaattatcattaaaaagattagaagaaattaatcaaagaactcgagatggaggcgctgaaatagttaagcatttggaaaaaggttctgcattttatgctccagcggcatcaggagttcaaatggcagaagcatatttaaaagatgaaaaaaaattacttccttgcgctgtacaacttaatggagaatatggcgttaaaaatatttttgcgggagtgccagttataattggaaagaatggtgtggaaaaaattgaagaaataaatttagatgaaaaagaaaaaagtcaatttatgcattcaatagatgcagtaaaaaaattatgggatgcagcttcaggaatagataaagatctctcaaaataat

SEQ ID NO: 207116 - DNA, 658 bp, Unknown
  Bacterial polypeptide expressing nucleotide sequence isolated from the Sargasso Sea
agcagaaggtataaaaaaaaatgcccctagtgcatttgtaatatgtatcacaaatccattagacgttatggtgatggcatttcaaaaatactcaggacttccagcaaataaagttgttggtatggcaggaatattggatagctcaagatttaaaatgtttttgtcaactgaacttaaaattcctgtaaaagaaatagaagcgatggttatgggcggccatggagatacaatggttccattaccaagatttacgaaagtttcaggtaagcctttattagatttagttaaagaagggaaattatcagcagagagattagaagaaattaaccaaagaaccagaaacggtggcgcagagattgttaaatatttagaaaaaggatctgcattttatgctccagcagcatcaggagttcaaatggctgaagcatatttaaaagataaaaaaaaattacttccttgcgctgttcaacttaatggagaatatggtgttcaaaatatttttgcaggagttccggtcataattggaaagaatggcgttgaaaagattgaagaaataaatttagatgaaaaggaaaaaagtcaatttatgcattcaatagatgcagttaaaaaattatgggatgcagcttcggcaatagacaaagatctttctaaataa

SEQ ID NO: 207117 - DNA, 526 bp, Unknown
  Bacterial polypeptide expressing nucleotide sequence isolated from the Sargasso Sea
aatgtcaaaaaaaatatcattaataggtgctgggcaaattggtggaacactcgcacatttaattggcttaaaggaactagcagatgaggttgttatgtttgatgttgcgagtggtattgctaaaggaaaggcactagatatagctcaatcatcatcagttgacggttttaatgttaaattatctggaacagataattatgaagatattaaagactcagatgtaattattataaccgcgggtgttccaagaaaaccaggcatgagtagagatgatttattaggaataaatttaaaaattataaaacaggtagcagaaggtataaaaaaaaatgcaccaaatgcatttgttatatgcatcactaatccattagatgttatggtgatggcgtttcaaaaatactcagaacttccagcaaataaagttgtaggcatggcaggaatattggatagttcaagatttaaattatttttgtcacttgaacttaaaattcctgttagagaaaaagaagcaatggttatgggaggc

SEQ ID NO: 207118 - DNA, 322 bp, Unknown
  Bacterial polypeptide expressing nucleotide sequence isolated from the Sargasso Sea
atgagaaaaaagattgcgcttataggagctggcaatattggtgggactctcgcacaacttgttagtttaaatgaattaggcgatgtagttttactagatatttttgaaggtatgccaaaaggtaaatctttagatttagctcagtcatcatctattgaaggatttcatgctgattttaagggcacttctaattttaaagatattaaaaattctgatgtagttatagtaactgctggatttccaagaaaaccaggaatgtcaagagatgacttggtggaaaaaaactcattaatcattcaaaacgtggaaaaaatattaaaaa

SEQ ID NO: 207119 - DNA, 625 bp, Unknown
  Bacterial polypeptide expressing nucleotide sequence isolated from the Sargasso Sea
atgagaaaaaaaattgctctcattggagcaggcaatattggcgggactcttgcacaacttgttagtttaaaagaattaggtgatgtagttttattagatatttttgaagggatgcctaagggtaaatctttagatcttgctcagtcatcttccattgagggatttcatgcagattttaaaggtacttcaagttttagagatatcaaaaattctgatgtagtaatagttactgcaggctttccaagaaaaccaggcatgtcccgagatgatcttgtagaaaaaaattctataatcattcaaaatgtagggaaaaatattaaaaaatattgtccaaaggcatttgttatatgcattactaatccactcgatgcaatggtaagtgtccttcagaaatcatcagaccttaagacaaatatgtgtattggtatggcaggtgttttggatagcgcaagattaaaatactttttatccaaggagtttaatgtgtcaattaatgatatcagtgcttttgtcttaggtggtcatggagacacgatggtcccacttatgcgatactcaacagtatcaggtattcctgtacctgaattaataaagatgaagtggacaacaaaaaaaaatatcgaca

SEQ ID NO: 207120 - DNA, 287 bp, Unknown
  Bacterial polypeptide expressing nucleotide sequence isolated from the Sargasso Sea
aatgagcaagatatctttaataggagctggtcaaataggtggaactttagcacatctaatcggaataaaagaattggttaaagaagttgtgttgtttgatgtagccagcggtatagcaaaaggaaaagctttagatattgcacaatcttcatctgtagatggtttcaatgtcaaattaagtggaactgataattatgagaatattaaaaattctgatgtaatcataattactgctggagtgcctagaaaacctggaatgagtaaagatgacttattaggaattaatt

SEQ ID NO: 207121 - DNA, 613 bp, Unknown
  Bacterial polypeptide expressing nucleotide sequence isolated from the Sargasso Sea
tatgacaaaaaaaatatctttaataggagcaggtcaaattggtggaacattagcacacctaattgcaattaaagaacttggtgatgttgttctatttgatgtagctaaaggattagcaaaaggcaaagccttagacattgctcaatcttcaggtgtaactggttttaatgtgaatatatcaggtacaaatgattacgaggatacaaaaaactctgatgtaattataataacagccggtgttcctagaaaacctggaatgtctagagacgacttacttggtactaatcttaaaataattaaacaggtatcagatggaataaaaaatacatctccagaagcttttgttatttgtataacaaatcctttggatgtaattgtaatggctctacagaaatactctgggctaccttctaataaagtagtcggtatggctggaattttggattcttcaaggtttaaatattttttgtctaaggaattaaatgaaccaataaaaaatatagattcattagttctcggtggtcatggggatacaatggtgcctatgccaaaaaaaactaaaattaaaaaacaaaacattaatcgatttaataaacgagagaaaaatttctaa

SEQ ID NO: 207122 - DNA, 289 bp, Unknown
  Bacterial polypeptide expressing nucleotide sequence isolated from the Sargasso Sea
gatgacaaaaatatctttaataggtgcaggccaaatcggtggaactcttgcacatttaataggaacaaaagaattagcaaatgaagtggttttatttgatgtagctagtggtattgcaaaaggaaaggcattagatattgcacaatcttcatctgtagatggatttaatgttaggttttcaggaactgataactatgaggacataaaagattcagatgtaattataattacagctggcgttcctagaaagcctggaatgagtcgagacgatcttcttggaataatttaa

SEQ ID NO: 207123 - DNA, 583 bp, Unknown
  Bacterial polypeptide expressing nucleotide sequence isolated from the Sargasso Sea
atgaaaaataaaaaaatatcacttattggatctggtcaaattgggggcactttagcccatcttgcggcgatgaaagaattaggtgatgttgttctttttgatttaatggctggtctagctaaaggaaaagcattagatatttcgcagtcatctgcgattgatggttttaatgtttccttatcaggaacagataattacgaagatacgcgagactctgatgtcataatcattaccgctggcgtgccaagaaaaccagggatgacaagagatgatctcttgggtaccaacttgaaaatcattaagcaagttgctgagggtattaaatctacgtcacccaacgcttttgtgatttgcattacaaatccattagatgttatcgtaatggcgctacaaaaatattctggcttaccgaaaaataaagtgattggcatggcgggtgtgcttgatacttcaaggtttaaatatttcttatcacaagagcttgatgtgcctataagcgaagtgaactcatttgttttaggtggacatggtgacacaatggttcccgttcctaatagaacaacagttagtggtaagcccttga

SEQ ID NO: 207124 - DNA, 388 bp, Unknown
  Bacterial polypeptide expressing nucleotide sequence isolated from the Sargasso Sea
aatgagtaaaatatctttaattggtgctggtcaaataggaggaactctcgcacatttaattggaacaaaagaacttgtagacgaagttgttctttttgatgttgcaagtggaatagctaaaggcaaagccttagatattgctcaatcttcatcagtagatggttttaatgtcaaattttcaggcactgatgactataaagatattaaagattccgatgtaattattattactgctggggttccaagaaaaccaggaatgagtagagatgatctacttggtataaatttgaaaatcattaaacaagttgctgaagggattaagcacaattcaccaaatgcttttgtaatttgtattacaaaccctttagatgtaatggttatggctttt

SEQ ID NO: 207125 - DNA, 862 bp, Unknown
  Bacterial polypeptide expressing nucleotide sequence isolated from the Sargasso Sea
tctttttgatctgatgtctggactggcaaaaggtaaagctcttgatatagcgcagtcctcagccatagatggttttaacgtttccttgtctggtactgataattatgaggatacaagtgactctgatgtcatcattataacagctggggttcctcgaaaaccaggaatgactagagatgaccttttaggaacaaacttaaaaatcatcaagcaagtagctgaaggtattaaatcaacttctcctaatgccttcgttatttgtattacaaatccactggatgtaattgttatggctcttcaaaaatattcagggcttccaaaaaataaagttgttggtatggctggagttttagatacttcacgttttaaatatttcttatcacaagaattgaatgttccaattagcgaagtagactcatttgttcttggtggtcacggtgacacaatggttccagttccaaatcgaactatggttagtggtgaaaatctgactgatttagtgaacaaaggaaaaatttcaaaggctaggcttgacgagataattgataggacgagaaaaggtggagccgaagttgttaagttattagaaaccggatccgctttttacggaccggcagcctcgggaattgaaatggccgactcatatctaaatgataagaaaaaaacgttaccatgcgcagcatatttaaatggtgaatacggtatttcagacttatatgttggagttcctgttgttattggcttagcaggaattgaaaaagttgttgaacttgatttagacgaagaagaaaaaaaattttttaaaacttcaatcgaagcagtcagtgagctatttgaagctgcaaaaaatattgatccttca

SEQ ID NO: 207126 - DNA, 496 bp, Unknown
  Bacterial polypeptide expressing nucleotide sequence isolated from the Sargasso Sea
tggagctcttgatagcgcaagatttagagcttttattgcagaagctacaaatttatcatcacaagatgttaactgtatggttcttgggggccatggagatacaatggttcctgttagtaggttggcaacagtaggcggtgtaccattatcatctttattaagtagtgaagaaattattgcaatagaaaatagaacgcgtgttggtggtggagaaattgttaaactttttgggaaaggttctgcattttatgctcctgctcaatctgctgtagaaatgattgaaagttttataagagataaaaaaagagttataccctgtgcctcattatgtgaaggcgaatttgatgtagaaggttatttcattggagtcccaacagtcattggttcaggaggtgttgaaaaaatacttacttttgatcttgataaagatgaaaaaatagctttaagcaatacacttattgaggtaaaaaaaacggttagtgaaactggtttataa

SEQ ID NO: 207127 - DNA, 490 bp, Unknown
  Bacterial polypeptide expressing nucleotide sequence isolated from the Sargasso Sea
catttctaaaaaaactaataaaagtatctcagatattaagaatatgatcatatggggtaatcatagtccaacgatgtatccagatgcagaaaattcaattatctctggtgaattaggaagtactgttattaatgatgttgattggttagaaaatgattttatacctctcgtacaacaaagaggtaaggctgtaattgatgcaagaggatcctcttcagctacctcagcagcaaaagctgcaattgatacgataatagcctgcgagaaccctactgaatcaggagagtgctttagcgcagcaatagcaagtgatggatcatatggtgttccagaaggacttatttgcggctttccactaattactcaaaaagatggaactgttgatattaaaagagatgtcgcattatcagattttggaaagacaaaaattaaaatatcaattgaagagttgctggctgagaaagaagcggtaaaacatctaatgaaatga

SEQ ID NO: 207128 - DNA, 529 bp, Unknown
  Bacterial polypeptide expressing nucleotide sequence isolated from the Sargasso Sea
aattattggcatggctggcgtactagactcagcacgtttacgaacattcgtatcactggaactgggttgttctcttgttgatgtggatgcgatggttttagggggacatggcgactctatggtgcctctccctcgttacacctcggtatcggggatatcgatcaccgaattgatgacaaaggaacaaatagaccgtgtggtagagcgcacacgaaaaggtggcgcggaaattgtttccctattgaaaacaggtagtgctttttatgcgccgggttcttcagttgttaaaatgattgaagctattttgcatgacaaacgtcgcattcttccctgcactgcttatctagaaggtgaatatggctggagcggaattttcttcggtgtgcctgttatgatgggcattaatggaattgaaaaaattatcgaactgaaaatgacagatgaagaaaaagtagcactggataagtccgcacaagatgttaaaaagacctgcgatgaaatagatgctattctcgctacatcgaactaa

SEQ ID NO: 207129 - DNA, 511 bp, Unknown
  Bacterial polypeptide expressing nucleotide sequence isolated from the Sargasso Sea
gcgcctggaccacaaccgtgccttgtcgcaaatcgctgccaagaccggcaagccggtttcgtccatcgaaaagctgttcgtgtggggcaaccacagcccgacgatgtacgccgactaccgctacgccacgatcgacggcaagagcgtcaaggacatgatcaacgacccggtgtggaacaacgacgtgttcctgccgaccgttggcaagcgcggcgccgccatcatcgaagcgcgcggcctgtcgtcggctgcttcggctgccaacgccgccattgaccacgtgcgtgactgggtacttggcagcaacggtaagatcgttacgatgggcatcccgtcgaacggcgaatacggcattccgaaggacgtgatgttcggtttcccggtcaccacggagaacggcaagtacaagatcgtcgaagggctggaaatcgacgagtacagccaaggcaagatcaagatcacgctcgacgagctggaagccgagcgcgcaggcgtacagcatctgctgtaa

SEQ ID NO: 207130 - DNA, 625 bp, Unknown
  Bacterial polypeptide expressing nucleotide sequence isolated from the Sargasso Sea
tttgtaatctgtattacaaatcctttagacgttattgttatggctcttcagaaatattctgggcttccaactaataaagttgtaggtatggcagggatactagactcgtcacgatttaaatatttcttatctagagagtttaaggagccgattaaaaacatagaatctttagttttaggaggtcatggagatactatggttccaatgctaaaacagaccaaaattaaaaataaaaatcttaacgaattagttaaagataacaaaatatctaaaaacaagttagatcaaattataaacagaacaagaaaaggtggagctgaaattgtcaaattattagaaaaaggttcggctttttacgctcccgcagcctcaggtgttgaaatggcagaatcttatcttaaagatttaaaaaaaacattgccttgtgcagcgtatttaaatggagaatatggctataaaaatatttatgcaggtgtgccagtggttataagtaaaaagggtgcagaaagaataattgaaattcaattagaaaaaaatgaaaaattaaattttgatatttcagcaaaggccgtgaaggaattatttgaatcagcggtaaagattgatccaactttagccaaataac

SEQ ID NO: 207131 - DNA, 292 bp, Unknown
  Bacterial polypeptide expressing nucleotide sequence isolated from the Sargasso Sea
ttgaaaacaggttcagcgttttatgcacctgccagtgccgccatacagatggcggactcttatttgaaggataaaaagcgtgtattaccttgcgcggcttttttgcgaggtcaatatggggtaaaagacctttatgtaggtgtgccagtggttattggtgcaaagggtgttgagcgcatagtcgaaataaagatgaatgcaacggagaaggcagcattcaggagatctgttagtgccgttagaaaacttgtaaaagagagtagcaaactaattaatagttctaagaaataga

SEQ ID NO: 207132 - DNA, 327 bp, Unknown
  Bacterial polypeptide expressing nucleotide sequence isolated from the Sargasso Sea
aatgacaaaaatatctttaattggtgcaggccaaattggtggaacacttgctcacttaattggtacaaaagaattagtaaatgaagtagtattatttgatgtagcgagcggtattgcaaaaggaaaagctttagatatagcccaatcttcatctgttgatggttttaatgttaagttttcaggtactgataattacaaagatattaaggactcagatgtaattattattactgcaggtgtccctagaaaaccaggaatgagtagagatgacttacttggaataaatttaaaaattattaaacaagttgctgaaggagttaaacaaaa

SEQ ID NO: 207133 - DNA, 322 bp, Unknown
  Bacterial polypeptide expressing nucleotide sequence isolated from the Sargasso Sea
atgagtaaaatatctttaattggtgcaggtcaaataggcggaactttagctcacttaattggagtaaaagaattagtaaatgaggtagttttatttgatgttgcaagtggtattgcaaaaggaaaagcattagatattgcacaatcatcatctgtggatggttttgatgttaaattttcaggaactgatgattacaaagatattaaagactcagatgtaattataataacagctggagtaccaagaaaacctggtatgagcagagatgatttacttggtattaatttaaaaattataaagcaagttgcagagggaataaaga

SEQ ID NO: 207134 - DNA, 814 bp, Unknown
  Bacterial polypeptide expressing nucleotide sequence isolated from the Sargasso Sea
agtacagtagagatgtttgactcaaagattgaaggagcatctgattatagtgctatagaagactcggatgtgataatagtaacagcaggcgtgccaagaaagcccggtatgagtagagatgacttgctggagataaatcttaaagtgatgagttctgtcggggaaggaattaaaaaatatgctccaaactcttttgtcatttgtattacaaatccgcttgacgcaatggtctgggcacttcaaaaggcaaccggacatagtacaaatatgatttgtggaatggcaggggttctcgactctgcacgatttaggtactttctcgctgaagcaatgggtgtttcagttgaagatgtcacggcatttgtattaggggggcatggagatacaatggtgccgcttactaaatactcaacagtagctggtattcccttaccagatttaattaaaatgaaatggattacccagaaaaaacttgatgaaattgttcagagaacgcgtgatggcggcgcagaaatagtatctctactcaagactggatcagcatattacgcgcctgcgagctcagctatagctatggctgagtcttatttaagggacaagaaaagattattacctgcagctgcctacttgaatggtgagtatgatgtaaacggttattacattggtgtaccagtcataatcgggaaagatggcgttgaaagaattgttgaaataaatctcgataaagatgagaaggaggagtttagctcttctgtcaaatcagttatcagcttagttgaagcctgccagaagattgctccagacttaaagtaat

SEQ ID NO: 207135 - DNA, 470 bp, Unknown
  Bacterial polypeptide expressing nucleotide sequence isolated from the Sargasso Sea
aaaaattaaaactttagttttaggaggtcacggagatacaatggttcccatgcctaatcgtactactataaatggaaaatctttaattgaattaataaaagaaaacaaaattacaaaagaaaaactggaagatattatcactaggacaagaaagggtggagctgaaataataaaatttctccaaaagggatctgcattttatgctcctgcagcgtcaggggtagaaatggccgaatcatatattaaaaacttaaaaaaaacattaccatgtgcagcatatcttaatggggaatatggctttaataaattatatgcaggagttccagcaatcataggtaataaaggcgtagaaaaaatagttgaaattaaattggatacaaaagaaaaagaaaattttgaagtatcagtaaaagcagtaaaagatcttttaaaaattgcaattaaaattgacccaagtctagctaattaat

SEQ ID NO: 207136 - DNA, 699 bp, Unknown
  Bacterial polypeptide expressing nucleotide sequence isolated from the Sargasso Sea
gagatgacttgctggagataaatcttaaagtgatgagttctgtcggggaaggaattaaaaaatatgctccaaactcttttgtcatttgtattacaaatccgctcgacgcaatggtctgggcacttcaaaaggcaaccggacatagtacaaatatgatttgtggaatggcaggggttctcgactctgcacgatttaggtactttcttgctgaagaaatggatgtttcagttgaagatgtcacggcatttgtattaggggggcatggagatacaatggtgccgcttactaaatactcaacagtagctggtattcctttaccagatttaattaaaatgaaatggattacccagaaaaaacttgatgaaattgttcaaagaacgcgtgatggcggcgcagaaatagtatctttactcaagactggatcagcatactacgcgcctgcgagctcagctatagctatggctgagtcttatttaagggacaagaaaagattattgcccgcagctgcctacttaaaaggtgagtatgatgtaaacgggtattacattggtgtaccagtcataatcggtaaagatggcgttgaaaggattgttgaaataaatctcgataaagatgaaaaggaggagtttagttcctctgtcaaatcagttatcagcttagttgaagcctgccagaagattgctccagacctaaattaat

SEQ ID NO: 207137 - DNA, 632 bp, Unknown
  Bacterial polypeptide expressing nucleotide sequence isolated from the Sargasso Sea
taatgcatttgtaatatgtattaccaatccattagatgttatggtgatggcttttcaaaaatactcaggacttccagcaaataaagttgttggtatggctggaatattggatagttcaagattcaaattgtttttgtcaattgaacttaaaattccagtaaaagaaatagaagcaatggttatgggcggccatggagatacaatggttccattaccaagatttacaaaagtttcaggcaaacctttgttgaatttagttaaagaaggaaagttatcagcagaaagattagaggaaatcaatcagagaaccagagatggtggtgctgaaattgttaaatatttagaaaaaggttcagcattttatgctccagcagcatcaggggtacaaatggctgaagcatacataaaagatgaaaaaaaattacttccttgtgctgtacagcttaatggagagtacggcgttaaaaatatttttgcaggagttccagtcataattggaaaaaatggtgtagaaaaaatagaagaaataaatttagatgaaaaagaaaaaagtcaatttatgcattcaatagatgcagttaaaaaattatgggaagcagcttcagcaatagataaagatctttctaagtaat

SEQ ID NO: 207138 - DNA, 847 bp, Unknown
  Bacterial polypeptide expressing nucleotide sequence isolated from the Sargasso Sea
aaaattagtttaataggtgcaggaaatataggaggtactttagctcatcttataggattaaaagaattagcagatgttgttttattagatattgctaaaggtataccgcaaggtaaaagtttagatatcgctgagtcttcacccgtagatggatttgatatcgatctgactggttcaaataacttttctagaattaaaaactccgacgtaataatcgttactgcagggtctccaagaaagcctggtatgtctagagatgatttaattgaaattaatttaaaagtaatgaaaagcgttggtgagggtataaaaaaatacagtccaaggtcctttgtcatatgcataactaacccgctagatgcaatggtttgggctttaagagagttttctaagttgccacatcaaatggtagtaggtatggctggagtcttagacagtgcaaggtttagatattttattgcaaatcatatgaaagtttcagttgaagatgtatctgcatttgtattaggtggtcacggagacacaatggtccccttggtaagattttctaatgtaggaggcatccctcttccagagctagttaaaatgaaattaatagacaataaaagtgtaaataaaattgttgaaagaacaagagcaggaggaggagagatagttagtttattaaaaactgggtcagcattttatgcaccagcttcgtctgctttagctatggctgagtcttttttaaaggataaaaaaagaatattgccttgtgcggcatttttgaatggagagtataatgttaaaaatttctatgtaggtgtacctgttattataggtaaaaaaggagtagaaaaagtcattg

SEQ ID NO: 207139 - DNA, 778 bp, Unknown
  Bacterial polypeptide expressing nucleotide sequence isolated from the Sargasso Sea
agataactataaagatataaaaaattcagatgttattattataactgctggcgtccctaggaagcctggtatgagtagagatgatctcttaggtataaatcttaatataattaaacaagtagctaaaggcatcaaaaataattctcctgaggcgtttgttatatgtattacaaatccacttgatgtaatggtaatggcatttcaaaaatattcagggttgcctacaaaaaaagttgtaggtatggcaggtatacttgatagttcaaggtttaagttgtttttatcattagaactaaacgtacctgtaaaagaaattgattctatggttatgggaggacatggagataccatggtaccacttccaagatttacaaaagtttctggtaaaccattgcttgatattgttaaaaatggaaaaataagtagtgaaagactagaggagataaatcagagaacaagagatggaggtgctgaaatagtcaaatacttggagaaagggtctgcatactatgcgcctgcagcatcaggcgttcaaatggccgaaacatatttgaaagatgataaaaaacttttaccttgtgctgtttatcttaatggagaatatggtgtaagcaatatatatgcaggagttcctgcgataattggcaaaaatggagttgaaaaaattgaggaaattaaacttgatccaaaggaaaaagaacaatttttgcattcaatttattcagtcaaaaaactttgggaagctgcaaaaaatattgataaagatttgtctaagtaa

SEQ ID NO: 207140 - DNA, 940 bp, Unknown
  Bacterial polypeptide expressing nucleotide sequence isolated from the Sargasso Sea
atgagtcatgataaaaaaatcagccttattggagctggaaatattggaacaattctagcttttagtatatcaagaaaaagattaggaaacattacactcattgacagagtcaaaggtttggctgaaggaaaatgccttgacttatctcaaagtctttcggctgaaaacttaaatacaaaaatcttaggtactgatgatatttctaaaatcaaaaatagtgatgcaatagttattactgctggaattccaagaaaacctggaatgtccagagatgatctagttgaaactaatttttcaattatgaaagaactaggaaatgcaattaaagaatattctccaaacgcatttgtagtttgcgtaacaaatccacttgacgctatggtttggtctctcaaagaaattgcagaaattgataaaaaaatgattgtaggtatggctggaatattagactctgcaagatttaagttttttctctccaatgagttatccatttcaactgattctatacaaacaatggttttaggtggacatggagacacaatggttccattattgagattcacgtctatatcaggtattccactttctgaatttattaaaaagaaaagaataagcaaaaataaagttgaagaaattgtttctagaacaagaaatggtggaggtgaaattgttgccttaatgaaaaacagctccgcatttttttcaccagctgcgagtgctatagaaatgcttgaatcatatttatttgataacagaagaatcttaccgtgtagtgcttatctagaaggtgaatacaatgttaaaggattatgtgttggagtacccgttgttataagtaagaatggtgtagaagaaataatagagctggatttacaaaattctgaaaaggatgagtttaataattctgtaaaggctgttagagaaattgttcaaaaatgta

SEQ ID NO: 207141 - DNA, 436 bp, Unknown
  Bacterial polypeptide expressing nucleotide sequence isolated from the Sargasso Sea
atgggtaggaaaaaagttactgtcgtcggagctgggaatgtaggagctactacggctcaacgattattcgagcgtgggtatatggatgttgttctagtagatgtcgttgaagacatgccgcaaggaaaagctttagatatagcagaatctggtccggtcttaggagttgactcaagcattgtaggctccaatgggtatgcagaatctgcaggttcagacgtcgtagtgataaccgctgggattgcacgaaaacctggtatgagcagggatgaccttctcttcaccaatatgaagattattggttcagtagtcagtgaagtagtaaagctatcgcctgaggctatattgatcattgtttcaaatcctttagacgcaatggttcagcatgcattttctttggcagggtttccaaaaaaccgagttgtaggcatggctg

SEQ ID NO: 207142 - DNA, 650 bp, Unknown
  Bacterial polypeptide expressing nucleotide sequence isolated from the Sargasso Sea
tatgtcaaaaaaaatatcattaattggtgctggacaaattggtgggacactcgcccacttaattggtttaaaagaaatagtagatgaagttgtaatgtttgatgttgcaagtggcattgccaaagggaaagcattagatatagctcaatcatcatcggtcgatggatttaatgttaaactatctggaacagataattacgaagatattaaagactctgatgtaattattataactgctggagttccaagaaaaccaggaatgagtagagatgatttattaggaataaatttaaaaattataaaacaggtagcagaaggtgtaaaaaaaaatgcacctaacgcatttgtaatatgtattacaaatccattggatgtaatggtgatggcatttcaaaaatattcaggacttccgactaacaaagttgttggaatggcaggtatattagatagttcaagatttaaattatttctatcaattgaacttaatgttccagtaaaagaaatagaagcaatggttatgggtggtcacggagacaccatggttccattaccaagatttacaaaagtttcaggaaagccattattagatttagtaaaagagggaaaactatcatcagaaagattagaagaaattaatcaaagaactagag

SEQ ID NO: 207143 - DNA, 515 bp, Unknown
  Bacterial polypeptide expressing nucleotide sequence isolated from the Sargasso Sea
catggcacgcaacaagatcgcactcgtcggcgccggtcagatcggtggcacgctggcattactttctggaatgaaggaattgggtgacgtcgtcctttttgacattgttaaaggggtgcctcagggcaaggcacttgacatcgaacaggcatcgacgattgaagggttcgacgcctcggttaagggcgccaacagttacgccggcttgaggaacgcggatgttgtgattgttacggctggtgttccgcggaagccaggcatgagccgtgatgacctcattgggattaacaccaatgtgatgcggcaggtgggcgccggtattaagaaatactgccccaaggcctttgtaatctgtattactaacccgttggatgtaatggtaggtattctgcgcgacgcctgtggcctgccatataatcgcgtggtcggaatggcaggtgtgctggatagcgcgaggtttcgcttattcttggcgcaggagtttaatgtctctgttgaagatgtcaccgcattcg

SEQ ID NO: 207144 - DNA, 769 bp, Unknown
  Bacterial polypeptide expressing nucleotide sequence isolated from the Sargasso Sea
atgaggacaccaaaaaattctgacgttattattattactgctggagtacctagaaaacctggaatgacaagagatgacctcttaggaattaatcttaaaataattaaacaagttgctgaaggaattaaaaaaacatctccaaatgcttttgtgatatgtattactaacccactggatgtaatagtaatggctctacaaaaatattcagacttaccaaaaaataaaatagtaggaatggcaggcatattagactcatcaagatttatatattttctttcccaagagttaaaagttccagtccagaaaataaaatcatttgtattaggcggacatggagatagcatggttgctatgctaggattgacagaagttgatggtaaaaaaattagtgaactggtgaaagaaggcaaaataaaaaaagaaaaactcgataaaatagttgaaagaacaaaaaaaggtggagcagaaattgtaaaatatctagaaaagggatcagcattttatgctccagcagcttcaggtgtggagatggcagaaagttatttaaaagatttaaagaaacaacttccttgtgccgcttatcttaacggagaatacaacacaaaaggtctatatgcaggggttccagtaattattggttctgggggcgtagaaaaagttgttgaattacaacttgataaagaagaaaagaaaaatttcgaaaattctatcaaatcagtacaagatctttttcaagctgctcaaaaaattgacccaagtttaaaataaa

SEQ ID NO: 207145 - DNA, 535 bp, Unknown
  Bacterial polypeptide expressing nucleotide sequence isolated from the Sargasso Sea
ggcaggtgttttggatagtgcaagattaaaatattttttatccaaggagtttaatgtgtcaattaatgatatcagcgcttttgtcttaggcggtcatggagacacaatggttccgcttatgcgatactcaacagtatcaggtattcctgtacctgaattaataaagatgaaatggacaacaaaaaaaaatattgacaaaattattcaaagaacacgtgatggtggtgctgaaattgtaaaactcatgaacacatctgcctattatgcaccagcttcttcagctatacaaatggcagagtcatttttgttagatcaaaaaagattattaccatgtgctgcatatcttaatggtgaatatggagtaaaaggactatatgttggagtcccagttatcattggtaaaaaaggtgttgaaaaaattattgaattacaacttaataataatgaaaagaaagaatttaatcattcagttaaagcagtaaaatcattaactacattgtctaacaagcttctaaataagaaaaataaaaaataa

SEQ ID NO: 207146 - DNA, 814 bp, Unknown
  Bacterial polypeptide expressing nucleotide sequence isolated from the Sargasso Sea
aatgaaaaaaatatctttaattggtgctggccaaataggcggaactcttgcacatttaataggaacgaaagaactagttgatgaagtagttttatttgatgtggctagtggtattgcaaaaggtaaagcattagatattgcacaatcttcatctgtagatggtttcaatgttaggttttcaggaaccgataactatgaaagcataaaagattcagatgtaattataattacagctggagttccaagaaagcctggcatgagtcgagatgatctccttggaataaatttaaaaattattaaacaagttgctgaaggtgtaaagaaaaatgctcctaatgcttttgtgatctgtatcaccaatcctttagatgttatggtaatggcatttcaaaaattttcaggtatgccatcaaataaagtagttggtatggcaggtattttagatagttcgagatttaaattatttttatcattagaactaaatgtgcctgtaagagaaattgaggcaatggttatgggtggtcatggtgacaccatggttcctatgccaagatttacaaaaatttcaggtaaaccattgttggatcttgtaaaggatgaaaagatatcttcagaaagagttgaggaaattaatcaaagaacacgagatggtggtgcggaaatagttaaatatttagaaaaaggatcagccttttatgcaccagcagcttcaggtgttcaaatggcagaagcatatttaaatgatcagaaaaaattattaccctgcgctgtacaattaaatggagaatatggtgtgaaaaatgtttatgcaggt

SEQ ID NO: 207147 - DNA, 619 bp, Unknown
  Bacterial polypeptide expressing nucleotide sequence isolated from the Sargasso Sea
tatgtcaaaaaaaatatcattaattggtgctggacaaattggtggaacactcgcacacttaattggtttaaaggaactagtagatgaagttgtaatgtttgacgttgcaagcggtattgcaaaagggaaagcgttagatatagctcaatcatcatcggtcgatggttttaatgttaaattatctggaacagataattacgaagatattaaagactccaatgtaattattataactgcaggagttccaagaaaaccaggcatgagtagagatgatttattaggaataaatttaaaaattataaaacaggtagcagaaggtataaaaaaaaatgcacctaacgcatttgtaatatgtattactaatccattagatgttatggtgatggcgtttcaaaaatactcaggacttccagcaaataaagtcgttggtatggcgggaatactagacagctcaagattcaaattgtttttgtcacttgaacttaaaactccagtaaaagaaatagaagcgatggttatgggcggccatggggatacaatggttccattaccaagatttacaaaagtttcaggtaagcctttgttggatttagttaaagagggaaaattatcattagaa

SEQ ID NO: 207148 - DNA, 778 bp, Unknown
  Bacterial polypeptide expressing nucleotide sequence isolated from the Sargasso Sea
gagcggttcttcaaaatacagtgaaatgaagggagctgatgtagtaattgtaacagcaggttttcaaaggcgtcctggaatgacgcgagatgacttagttgaaaaaaactcagtaattattcaaacagtaggaagtggaataaaggctaattgccctaaagcatttgttatatgtataactaatccgcttgatgccatggttagtgttttacaaaaagctgctggcttaaaaactaatatgtgtgttggtatggcaggcgttcttgatagtgcaagattaaaatatttcttagccgaagagtttaaagtttctgtagaagatgtaagtgcatttgttcttggtgggcatggtgataccatggtgccacttataagatatgcgagtgttgcaggcatccctgttccagagttaattaaattaaaatggacaacaaagaaaagaatagattcaattattgagagaaccagagatggtggtggtgagattggtaggttaatgaaaactgcttctgcattttatgcccctgcttcttcggcaatagcgatggctgagtctttcctaaaagatcaaaaaagagctctaccatgtgctgcttatttaaatggacaatacggtgttaaaggtttgtatgttggtgttccagttatcattggtaaaaaaggtgtggaaaaagttttagatttgaaattaaattctgatgaaaagaaacaatttaataactcagtaaaagccgttaaaaatcttactgctttagcaaaaaaactaacatcaaaataa

SEQ ID NO: 207149 - DNA, 755 bp, Unknown
  Bacterial polypeptide expressing nucleotide sequence isolated from the Sargasso Sea
aaattctgacgtcataattattactgctggagttccaagaaaacctgggatgtctagagatgatcttctaggtataaatctaaaaataataaaagaagtagctctgggaataaaaaaaacatctcctgatgcatttgttatatgtataaccaaccctttagatgtaattgttatggcacttcaaaaatactctggtttaccaaaaaacaaagtcgttggaatggctggtattttagactcgtcaagactcatttattttttatctgaaaaattaaacatcgaagcgagtaaaataaaatcatttgttctcggcggtcatggagacacaatggttgctatgttaaaccatactaaagtagacggggaacctatcaaaaatctcgtaaaatctggaaaaatattagaggaggatttaaataaattggtagatagaacaaaaaaaggtggcgctgagatagttaaatacttagaaaaagggtcggcattttatgcacctgcctcagctggagttgaaatggctgagagttttattaaagatctcaaaaaagaacttccatgcgctgcatacctcaatggagaatatggagttaaagatatttatgctggagttcctgtcataataggtaaaaacggtgtcgaaaaagtagtggagatcaaattatcgtctgatgaaaaagatcaatttaataaatcaattaaagctgtacaagatttatttgaagcagctaaaaaaatagataataatctcaagtaat

SEQ ID NO: 207150 - DNA, 580 bp, Unknown
  Bacterial polypeptide expressing nucleotide sequence isolated from the Sargasso Sea
cttcagaaatcatcaggccttaagacaaatatgtgtattggtatggcaggtgttttggatagtgcaagattaaaatactttttatccaaggagtttaatgtgtcaattaatgatatcagcgcttttgtcttaggcggccatggagacacaatggttccacttatgcgatactcaacagtatcaggtattcctgtacctgaattaataaagatgaagtggacaacaaaaaaaaatatcgacaaaattattcaaagaacacgtgatggtggagctgaaattgttaagcacatgaatacatctgcttattatgcaccagcttcttcagctatacaaatggcagagtcatttttgttagatcaaaaaagattattaccatgtgctgcatatcttaatggtgaatatggagtaaaaggactatatgttggagttccagttatcattggcaaaaaaggtgttgaaaaaattattgaattaaaacttaataataatgaaaagaaagaatttaatcattctgttaaagcagtaaaatcattaaccacattgtctaacaagcttctaaataagaaaaataaaaaataat

SEQ ID NO: 207151 - DNA, 709 bp, Unknown
  Bacterial polypeptide expressing nucleotide sequence isolated from the Sargasso Sea
atgaaaaaaaaaatctctttaattggagcaggtcaaatcggagggacacttgctcatctaattgccttaaaacaacttggtgatatagttttgtttgatgtagacgaaggagttgccaagggaaaagctttagatattgcacaatcatcagcggttgaagaatttgatcttaatttaacaggaacttcaaattacaatgatacagaaaattcagatgtcataattataaccgctggagttcctaggaaaccaggtatgtcaagagatgatttgttaggaattaatcttaaaataatcaaacaggtttctgaggggattaaatcaacatcaccaaatgcatttgttatttgtataactaatcctttagacgttatagtaatggcgcttcaaaaatatacaggttttaaaaaatctaaagtagtaggtatggctggaattttggactcttcaagatttaagtattttttatcaacagaactaggtattccagcaaaatcgattaaatctttcgtattaggagggcacggggatacaatggttgcaatgactaataataccttcataaacgaaaaaccattaagtgaatttgttaaaactggaaaattacctgaaacaaaattgaaaaagattatcgagaggacaaaaactggaggagctgaaatagttaaatatttaaaaaagggtttctgcattttacgcacccgcttct

SEQ ID NO: 207152 - DNA, 460 bp, Unknown
  Bacterial polypeptide expressing nucleotide sequence isolated from the Sargasso Sea
aatggctcgaaaaaaaatagcgctcataggtgcgggaaacattggtggtacgctagcgcatttggcaggactcaaggagctcggcgatgttgtcttgtttgacattgttaagggtattccgcaagggaaggcgctggatatagtgcagtcctcgccagttagtggtctcgatgcaaagtatttgggtgcaaacagctatcgagcaatccgcggcgctgatgtcgtaattgtgacggcgggcatccctcgtaagccaggcatgagcagagatgatcttgttagtgtcaacacaggcgtaatggaggcggttggcgcaggtataaaggcaaactgcccgaaagccttcgttatttgtataactaacccattggatgcaatggttctggttcttaaggaagctagtggcttgccgcataataaggttgttgggatggcagggattttagattctgctaggttt

SEQ ID NO: 207153 - DNA, 931 bp, Unknown
  Bacterial polypeptide expressing nucleotide sequence isolated from the Sargasso Sea
tcgtgtaactataactggagcagcagggcaaataggttatcaattggcatttcgaattgcctctgggcaaatgctaggctcaaatcagaaagtcatactacaattacttgagattactccagcgcttcctgcccttcaaggtgtccttatggagcttgaagattgtgcttttcctacgcttgctggtgttatagccacagacaacgcagatgaagcatttaatgaaacagactatgctctgctggttggagcaatgccaagaggaccaggaatggagagagctgatttgctcgaagcaaacgcaaaaatctttactcatcaaggttctgccataaataatagtgcaaataaggatgcaaaaattctcgtggttggaaatccggcaaataccaatgcattgattgcgagttcaaatgcaccaaatattgatccttcaaacttttctgctatgactagactggatcacaacagagcaaaatcatatttagcaaaaaaaatagaggtctccagcacagagatcaagaaaatgattatctggggaaatcactcagcaactcagtttcctgatctttatcatgtgctctacaacggcaaacccataaataatgagatcgatcatcaatggctaatcgatgatttcattccaacagtacaacaaagaggggctgaaattattaaggccagaggcgcatcctctgccgcctctgctgcctcagcagctattgaccatatgagggactgggcactgggaacaccaaaggatgactgggtaagcatggcgatcccatcagatggaagctatggaattgaaccaggtatcatattctcttttcctgttaaatgtgaaaatgggaaatatgagattgttcaagggcttgatattgaggcattcagcagagagagaatcaatattacagaagcggaactaaga

SEQ ID NO: 207154 - DNA, 778 bp, Unknown
  Bacterial polypeptide expressing nucleotide sequence isolated from the Sargasso Sea
aattatgacgatattaaagattctgatgtaattatcataactgcaggagtaccaagaaagccaggtatgagcagagatgatttacttggtattaatttaaaaattattaagcaggttgcagaaggaataaaagtaaatgcacctaacgctttcgttatatgcattacaaatccattagatgtaatggtaatggcatttcaaaaatattcaggacttccagcaaataaagtagttgggatggctggtattttagatagttcacgttttaaactttttttatctgaggaattaaatgtacctgtaagagaaattgatgcaatggtaatgggtgggcatggagacacaatggtacctcttccaagatttactaaggtctctggaaaacctttaatggatttattaaaggatggaaaaatttctgaagaaaaattagagagtattaatcaacgaacaagagatggtggtgctgagattgttaaatatttggaaaagggatctgcattttatgcaccagcagcttccggagtagagatggcagaagcatttttaaaagatcaaaaaaaacttttaccatgtgcagcacatctacatggagaatatgggatcaataatgtttatgctggtgttcctgttatcatcggaaaagaaggcgttgaaaggattgatgaaattgatcttaatgagaatgaaaaaacagaatttaataattctgtggaagcagtcatcaaattgtgggatgcggcatcaaaaatagatcctgatttgaataaagactaaa

SEQ ID NO: 207155 - DNA, 790 bp, Unknown
  Bacterial polypeptide expressing nucleotide sequence isolated from the Sargasso Sea
atgaaaaaagttactgtagttggcgcaggtaagtatggttctatgactgcattgaggatagcagagtatgatatagccaagacagtagtaatgactgatattgtggaaggcttacctcaaggtttaagtttggatataaaccaatcaagatatgttgaaggcttcaacacaaaacttattggaacaaataattacgaagacacatcagatagtgacatagtagtaataaccgctggcttaccaagaaagcctggaatgtcgcgaatggatttattagaagttaatgctggaatagttagtgaagtaactaaaaatattctaaagcactctgaaaatccaataatagtggttgtaacaaacccgctagatcaaatgacaactcttacagctgaagtatcaaatctttcaaaaaatagagttattggtcaagcaggtgtattagattcttcaaggtttgcttattttatttcagaaaaagttggagttgatatttcagctgtagaagctttaactcttggaagtcatggcgatacaatggttccagttccttcattatgcaaggtagatggaaaaccattagaagaaatattatcttctgaagaaataaatgatttagttcagaggacatccgatggaggagctgaaattgtaagtttacttaaaactggaagtgcatattttgcccctgcctcatctgctgcaaccatggtcaaagccatgttgagtgattctaatgagatatttccagtctgtgcatggcttgatggcgaatatggcataaatgacgtat

SEQ ID NO: 207156 - DNA, 556 bp, Unknown
  Bacterial polypeptide expressing nucleotide sequence isolated from the Sargasso Sea
aaaacaaatatgtgtgttggaatggctggagtattggatagtgctcgtctcaaatattttttggctaaagaatttaaagtttcagtcaaagatgtaagcgcttttgttcttggtggtcatggtgatacaatggttccaattattaggcattcaactgtttcaggagtatctgttcctgaattaataaaactaggactttcaacaaagaaaagaattgactcaattatcaaaagaacaagaaatggtggtggagaaataggaaagcttatgaaaacatcttcagctttttatgcacctgcttcatcagcaattttaatggcagaatcatatttaaaagaccaaaaaagaattttgccatgtgctgcatatttaaatggtcattatggagttaaatccctatatgttggggttccagtaataataggaaaaaaaggggtagaaaaaattttagaacttaaattaaattcagttgaaaaaaaacagtttagtaattctgtcaaagcggttaaaaaattgactagcctagcttttaaattaattaaaaataataaatgaa

SEQ ID NO: 207157 - DNA, 867 bp, Unknown
  Bacterial polypeptide expressing nucleotide sequence isolated from the Sargasso Sea
tgagagaagtggacatcggcatcgattgcagaaaggtgttcgcggacgccgattgggcgctgttgatcggggctaagccgcgcggtccgggaatggaacgcggtgatttgctcgacatgaacggcgccatcttcgccgaacagggcaaggcgttgaacgacgtcgccaagccgacgtgtaaggtgatcgtcgtcgggaacccgtgcaacacgaacgcgttgatcgcgctctcgcacgcgcccaacttggatccgcgcaacttccacgcgttgaccaagctcgatgaaaaccgagccaagtgccagctcgccatcaaggctggcgtcttttacgagacggtgagcaacgtcgtgatttggggcaaccactccacgacgcaggtgccggatttcgtcaacgcgaagatcaacggcgacatggccaccgaagtgatcaatgatacggagtggctcgagaacgatttcaccccggcgattcaaacgcgcggcggtttgttgattaaaaagtggggtcgctcctcggcggcgtccacggcggtgtccatcgagagcgccatcaaagacttggtgaacccgaccccggagggtgactggttctctacggcggttcttagcaacggtaacccgtacggcattcaagacggtttggtctactcgttcccgtgccgctccaccggcgacggttcgtacgaattcgtcgagggcttggagatcaacgactggctccgcgaacgcatggccaagagcgaagaagagctctcgggagagaagggttgcgtctcgcaactcatgggcaccgcgcacgtagcaggtggcgatctctgcccggttgatctcgaggacaccctcttgccgggagaaatgtaag

SEQ ID NO: 207158 - DNA, 322 bp, Unknown
  Bacterial polypeptide expressing nucleotide sequence isolated from the Sargasso Sea
tatgtcaaaaaaaatatcattaattggcgctggacaaattggtggaacactcgcacacttaattggtttaaaagaactagcagacgaagtggtaatgtttgatgttgcaagtggtattgccaaagggaaagcattagatatagcccaatcatcatcggtcgatggttttaatgttaaattatctggaacagataattacgaagatattaaagactccaatgtaattattataactgcaggagttccaagaaaaccaggcatgagtagagatgatttattaggaataaatttaaaaattataaaacaggtagcagaaggtata

SEQ ID NO: 207159 - DNA, 538 bp, Unknown
  Bacterial polypeptide expressing nucleotide sequence isolated from the Sargasso Sea
tatggcaggaattttagacagttcaaggtttaagttatttttatcaagagagttaaacgttcctgttaaagagattgatgcaattgtaatgggaggacatggagatacgatggtacctttaccaagattcacaaaagtgtctaaaaaacctttattggatcttgtaaaagacggaaaaatatcttcagaaaaattagaaagtataaatcaaagaactagagatggaggtgctgaaatagttaagtatttagagaaaggctcagcgttttatgcaccagcagcttcaggagttgaaatggctgcagcatatttaaatgatgaaaaaaaacttttaccttgtgctgcatatatgaatggtgagtatggagttgaaaaaatttatgcaggtgttccagtaattataggaaaaaatggaatagaaaaaattgaagaagtagaattggatgataaagaaaaaacagaatttaatcattctatagaagccgtgaaaaaattatgggaggcggcatccgcaattgatccagatttaaaaagataa

SEQ ID NO: 207160 - DNA, 720 bp, Unknown
  Bacterial polypeptide expressing nucleotide sequence isolated from the Sargasso Sea
gaaaacctggcatgagtagagacgatctacttggtataaatttaaaaataattaaacaagtagctgaggggattaagaaaaattcgccaaatgcatttgtaatttgtattaccaatccattagatgtaatggttatggcattacaaaaatattcaggattaggaaaaaataaagtagtaggaatggcaggaattttagatagttcaaggtttaaactttttctatctaaagaattaaaagttcaagtaaaagaaattgaagcgatggtcatgggaggacacggagacaccatggtaccacttccaagactaacaaaagtttcaggaaaacctcttctcgatcttattaaagaaggaaaaatttctagtaaaaaattagaaagtattaatcaaagaactagagacggtggagctgaaatagtcaaatttttagaaaaaggatctgctttttatgcaccagcagcttcaggtgtagaaatggcagaatcttatattaaagatcttaaaaaagtattgccttgtgctgcgtatttagacggtcagtatggagtaaaagatttgtatgctggtgttccagttgtaattggaaaaaatggtgtcgaaaaaatagaagaaatcaatttagatgataaagaaaaatcagaatttatgaactcagtaaatgctgtaaaaaaactttgggaagcagcttccaaaattgatcccgatttaaataaataga

SEQ ID NO: 207161 - DNA, 721 bp, Unknown
  Bacterial polypeptide expressing nucleotide sequence isolated from the Sargasso Sea
catgaaaaaaaaaatttctttaattggtgcaggtcaaataggtggaacacttgcacatttaattggaacaaaagatttagttaatgaagtagttttatttgatgtagcaagtggaattgcaaaaggtaaagcgcttgatatagctcaatcttcttcagtggatggttttaacgtaaaattttcaggaacagatgattataaagacattaaagattctgatgtaatcattattactgctggcgttcccagaaagcctggaatgagtagagacgatctgcttggtattaatttgaaaattataaaacaagtagctgaaggagtaaaacaaaatgctcccaatgcatttgttatatgtattactaacccactagatgttatggttatggcatttcagaaattttctggtttaccatcaaataaagtagttggtatggctggaattttagacagttctagatttaaattatttttatcactagagctaaatgttcccgtaagagaaatagatgcaatggttatgggaggacatggagatactatggttccaatgcccagatttaccaaagtttctggtaaacctttgctagatctaattaaggaaggtaagatttctcaagaaagactggaagaaataaatcaaagaacaagagatggtggtgcagaaattgtaaaatatcttgaaaaaggttcagcattttatgctccggcagcatcaggtgtt

SEQ ID NO: 207162 - DNA, 286 bp, Unknown
  Bacterial polypeptide expressing nucleotide sequence isolated from the Sargasso Sea
atgaaaaaaatatctttaatagggtctggtcaaattggaggaaccttggcacatttaattggcctaaaagaattagcagatgaagtagtattatttgatgttgcaagtggaatagcaaagggcaaaagtttagatattgctcaatcttcatcagttgatggttttaatgtaaaattatctggaactgatgattataaggacatcaaaaactcagacgttataattataacagcgggagttccaagaaagcctggcatgagtagagatgatttattaggaattaatt

SEQ ID NO: 207163 - DNA, 722 bp, Unknown
  Bacterial polypeptide expressing nucleotide sequence isolated from the Sargasso Sea
aagaaaacctggaatgagtagagatgatttattaggaataaatttaaaaattataaaacaagtagctgatggaattaaaaaaaattcacctgaatcatttataatttgtattacaaatcccttagatgttatggtaatggctttacaaaaatattccagtttatcaccaaataaagttgttggaatggcgggtattttggatagctcaagattcaaattgtttctctctctagagttaaatgttccagttagagaaattgaagctatggttatgggaggtcatggtgataccatggttcctttaccaagattcacaaaaatatcaggcaaacctcttttagaattaattcaagagggtaaaatttcgaaagataggctagagagtattaatcaaagaacaagagatgggggtgcagagatagttaaatttttagagaaaggttctgcattttatgcacctgctgcatcaggagttcaaatggcagaagcctacttaaaaaatcaaaaaaaaattttaccatgtgctgcctacttaaatggtcaatatggatttaaaaatatttatgctggagttcctgtggtaattggaaaaaatggagtagaaaaaattgaggaaatagatcttgatgagaaagaaaaacaggagtttaatcactctgttgatgcagtaaaaaaactctgggaagctgctataaatattgatcctgatctaagtaaatgaa

SEQ ID NO: 207164 - DNA, 652 bp, Unknown
  Bacterial polypeptide expressing nucleotide sequence isolated from the Sargasso Sea
tatgaaaaaaatatctttaattggtgcaggtcagatcggtggaacattggctcacttaattggtttaaaagaattagtgaatgaagttgttttatttgacgttgtaggtggtgttgcaaaaggaaaagctttagatattgagcaatcttcatcggttgatggtttcaatgttaaattatctggaacagataattatgaggatataaaaaactctgatgtaattattataacagcaggtgttccaagaaaaccaggaatgagcagagatgatttacttggaattaatttaaaaattataaaacaagtagctgaaggtataaaaaaaaatgcacctagtgcatttgttatatgtataactaatcctttagatgttatggttatggcgtttcaaaaatattcaggcttaccaactaataaagttgttggaatggcaggaatacttgatagttcaagatttaaattatttttgtctcaagagctcaaagttcctgtaagagaaattgaatcaatggtaatgggcggtcatggagataccatggttcctttaccaagatttacaaaagtttcaggtaaaccgttattagatcttgtaaaagatggaaagctgtcgaatgaaagattggaagaattaatcaaagaaccagagatggtg

SEQ ID NO: 207165 - DNA, 546 bp, Unknown
  Bacterial polypeptide expressing nucleotide sequence isolated from the Sargasso Sea
aatgacaaaaatatctttaattggtgcaggccaaataggtggaactcttgcacatttaataggaacaaaagaattagtgaatgaagtggttttatttgatgtagctagtggtattgcaaaaggaaaagcattagatatcgcacaatcttcatctgtagatggtttcaatgttagtttttcaggaactgataactatgaggacataaaagactcagatgtaataataattacagcaggcgttccaagaaaacctggaatgagccgagacgatcttcttggtattaatttaaaaattattaaacaagttgctgagggggtaaagaaaaatgctcctaacgcttttgtgatctgtatcaccaatcctttagatgttatggttatggcatttcaaaaattttcaggtttgccatcaaataaagttgttggtatggcaggtattttagatagttcgagatttaaattatttttatcattagaactaaatgtgcctgtaagagaaattgaggcaatggttatgggtggtcatggtgacaccatggttcccat

SEQ ID NO: 207166 - DNA, 661 bp, Unknown
  Bacterial polypeptide expressing nucleotide sequence isolated from the Sargasso Sea
tgcagaaggaataaaaaataatgcgcctaatgcctttgtaatttgtattacaaatccattggatgtaatggtaatggcatttcaaaaatattcaggactccccgttcataaggttgtagggatggcgggtatattggatagttcaagatttaagctatttttatctgaagaattaaatgtgcctgtaaaagaaatcgatgctatggtaatgggtggacatggagatacaatggtacctcttccacgatttaccaaagtctctggtcaaccattgatggagttagtgaaagagggaaagatttctgaggaaaaattagaaagtattaatcagcgaactagagacggtggtgcagaaattgtaaaatatctagaaaaaggatcagcattttatgcacctgcagcatctggagttgagatggccgaagcatttttaaaagatcaaaaaaaacttttaccatgcgcagcatatttacatggagagtatggaattaataatgtatatgcaggcgttcctgttatcattggaaatgaaggtgttgaaaaaattgaggaaatcgaccttaatgaaaatgaaaaaactgagtttaataattcagtagaagcagtaataaaattatgggatgcagcatctaaaatagaccctgacttaaacaaagattaa

SEQ ID NO: 207167 - DNA, 698 bp, Unknown
  Bacterial polypeptide expressing nucleotide sequence isolated from the Sargasso Sea
aatgtctagagatgacttagtagaaaaaaattcaaaaatcattcaaacagttggaaaagcaataaaaaaatattgtccaaaagcatttattatatgtatcactaatccgcttgatgctatggttagcgttcttcaaaaaagctcttcattaaaaacaaatatgtgtgttggtatggcaggagttttggatagtgccaggttaaaattatttttagcaaatgaattcaaagtatcagttaaagaagttaatacatttgttttaggaggtcacggcgatactatggtacctttaataaggtattcaacaatatcaggcattcccgttccagaattaattaaattaaaattaagctctaataaaaaaataaattccattgttaaaagaacacgtaatggtggtgcagaaatagtgaaattaatgaaaacttccgcattttatgctcctgcttcatcagcaatagcaatggccgaatcttatttgagagatgaaaaaagaatacttccctgtgcagcgcacctaaatggagaatatggagttaaaggtttatatgttggtgttcctgtaataataggaaaaaaaggtgtagaaaaaattgttgaattaaaattaacacctcttgaaaaaaaacaattttcaaaatcggttaaagctgttcgtaatttaactaaactagctatcaatcttttaaaaaaataat

SEQ ID NO: 207168 - DNA, 538 bp, Unknown
  Bacterial polypeptide expressing nucleotide sequence isolated from the Sargasso Sea
aatgagaaaaaaaattgctcttattggagcaggcaatatcggtgggactttagcacaacttgttagtataaaagaattaggtgatgtagttttattagatatttttgaagggatgcctaagggtaaatctttagatctcgctcagtcatcttccattcagggatttcatgcagattttaaaggtacttcaagttttagagatatcaaaaattctgatgtagtaatagttactgcaggttttccaagaaaaccaggcatgtcccgagatgatcttgtagaaaaaaattctataatcattcaaaatgtaggcaaaaatattaaaaaatattgtccaaaagcatttgttatatgcattactaatccactcgatgcaatggtaagtgtccttcagaaatcatcaggccttaaaacaaatatgtgtattggtatggcaggtgttttggatagtgcaagattaaaatactttttatccaaggagtttaatgtgtcaattaatgatatcagcgcttttgttttaggcggtcatggagacacgatg

SEQ ID NO: 207169 - DNA, 811 bp, Unknown
  Bacterial polypeptide expressing nucleotide sequence isolated from the Sargasso Sea
ggcgctgggaatataggaggggagttagcttccttgatagcttcaaaatcattaggagatgtcgttttagttgatgttgttgatggtctggctaaaggaaaggcattagacctcggacagagtggtgctgtgagaaactttatttattctatttctggtggaagctccttatcaaaaattaaaaacagtgatgtaatagtagttacagctggaatttctagaaaaccaggaatgagcagagatgatttaatttctaccaatcttgaaattatgaaaaatatcggacaagctattaaaatttacagtcctaattcgttcattgtttgcgttacaaaccctctcgatgctatggcatgggttctaaaaaaaatcagtggaataaaaaaaaatatgattgtaggtatggctggaatacttgattcagcaagatttaaattttttttatcaaaagctttgaatgtatctcaggaagatattcaaacaatggtcttaggaggacatggcgatactatggtaccacttttgaattatacaaaaattagtggtattcctattctagaatatttaaaacaaaataatgttaaaagaaaaattgttgatgacataattgaaagaacaagaaatgggggaggagaagtagtatcattgttaaaaactggatcggcattctatgcacctgctataagtgcatgtgagatagttgagtcttttttgagaaataagaaaaaattagttccttgttcaacgtatcttacaggagaatatggtgttaagaatctttttgtaggagttccagttgtaaataggtaat

SEQ ID NO: 207170 - DNA, 571 bp, Unknown
  Bacterial polypeptide expressing nucleotide sequence isolated from the Sargasso Sea
gtactcaaaattaccaacaaataaagttgttggaatggcaggtattcttgatagttcgagatttaaactttttttatctttagaattaggtgtgccagtaaaacaaatcgatgcaatggttatgggtggtcatggagatacaatggtcccgcttcctagatttactaaagttaacggtaaaatgttaaatgatttaattagtgagggaaaaatttcagcagataaagttgaaagtattaatcagagaacaagagatgggggtgcagaaatagtaaaatatttagaaaaaggatcagcttattatgctcccgcagcttcgggcgtagagatggctatatcttttcttaatgatgaaaaaaaagttttaccatgtgcagcacatttaaacggcgagtatggtattaaaaacgtttatgctggtgttccagttttgataggaaataaaggtgtcgaaaaaattgaggaaatccaactcgatgaaaaagaaaaaaaagaatttttaaattcggtaagtgcggttgaaaagctttgggaggcagctgtaaaaattgatcctgaattgaataattga

SEQ ID NO: 207171 - DNA, 755 bp, Unknown
  Bacterial polypeptide expressing nucleotide sequence isolated from the Sargasso Sea
tgacgtatgcattgttactgctggtgttcctagaaaaccaggcatgagcagagatgatcttcttggtataaacttaaaagtaatgaaatcagtagcggagggaatctccacccacgctcctaatgcatttgtaatttgcattactaatcctctggatgcaatggtttgggcgctaaaagaattctctggtctgcctcatgaaaaagttgttggaatggctggagtgcttgatagctcaagatttagatattttatttcagaagaaacgggcgtatcagttcaagatatatcggcgtttgttttgggaggacacggcgatactatggttccactagtaagatattcaactgtcgggggtatccctcttcctgacatagtggaaatgggaattatgtctcaagattctttagataatattgtgcaaaggacaagggatggtggagcagaaatagtaggccttcttaaaactgggtcagcgtattacgcccctgcatcctctgcgatacaaatggctgagtcgtatttatatgactcgaaaagattactgccttgtgccgcatttgttgacggacaatataatcttaatggcatatatgttggggtaccagtggtgatagggggtcaaggaatagaaagggtaattgagatatctctctctaaggaagagcaaatagaattttctaattctgttgactcggtcaaaggtctaattgacgcatgtataaaaattgatccgtcgctaggaaaaaaataga

SEQ ID NO: 207172 - DNA, 384 bp, Unknown
  Bacterial polypeptide expressing nucleotide sequence isolated from the Sargasso Sea
aatgagcaaaatatctttaattggcgcaggtcaaattggtggaactttagctcatctaataggaattaaagaattggtgaatgaagttgttttatttgacgttgcaagtggtattgctaaaggaaaagctttagatattgcacaatcatcctctgtagatggttttaatgttaagtttttaggtactgatgactacaatgatattaaaggttctgatgtaataattattacggctggagtaccaagaaaacccggcatgagtagagatgatttattaggtataaatttaaaaataattaaacaagtcgcagagggagtaaaacaaaatgctcctgatgcatttgtaatatgtattactaatccactagatgtaatggtcatggc

SEQ ID NO: 207173 - DNA, 466 bp, Unknown
  Bacterial polypeptide expressing nucleotide sequence isolated from the Sargasso Sea
tatgaaaaaaaaaataactttaattggttcaggtagtataggaggtacactagctcacttaatagctttaaaagagttaggagatattacattaatagatattataaaaggtgtgcctcaaggcaaagctcttgatctagctcaatcttcatctgttgaattatttgatgtcaagattgtaggatctaacaattattcatcacttagaaattctaatgtggtaattatcacagctggcattcctagattgccaggaatgtcacgtgaggatttacttgatactaataccagaattatcttaaacattggcaaagcaataaaaaaatattgtcctaaagcatttcttatttgtattactaatcctttagatgcaatggtaagtgttcttcaactagcatcaaaagtaaaacataatatgtgtgttggaatggccggtattttagatagttcacgtttaaaatatttt

SEQ ID NO: 207174 - DNA, 595 bp, Unknown
  Bacterial polypeptide expressing nucleotide sequence isolated from the Sargasso Sea
ttagatgtaattgttatggcactacaaaaatactcaagtttgccaacatctatgatagttggtatggcaggaatattagacacatctagatttaaatattttctttcacaagaactcaaaatttcaataaataaaattaattcattagttttgggtggtcatggagacacaatggttccaacacttaaccatactataattgatggtaaatctttaactcaactcgtgaaagataaaaaaatctcaccagaaaaattaagctctataatagacagaactagaaaaggtggagcagaaatagttaaattattagaaaaaggatctgcattttatgctccagctgcttcaggagttgatatggctgagtcttatattaaagatattaaaaaaacattgccatgtgcagcatatctaaatggagaatacaatgttaaggggctatatgttggtgttccagttgtcattggcaaaagtggagtagaaaaaatattggagctagagctaaatgatgaagaaaaaaataactttgaaaaatctgttaaagctgtagaagaattatttcattcagctcaaaaaattgatccatctttgtaat

SEQ ID NO: 207175 - DNA, 748 bp, Unknown
  Bacterial polypeptide expressing nucleotide sequence isolated from the Sargasso Sea
atgaaaaaaaaaataactttaatcggagccggtcagattggtggaactttagcacatttaatagctttgaaagagttgggagatatagttttatttgacgttgctgtaggtattgcaaaaggaaaggccttagatattgctcaatcatcaccagtaaataaatttaatatagatttaattggtactgataattatgaagatactaaaaattcggatgtgattattatcactgcaggaattccgagaaaacctggtatgacaagagatgatttactaagtataaatctaaaaataattaaacaagtatcagagggaattaaaaaaacttctccaaatgcatttgtaatctgcattacaaacccacttgatgtgattgtaatggcactgcaaaaatactctggattgcctaaaaataaagtagtaggtatggctggaattttagactcttcaagatttatttattttctctcaaaagaattaaaagttccagtacaaaaaatcaaatcttttgttcttggtggccacggtgacaccatggttgcaatgttagagtcaacagaagttgaaggtaaaaaaattttagacttagtcaaaaaaggaaaaatatcaaaagacaaattaaatcaaatagttgaaagaacaaaaaaaggtggagctgaaatagtaaaatacctcgagaaaggttctgcattttatgcacctgcagcgtcaggagttgagatggcagaaagttatctaaaagattaaa

SEQ ID NO: 207176 - DNA, 838 bp, Unknown
  Bacterial polypeptide expressing nucleotide sequence isolated from the Sargasso Sea
agcacttgatatagctcaatcttcttctgtggatggttttaatgtaaaattttctggtactgataaatatgaggatattaaggattcagatgtaataattattactgcgggtgttccaagaaagcctggaatgagtagagacgatcttttaggaattaatttaaaaataattaagcaggtagcagaaggtattaaaaaacattctccagattcttttgttatttgtattacaaatccattagatgttatggttatggcatttcaaaaatattctggattacctactaatatggtagttggtatggctggcatattagacagttcaagatttaaattatttttatcaagagaacttaaagttcctgttaaagaaatagatgctatggtaatgggaggccatggagacacaatggtacctttgccaagattcacaaaagtttcaggcaaacctttactagatatagttaaagagggtaaaatttcctcagaaagattagaagaaatcaatcaaagaactagagatggaggagcagaaatagttaaatttttagagaaagggtctgcattttacgctcccgctgcttcaggagttcaaatggctgaagcctttataaatgatgaaaaaaaactacttccttgtgctgttcatttgaatggagagtacggtgtaaaaaatgtctttgctggagtgccagtcgtgattggtaaaaatggtatcgaaaaaattaaagaaatagatcttgatgaaaatgaaaaaaaagaatttatgaattctatagaagcagtaaagaaattatgggaggccgcatcagtcattgatccaaatcttataaaataa

SEQ ID NO: 207177 - DNA, 919 bp, Unknown
  Bacterial polypeptide expressing nucleotide sequence isolated from the Sargasso Sea
aaaaaaaatttctttaataggcgcaggtcaaattggaggtactttagcacatttaatagctctcaaagatttagctgatgtagtattgtttgatgttgcggctgggattgcaaaaggtaaagcccttgatattgctcaatcatccccggtaaatggatttaatattaaattatttggaactaacaattacgaagacacgaaagattctgatgtaataataataactgccggtgttccgagaaaaccaggcatgactagagacgatttattaggaattaacttaaaaataattaaacaagtagctgaaggaataaaaaatacatccccagaagcatttgtaatttgtattacaaatcctctagatgttattgttatggctttgcaaaaatattctaatatgcctaagaataaaattgtggggatggcaggcatcttggactcttcaagatttatttattttttatctcaagaattaaaagtaccagttcaaaaaataaaatcatttgttcttggcggccatggagatactatggttgccatgctaggctctacagaagttgatggtaaaaagattacagagctagttaaagatggtaaaattagccaaaataaactagatgagatagtagacagaactaaaaagggaggtgcagaaattgtgaaatatttagagaaaggatctgcattttatgccccagcagcttcaggtgttgaaatggcagaatcctatcttctagataaaaaaaaacaattaccatgtgcagctcacttaaatggcgaatacggaataaaaaatttatacgctggtgttcccgtgattattggatcaaaaggagttgagaaaatagttgagttgaaattatcacaagatgaaaaagaaaatttcaaaaaatctgttgatgctgtaagtaaattattc

SEQ ID NO: 207178 - DNA, 772 bp, Unknown
  Bacterial polypeptide expressing nucleotide sequence isolated from the Sargasso Sea
catgaaaaaaaaaatatctctaattggtgctggtcaaattggtggtaccttagctcatctaataggaattaaagaattagttgatgaagttattttatttgatgtagcaagtggtatagccaaaggtaaagctttagatattgctcagtcttcatcggttgatggttttaatgtaaagtttataggaacagatgattacaaagatataaaggattcagatgtaatcattataactgctggagtaccaagaaaaccgggtatgagtagagatgatttgcttggaattaacttgaagataattaaacaggtcgctgaaggaataaaacttaatgcacctgatgcctttgtaatatgtattactaatcctctagatgtaatggtaatggcatttcaaaaattttctggccttccatctaataaagttgttggaatggcaggtatattggatagctcaaggtttaaattatttttatcattagacctcaatgttccagtaaaagaaatagaagctatggtaatgggaggacatggggatacaatggtgccactaccaagatatacaaaagtttctggaaaacctttattggatttcgttaaagagggaaaaatttctgaagaaagattagatgaaataaatcaaagaacaagagatggaggagcagaaatagtcaaatttttagagaaaggttcggctttttatgcaccagcagcttctggagtagaaatggccaaggcttaccttgaggatgaaaaaaaaatgcttccatgcgct

SEQ ID NO: 207179 - DNA, 625 bp, Unknown
  Bacterial polypeptide expressing nucleotide sequence isolated from the Sargasso Sea
atgaaaagaaacaaaattgcgcttattggttccggtaacattggtggtacccttgcgcatcttgtagctataaaagaattaggtgatgttgtattatttgacatcgctgaaggcattcctcaaggtaaggctcttgaccttcagcaatcaggccctgttgaatcgtttgattccaaaataacaggtactaataaatatgaagatttacaagatagtgatgtcgttattgtaactgctggagttccaagaaagccaggtatgagtagagatgatcttgtagaaattaacactaaagtgatgaaacaagttggcgaaggtataaagcaaaactgcccaaaagcttttgtaatttgtattaccaatccactcgatgcaatggttggtgtgttgcaaagagcatctaatttaccagtaaatatggtagtaggtatggcaggagttcttgactcagctagatttagaactttcttggctcatgaatttaatgtttcactttcagacgttactgcttttgtattaggtggacatggtgatacaatggttcccttggtaagatactctgcagttgcaggaattcctgtaccagatttaataaaaatgggttggagtagtgataaaaaaattg

SEQ ID NO: 207180 - DNA, 358 bp, Unknown
  Bacterial polypeptide expressing nucleotide sequence isolated from the Sargasso Sea
atgagcaaaatatctttaattggagcaggccaaataggtggaactttagcacatttaattggaataaaagaattagtaaatgaggtggttttatttgatgttgcgagcggtgttgcaaaaggaaaagcgttagatattgcacaatcatcatctgtagatggttttgatgttaaattttcaggtacggatgattataaggacataaagggctcagatgttattataattacagctggcgtgccgagaaaacctggcatgagcagagatgatttacttggtataaatttaaagattataaagcaagttgcagaaggaattaaaaaaaattcgcctgatgcatttgtaatttgtataacaa

SEQ ID NO: 207181 - DNA, 330 bp, Unknown
  Bacterial polypeptide expressing nucleotide sequence isolated from the Sargasso Sea
aatgagaaaaaagattgctctcattggtgctggtaatattggtggaacccttgcacaacttgttagtttaaaagagttgggtgatgtagttttattagatatttttgaaggaatgcctaaaggtaaatctttagatctagcacagtcatcttctattgaaggatttcatgccgattttaaaggcacttcaagttttagagatatcaaaaattctgatgtggtaatagttactgcaggctttccgagaaaaccaggtatgtctcgagatgatcttgtagaaaaaaattctataattattcaaaatgttgggaaaaatattaaaaaatattg

SEQ ID NO: 207182 - DNA, 734 bp, Unknown
  Bacterial polypeptide expressing nucleotide sequence isolated from the Sargasso Sea
cgcggatttggtcatcattcccgcgggcgtgccgcgcaaaccgggcatgacgcgcgacgacttgttcgccatcaacgccggcatcgtgcgagatttgtgcgaggcgtgcgccagcgcgtgcccgaacgcgctggtgaacatcatctctaacccggtgaactcgacggtgccgatcgcgagcgaagtgttcaaaaaggctggatgctacgatccgaagaagattttcggcgtcacgacgctcgacatcgttcgatccaacaccttcgtcgccgaggcgaaggatttggacatcaacgacgtcgacgtccccgtcatcggtggtcacgccggcatcaccattttgccgctcttgagccaaacgtacccgaagtgcgatttcaccccggaggagctcgaaaagctcaccgtgcgcatccaaaacgccggcaccgaggtggtcgaagccaaggctggcgccggttcggcgacgctctccatggcgtacgccgccgcgcgcatggccgaggcgtgcttgcgcggtttgagcggtgaatcggacgtgtacgaatgctcgtacgtcgcgtccgacgtcaccgaccttccgtactttgcgaccaaggttcgactcggtccgtcgggcgccgaggaggtgatgcccatcggcgacatcaccgagtacgagtccgagtggttggcgaagctcaaggttgagctcaagggcagcatcgaaaagggcatcaactttgtcaactaat

SEQ ID NO: 207183 - DNA, 755 bp, Unknown
  Bacterial polypeptide expressing nucleotide sequence isolated from the Sargasso Sea
tatgaaaaaagttactgtagttggcgcaggtaagtatggttctatgactgcattgaggatagcagagtatgatatagccaagacagtagtaatgactgatattgtggaaggcttacctcaaggtttaagtttggatataaaccaatcaagatatgttgaaggcttcaacacaaaacttattggaacaaataattacgaagacacatcagatagtgacatagtagtaataaccgctggcttaccaagaaagcctggaatgtcgcgaatggatttattagaagttaatgctggaatagttagtgaagtaactaaaaatattctaaagcactctgaaaatccaataatagtggttgtaacaaacccgctagatcaaatgacaactcttacagctgaagtatcaaatctttcaaaaaatagagttattggtcaagcaggtgtattagattcttcaaggtttgcttattttatttcagaaaaagttggagttgatatttcagctgtagaagctttaactcttggaagtcatggcgatacaatggttccagttccttcattatgcaaggtagatggaaaaccattagaagaaatattatcttctgaagaaataaatgatttagttcagaggacatccgatggaggagctgaaattgtaagtttacttaaaactggaagtgcatattttgcccctgcctcatctgctgcaaccatggtcaaagccatgttgagtgattctaatgagatatttccagtctgtg

SEQ ID NO: 207184 - DNA, 520 bp, Unknown
  Bacterial polypeptide expressing nucleotide sequence isolated from the Sargasso Sea
tatgggaatggcaggggttcttgatgcttcgagatttaaagcttttctttctatggagcttaatgtagctgtttccaagattgacaccttagtgttaggtggacatggagatgatatggttccgttaaagaattgtacagggatttctggagttccaataactcagctcattgatgagaagaaattaaacaagattattcaacgtacacgagatggaggagctgagattgttaagctgctcaaaaccggcagcgctttttatgctccgggagtttctgctgttgatatggccgaatccatcctaaaagatcaaaggaagttgctaccatgttgtgtttttgcaaatggtcaatatggagtaaaaaaccagtttttaggacttccagttattttatcatctaagggagtagatgagattgtagaaattgaattgaccgactccgagaaagaagagcttcacgcttctgctttgcatgtaaaagagctctgtgatttaattgacggtttcgggatactttaa

SEQ ID NO: 207185 - DNA, 605 bp, Unknown
  Bacterial polypeptide expressing nucleotide sequence isolated from the Sargasso Sea
agtacttgttgttggcaatccagctaacacaaatgccctgatcgcaatgtcaaatgcgcctgatattgatcaaaatgctttcactgcgatgatgagacttgatcacaatcgagcacttgcacaacttgcatcaaaacttgattgccattcaagcgaactttcaaatatgacgatttggggtaatcattcgacaactcaatatccagatataaccaatttaaaagtcttgggcgaagctgcatcaaaaagactcaatgaatcatggataaaggatgattttattccaagggttcaaaacagaggtgcagagattattaaagcaaggggtttatcgagtgctgcgtctgcagcatcagcggctattgatcatatgagagactgggcattaggaacagaagataacgattgggtcagcatggctattccgagtgatgggtcttatggaattactgaagggatcatctattcatttcctgtgacatgtcaaaatggatcctattcaattgttcaagatcttgatatcgatgatttcagcaaggaatgcatggagataactgaaaaagagctgctcgaggaaaaggcagcaattgagcacctgctgtaaa

SEQ ID NO: 207186 - DNA, 686 bp, Unknown
  Bacterial polypeptide expressing nucleotide sequence isolated from the Sargasso Sea
aatgattggcggtgggcaaattggtggaaacctagctcttattgctgctcaaaaagaattaggcgatgtagtcatttttgatatacctcaatcagagggtatggtaaaaggaaaggctttagacattatgcaattacgtccgcacgatggctatgattcagaattatctgggacttccgattataaagatatcgaaggatcagatgtagtaatcattacagcagggataccaagaaaaccaggtatggatagagaagatctaatgtcaattaatttaggcattatgaaagatgttgcctctaatgtaaaaaaatatgctcctgatgcatttgttatagttatttcaaatcctctagatgctatggtttatgcttttcacaaagtttcaggctttgataagaacaaagttattgggatggcaggagcactagattctggaagatttcgtgcattcttggccatggaaacagggttgtctgttcaagatgtgagctgtatggttcttggaggtcatggggatagcatggttccaataacacgattagctacaataggaggagttccagtaactgaccttattgactctgaaagattaaaagaaatcgaagatagaactagattcgccggtggagagcttgtcaaattatttggtaatggatctgcattttacgcaccagcccaatgtg

SEQ ID NO: 207187 - DNA, 811 bp, Unknown
  Bacterial polypeptide expressing nucleotide sequence isolated from the Sargasso Sea
atttgacgttgcaagtggaattgcaaaaggaaaagctttagatatagctcaatcttcatcagttgatggttttaatgtaaaattttctggaactgacgattataaagatattaaagattctgatgtaataattattacagcaggagtaccaagaaaaccgggtatgagtagagacgatcttttaggcatcaacttaaaaattattaaacaagtagctaatggaataaaagaaaattctcccaatgcatttataatatgcattactaatccattagacgtcatggtcatggctcttcaaaaatactcaggtcttcctactaataaagttgttggtatggcgggaattttggatagttcacgatttaagttatttctatcattagaactaaatattcctgtaaaagaaattgatgcaatggtaatgggaggtcatggagatacaatggtgcctttgcctagatttacaaaagtttctggcaaacctttattagatttaattaaagatggaaaaataactaaagaaagattagaagaaataaatcaaaggactagggatggtggtgcagaaattgttaagtacttagaaaaaggctctgcattttatgctccagcagcttctggtgttcaaatggcagaagcatatttaaatgataaaaaaaaattactaccatgtgctgtgcaattaaatggcgaatatggtgtaaacaatgtttacgcgggagtgccagtaattgtgggtaaagacggggttgaaaaaatagagcaaattgatctagatgagaaagaaaaaaaagaatttatgcactctata

SEQ ID NO: 207188 - DNA, 916 bp, Unknown
  Bacterial polypeptide expressing nucleotide sequence isolated from the Sargasso Sea
gataaaagatttagttgatgaagtggttttgtttgatgttgctagtggtgtagcaaaaggaaaagctttagatatcgcccaatcatcctcagtagatggttttaatgttaaattttcaggaaccgatgattacaaagatataaagggctcagatgtgattattattacagctggtgttccaagaaaacctggtatgagcagagatgatctacttggaataaatttaaaaataattaaacaagttgctgaaggaataaaacaaaatgctccagatgcatttgtgatatgtattaccaatcctcttgatgtaatggtaatggcatttcaaaaattttcaggtctttcaccaaacaaagttgtaggaatggccggtatattagatagctctagatttaaactatttttgtccgaagaatttaatattcctgtaagagatatagaggcaatggtaatgggtggacacggtgacacaatggttcctttgccaagatttacaaaagtttctggaaaacccttgctagacttagttaaagaaggaaaaatttctcaaaaaagattggaagaaataaatcaaagaacaagagatggtggagctgaaattgtaaaatttttggaaaaaggttcagctttttatgcaccagcagcttcaggagttgagatggctaaagcttatctaaaagatgaaaaaaaaatgcttccgtgtgctgcttatttaaatggagaatatggaattaaagatatttatgctggtgttccaattattataggtaaaaatggtgttgaaaaaattgaggaaataaatttagatgataaagaaaaatctgaattccttcactctgtagaagctgtaaaaaaactttgggaagcagcatctaatatagatacagatttaaaaaataatgaatattcacgagca

SEQ ID NO: 207189 - DNA, 646 bp, Unknown
  Bacterial polypeptide expressing nucleotide sequence isolated from the Sargasso Sea
gatgacaaaaaaaatatctttaataggagcaggtcaaattggtggaacattagcccacctaattgcaatcaaagaacttggtgatgttgttctatttgatgtagctaaaggattagcaaaaggcaaagccttagacattgctcaatcttcaggtgtaactggttttaatgtgaatatatcaggtacaaatgattatgaggatacaaaaaactctgatgtaattataataacagccggtgtccctagaaaacctggaatgtctagagacgacttacttggtactaatcttaaaataattaaacaggtatcagatggaataaaaaatacatctccagaagcttttgttatttgtataacaaatccgttggatgtaattgtaatggctcttcagaaatactctgggctaccttctaataaagtagttggtatggctggaattttagactcttcaaggtttaaatattttttgtctaaagaactaaatgaaccgataaaaaatatagagtcattagttctcggtggtcatggggatacaatggtgcctatgcctaaaaaaactaaaattaaaaacaaaaccttaatcgatttaattaatgagagaaaaatttctaaagataaattagatgaaattataaatagaacaaga

SEQ ID NO: 207190 - DNA, 799 bp, Unknown
  Bacterial polypeptide expressing nucleotide sequence isolated from the Sargasso Sea
tatgagtaaaacacctgtacacgtaaccgtaactggagcagcaggacaaattggctacgcactgctttttagaatcgcgagcgggcaaatgcttggtgccgaccaaccagtcgttcttcgtctattggagattaccccagcgttaggtgctctagatggagtacatatggaacttgatgactgtgctttcccgctacttgaaggagttgtcaaaacagatgacgcaaatgtggcgtttgcagagagtaattacggtctgttagttggagcaatgccacgaagagacggtatggaacgggccgatctcttagaagctaatggaggaattttcggtcctcaaggcaaagcgattgcagaaaatgccaacgaaaatatcaaagttcttgtagtcggaaatccagcaaacacaaatgccttaatagcgcaatcctctgcttccgcgataaacccaagacagttcaccgctatgacacgacttgaccataatcgtgctcaaactcaagttgcctcaaagttgggtgttcaagttagtgatgtgaaaaaaatgacaatatggggaaaccattcagcaacccaatatccagatcttttcaactgcgaagttaacggagaatccgtggcacacacaataaacgaccagcaatggctggagaatgactttattccaactgtgcaacaacgaggcgctgcaatcattaaggccagaggagcctcatctgcagcctctgccgcaaatgcagctattgatcacatgcgtgactggacactcggaacacccgacggcgattgggtatcaatg

SEQ ID NO: 207191 - DNA, 842 bp, Unknown
  Bacterial polypeptide expressing nucleotide sequence isolated from the Sargasso Sea
catgggaaaaaaaattactttaataggcgcgggacaaattggcggcaccttagctcatttgatcgctttaaaagaacttggagacatagtcttatttgatgtagctgctggtatagctaaaggtaaagctttagatatagcgcaatcatcacctgtcagcggatttaacgtgaatttaactggcacggacgattataatgatacaaggaattctgacgttataattataacagctggggtgccaagaaaaccagggatgagtagagacgatttacttgagataaatttaaaaataattaaagaagttgccgagggtataaaaaggacatcgccaaatgcatttgttatatgcataacaaaccctttggatgttattgttatggctttacagaagtattcaggtttaccaaaaaataaaattgtaggaatggcgggaatattagactcctcaagatttatatattttctttctcaagaattgaaagagccagtccaaaatattaaatcgtttgtattaggcggccatggagatagcatggttgcaatgctaggtttaaccacagtaaatggtattacaattacaaatcttgttaaagagggaaagattaaacaagaaaaattaaatgagatagttagtagaacacaaaatggaggtgcagaaatagtaaagttcttagagaaaggttctgcattttatgcccctgcagcatcgggtgtagagatggcggaaagttatcttaaggatcaaaaaaaacaattaccttgcgctgcatttttaaatggagaatatggggtaagtaacttgtatgctggtgttcaagttattatcgggagcacgggtg

SEQ ID NO: 207192 - DNA, 361 bp, Unknown
  Bacterial polypeptide expressing nucleotide sequence isolated from the Sargasso Sea
atgaaaaataaaaaaatatcacttattggagctggtcaaattggaggtacgttagcccatctcgcagcaacgaaagaattaggtgatgttgttctttttgacttaatggctggtttagctaaaggaaaagcattagatatttcacagtcatcggcaattgatggctttaatgtttccctatcgggaacagacaattacgaagatactcgagactctgatgttatcataattactgctggcgtgccaagaaaaccaggcatgacaagagacgatctattaggtaccaacttgaaaatcataaaacaagttgctgaaggtatcaaatctacatcacctaacgcttttgtgatttgtatcacaa

SEQ ID NO: 207193 - DNA, 565 bp, Unknown
  Bacterial polypeptide expressing nucleotide sequence isolated from the Sargasso Sea
atggcacgtgacaaaattgccttaattggtgcaggaaatattggaggaacactcgcgcatcttttgggtcttaaagaattgggagatattgttctctttgacattgtaaaaggtgttccagcggggaaagctttggatctggcagagtcttctcccattgagggttttgactgcagtttgaaaggtataaattcatattctggcattaatggggctagagttgtaatagtgactgcaggcgtagctcgtaagccgggtatgacaagagatgatttaatcggaataaatacctcggttatgcaaaaagttggggcaggaataaaaaaatatgcgcccaacgcttttgtgatctgtattactaacccgttagacgcaatggtaatggttttacgagatgccacgggatttaatcataataaagtagttggaatggctggagttttagactccgcccgatttagctactttcttgctaaagaatttaatgtctctgttgaagatattacgtcatttgttttaggaggacatggagatacgatggttccgctaactcggtattctgcag

SEQ ID NO: 207194 - DNA, 576 bp, Unknown
  Bacterial polypeptide expressing nucleotide sequence isolated from the Sargasso Sea
aaaaatattcagacttaccaaccaataaagtagttggaatggcaggtgttcttgatagttcaagatttaaattatttttatctcaagagttaaacattccagtaaaaaagattgaagctatggtaatgggtggtcatggagacaccatggtgcctttaccaaggtttacaaaagtttcaggaaaaccattattagatttagttaaagaaggaaagatatcaaaagaaagactagaaaatattaatcagagaacaagagatggtggagctgaaatagttaaatttttggaaaaaggttcagctttttatgcaccagcagcttcaggtgtagagatggcttctgcatatttaaaaaatgaaaaaaagctcttaccttgtgcggcttatcttaaaggagagtatggaataaaggatatttatgctggtgttcctgttgtaattggcaacaaaggtgtagaaaaaatagaagaaataaatcttaacgaaaaagaaaaaaaagaatttctgaattccatcaatgcagtaaaaaaattatgggaagcagcttcaacaattgaccctgatctttccaagtaat

SEQ ID NO: 207195 - DNA, 642 bp, Unknown
  Bacterial polypeptide expressing nucleotide sequence isolated from the Sargasso Sea
aaaacgcacctaatgcatttgtaatatgtattaccaatccattagacattatggttatggcgtttcaaaaatactcaggacttccaacaaataaagttgttggaatggcaggaatattggatagctctagatttaaattgtttttatctcttgagctcaaagtttctgtaaaagaaatagaatcaatggttatgggtggtcatggagatacaatggttccattgccaagatttacaaaagtttcaggtaagccattattggatttggttaatgaggggaaattatcattaggaaggttggaggaaattaatcaaagaactcgagatggaggggctgaaattgttaagtatttagaaaaaggttctgcattttatgctccagcagcatcaggagttaaaatggcagaagcatatttaaaagatgaaaaaaaattacttccttgcgcagtacaccttaatggagaatatggtgtaaaaaatatttttgcaggagttccagtcataattggaaagaatggtgtagaaaaaattgaagaaataaaattagatgaaaaagaaaaaagtcaatttatgcattcaatagatgcagttaaaaaattgtgggatgtggcatcatcaatagataaagatctttcaaaataat

SEQ ID NO: 207196 - DNA, 913 bp, Unknown
  Bacterial polypeptide expressing nucleotide sequence isolated from the Sargasso Sea
ttcggggctacccaagcggcaaattatcaacggaccggagacagatccaatggccagacccaagattgcccttatcggtgcaggacaaatcggcggcaccctcgcccacctcgcagcgatcaaggaactgggcgacgtcgtccttttcgacatcgccgaaggcacccccgaaggcaaggcgctcgatatcgctgaatccggcccctcggaaggcttcgacgccaagctgaaaggcacgcaggattacgccgacatcgccggcgccgacgtctgcatcgtcaccgccggcgtcccccgcaaaccgggcatgagccgcgatgacctgctgggcatcaacctcaaggtcatgaaatccgtgggcgaaggcatccgcgacaatgcaccgaacgcctttgtcatctgcatcaccaacccgctcgatgcgatggtctgggcactgcaaaaattctcgggcctgcccgccgagaaagtctgcggcatggccggtgtgctggacagcgcgcgcttccgccacttccttgccgaagaattcaacgtatcgatgaaagacgtcaccgccttcgttctgggcggtcacggcgacaccatggttccctgcgtgcggtattccaccgtcgccggtgtgcccctgcccgaccttgtcgacatgggctggaccacgcaggaaaaactggatgccatcgtgcaacgcacccgcgacggcggtgccgaaatcgtcggcctgctgaaaaccggctcggccttctacgcgcccgccacctcggcgatcgagatggccgaagcctacctcaaggaccaaaagcgcgtcctgccctgcgccgcctattgtgacggcgaccttggcgtcaaaggcatgtatgtgggcgtgccccacgtgatcggcgcgggcggcatcgagaagatcgtccacatc

SEQ ID NO: 207197 - DNA, 353 bp, Unknown
  Bacterial polypeptide expressing nucleotide sequence isolated from the Sargasso Sea
gatgaccaaagagcagattgatcgtgtcgtagaacgaacacgaaaaggcggtgcagaaattgtttccctgttaaaaacgggtagtgctttttatgcaccgggtgcttcagtagtaaaaatgattgaagctattttacaagacaaacgccgcattcttccatgcactgcttatcttgaaggggaatatggctggagcggaattttctttggtgtccccgtgatgatgggcattcacggaatagaaaaagttatcgaattaaatatgacagaagaggaaaaggcggctttggacaaatcagctcaggatgtcaaaaagacctgcgatgaaatcgatgcaatcctggctgaataga

SEQ ID NO: 207198 - DNA, 540 bp, Unknown
  Bacterial polypeptide expressing nucleotide sequence isolated from the Sargasso Sea
aatggcacgtgcaaaaatctcattaattggcggtggtcaaattgggggcaatttggccttgttagctgctcaaaaagaactaggtgatatcgttatatttgatattccaaaagctgaggggatggtaaaaggcaaggctcttgatttaatgcagcttaagcctcatgatggatatgatgcaaatatctctggtacttcagattggaaagatcttacagattcagatgtgtttattattacagctggtttacctagaaaacctggaatggaccgggaagatttacttgaaatcaatctaggaataatgacagatgttgctgaaaacatcaaggaatactcacccaacgcatttgtaattgtagtttctaatcctttagatgctatggtatatgctttttataaagtttctcaacttaaaaagaatatggttgttggaatggctggggctttagatagtgcaaggtttagagcatttattgcaatggaagttgggtgttcagttcaagatgttacatgtatggtgcttggcggccatggcga

SEQ ID NO: 207199 - DNA, 463 bp, Unknown
  Bacterial polypeptide expressing nucleotide sequence isolated from the Sargasso Sea
atgaaaaaatataaaattgctttaattggttcaggtcagattggaggtactttagctcacttagctggcctaaaagaattgggggatattgtactatttgatatagccgatggtattcctcagggcaaagctcttgatatagcagaaagttcttcaataagctccttcgatagtaacataattggtactagtaaatatgaagatataagcgatgcagatgtttgtatagttacagctggagtacctcgtaaaccaggaatgagtagggatgatttgttaagcattaacctgaaagttatgaaatcagtaggagagggaataaagaaatatgctccaaattcttttgtaatttgtattacaaacccattagatgcgatggtttgggctttacaaaagttttccacactaccagcagaaaatgtagttggtatggcgggggtcttagatagtggtagattgcata

SEQ ID NO: 207200 - DNA, 550 bp, Unknown
  Bacterial polypeptide expressing nucleotide sequence isolated from the Sargasso Sea
attgctttttgagcgccttcggacgagattccgagggcgcttttcgttatttaacggtaaccggagtggtgacgtgaagatcggagtggtgggagcaggaaacgtcggtgcaacgactgcgcagctgatcgcacagcaggaactgggacgggaaattgttctcctcgatgtagctgagggcatccctcagggcaaagggctcgacatcgcggaatcatcacccgtggaccgtttcgacaccctgatcaagggtacgaacgatccggaagacctctgcaactgtgggattaccgtcgtgactgcgggcattgcccggaaacccggtatgagccgagatgaccttctcgccacaaacgccgaagtcgttggatcagtctgcgagcacatcgcacgcgtcgccccgaacgcgatcgtcatcacggtcaccaatccgctcgacgcaatgacccatgtcgccttcaagaagacgggtttcccacctgagcgtgttgtcggcatggccggcatcttggacaccgctcgctaccgctatttcctcgcgtgcgaactc

SEQ ID NO: 207201 - DNA, 681 bp, Unknown
  Bacterial polypeptide expressing nucleotide sequence isolated from the Sargasso Sea
acctattgcaagaagatgcaaaaatattttcggctcaaggcaaagcaatcaatgagaatgcttctagggatataagagttcttgttgtgggcaatccggcaaacacaaatgccctgatcgctatgtcaaatgcgccagatattgaaaaaaatgcattcactgcaatgatgagactagatcacaatagggcgctagcccagattgcatcaaaactagattgtcattcaagtgagcttagcaatatgactatctggggcaatcattcaacaactcaatatccagatgtaaataatttgaagctctcaggagaaactatatcaagtaggctcgatgaggtatggataaaaaatgaatttattccaagagttcaaaataggggtgcggaaataattaaagcaaggggtttatcaagtgcagcatctgctgcatccgcggctattaaccatatgagagactgggcattgggaacaaaaaataatgattgggtgagcatggctattccgagtgatggatcttatggtatcaatgaaggaattatctactcatttcctgtgacatgtcaaaatggatcctattcaattgttcaagatcttgaaatcgatgatttcagcaaggaatgtatgaaaataactgaaaaggagcttcttgaagaaaaggaagcaattgaacacctcctctaaa

SEQ ID NO: 207202 - DNA, 479 bp, Unknown
  Bacterial polypeptide expressing nucleotide sequence isolated from the Sargasso Sea
tcaagtaaaagaaattgaagcgatggtcatgggaggacatggagacaccatggtaccacttccaagactaacaaaagtttcagggaagccactgctagatcttgttgaagaaggaaaaatttctagtaaaaaattagaaagtattaatcaaagaactagagacggtggagctgaaatagtcaaatttttagaaaaaggatctgctttttatgcaccagcagcttcaggtgtagaaatggcagaatcttatattaaagatcttaaaaaagtattgccttgtgctgcgtatttagacggtcagtatggagtaaaagatttgtatgctggtgtcccagttgtaattggaaaaaatggtgtcgaaaaaatagaagaaatcaatttagatgataaagaaaaatcagaatttatgaactcagtaaatgctgtaaaaaaactttgggaagcagcttcaaaaattgatcctgatttaaataaataga

SEQ ID NO: 207203 - DNA, 807 bp, Unknown
  Bacterial polypeptide expressing nucleotide sequence isolated from the Sargasso Sea
aatgagaaaaaaaattgctctcattggagcaggtaatatcggcggaactcttgcacaacttattagtttaaaagaattaggagatgtagttttactagatatttttgaaggcatgccgaaaggtaaatctttagatttagcacagtcatcttctattgaaggctttcacgctaattttaagggtacttcaagttttaaagatatcaaaaattctgatgcagttatagtgactgctggatttccaagaaaaccaggaatgtcaagagatgacttggtagaaaaaaattcagtaattattcaaaatgttggaaaaaatataaaaaaatattgccctaaagcatttgtgatatgtattaccaatccccttgatgcaatggtaagtgttcttcagaaatcatctggattaaaaacaaatatgtgtgttggtatggcaggcgttcttgatagtgcaagattgaaatattttttatcaaaagaatttaatgtttcaattaacgatattagtgcttttgttttaggtggccatggagatacaatggtgccacttatgagatacgcaactgtatctggtattccagtgcctgaattaattaaaatgaaatggactacaaaaaaaaatatagataaaattattcaaagaacccgtgatggtggtgcagaaattgttaaacttatgaaaacttctgcttattatgcaccagcttcatcagcaatacaaatggcagagtcatttttattggatcaaaagagattattaccatgcgctgcatatcttaacggtgaatacggtgtcaaaggactttacgt

SEQ ID NO: 207204 - DNA, 744 bp, Unknown
  Bacterial polypeptide expressing nucleotide sequence isolated from the Sargasso Sea
ctgattatgcagatatgctgggttccgaagttatagtagtaacatctggtttctcacgtcaaccagggatgacgcgtgaagatcttattggaaaaaatgcagatatcgtttctcaagtaggtacaggtattagagaacatgctcctgattcagtcgtgattatggttaccaatccattagatttaatgacatatcatatgcaaaaggtcacaggattcccaactaatcgtgttattggtcaagccggaatcctagatagtgccagaatggctcacttcattgctttggaacttaattgtgcagaggaagatgtttctccaatggttctaggtgggcacggagatacaatggttcctctgcctcgatatactacagttggaggaataccaataactcaactaatgagtgaagaaagaatagatgcaatctctaagcgcaccgcttcaggtggcggtgaaatcgtcaagttgctagagagaggatccgcattttatgctcctggttcagcggctgccataatggcagaatctgttttgaatgatagaagaagattaattccggcatcttgtcatttaactggacagtatggattggataacgtctacattggagttccatgcattcttggtgcaaatggtgtcgagcaaatatttgaattagatttggcagatgatgaattagaatcgcttcaaggttctggtaatttttacaagtcgcaactcagtgaattattgggttactaat

SEQ ID NO: 207205 - DNA, 804 bp, Unknown
  Bacterial polypeptide expressing nucleotide sequence isolated from the Sargasso Sea
taaatggatttaatgtaaacttatcaggtacagataattacgaggatacaaaaaattctgatgtaataattattactgctggcgttccaagaaagccagggatgactagagacgatttattaggaataaatcttaaaattataaaacaagtcgctgaagggattaaaaggacttctcctaatgcctttgtaatttgtataacaaatcctttagatgtaatcgtcatggctttacaaaagtactcaggtttgccaaaaaacaaagtagttggcatggcaggtatattggactcatctagatttatttactttctatctcaagaattaaaagttccagtcacgaaaattaaatcttttgtattaggcggacatggagacagcatggttgcaatgttgggttcaaccgaaatagatggtaagaaaatttatgaatttataaaagatggaaaaattactcaagaaaaattaaatcaaattgttgaaaggacaaaaaaaggcggagcggaaatagtaaaatatttggaaaaggggtctgctttttatgcgccagctgcttcaggggttgaaatggcagaatcttacctaaaagatcaaaaaaaaaagttaccatgtgctgtatatctagatggtgaatatggagcaaaaaatatttatgcgggagttccagcaattattggatcaggaggtgtagagaatattatagaaattgagctttcacctcaagaaaaagaaaattttaaaaaatctatcaaatctgtacaagatttgtttagcgccgctcaaaaaatagataaaacattataaa

SEQ ID NO: 207206 - DNA, 624 bp, Unknown
  Bacterial polypeptide expressing nucleotide sequence isolated from the Sargasso Sea
gatgagaaaaaaaattgctctcattggagcaggcaatatcggcgggactttagcacaacttgttagtttaaaagaattaggtgatgtagttttattagatatttttgaagggatgcctaagggtaaatctttagatttggctcagtcatcttccattgagggatttcatactgattttaaaggtacttcaagttttagagatatcaaaaattctgatgtagtaatagttactgcaggttttccaagaaaaccaggtatgtctcgagatgatcttgtagaaaaaaattctataatcattcaaaatgttggtaaaaatattaaaaaatattgtccaaaagcatttgttatttgcattactaatccactggatgcaatggtaagtgtccttcagaaatcatcaggccttaagacaaatatgtgtattggcatggctggtgttctagatagtgcaagattaaaatactttttatccaaggaatttaatgtgtcaattaacgatatcagcgcttttgtcttaggtggtcatggagatacaatggttccacttatgcgatattcaactgtatcaggtatccccgtacctgagttaataaacatgaaatggacaacaaaaaaaaatataga

SEQ ID NO: 207207 - DNA, 586 bp, Unknown
  Bacterial polypeptide expressing nucleotide sequence isolated from the Sargasso Sea
aatgaataaaaaaatttctttaattggtgcaggtcaaattggtggaactttagcccatcttattggaattaaagaacttgcatctgaggtagttctttttgatgtagcccaaggaattgccaaagggaagtccctagacattgctcaatcttcatcggtagatggatttaatgtaaaattttcagggactgataaatattctgatatcaaaaattctgatttaattattattaccgctggtgttccaagaaaacctggaatgagtagagatgatctacttagtataaacctaaaaataatgaagcaggttgcaaaaggaataaaggaaaattgcccaaacgcttttgtgatatgtatcacaaaccccttagatgtgatggttatggctttacaaaaatattctaatttaccaacttcaaaggttgtaggaatggcaggaattttagatacctcaagatttaaattatttctctcattagaattaggcgttcctgtaaaagaaattcaggcaatggtgatgggtggacatggagatacgatggttccactaccaagattcacaaaagtagggggcaaaaactattag

SEQ ID NO: 207208 - DNA, 673 bp, Unknown
  Bacterial polypeptide expressing nucleotide sequence isolated from the Sargasso Sea
atgtcaaaaaaaatatcattaattggtgctggacaaattggtggaacacttgcacatttaattggtttaaaggaactagtagatgaagttgtattgtttgatgttgcaagtggtattgcaaaaggtaaagcgttagatatagctcaatcatcatctgtcgatggttttaatgttaaattatctggaacagataattacgaagatattaaagactccgatgtaattattataactgcaggagttccaagaaaacctggtatgagtagagatgatttattaggaataaatttaaaaattataaaacaggtagcagaaggtataaaaaaaaatgcacctaatgcatttgtaatatgtattaccaatcccctagatgttatggtgatggcgtttcaaaaatactcaggacttccagcaaataaagtcgttggtatggcagggatactggacagctcaagattcaaattgtttttgtcacttgaacttaaaattcctgttaaagaaatcgaagcgatggttatgggtggccatggagatacaatggttccattaccaagatttacaaaaatttcaggtaaatctttgatggatttaattagagagggaaaattatcatcaaaaagattagaggaaatcaatcaaagaaccagagatggtggtgctgaaatagttaaat

SEQ ID NO: 207209 - DNA, 638 bp, Unknown
  Bacterial polypeptide expressing nucleotide sequence isolated from the Sargasso Sea
aatgacaaaaatatctttaattggtgcgggccaaataggtggaactcttgcacatttaataggaataaaagaattagtgaatgaagtggttttatttgatgtagctagtggtattgcaaaaggaaaagcattagatattgcacaatcttcatctgtagatggtttcaatgttaggttttcaggaactgataactatgaggacataaaagattcagatgtaataataattacagcaggcgttccaagaaaacctggaatgagccgagacgatcttcttggaattaatttaaatattattaaacaagttgctgagggggtaaagaaaaacgctcctaacgcttttgtcatctgtatcaccaatcctttagatgtcatggttatggcatttcaaaaattttcaggtttgccatcaaataaagttgttggtatggcaggtattttagatagttcgagatttaaattatttttatcattagaactaaatgtgccagtaagagacattgaggcaatggtcatgggtggtcacggtgacaccatggttcctatgccaagatttacaaaaatttcaggtaaaccattgttagatcttgtaaagaatggaaagatttcttcagaaagagttgaggaaattaatcaaa

SEQ ID NO: 207210 - DNA, 453 bp, Unknown
  Bacterial polypeptide expressing nucleotide sequence isolated from the Sargasso Sea
aatgagtaaaatatctttaatcggtgcaggtcaaataggtggaactttagctcacctaattggaataaaagaattagcaaatgaagtagttttatttgatgttgtaagtggtgttgcaaaaggaaaagcactagatattgcacaatcatcatctgtagatggttttgatgttaaattttcagggacagatgattataaagacattaaagattcagaggtaattgtaatcacagctggagttccaagaaaacctggtatgagcagagatgatttacttggtattaatctaaaaattataaagcaagttgcagagggaattaaagaaaatgcgcctaatgcatttgtaatatgtattacaaacccattagatgtgatggtaatggcttttcagaaattttcaggactatctccaaataaagtagttggaatggcaggtatattagatagctctag

SEQ ID NO: 207211 - DNA, 667 bp, Unknown
  Bacterial polypeptide expressing nucleotide sequence isolated from the Sargasso Sea
caaacaagtagctaatggaattaaagaaaatgccccaaacgcatttataatatgtattactaatccattagatgtcatggtaatggctcttcaaaaattctctggtcttccagctaataaaattgttggaatggctggaattttggatagttcacgatttaaattatttctatcattagagttaaatgttcctgtaaaagaaatagatgcaatggtaatgggtggacatggagatactatggttccaatgccaagattcacaaaagtttctggaaaacctttactagatttagttgaagaaggaaaaataactaaagagagattagaagaaataaatcaaaggacccgagatggtggtgcggaaattgttaagtatttagaaaaaggctcagcgttttatgctccagcagcgtctggtgttcaaatggcagaagcatatttaaataatgaaaaaaaattattaccatgtgctgtgcaattaaatggcgaatatggtgtcaataatgtttatgcgggagtaccagtaattgtgggtaaagaaggtgtagaaaaaatagagcaaattgatctagatgagaaagaaaaaaaagaatttatgcactctatagaagcagtaaaagctctttgggaggcagcttctaaaatagaccctgatctctcaaaataa

SEQ ID NO: 207212 - DNA, 558 bp, Unknown
  Bacterial polypeptide expressing nucleotide sequence isolated from the Sargasso Sea
caacaaataaagttgttggaatggcaggtattctagatagttcgaggtttaaactttttttgtctttagaattaggtgtgccggtaaaacaaatcgatgcaatggtcatgggtggtcatggagacacaatggttccacttcctagatttactaaagttaacggcaaaatgttaaatgatttaattaacgagggaaaaatttcagcgaataaagttgaaagtattaatcagagaacaagggatggaggcgcagaaatagtaaaatatttagaaaaaggatcagcttattatgctcctgcagcctcgggtgtagagatggccatatcttttattaatgatgaaaaaaaagttttaccatgtgcagcatatttaaatggtgagtatggtattaaaaatgtatatgcaggtgttccagttttgataggaaataaaggtgtcgaaaaaattgaggaaatccagctcgatgaaaaagaaaaaaaagaatttttaaattcagtaaatgcggttgaaaagctttgggaggcagccgtaaaaattgaccctgaattaaataattgat

SEQ ID NO: 207213 - DNA, 722 bp, Unknown
  Bacterial polypeptide expressing nucleotide sequence isolated from the Sargasso Sea
tgattctgatctttttattatcacagctggtatacctcgaaaacctggaatggatagagaagatcttctagaaataaaccttggaattattaaaaatgttgcaaaagaaataaaagaaaaagcacctaattcttttgtaatagttatatctaaccccttagatgcaatggtttacgcattttataagatctcaggatttccaaagaatagagttgtcggtatggccggcgctcttgatagtacacgatttagaacatttatagccatggaaacaggatattctgttcaagatgtcacatgcatggttttaggtggccatggagatactatggtgccaatatctagactcgcaactatcggaggcgttccaattttagatattatatcaaaggataaattaaaagaaattgaagataggacacgtgttgcaggtggagagattgtgaaactttttggaaatggttctgctttttatgctcccgctcaatctgccatagaaatggcagaatcttatcttagagataaaaaacgtgttatcccctgtgctgcattatgcgaaggagaattcggtatagaaggatattttattggcgtaccaactgttattggttcaaatggagttgaagaaattttagcctttactctttcagaaaaagaaaaagcagatctaaataacaccttagatgctgtaaaaaagaccgttaaagaaacaggcctttaaa

SEQ ID NO: 207214 - DNA, 385 bp, Unknown
  Bacterial polypeptide expressing nucleotide sequence isolated from the Sargasso Sea
aatgaatacagtcaaagttgctgttaccggcgctgccggtcagatcggatatgcccttttatttagaattgcatccggatcagtttttggaccagataccaaggtcgagttgcagcttttggaattggaacctgcacttccggcactcgaaggagtcaaaatggaattggacgattgcgcctttccacttctccaaaaaatcaccaccacctccgatgcaggtgtcgcattcaaagatacagattggattctgctggttggcgcagcaccaagaaaagcagggatggagcgcaatgacctccttcgtgtcaacggaggtatatttgtcggacagggcaaagccatcgaggaacaagccggagatcgggcaaaaatcctcgtcatc

SEQ ID NO: 207215 - DNA, 571 bp, Unknown
  Bacterial polypeptide expressing nucleotide sequence isolated from the Sargasso Sea
gtattcaaaattaccaacaaataaagttgttggaatggcaggtattctagatagttcgagatttaaactttttttatctttagaattaggtgtgccagtgaaagaaatagatgcaatggttatgggtggtcatggagatacaatggtcccacttcctagatttactaaagtcaatggcaaaatgttaaatgatttaattaacgagggaaaaatttcagcagataaagttgaaagtattaatcagagaacaagggatggaggcgcagaaatagtaaaatatttagaaaaaggatcagcttattatgctcctgcagcctcgggtgtagagatggccatatcttttattaatgatgaaaaaaaggttttaccatgtgcagcatatttaaatggagagtatggtattaaaaatgtatatgcaggtgttccagttttgataggaaataaaggtgtagaaaaaattgaggaaatccaactcgatgaaaaagaaaaaaaagaatttttaaattcagtaaatgcggttgaaaagctttgggaggcagccgtaaaaattgaccctgaattaaataattga

SEQ ID NO: 207216 - DNA, 478 bp, Unknown
  Bacterial polypeptide expressing nucleotide sequence isolated from the Sargasso Sea
atgagcaagaagcccgttcgcgtcgctgtcaccggcgccgccggtcaaatcggttacgccctgctgttccgtatcgcctccggcgaaatgctgggcaaggaccagccggtcatcctgcaattgctcgaagtgcctgtcgaaggtcctcaaaaagcgctcaagggcgtgatgatggaactggacgactgcgccttcccgctgctcgtcgaaatgaccgcccacagcgaccccatgaccgccttcaaggacgctgactacgcactgctggtcggttcgcgcccccgtggtcctggcatggagcgtgccgagctgctggccgtcaacggcgccatctttacagcgcagggcaaggccctgaacgcagtggcatcgcgtgacgtgaaggtgctggtggtgggcaaccccgccaacaccaacgcctacatcgccatgaagtcggcccccgacttgccacgcaagaacttcaccgccatgctgc

SEQ ID NO: 207217 - DNA, 470 bp, Unknown
  Bacterial polypeptide expressing nucleotide sequence isolated from the Sargasso Sea
cgatcttgtccggatgaaatggatgacccagaaaaaacttgatgagattgttcaacgtacccgtgatggcgggggagagatagtggcgcttctcaaaactggctcggcattctatgcacctgccagcgccgcgattcaaatggcagatgcctacctcaaggacaaaaaacgtgtgctgccgtgcgcagcttatttgcgcggtgagttcggtatcaaaggtttgtacgttggtgtgcccgtggtgattggtgccaagggtgttgagaaaattgtcgaaattaagatggaccgcgaagagaaagcagcattcaataaatcaattcgggcagttaagaaattggtaacggaaagtaagagagttttgtctgggcaagctcaaaaaagcaatacggccaagaaaaaagcgccggctaaaaagaaagtggtcgtgaagaagaaaggggctatcaaagagcgcgcaaaaaagtaat

SEQ ID NO: 207218 - DNA, 286 bp, Unknown
  Bacterial polypeptide expressing nucleotide sequence isolated from the Sargasso Sea
atggcacgacataaaatctctctaattggcgctggcaatattggtggcacattggctgtgcttgccggtttgaaagagcttggcgacatcaccatgttcgatatcgccgagggtattccacagggtaaggcgcttgatattgtgcaatcaagcccgattgaaagatttaatgcggcggttaccggggcgaatgattatgccgctttggctgatagtgacgtggtcattgttaccgctggtgtgccgcgcaagccaggcatgagccgcgatgatttgatcggtatca

SEQ ID NO: 207219 - DNA, 617 bp, Unknown
  Bacterial polypeptide expressing nucleotide sequence isolated from the Sargasso Sea
tatgagaaaaaaaatttcattaattggagctggtcaaatcggaggaacattagctcatcttatttgtatcaaagaacttgctgacgtcgtactttttgatgtagcggaaggaattgcaaagggcaaagctcttgatatagcacaatcaatttctgttgacggccaaaatgtcggtataattggaacatctaattataaagatactgctaattcagatgtaataattattacagcgggtgttccgagaaaacctggtatgagcagagatgatttgttggaaattaatttaaaaattattaaacaagttgccgatggaatagcacaaacttcacctaatgcatttgtaatatgtattaccaaccccttagatgttattgtaatggctttacaaaaatactctaaatttccaacacaaagaattgttggaatggcagggattttggatagttccagatttaagtattttctttctcaggaattgaaggtgcctgtaaaaaatataaatgctctagtgttgggtggtcacggagacacaatggttcctatgttaaaccatacaactgttaataaaaaatctttaattgagttggtaaaagaaaaaaaaatttcacaagaaa

SEQ ID NO: 207220 - DNA, 767 bp, Unknown
  Bacterial polypeptide expressing nucleotide sequence isolated from the Sargasso Sea
tatgaaaaagtcaaaaatatcccttattggatcaggacaaatcggtggaacattagcccatctaatagtaatgaaagaacttggtgatgttgttttgtttgatgtagctgaaggattagcaaaaggcaaagcgctagacttatcgcaatcaacagctgttgacgggttagatgtaaaaattacaggaacaagtgattatagtgatactagtaattcagatgtaattatcattactgcaggagtgccacgcaagcctggaatgacacgggatgatttacttggtacaaatttaaatattattaaacaagttgctgaaggtataaaagatacatccccaaatgcttttgtaatatgtattaccaatcctctagatgtaattgtaatggcattacaaaaatactcaggccttcctaaaaataaagttataggaatggcaggtattcttgacacctcaagatttaaattttttatttcgcaagaacttaatgttccaattaaagaggttgattcgtttgtattgggtggtcatggagatacaatggtacctgtcccaaatagaactaccgtgtcaggaaaacccttaatggactatgtcaatgagggtaaaataacattagatagattagatgaaataattgaccgcaccagaaaaggtggtgccgaggttgtaaaactacttcaaacgggctcagcattttatggtcctgcagcttcaggtattgaaatggctgagtcatatttaaaaaaccaaaataaaacattgccgt

SEQ ID NO: 207221 - DNA, 865 bp, Unknown
  Bacterial polypeptide expressing nucleotide sequence isolated from the Sargasso Sea
ggtgcaggccaaataggtggaactcttgcacatttaataggaataaaagaattagtgaatgaagtggttttatttgatgtagttagtggtattgcaaaaggaaaagcattagatattgcacaatcttcatccgtagatggtttcaatgttaggttttcaggaactgataactatgaggatataaaagattcagatgtaataataattacagcaggtgttccaagaaaacctggaatgagccgagacgatcttcttggaattaatttaaaaattattaaacaagttgctaagggggtaaagaaaaatgctcctaacgcttttgtgatttgtatcaccaaccctttagatgttatggttatggcatttcaaaagttttcaggtttgccgtcaaataaagttgttggtatggcaggtattttagacagttcgagatttaaattatttttatcattagagctaaatgtgccagtaagagatattgaggcaatggttatgggtggtcatggtgacactatggttcctatgccaagatttacaaaaatttcaggtaaaccattgttggattttgtaaaagatggaaaaatttctttagaaagagttgaggaaattaatcagagaacgcgagatggtggtgcggaaatagttaaatatttagaaaaaggatcagccttttatgcaccagcagcctcaggtgttcaaatggcagaagcatatttgaatgatcagaaaaaattattaccctgcgctgttcaattaaatggagaatatggtgtgaaaaatgtttatgcaggtgttcccgttgtcattggaaaagatggtgcagaaaaaattgaagagattgatttagatgaaaaagaaaaaaaag

SEQ ID NO: 207222 - DNA, 310 bp, Unknown
  Bacterial polypeptide expressing nucleotide sequence isolated from the Sargasso Sea
atgcgaaacaaaatagccttggttggatcaggaaatattggaggaactcttgcacacttagctgcaattaaagagcttggggatgtaacactatttgatatcgcagagggtattcctcagggaaaatctttagatcttgctcaatcaggaccagtcgagagttttgatagtaaaatgatcggttcaaatgattataaagatctcaaagatagtgatgtagtaatcgtaactgctggtgttgcaaggaagccaggtatgagcagagatgatttagttgagatcaacactaaagttagaaacaggttgtaaa

SEQ ID NO: 207223 - DNA, 427 bp, Unknown
  Bacterial polypeptide expressing nucleotide sequence isolated from the Sargasso Sea
atgggataccgaagaaataaaatatcacttatcggcgctggacaaattggtggcactcttgcacttttatctggtttaaaaaaccttggcgacctagttttgtttgatattgttgatggggttccacaaggaaaaggtcttgatatagcacaggcaagtacagtagagatgtttgactcaaagattgaaggagcatctgattatagtgctatagaagactcggatgtgataatagtaacagcaggcgtgccaagaaagcccggtatgagtagagatgacttgctggagataaatcttaaagtgatgagttctgtcggggaaggaattaaaaaatatgctccaaactcttttgtcatttgtattacaaatccgcttgacgcaatggtctgggcacttcaaaaggcaaccggacatagtacaaatatga

SEQ ID NO: 207224 - DNA, 755 bp, Unknown; identical to SEQ ID NO: 207183
  Bacterial polypeptide expressing nucleotide sequence isolated from the Sargasso Sea

SEQ ID NO: 207225 - DNA, 446 bp, Unknown
  Bacterial polypeptide expressing nucleotide sequence isolated from the Sargasso Sea
tatgaaaaaaaaaatttcactaataggagcaggtcaaattgggggaacattagctcatcttttaagtataaaagaacttgctgatgttgtactttttgatgtagccgaaggtattgctaaaggcaaagctctagatatagcacaatcaacagcagttgatggacataatgttaatctaataggaactaacgattataatgacataaaaaattctgatgtaattattattaccgctggagttccaagaaagcctggtatgacaagagacgatctattagatacaaatttaaaaataatcaaacaagttgctttaggaattaagaaaaactcacccaatgcatttgtaatttgtattaccaatcctttagatgtgattgttatggcttttcaaaaatactcaggattaaataccaataaagtcgtaggaatggctggtattttagatt

SEQ ID NO: 207226 - DNA, 529 bp, Unknown
  Bacterial polypeptide expressing nucleotide sequence isolated from the Sargasso Sea
aaacctaatgaagtattcggtatggctggagttttagattccgctaggtttacaacttttatttcacaaagtcaaaatacatcagtaaaatcaatttcatctaatgtattaggtgggcacggagacactatggttcctttgctaaataacagttttatcgggggcaaaagcctttcggaatcaataaaagaagatgaattaaatgatttagtagacagaactaaaaatggtggagcagaaatagtaaattaccttaaaactggcagtgcattttatgccccgtctgcatctatagttcaaatggtagacgccattagctcagattcaaaagaagttttaccaacaacagcatacctgcaaggtgaatacggaataaacgacttatatttcggtgttcctgctaaactaggtaaaaatggagttgaagagataattcaatatgatttatcagatgctgaaaaagaagatttaaataaatcagcaaaagcagttaaagatactgtgattgccatggaaaatttatcttagg

SEQ ID NO: 207227 - DNA, 552 bp, Unknown
  Bacterial polypeptide expressing nucleotide sequence isolated from the Sargasso Sea
aaaataaagtggtaggaatggctggtatattagactcttctcgttttatttattttctatcacaggaacttaaagtgccagtgcaaaagattaaatcttttgttttaggtggtcatggtgacagtatggtagccatgttagcttcaacagagattgaagggaaaaaaattcttgatttagttaaagatggaaaaatatcgatggaaagactaaacaaaatagttgatagaacaaaaaaaggaggagctgaaattgttaaatatttagaaaaaggttcagcattttatgcccctgcagcctcaggagtggaaatggctgaatgttatctaaaagactcaaaaaaacaattaccatgtgcagtttatttaaatggtgaatatggtgcgaaagacatttatgctggtgtgcctgtaataattggatcaaaaggagttgaaaaaatcattgaacttgatttgacttcagaagaaaaaagtaattttgaaaaatctatagactcagttaaagatttattcaatgctgcaaaaaacatagaccctaatttaaattaga

SEQ ID NO: 207228 - DNA, 821 bp, Unknown
  Bacterial polypeptide expressing nucleotide sequence isolated from the Sargasso Sea
gggcatggttaaaggtaaggcgcttgatctgatgcagcttagacctcatgatggccatgatgcaaatataatgggcacatctgattggaacgatgtaaaagattcagatgtgtttattataaccgctggtattcctagaaaacctggtatggatagagaggacctacttgaaatcaatttaggtataatgaaagatgtagcaaacaatataaaggaacaatcacctaatgcatttgtgattgtaatatcaaaccctcttgatgccatggtctacgcattccacaaagtatctggatttcctaaaaatcaggtagttgggatggctggggcactagatagtgcaagatttcgtgcctttattgcaatggaaactgaatactccgtccaagatgtgacctgtatggtactaggcgggcatggtgatacaatggtgcctatttctagacttgccactgtgggtggagttcctgtcactgaccttattaattctgatagactaaaagaaatcgaagacaggacacgggtagctggtggtgagatagtaaagttgtttggtaatggctctgcattttatgctccagctcaatctgcaattgaaatggctgaatcatatattagagataagaaaagagtcataccgtgtgcttctttgtgtgaaggtgagtttggtatagacggatatttcattggtgtgccaactgtaattggaagcaatggagttgaaaaaatattggaattcacattgaatgatgatgaaaaaactgaattgaacaaaacactagaagccgtgaaaaaaactgtagctgaaactgagctttaag

SEQ ID NO: 207229 - DNA, 532 bp, Unknown
  Bacterial polypeptide expressing nucleotide sequence isolated from the Sargasso Sea
atcattattacagctggagtaccaagaaaacctggaatgagtagagatgatcttcttggaattaatttaaaaataattaaacaagttgcagagggaataaaacagaatgctcctgatgcatttgtgatatgcattaccaatccactagatgtaatggtaatggcatttcaaaaattttcaggtctttcgccaaataaagttgttggaatggccggtatattggatagctcaagatttaagttatttttgtctgaagaatttaatgttccagtaagagaaatagaggcaatggtaatgggtggacatggtgatacaatggttcctttaccaagatttacaaaagtttctaaaaaaccattattagacttagttaaagaaggaaaaatttctcaaaaaagattagaggaaataaatcaaagaacgagagatggtggagcagaaattgtaaaatttttagaaaaaggttcagctttctatgcaccggcagcttcaggagttgaaatggctaaagcttatttaaaagatgaaaaaa

SEQ ID NO: 207230 - DNA, 397 bp, Unknown
  Bacterial polypeptide expressing nucleotide sequence isolated from the Sargasso Sea
atgaaaagaaataaaatcgctctaattggatcaggtaatattggaggaactttagcacatttagttgctttaaaagaattaggtgatattgttttgtttgatatagctgaaggaattcctcagggcaaagccttagatctacaacagtcaggcccaattgaatcatttgatgggaaaatttcaggtactaatcaatatcaagatttacaagaaagtgatgtagttattgtaacagcaggagttcctagaaagccaggaatgagtagggatgaccttgttgaaataaacacaaaggttatgaaacaagttggccaaggtataaaagaaaattgtcctaatgcatttgtgatatgcatcacaaatccattagatgcaatggtaggtgtgttgcaaagag

SEQ ID NO: 207231 - DNA, 382 bp, Unknown
  Bacterial polypeptide expressing nucleotide sequence isolated from the Sargasso Sea
aatgaaacgtaataaaattgcactaattggctcaggaaatattggtggaacactcgctcaccttaccgggcttaaagagttgggggatgtcgtcctatatgatattgcaaagggaatcccccaaggtaaatctctagacatagcagaaagttcacctgtagacagttttgactgtaagctcataggtagcaactcttatgcagctataaagaattctgacgtagttatagtgaccgcaggaattcccagaaaacctggcatgagccgtgatgacttactgaatattaatactgatgtaatgaaacaagttggcaaaggcataaaaaaatactgcccaaatgcttttgttatctgcattactaatcctttggatgccatggtt

SEQ ID NO: 207232 - DNA, 900 bp, Unknown
  Bacterial polypeptide expressing nucleotide sequence isolated from the Sargasso Sea
caaaagaactagtagatgaagttgttctttttgatattgcaagtggtatagctaaaggaaaagctttagatatttctcaatcgtcatctgtagatggttttaatgtaaaatttttaggaactgatgattataaagatattaaaaactcagatgtaattattattactgcaggtgttccaagaaaacctggaatgagtagagatgatttacttggtattaatttaaaaattattaaacaagttgctgaaggaattaaacaaaatgctccaaacgcttttgttatttgtattacaaatcccttagatgtaatggtgatggctttccaaaaattttcaggattacccgcaaacaaagtagttggaatggctgggattttagacagttcaagatttaaactatttttatctttagaacttaatgttccagtaaaagaaatagatgcaatggtaatgggaggtcatggagatacgatggttcctatgccaagatttacaaaagtttcaggaaaacctttgcttgatttagttaaagaagaaaaaatttcaaaagaaagattagaagaaataaatcaaagaacaagagatggtggtgcagaaattgttaggtatttagaaaaaggatcggcattttatgctcctgccgcatctggagttcaaatggctgaagcatatttaaaaaatgaaaaaaaattattaccatgtgctgtacaattaaatggagagtatggagtcaaaaatgtctatgcgggcgttccagtaataataggaaaaaaaggtgtcgaaaaaatagaagaaattaaattagatgataaagaaaaaaaagagtttatgaattcaatagatgccgtcaggggtctctggaaggcagcttctaaaattgatcctgatctttctaaataat

SEQ ID NO: 207233 - DNA, 406 bp, Unknown
  Bacterial polypeptide expressing nucleotide sequence isolated from the Sargasso Sea
tatgtcaaaaaaaatatcattaattggtgctggacaaattggtggaacactcgcacacttaattggtttaaaggaactagtagatgaagttgtaatgtttgacgttgcaagcggtattgcaaaagggaaagcgttagatatagctcaatcatcatcggtcgatggttttaatgttaaattatctggaacagataattacgaagatattaaagactccaatgtaattattataactgcaggagttccaagaaaaccaggcatgagtagagatgatttattaggaataaatttaaaaattataaaacaggtagcagaaggtataaaaaaaaatgcacctaacgcatttgtaatatgtattactaatccattagatgttatggtgatggcgtttcaaaatactcaggac

SEQ ID NO: 207234 - DNA, 325 bp, Unknown
  Bacterial polypeptide expressing nucleotide sequence isolated from the Sargasso Sea
atgaatagaaaaatatcattaattggtgcaggtcaaataggcggaactttagctcatttacttggattgaaagaagttgcttcagaaatagtattatttgatgttgcggcaggagttgctaaaggaaaagcattagatatagcacaatcatcttctgtagacggttttaatgtaaagttgtcaggcacagatgattataatgatattaaaaattctgatgtaataatcattaccgcaggagtgccaagaaaaccaggaatgagcagagatgatttacttggaattaatttaaaaataatgaaaaaggtagctgatggtataagaa

SEQ ID NO: 207235 - DNA, 844 bp, Unknown
  Bacterial polypeptide expressing nucleotide sequence isolated from the Sargasso Sea
tatgaaaagtaaaatcacccttataggagcaggccaaattggaggaactttagctcatttaatagttttaaaaaaattgggtgatgtagttttatttgatgttgcagaaggtttagcaaaaggcaaagcacttgatattgctcaatcttcaccagtgcataattttgataataaaataattggtaccaataattataaagatatcaaaaattcagatgtaataataattactgcaggagttcctagaaaaccaggaatgaatagagatgacctacttagcattaacctaaaaataattaaggaagttgctgacggcatcaaaaaaaactcaccaaacgcttttgtgatatgtataactaatccattagatgtaattgtaatggcactacaaaaatattcaggtttaccaaaaaataaagtagtaggtatggctggaatattagattcgtcacgatttatttattttttatcacaagaacttaaagtgccagtcagtaagattgagtcattcgtattaggtggacatggagatacaatggtagcaatggtaaatcacacaaaaattgatggcacaccactaattgatatagttaaacaaggaaaaatagaaaaaaaagtgcttgatcaaataataaataggacaaaaaatggaggtgctgaaattgtgaaatttcttgaaaaaggatcagcattttatgctcccgcagcctcaggtgtattaatggctgaaagttatatttttaataagaaaaatcagttaccttgtgcagctttcttaaacggagagtatggcgtttataacttatatgcaggcgtacctgttgtattggaaatggcggagtag

SEQ ID NO: 207236 - DNA, 806 bp, Unknown
  Bacterial polypeptide expressing nucleotide sequence isolated from the Sargasso Sea
tggttttaatgttaaattctctggaacagacaattatgtggatataaaaaattctgatgtaattattataacagcaggtgttcctagaaaaccaggtatgagtagagatgatttgcttggaattaatttaaaaattataaaacaagtagccgaaggtataaaaaaaaatgctcctagtgcatttgttatatgtataaccaatcctttagatgttatggttatggcgtttcaaaaatattcaggcttaccaactaacaaagttgttggaatggcaggaatacttgatagttcaagatttaaattatttttatctcaagagcttaaagttcctgtaagagaaattgaagcaatggttatgggcggtcatggagatactatggttcctttgccaagattcacaaaagtttcaggtaaaccattattagaacttgtaaaagagggaaagctgtcgagtgaaaaattggaagaaattaataaaagaacgagggatggtggagctgagattgtgaaatatctagaaaagggttctgcattttatgcaccagcagcatcaggagttcaaatggctgaagcatatttaaaaaatgaaaaaaaattacttccttgtgctgttcatcttaatggagaatatggtgtaaaaaatatttttgcaggtgttccggttataattggaaagaatggtgtagaaaaaatagaagaaatcagtctagacgaaaaagaaaaaagtcaattcatgcattctataaatgctgtaaaaaaattatgggaggccgcttcggcaattgataaagatctttctaaataat

SEQ ID NO: 207237 - DNA, 424 bp, Unknown
  Bacterial polypeptide expressing nucleotide sequence isolated from the Sargasso Sea
catgaaagttgccgtattaggtgctgctggtggtataggtcaggcgctgtctttattattaaagttaaacttaccggctggtactgatttagctctgtacgatttagccccagtgactccaggtgtagctgttgatttaagtcatatccctacagcggtaaaaattacaggttttggtaaagaagacctggataaagcgctgatcggtgcagatatcgtgatgatccctgccggtatgccacgcaagccaggcatggaccgctctgatttattcaacatcaacgctggtgttgtaaaaactctggctgaagccatagtagtgaactgccctaaagccttggttggtgtaatcactaaccctgtgaacaccactgttgctatcgcagctgaagtgttcaaaaaagccggtacttatgatcctaag

SEQ ID NO: 207238 - DNA, 850 bp, Unknown
  Bacterial polypeptide expressing nucleotide sequence isolated from the Sargasso Sea
atgggcgcattagagggtgtggctatggaacttgatgattgcgcgtttcctttgttgaaacaaatagaactttcggatcaagcagacgaagcttttaatgaagcaaatattgctttattagttggatctaggcctagaagtaaaggcatggaacgcaaagacctgttggaagcaaatggtgaaatttttactggccaaggggaggctttgaacaaaaaggcggcagacgacatacgtgtattagtagttggtaatcccgcaaacactaattgtcttatagcgatgaataatgcgcctgatattcctaggcacagatttacagctatgactcgtttagatcacaacagggcaattacccaagttgctcataagttagatattggaacgacagaaataaccaaaatgaccatttggggaaatcattccgctactcagtatccggacttattcaattgtaaaatttctgataaatctgctgcagaggtcatagatgaccagaattggttagaagaaacctttattccttcggttcaacaaagaggagcagcgataattgaagctcgcggtgcttcaagcgcggcgtcagctgcaaatgccgcaattgatcatgtccgggattggaccgattcaacccccgaaaatgattgggtgtctatggctgtgtgttctgacggcagttatggcgttgaagaagggctaatttcatcctttcccgttaaatgctctaatggcaattgggaaattgttcaagatcttgaaatagatgatttttcaaaaataaaaattgatgcttcggtaaaagaattatctgaagaacgagacactgtctctgacttgaacttaatttaaa

SEQ ID NO: 207239 - DNA, 310 bp, Unknown
  Bacterial polypeptide expressing nucleotide sequence isolated from the Sargasso Sea
aatgagcaaaatatctttaataggtgctggacaaataggtggaactttagctcatttaataggaataaaagacctagtagatgagctcgttctatttgatgtcgcaagtggtatagcaaaaggtaaagctttagatatagctcaatcttcctcagtagatggatttaatgtgaaactgagcggaacagataattatgaagatattaaaaactctgatgtaattataattaccgcaggtgtgcctagaaaaccaggcatgagtagagatgatttattgggaataaatctgaaaattattaaacaagttgca

SEQ ID NO: 207240 - DNA, 568 bp, Unknown
  Bacterial polypeptide expressing nucleotide sequence isolated from the Sargasso Sea
gattgctgcttccagtgccccgaacctcgaccgtaatcagtttacggccatgactcggctcgaccataatcgcgccattagctggctagcagagaagacgcaaacccattcgactcaaattcgtcgtatgtccatctggggcaatcattccgccacgcagtacccggatcttagtaactgcacggtgaatgggactcttgcgacagaattggtggatgaaacctggtgccgcgagagctttatccccaaagtccaaaagcgaggggcagaggtcattcgggcacgtggtgcgtcatcggctgcttctgctgcgtctgcggccattgatcatgtccggacttggctccgtggaactactgagggtgattggacgagtatggccgtggcatctgacggcagctacggagttgaagaaggtattgtctactcttatccggtcacctgttcgaacggcagttactcaatcgttcaagatcttgaagtgagcgaattcagccgcggatgcatgaatacgacagaggccgaactccgagaagaacgtgccgccgtcgaagatttactggagtag

SEQ ID NO: 207241 - DNA, 856 bp, Unknown
  Bacterial polypeptide expressing nucleotide sequence isolated from the Sargasso Sea
gggatagctaaaggcaaagccctagatattgctcagtcatcatcagttgatggattcaatgtgaggttttccggaactgatgattataaagatattaaaggttcagatgtaataattattacagctggggtaccaagaaaacctggaatgagtagagacgatctacttggaataaatttaaaaataatcaaacaagttgctgatggagtaaaacaaaatgctcctgatgcgtttgtgatatgtattaccaatccattagatgtaatggtaatggcatttcaaaaattttcaggtctttcaccaaataaagttgttggaatggccggtatattagatagttctagatttaaattatttttgtctgaggaatttaatgttccagtaagagagatagaggcaatggtaatgggtggacatggtgatacaatggttcctttaccaagatttacaaaagtttctaataaaccattgctagaactggttaaagaaggaaaaatttctcaaaagagattagaggaaataaatcaaagaacgagagatggtggagcagaaattgtaaaatttttggaaaaaggttcagcattttatgcaccagcagcttcaggagttgaaatggctaaagcttacttaaaagatgaaaaaaaaatacttccgtgtgctgcttacttaaaaggagagtacggaataaaagacatttatgctggtgttccaattatcgttggtaaaaatggtgttgaaaaaattgaggaaataaatttagatgagaaagaaaaatctgaatttcttcactcagtcgaggctgtaaaaaaactttgggaagtggcatctaaaatagatccagatttagccaaataat

SEQ ID NO: 207242 - DNA, 493 bp, Unknown
  Bacterial polypeptide expressing nucleotide sequence isolated from the Sargasso Sea
ttctttcccacaatttaatgtcccaattaaaaaagtagaatcctttgttttaggtggtcatggagatactatggttccaattttaaatagttcgtttgtagatggaaaaaatttaacagaacttgttaaagaaaagaaaataaaaaaggaaactttagaatcaattattatgaggactagaaaaggaggtgcagaaatagtgaaatttttagaaaagggttcagcattttacgcgcctgctgcatccggcattcagatggcagagtcttatattaaagatttaaagaaaactttaccatgtgctgcttatttaaatggagagtacgaaacaaaaaatttatacgtaggtgtaccagttgtaataggtaaaaatggagttgaaaaggttatcgaactaaaattaacagatgaagaaaagaatgattttaaaaaatcagttaaagctgtggaagatttatttagttcagctaaaaaaatagactcgtctttataa

SEQ ID NO: 207243 - DNA, 623 bp, Unknown
  Bacterial polypeptide expressing nucleotide sequence isolated from the Sargasso Sea
catgagaaaaaaaattgctctcgttggagcaggaaatataggcggaactcttgcgcatttaattggtttaaaagaactgggcgatgttgttcttatagatattgcggatggtatgacaaagggaaaagcacttgatttagctcaatcttcatcaattgaaagctttaacgcaaaaatgagtggctcttcaaattaccgtgagatgaaaaacgcagatgttgtgatagtaacagcaggctttcaaagacgacctggtatgactagagatgacttagtagaaaaaaattcagcaattattcaaactgttggaaaaggaattaaaataaattgtcctaaggcttttgttatttgtattactaaccctctggatgcaatggtcagtgttttgcaaaaagctgctggtttgaagtcaaatatgtgtgttggtatggcaggtgtccttgatagtgcacgactaaaatatttcttagctgaagagtttaaagtttctgtagaagatgttagcgcttttgttcttggtggtcatggtgatacaatggttccagttataagatatgctactgttgcaggtgtacctgttccagaactgattaaacttaaatggtctacctccaaaaaaataa

SEQ ID NO: 207244 - DNA, 592 bp, Unknown
  Bacterial polypeptide expressing nucleotide sequence isolated from the Sargasso Sea
ctgggcgcggcgggcgggatcggccagcccctgagcctcctcctgaagcaaaacaccctcgtcgccgcgctcaatctgtacgacgtcgccgccgtcgtcgcgggcgtcgcggcggacatctcccacgtcaacacccccgcgcacgtccgcgggttcgccggccccgcgcagctcggcgcggcgctcgcgggcgcggacctggtcgtcatccccgcgggcgtgccccgcaagcccgggatgacgcgcgacgacctcttcgccgtcaacgcgggcatcgtctcgacgctcgtcgacgcgtgcgcgacgcactgccctcgcgcgatcgtcaacgtcatctccaacccggtcaacagtaccgtcccgatcgcggcggaggttctgaagcgccgcgggtgtttcgacccgcgcaagctcctcggcgtgacgcacctcgacgtcgttcgcgcgcggaccttcgtcgcggaggcgaagggcctcgacccggcgggcgtggacgtccccgtcgtcggcgggcacgcgggggcgaccatcctgcccctgttgtcgcagacgaggccgttccctcgggacgggttcacgcccgaggaggtcg

SEQ ID NO: 207245 - DNA, 613 bp, Unknown
  Bacterial polypeptide expressing nucleotide sequence isolated from the Sargasso Sea
aaaaaaaatgcacctaatgcatttataatatgtattacaaatccattagatgtaatggtaatggcatttcaaaaattttcaggtttaccagccaataaaattgttggtatggcaggcattttagatagttcgagatttaaattgtttttatccttagagctaaatgtacctgttaatcaaattgaagctatggttatgggcggccatggtgatacaatggttccaatgcctagatttaccaaagtttcaggtaagcctttgttagatttagtaaaagacggaaaaatttcacaagaaagattagaagagataaatcaaaggaccagggatggtggcgcagaaattgttaagtatttagaaaaaggttcagcattttacgctccagcagcatctggtgttcaaatggcagaggcttatttgaataatcagaaaaaattattaccttgtgctgtgcaattaaatggagaatacggtgtacaaaatctttacgcgggtgttccagttgttattggaaaagatggtgtagaaaaaattgatgaaattgaattagatgagaaagaaaaaaaagaatttatgcattcaatagatgctgtaaaagctcatatgggaagca

SEQ ID NO: 207246 - DNA, 958 bp, Unknown
  Bacterial polypeptide expressing nucleotide sequence isolated from the Sargasso Sea
aatgtcaaaaaaaatatcattaattggtgcaggtcaaattggtggaacactcgcacatttaattgggttgaaggagctagtaaatgaagttgttatgtttgatattgcaagtggtattgctaaaggaaaagctttagatattgcccaatcatcatctgtagatggatttaatgtaaaattttcaggtacagataattatgaagatataaaaaattccgatgtagtcataataactgcaggtgttccaagaaaaccaggaatgagcagagatgatttattaggaataaatttaaaaattattaaacaagtggctgaaggtataaaaaaaaatgctcccaaagcatttgtaatatgcattactaatccattagatgttatggttatggcgtttcaaaaatactcaggacttccagtaaataaagttgttgggatggctggaatattagacagctctagatttaaattgtttttatctattgagcttaaaattcctgtaaaagaaatagaagcaatggttatgggtggtcatggagatacaatggttccattaccaaggtttacaaaagtttcaggtaaaccattattagatttagttaaagagggaaaattatcattagaaagattagaagaaattaatcaaagaactagagatggaggtgccgaaattgttaaatatctagaaaaaggttctgcattttacgcgccagcagcatcaggcgttcaaatggctgaagcatatttaaaagatgaaaaaaaattacttccttgcgctgtacatcttaatggagaatatggtgtaaaaaatatttttgcaggagttccagtcataattggaaagaatggtgtagaaaaaattgaagaaataaacttggatgaaaaggaaaaaagtcaatttatgaattcaatagatgcggttaaaaaattatgggatgcagcttcagcaatagataaagatctt

SEQ ID NO: 207247 - DNA, 697 bp, Unknown
  Bacterial polypeptide expressing nucleotide sequence isolated from the Sargasso Sea
agcgacttgctgcaagctaacggcggcatcttcacgggtcaaggtcgcgccctaagcgatgcagctaacagttcagtcaaagtacttgtcgtaggtaacccagctaacaccaactgtctcatagccatgcacaacgctccgaatattcctgacgcacaattcacggcgatgaccagactcgatcacaacagagcaatagcgcaactcgctcaaaaaacatcggtgtcggtgaacgaaattaaacacatgacaatttggggcaaccactctgcaacccagtacccagatctctttcacgcagacgttgcgggccaaaacgctgcagcgttagtaaacgaccaacaatggctagaaaacgaattcattcctactgttcaacaacgaggtgcagcaataattgatgctcgcggggccagctccgccgcgtccgccgcgtccgcagcagttgaccacatccgagattgggcgttgggtactcctcgaggcgattgggtctcgatggcaatcccatcgactggtgattatggcgcgcctgaggggatcattacttcctttccctgtactaccagtgaaggccaatacgaagttgtacttggcctggacctccatccgttcagcctggaaaaaatcgaggcttcttgggctgagctcgtcgaagaacgagacaccgtggcatccatgggtctgctgggctaag

SEQ ID NO: 207248 - DNA, 499 bp, Unknown
  Bacterial polypeptide expressing nucleotide sequence isolated from the Sargasso Sea
catgaaaaccataaaagtagcagttacaggcgcagccggacaaatcggctatgcaatgctgttccgcctggcttccggagcagtttttggccgggacacggctgttgaacttagactgcttgaactggagcaggcacttccagcactggaaggagtaaagatggaactggacgactgcgcctttcccctgctggaaaatattgttaccacttcagatacagaacacgcttttaaaggtgttgactgggttatcctggtaggctcagttccgcgaaaagccgggatggaacgcaacgacctgctgaaggtcaacggcggaatttttgttggccagggaaaagcaattaatcagaacgccggcagtaatgtccgaatcgttgtggtaggtaatccctgcaataccaattgcctgattgccatgaataatgcaccggatattccacatgagagatggtttgccatgacggctcttgacgaaaatcgggccaagagtcagctt

SEQ ID NO: 207249 - DNA, 613 bp, Unknown
  Bacterial polypeptide expressing nucleotide sequence isolated from the Sargasso Sea
tatgtctagaaagaaaatcagcttaattggcggtggtcaaattggaggaaatcttgctctcctttgtgctcaaaaagaattaggagatgtcgttatttatgatgttcccaatgcagaaggaatgataaaaggtaaagctttagatatttctcaactaaccccaatggatggatatgacgcaaaaataacgggaacttctaatcctgaagacataaaagattctgatattgttattattactgctggcataccaagaaaaccaggaatgaatagggaagatttattagaaataaacataaaaattattacagatgttgctaataatgttaaaaaatacgctcctaacgcctttgtaattgttttatcaaaccctcttgatgctatcgtttactcattttataaagtgtctggctttaaaaagaataaagttgttggtatggcaggagttttagatagcactagatttaaaacatttttagctatagaaacaggatattctactcaagatatacaatgtatggttttagggggacatggagatactatggttcctattactagacttgctacaatcggaggaattcctgcggaagaattaatatcaaaagaaaaa

SEQ ID NO: 207250 - DNA, 295 bp, Unknown
  Bacterial polypeptide expressing nucleotide sequence isolated from the Sargasso Sea
aatggctcgaaaaaaaattgcgctcataggtgctggaaacattggcggtactctagcgcatttggtaggactaagggaacttggcgacgtcgtcttgtttgacattgttaagggcattccgcagggaaaggcgttggatatagtgcagtcttcgccagctagtggtttcgatgcaaagtatttgggcgcaaacagctatcgtgccatccgcggcgctgatgttgtaattgtgacggcgggcatccctcggaagccaggcatgagtcgagatgatcttgttagtgtcaatacaggt

SEQ ID NO: 207251 - DNA, 625 bp, Unknown
  Bacterial polypeptide expressing nucleotide sequence isolated from the Sargasso Sea
ttgagaaaaaaaatttctttaataggagccggacaaataggaggaactttagctcatttaatcgctttaaaacaattaggtgatgtagttttattcgatgtagccgaaggcatagcgaaaggcaaagcattagatatagctcaatcttctccagtgaatggttttaatattaaacttacaggaacaaacaattatgaggacactaggaattctgacgtaataatcattacggcgggggtacccagaaaaccaggcatgactagggacgaccttttaggagtcaatctcaaaataattaaacaagttgcagaaggaattaaaaaaacctcacctgaagctttcgtaatatgcattaccaatcctcttgatgttatagtaatggcgctacaaaaatattcaaatcttccaaaaaataaaattgtaggaatggcaggtatattagactcatcaagatttatttatttcctctcagaagaattaaataccccagtacagaaaataaaatccttagttcttggcggacatggagatactatggtagcgatgttagggtcaacagaagtcgatggaaaaaaaataaacgaattggtgaaggcaggtaagatatccaaaggaaaacttgatc

SEQ ID NO: 207252 - DNA, 619 bp, Unknown
  Bacterial polypeptide expressing nucleotide sequence isolated from the Sargasso Sea
aatggcaagaaaaaaaattagtttaataggagcaggaaacataggcgggactctagctcaccttattggattaaaagaattagcagatgttgttttattagatattgcgaaaggcataccgcaaggtaaaagtttagatattgccgaatcttcacctgtagatggatttgatgttgacttggctggttcaaataacttttctagaattaagaattcagatgtaatcatagttactgcagggtctccaagaaagcctggtatgtctagagatgatttaattgaaattaatttaaaagtaatgaaaagcgttggtgaggcaataaaaaaatacagtccaaaatcctttgttatatgtataactaacccactagatgcgatggtttgggctttaagagagttttctaagttaccacatcaaatggtagtaggtatggctggggttttagatagtgcaaggtttagatattttattgcaaatcatatgaaagtttcagttgaagatgtgtctgcatttgtgttaggtggtcatggagatacaatggttcccttggtaaggttttctaatgtaggaggtgtccctattccagagctggttaaaatgaaatttaatagacaataa

SEQ ID NO: 207253 - DNA, 842 bp, Unknown
  Bacterial polypeptide expressing nucleotide sequence isolated from the Sargasso Sea
aaaaggtaaagctttagatatagcacaatcatcaccagtcaatggttttaatatcaatctttcgggaacaaataaatatgaggatacaaaaaactcagatgtaattattattactgctggtgttccgcggaagccaggtatgactagagatgatttacttggtataaatctaaaaataataaaacaagtcgccgaaggcataaaatctacttcaccaaatgcttttgttatatgtatcacaaatccactcgatgtaatagttatggctttacaaaaatattcaggcttgcctaaaaataaaatagttggaatggcaggaatattagactcttcaaggtttatttattttttgtcgcaagaattgaaaataccagtacaaaaaattcaatcatttgttttagggggacatggtgacagcatggttgcaatgctgggttcaacaaaagttgatggtagaaagatagaagatttaataaaagatggagtaattaaaaaagagaaactagaggaaattgtagaacgaacaaaaaaaggaggtgcagaaatagtaaaatatttaaaaaaaggatcagcattctatgccccggctgcatctggtgtagaaatggctgaaagttacctgaaagatttaaaaaaacaattaccttgcgcagcttatttaaaaggagaatatggagtaaaagatatttatgcaggtgtgccagttgttataggatcaaatggagtagaaaaagtaatcgaacttagtctaaatactgaagaaaaaaataattttgaaaactctatacagtctgttagagatttatttagtgttgcaaaaaaaattgatccagaattataaa

SEQ ID NO: 207254 - DNA, 550 bp, Unknown
  Bacterial polypeptide expressing nucleotide sequence isolated from the Sargasso Sea
taaagtcgttggtatggcaggaatattggacagttcaagattcaaattgtttttatcacttgaacttaaaattcctgtaaaagaaatagaagcaatggttatgggtggacatggagatacaatggtaccattgccaagatttacaaaagtttcaggtaaacctttattagatttagttaaagaggaaaaattatcagtagaaagattagaggaaatcaatcaaagaaccagagatggtggtgctgaaattgttaaatatttagaaaaaggttcagcattttatgctccagcagcagcaggagttcaaatggctgaagcttacttaaaagatgaaaagaaattattaccttgtgctgtccaacttaatggagaatatggagttaaaaatatttttgccggcgtaccagttataattggaaaggatggtgtggaaaaaatcgaagaaatcaatttagatgaaaaggaaaaaaatcaatttatgcattcgatagatgcagttaaaaagttatgggatacagcttctaaaatagataaagatctttctaaatag

SEQ ID NO: 207255 - DNA, 853 bp, Unknown
  Bacterial polypeptide expressing nucleotide sequence isolated from the Sargasso Sea
ggacaaattggcggaacattagcgttgctcgccgggttaaaaaatttgggtgatgtagtgttgttcgatatcgctaagggcatgccacaaggcaaggctctggatattgcgcaggcctctacgattgagggctttgatgcaaatatcaccggcgctaacagctattctgctttgaagggtgcggatgtagtgattgtcaccgctggcgtgccgcgcaaaccggggatgagccgagatgatttgctaggcatcaatacttcggtgatgcaatccgttggcgagggtataaaaaaatattgcccgaaagctttcgtaatttgcattaccaacccgctggacgtcatggtccaccagcttcgcaaggcttgtggtcttccctataacaaagtcgttggtatggctggggttttggactcggcgcgtttccggcttttcctggcccaagagttcggtgtttcagtggaagatgtttctgcttttgttttgggcggtcatggcgatacgatggtgccgttagtgcgctattccacggtggccggaattccggttccggacctcatcaagatgggttggaccacgcagaagaaaattgatgcaatcgttgaacgtactgctaatggcggcggtgagattgttaatttgcttggtaacgggtcggcgttttatgcgccggcatcgtcggctatttccatggcggagtcctatctgctggacaaaaagcgtgttgttccggcagcggcgtatgtaaaagggtattatggcttaaaaggtttatatgtcggtgttcccgtggtgatcggtgccaagggtgtagagcggattgtgaaattaagcttaaccctaagagaagaaa

SEQ ID NO: 207256 - DNA, 346 bp, Unknown
  Bacterial polypeptide expressing nucleotide sequence isolated from the Sargasso Sea
tatgagaaaaatatctttgattggtgctggacaaattgggggaactttagcccacctaattggacttaaagaattggtaaatgaagttgtaatgtttgatgttgcaagtggtatagcaaaaggtaaggcgctagacattgctcaatcatcgtctgttgacggatttaatgttaatttttctggcacagataattatgaagatattaaaaattcagatgtcataatcattaccgcaggagttcctagaaaacctggaatgagcagagatgatttattgggaataaatcttaaaataaaaagacaggttgccgaaggaataaaaattcactctccagaagcctttgta

SEQ ID NO: 207257 - DNA, 498 bp, Unknown
  Bacterial polypeptide expressing nucleotide sequence isolated from the Sargasso Sea
ttttatcaaaacagctagatattccggttaataaaataaactcattagttttgggtggtcatggcgacaccatggtgccgatgctcgaacaaacaaaaattgatggtgtttctttatcaaaatttttaaaagatggaaaaatagataaaaaaaagctagaggaaattgtagacagaactcgaaaaggcggagctgaaattgtaaaatttttacaaaagggatcagctttttatgctcccgcagcatcagggattgaaatggcagaaagttatttaaaagatcaaaaaaaacaattaccttgtgccgcttatttacaaggtgagtacggggttaaaaatttgtatgctggagttccggtaattattggagcttctggcgtagaaaaagtgattgagcttaaattaaatagtgaagaaaaagagagttttcaccaatctatcaaggcagtagaagatttacttagtgctgccaaaaaaattgatactagtttaaattaaa

SEQ ID NO: 207258 - DNA, 559 bp, Unknown
  Bacterial polypeptide expressing nucleotide sequence isolated from the Sargasso Sea
tatgaaaaaaaagatcactttaataggagctggacaaataggaggaactttagctcatttaatagcattaaaagaacttggagatgttgttttgtttgatgtagccgtaggaatagcaaaaggtaaagcattagatatttcacagtcttcacctgtagatggattcaatattaatttatcaggaacagataactatgaagatacaaaaaattctgatgttataattgtaactgctggagttcctagaaaaccaggaatgactagagatgatttgctgggtataaatcttaaaataataaaacaagttgctgagggtataaagaaaacctctcccaatgcttttgtaatatgcattacaaaccctctagatgtaattgtaatggctttacagaaatactctggtttacctaaaaataaaatagtaggtatggcaggtatattggactcctctcgatttatttatttcctgtctcaagaattaaaagttcctggtaaaaagattaaatcttttgtgctgggaggtcatggtgacagtatggtagcaatgcttgggcatacc

SEQ ID NO: 207259 - DNA, 748 bp, Unknown
  Bacterial polypeptide expressing nucleotide sequence isolated from the Sargasso Sea
attgaaaaaaataagtcttattggtgcgggaaatataggaggagaacttgcagctattgcagcttctaaatctcttggcaatattatgttaattgatattgaagaaggaattgctcgtggaaaatcattagatttatctcaaagtggagtagtaagaaattttagttctaaaataaatggaacttcaaatttatctaaaataaaagatagtgatgtaataattgtaaccgctggaattgcaagaaaaccagggatgagcagagatgacctcataataactaatcttaagataatgaccagtataggtaatgctataaaaacttatagcccaaaagcatttgtcatatgtgtaactaacccgttagatgcaatgacatggattttaaaaaaaataagtgggattaaaaaaaacatgatagtaggtatggcaggaatcctcgattcttctcgtttcagattttttttatctgaagaaataaaagtatcctcagccaatatccaaacaatggtactaggaggccatggcgataccatggttcccatgttaaattatacatcaataagtggaattccaatcttagaattcattaaagaaggaaaattaacaatgtcaacacttgaaaagattataaaaagaacaagaaatggtggaggggaaatagtaggtttattaaaatctagttctgcatattatgcacctgcaataagtgctattgaaatggcagaatcttttcttttagatcaaaaa

SEQ ID NO: 207260 - DNA, 619 bp, Unknown
  Bacterial polypeptide expressing nucleotide sequence isolated from the Sargasso Sea
aatgtcaaaaaaaatatcattaattggtgcaggacaaattggtggaacactcgcacatttaattggtttaaaggaactagtagatgagattgttatgtttgatgttgcgagtggtattgcaaaaggaaaggcactagatatagctcaatcgtcatcagttgacggttttaatgttaaattatctggaacagataattatgaagatattaaagactccgatgtaattattataaccgctggtgttccaagaaaaccaggcatgagcagagatgatttattaggaataaatttaaaaattataaaacaggtagcagaaggtataaaaaaaaatgcaccaaatgcatttgttatatgcatcactaatccattagatgttatggtgatggcgtttcaaaaatactcagcacttccagcaaataaagttgtgggcatggcaggaatattggatagttcaagatttaaattatttttgtcacttgaacttaaaattcctgttagagagatagaagcaatggttatgggaggtcatggagatacaatggttccattaccaagattcacaaaagtttcaggtaagccattattagatttagttaaagagggcaaattaacatcagaa

SEQ ID NO: 207261 - DNA, 756 bp, Unknown
  Bacterial polypeptide expressing nucleotide sequence isolated from the Sargasso Sea
taaggctctcgagggagtcgttatggaactggacgactgctcctttcctcttctcaaggacgtccgtcccaccagtgacctcgacgaaggcttcgggggagccaactgggccctgctcgtgggaagcgttccccgcaaggccgggatggagaggggagacttgctcggcatcaacggcaagatctttaccggacagggccgggcaatacagaagaacgccgcttccgacgtccgcgtgctggtggtcgggaacccctgcaacaccaattgcctgatcgccatgaacaatgcccccgacgttccccgcgagcgctggttcgccatgactcgcctggacgaaaaccgggccgccgcccagcttgccgccaaggccggcgtccaagtctcggaggtgtccaacgtcaccatctggggcaaccattccgccacccagtacccggactactacaatgccaggatcgggggaaccccggctcccgaggtcatttccgacgacacttgggcccatatcgactttattcccaccgtccagcagcgcggagccgccatcatcgaggcccgtggagcctcttccgccgcctccgcggctaacgccgcaatcgataccgtgcactccctggtcaacccgacccccgagggggactggaacagcctctgcgtggcctccgacggaagctacgacaccaaggagggtctcattacctccttccccgtccgttccgatgggaacggctgggaaatcgtccaggacgtacc

SEQ ID NO: 207262 - DNA, 686 bp, Unknown
  Bacterial polypeptide expressing nucleotide sequence isolated from the Sargasso Sea
tatgaaaaaaatatctttgattggtgctggacaaattggaggaactttagctcatcttattggacttaaagaattggtaaatgaagttgtaatgtttgatgtggcaagtggtatagcaaaaggtaaagcgctagatattgctcaatcatcatctgtagatggatttaatgttaatttttctggcacagataattacgaagatattaaaaattcagatgtaataatcattactgcaggagttcctagaaaaccaggaatgagcagagatgatttattgggaataaatcttaaaataataaagcaggttgccgaaggaataaaaactcactctccagatgcttttgtaatttgtataacaaatcctcttgatgttatggttatggcattccaaaagtattcaggtttaccagcaaataaagttgttggtatggcaggaattttagatagttcaaggtttaaactttttttatcaagagagttagaggttcctgttaaagagattgatgcaattgtaatgggaggacatggagatactatggtgccactaccaagatttacaaaagtttcagaaaaacctttattagatcttgtaaaagagggaaaaatatcttcagaaaaattagaaagtataaatcaaagaactagagatggaggtgctgagatagttaagtatttagagaaaggct

SEQ ID NO: 207263 - DNA, 622 bp, Unknown
  Bacterial polypeptide expressing nucleotide sequence isolated from the Sargasso Sea
aatgaacaagaaaattacattaataggtgcgggtcaaataggaggcacgcttgctcatatgattgctttaaaagagttggctgatgtggtcctatttgatgttgcttctggaatagcaaaagggaaagctctcgatattgctcaatcctcaccagtaaatggttttaatattaatttatttggtacagataattacgaagatacaaaagactctgatgtaataataataaccgcaggtgtccctagaaaacctggaatgactagagacgatcttctaggtataaatttaaaaataataaagcaagttgctgaaggtatcaaaaatacatcgcctaatgcttttgttatttgtattacaaatccattagatgtaattgtaatggctttacaaaagtattctggattaccaaaaaataaggtggtaggaatggcaggaattctagactcctcaagatttatttattttttatctcaggagctgagagttccagtacaaaaaattcaatcttttgttcttggaggtcatggagacagtatggtagcaatgctgggctcaacaatagtggacggaaaaaaaatttatgacttagttaaagagggtaaaattagcaatgaaaagtta

SEQ ID NO: 207264 - DNA, 710 bp, Unknown
  Bacterial polypeptide expressing nucleotide sequence isolated from the Sargasso Sea
aatgagaaaaaaattcgctctaattggagcgggcaatataggcggtacacttgctcacttagttggtctaaaagaattaggtgatgttgttttgattgatatagctaaaggtataccaaaaggcaaagcattagatttaattcagtcatctcctatagaatcttttgattcaaatataattggctcttctaactataaagatatcaaagatgctgatgttgttattgtaactgccgggtttccaagacgaccaggtatgtctagagatgatttagttgaaaaaaatgcaaagattattcaaactattggacaagcaattaaaaagcattgtccaaatgcctttgtaatatgtattacaaatccacttgatgcaatggtaagtgttttacaaaaatctgcttctcttaaaactaatatgtgtgttggaatggcaggagtgttagacagtgcaagattaaaatattttttagcaaaagagtttaatgtatcaatcaaagatgttaatacttttgttttaggtggtcatggagacacaatggttccactaataaggtactcaacagtatctggtattcccgtttcagaattaattaaattaaaacaaactacccaaaaaaaaataaattctataattacaagaacacgtaatggtggagctgaaataattaatttaatgaaaacttctgctttttatgctcctgcctcttcag

SEQ ID NO: 207265 - DNA, 385 bp, Unknown
  Bacterial polypeptide expressing nucleotide sequence isolated from the Sargasso Sea
atgagcaagatatctttaataggagctggtcaaataggtggaactttagcacatctaatcggaataaaagaactagttaaagaagttgttttgtttgatgtagctagtggtatagcaaaaggaaaagctttggatattgcacaatcttcatctgtagatggatttgatgtaaaattaactggaactgataattatgaggatattaaaaattccgatgttatcataattacagctggagtgcctagaaaacctggaatgagcagagatgacttattaggaattaatttaaaaataataaaacaagttgcacaaggcataaaaaaaaattcaccagatgcttttgtaatctgtataacaaacccgttagatgtaatggtgatggcat

SEQ ID NO: 207266 - DNA, 588 bp, Unknown
  Bacterial polypeptide expressing nucleotide sequence isolated from the Sargasso Sea
catggcacgcaacaagattgcactcgtcggcgctgggcagatcggtggtacgctggcattactctcaggtttgaaggaattgggcgatgtcgtccttttcgacatcgtcaagggcgtgccccagggcaaagcgctcgatatcgaacaggcttcaacgattgaaggttttgacgcctcggtgaaaggcgctaacagctacgccggtcttcgcaatgccgacgtcgttatcgtcactgctggtgtcccgcggaagccaggtatgagccgggacgacctgatcggtatcaacaccaacgtgatgcgccaggtcggtgcgggtatcaaaaagtattgtccgaaagcctttgtcatatgcattaccaatccgctcgacgtcatggtcggcgtcctgcgcgacgcctgcggcctgccgcacaatcgcgtcgtaggcatggcgggcgttctggatagtgcacggttccgcctcttcctggcccaggagttcaatgtttccgtagaggatgtcactgccttcgtacttggcggtcatggagattcgatggtgccactagtgcggtactcgacggtggcgggaattcccgtacctga

SEQ ID NO: 207267 - DNA, 580 bp, Unknown
  Bacterial polypeptide expressing nucleotide sequence isolated from the Sargasso Sea
atggtaggggttcttcaaagagcttctgggttgcctacaaatatgattgttggaatggctggagttttagactcggcaagatttagatattttttagcagaggaatttaacatatcgatgacagatgtgtcagcttttgttttaggtggacatggagacacgatggttcctttggttagatactccaccgtagcaggcattccaattccagatcttttagaaatgggatggagttcacagaaaaaaatagatgatattgttcagaggacaagagacggtggtgccgagattgttggtttattaaaaacaggttcagctttttatgctcctgcagaatcagctgttcaaatggcagatgcctttttaaaagataagaaaaaacttttgccttgtgcagcatttgttgatggcccttataatttagatggaatatatgttggagttcctgtagttattgggaaggaaggtgtagagagaattgttgaaattaatttaagtgaagaagagaaacaaatgtttaatcattcagttgaatctgtccaaaaattaaatcaacttgcaaaaaattttgaaaattagg

SEQ ID NO: 207268 - DNA, 502 bp, Unknown
  Bacterial polypeptide expressing nucleotide sequence isolated from the Sargasso Sea
atgagaaaaatatctttgattggtgctggacaaattgggggaactttagctcaccttattggacttaaagaattggcaaatgaagttgtaatgtttgatgtagcaaaaggtgtagcaaaaggtaaagcgctagacattgctcaatcatcatctgtagatggatttaatgttaatttttctggtacagataattacgaagatattaaaaattcagatgtaataatcattaccgcaggagttcctagaaaaccaggaatgagtagagatgatttattgggaataaatcttaaaataataaagcaggtggccgaaggaattaaaactcactctccagatgcctttgtaatttgtataacaaatcctcttgatgttatggttatggcattccaaaagtattcaggtttaccagcaaataaagtagttggaatggcaggaattttagacagttcaaggtttaagctctttttgtcaagagagttaaacgttcctgtaaagagattga

SEQ ID NO: 207269 - DNA, 952 bp, Unknown
  Bacterial polypeptide expressing nucleotide sequence isolated from the Sargasso Sea
catgaataaacctgttcgtgtaactataactggagcagcaggacaaataggttaccaattggcatttcgaattgcttctgggcaaatgctaggctcaaataagaaaatcatactgcaattacttgagattactccagcacttcctgcccttcaaggtgtccttatggagcttgaagattgtgcttttcctacacttgctggtgtcatagccacagacaatgcagatgaagcttttaatgaaacagactacgctctgctggttggagcaatgccaagaggaccaggaatggagagagctgatttgcttgaagcaaacgcaaaaatctttactcatcaaggttctgccataaataatggtgcaaataaggatgcaaaaatcctcgtggttggaaatccggcaaataccaatgcattgattgcaagttcaaatgcaccaaatattgatccttcaaacttttctgctatgactagactggatcacaacagagcaaaatcatatttagcaaaaaaaatcggggtcaccactacagagatcaagaaaatgattatatggggaaatcactcagcaactcagtttcctgatcttgatcatgtgctctgcaacggcaaatccataaataatgagattaatcatcaatggttaatcgatgatttcattccaacaatacaacaaagaggggcagaaattattaaggccagaggcgcatcctctgccgcctctgctgcctcagcagctattgaccatatgagggactgggcgctgggaactccaaaagatgactgggtaagcatggcgatcccatcagatggaagctatggaattgaaccaggtatcatattctcttttcccgttaaatgtgaaaatgggaaatatgagattgttcaagggcttgatattgaggtattcagtagagagagaaatcatattacagaagcggaactaagagaggaa

SEQ ID NO: 207270 - DNA, 679 bp, Unknown
  Bacterial polypeptide expressing nucleotide sequence isolated from the Sargasso Sea
cctggaatgggatcgggaagatttacttgaaatcaatctaggaataatgacagatgttgctgaaaatatcaaaaaatactcacccaacgcatttgtaattgtagtttctaatcctctagatgctatggtatatgctttttataaagtttctcaacttaaaaaaaatatggttgttggaatggctggggctttagatagcgctaggtttagagcatttattgccatggaagttgggtgttcagttcaagatgttacatgtatggtgcttggcggccatggtgatacaatggttccgattactcgagttggaacagtgggtggagttccaatagagtcattaattaagcctgatagattagaagaaattgttaaccgcacaaggtttgcaggtggagaaattgtcaagctatttggaaatggttctgcattctatgctccagcgcaatctgcaattgaaatggcagaatcatatcttagagataaaaaaagaattatcccttgcgcttcgctttgtgagggcgagtttggaattaatggttattttataggcgtcccatctaagataggaaaaaatggtgtcgaaaaaattctagagtttgaactacgcgataatgaaaaatcagcacttgaaaatacacttgaagctgttaaaaaaacagttcttgaaacaaaattataa

SEQ ID NO: 207271 - DNA, 778 bp, Unknown
  Bacterial polypeptide expressing nucleotide sequence isolated from the Sargasso Sea
ggatttaatataaatttgtcaggtactgataactatgaagatacaaaaaactcagatgtaataatcataactgcaggtgtacctagaaagccaggaatgacaagagatgacttgttaggcatcaatctgaaaattattaaacaagtcgcagagggaataaaaaaaacttcaccaggtgcttttgtaatatgtattacaaacccattagatgttattgttatggcacttcaaaaatattcaggtttaccaaaaaataaagttataggaatggccggtatactagactcgtcaagatttatttactttttgtctcaagaattaaaagtttctgtccagaagataaaatcatttgttctaggaggacatggcgatagtatggttgcaatgctaggttcaacgaaagtagatggaaaaaaaatagctgaccttgtagaagaagggaaaatttctaaagaaaagttagatcaaatagtagataggactaaaaaaggtggagctgaaattgttaaatatttagaaaaaggttcggcgttttacgcaccagctgcatcaggtgtagaaatggctgaatgttatttaaaagatttaaagaaacaattaccctgcgcagctcacttggatggagaatacggtataaaagatatatatgcaggtgttccggtcattattggatctggtggtgtagaaaaaattattgaattaaaactgtcttcaaaagagagagaaaattttgaaaagtctgtagatgccgtgagaagtttatttaatgctgcaaaga

SEQ ID NO: 207272 - DNA, 464 bp, Unknown
  Bacterial polypeptide expressing nucleotide sequence isolated from the Sargasso Sea
tgttccggtaaaaaacatagaaaccctagttttgggtggacacggcgatacaatggtaccaatgccaaatcatacaacagtaaataaaaaacctttaagccagttgattaaaaaagaaaaattagactcaataattaatagaacacgaaaaggaggagctgaaataataaaactgcttgaaaaaggatcagctttttacgcgccggcagcttccggcattgaaatggctgagtcatatataaaagatcagaaaaagatattgccttgcgcagcttaccttaacggagagtatggagtaaaaaatatttatgctggagtgccagtgcaaataggcaaaggtggtgctgagaaaataattgaaaaaacactattagatgaagaaaaaagacaatttaatgattcaataaaagctgtaaaagaactttttgagtcagcgaaaaaaatagataaagatttaaaataag

SEQ ID NO: 207273 - DNA, 313 bp, Unknown
  Bacterial polypeptide expressing nucleotide sequence isolated from the Sargasso Sea
atgactaaaaagatttctttaataggtgctgggcaaattggaggaacattagcacatttaatagctataaaagagctcgcaaatgttgttttatttgatgttgtagaaggagttgctaaaggtaaagcattagatattgcacaatcttctggtgtagccgagtttaacattaatttaattggcacaagtaattataatgatattaaagactcagacgttgtaattataactgctggcgtaccgagaaaacccggaatgagtcgtgatgatcttttaggtataaacttaaaaataataaaacaggtagctaagg

SEQ ID NO: 207274 - DNA, 619 bp, Unknown
  Bacterial polypeptide expressing nucleotide sequence isolated from the Sargasso Sea
gatgtacgcatcatagttgttggaaacccttgcaacactaactgcttaatcgcgatgaataatgctcctaaaatccctaaagatcgttggttcgcaatgactatgcttgatgaaaatagagccaaagcacaattagcagaaaaggcaaagcaacccgtcaactcaatttccaatatgacaatttggggaaaccattcagcgactcaatatcctgattttcattctgctaaaattaacggccaaaatgcaaccagtgtaattaatgataatggttggttagaaaatatatttatacctaaggttcaaaaacgaggtgctgaaattatcgccgcccgaggcgcttcatcagctgcttctgctgccaatgcaatcattgattcaattaaatcaataattacacctacatctgaaggcgattggttcagtatctgcctacattcagacgggagctatggaatcgatgaaggcttaattgcatctttcccatgcacgagtaatggtgaagctattagtattgtacaaggaattgaactaaattcttttagccaagaaaaaatccgattcacggttgaagaattaaggctcgagaaagaaaacgtaaaagcccttcttaattagt

SEQ ID NO: 207275 - DNA, 594 bp, Unknown
  Bacterial polypeptide expressing nucleotide sequence isolated from the Sargasso Sea
tcatcaccaacccagttaatactacagttgctattgcagctgaaatgcttaaagcaaaaggcgtttataacaaaaacaaacttttcggtgtaactacgcttgacgttattcgtgctgaaaccttcgttgctgagcttaaaggtgtagatgttgcttctgtgcatgtaccagtaattggtggtcactctggtacaactattctacctcttctttcacaagttgaaggtgttgagtttaccgacgaagaagtggctagcctaacgactcgtatccaaaatgcgggtactgaagttgttgaagcaaaagctggcggcggttctgcaaccctttctatgggtcaagcagcagcgcgtttctgcctgtctcttgtagcagcaatgcaaggcgagaacgtggttgaatacacttacgttcaaactgatgacagcgatgacgcagcattctttgcacacccagttcgccttagtgcaaacggtgttgaagaaatcttgccatacggtgagctaagcgcatttgaagaaaaagcgaaaaacgacatgcttgaaggcctacgtggcgacatcaagctaggcgtagacttcgtaaacggctaat

SEQ ID NO: 207276 - DNA, 733 bp, Unknown
  Bacterial polypeptide expressing nucleotide sequence isolated from the Sargasso Sea
atgagaaaaatatctttgattggtgctggacaaattgggggaactttagcccatctaattggaattaaagaattagcaaatgaagttgtaatgtttgatgttgcaagtggcatagcaaaaggtaaggcattagacattgctcaatcatcatctgtagacggatttaatgttaatttctctggcacagataattatgaagatattaaaaattctgatgtaataatcattaccgcaggtgttcccagaaaaccaggaatgagtagagatgatttattgggaataaatcttaaaataataaagcaggttgccgaaggagtaaaaactcactctccagatgcttttgtgatttgtataacaaatcctcttgatgttatggttatggcattccaaaagtattcaagtttaccagtaaataaagtagttggtatggcaggaattttagacagttcaaggtttaagttatttttatcaagagagttaaacgttcctgttaaagaaattgatgcaattgtaatgggaggacatggagatacgatggtacctttaccaagatttacaaaagtgtctaaaaaacctttattggatcttgtaaaagacggaaaaatatcttcagaaaaattagaaagtataaatcaaagaactagagatggaggtgctgaaatagttaagtatttagagaaaggctcagcgttttatgcaccagcagcttcaggagttgaaatggctgcagcat

SEQ ID NO: 207277 - DNA, 328 bp, Unknown
  Bacterial polypeptide expressing nucleotide sequence isolated from the Sargasso Sea
atgagtaaaatttctttaataggggcaggtcaaattggaggaactttagctcatttaattggtttaaaagaactagtggatgaagttgttttatttgatgttgcaagtggaatagcaaaaggaaaaggtttagatatagcccaatcttcctcgatagatggatttaatgtaaaattttcaggaacagataagtatgaagatataaaaggatcagatgttattataattacagcaggtgttcctagaaaacctggaatgagtagagacgatctattaggaattaatttaaaaattattaaacaagttgcagaaggaataaaaaataatg

SEQ ID NO: 207278 - DNA, 742 bp, Unknown
  Bacterial polypeptide expressing nucleotide sequence isolated from the Sargasso Sea
atgagaaaaaaaattactctgataggcgcagggcaaattggaggaactttagcccatttaattgcattaaaagaattagcagatgtagttttatttgatgtagcagctggaattgcaaaaggtaaagcactagatattgctcaatcatcacccataaatggatttaatgtcaatttatctggtacagataattatgaagatacaaaaaactcagatgttattattataacagcgggagttccaaggaaaccaggaatgacaagagatgacttgttagaaattaatctcaaaattataaaacaagttgctgcaggcatcaaagcaacttcaccaaatgcttttgtcatatgtattactaatcctctagatgttatcgtgatggcgttacaaaaatattctggattacctaaaaataaggttgttggaatggcagggatattggattcatcaagatttatttattttctatctcaagaattaaatgttccagtaaaaaaaattaagtcatttgttctaggaggtcatggagacagtatggtgacaatgcttggttcaaccgaagttgatggcactaatataaatgagttagtaaaaaagggaaaaatttctcaagaaaaattagaccagattgtagatagaacaaaaaaaggtggcgccgagattgtaaaatatttagagaaagggtcagctttttatgctcctgcagcttctggagttgagatggcggaaagctacttaaaag

SEQ ID NO: 207279 - DNA, 535 bp, Unknown
  Bacterial polypeptide expressing nucleotide sequence isolated from the Sargasso Sea
tggtttgccatgactgcgcttgacgaaaaccgggctaagagccagttggcccataaagctaatgttgctgcaagagacgtcaccaatatgacaatctggggcaatcacagtgccacacaatatccagattataccaatgccttgatcaagggcatgccagctattaaggtgattaaggacgaagaatggcttaaaggtgatttcataaaaacagtccagcaacgagggtccgagatcatcacggcccgtggagcctcttctgcagcatctgcggccaatgcagcattagatactatcacaaagatcataacacccaccattaaagaggactggttcagcgctgccatcccaagcagtggaagttatggagtttctcagggattaatttttagctacccgctgagaagttcaggaaacggtgattatgaagtggtacaggggattgaactcgatgatttttctcagcagaaaatcaaggctacaagggaagaattggaaatggagcgtgaagcagtagatgaaatattaaactgaa

SEQ ID NO: 207280 - DNA, 359 bp, Unknown
  Bacterial polypeptide expressing nucleotide sequence isolated from the Sargasso Sea
aatgagtaaaatttctttaataggggcaggtcaaattggaggaactttagctcatttaattggtttaaaagaactggtggatgaagttgttttatttgatgttgcaagtggagtagcaaagggaaaaggtttagatatagcccaatcttcctcggtagatggatttaatgtaaaattttcaggaacagataagtatgaagatataaaaggatcagatgttattataatcacagcaggtgttcccagaaaacctggaatgagtagagacgatctattaggaattaatttaaaaattattaaacaagttgcagaaggaataaaaaataatgcgcctaatgcctttgtaatttgtatcacaa

SEQ ID NO: 207281 - DNA, 496 bp, Unknown
  Bacterial polypeptide expressing nucleotide sequence isolated from the Sargasso Sea
atgaaaaaaaaaattactttaataggtgccggtcaaattggaggaacacttgcgcatcttattgctctgaaaggtttagcagatgtagttttgttcgatgtcgcagaaggtatagccaaaggtaaggcattggatattgcacaatcttctccggttgagggatttgatgtatcactcaaaggtacaagcgattacaaagatactagtaattctgatgtcatcataataacagctggtgttcctagaaaaccaggtatgtctagagatgatttgttaggtataaacttaaaaattataaaacaagttgctgaaggtataaaaaaaacttcacctaatgcattcgttatttgcataacgaatccattagatgtaattgtaatggctttacaaaaatattcaggactgcctaagaataaagttgtaggtatggctggaattttagactcctcaagatttatttattttctttctcaaagagttaaaagtgccagtaagt

SEQ ID NO: 207282 - DNA, 611 bp, Unknown
  Bacterial polypeptide expressing nucleotide sequence isolated from the Sargasso Sea
aatgaaaaaaatatctttaattggcgctggccaaataggcggaactcttgcacatttaataggaacgaaagaactagttgatgaagtagttttatttgatgtggctagtggtattgcaaaaggaaaagcattagatattgctcaatcttcatctgtagatggatttaatgttaaattttcaggaactgataattatgaggatataaaaggctcagatgtaattataatcactgcaggcgttccaagaaaacctggaatgagtcgagatgaccttcttggaataaatttgaaaattatcaaacaagttgctgaaggggttaagaaaaatgctccaaacgcttttgtgatttgtattaccaaccctttagatgttatggttatggcatttcaaaaattttctggtttgccatcaaataaagttgttggtatggcaggtattttagatagttcgagatttaaattatttttatcattagaactaaatgttccagtaagagaaattgaggcaatggttatgggtggtcatggtgacaccatggttcctatgccaagatttacaaaaattcaaggtaaccatttgttggatcttgtaaaggatggaaaagatttct

SEQ ID NO: 207283 - DNA, 505 bp, Unknown
  Bacterial polypeptide expressing nucleotide sequence isolated from the Sargasso Sea
tctcgcccaactgtccgaacgaagcggtaagccgacgagagaggtgaagaacaccatcatctggggtaatcactcgtccacgcagtaccccgacgtgaatcacgcgacgatcggtgggaaaccggcacgagacgtcgtcggcgacgacgcgtaccttgacggcaactttgtcgacgtcgtgcgcaagagaggcgccgccatcatcgaggcgcgaaagctgtcgtctgcgctcagcgcggcgagctcggtgtgcgatcacgtgtacgattggatttacggtaccaaggagggtgagtggacgtccatgggcgtcgtctcggacggatcttacggcattccggaggggctcgtgtactcgtttccggtgacgtgcacgggcggcaagtggcaaatcgttcaaggtttaaacattgacgaacgctcgcgaaaactcatggatgaatccgcgcaagagctcaccgaagaattcgcggtggccgaggagtgcctcgcggaatcggcgtga

SEQ ID NO: 207284 - DNA, 475 bp, Unknown
  Bacterial polypeptide expressing nucleotide sequence isolated from the Sargasso Sea
aatgaatacagtcaaagttgctgttaccggtgctgccggtcagatcggatatgcccttttatttagaattgcatccggatccgtttttggtccagataccaaggtcgagttgcagcttttggaattggaacctgcacttccggcacttgaaggcgtaaaaatggaattggacgattgcgcctttccacttctccaaaaaatcaccaccacctccgatgcgggtgtcgcattcaaagatacagattggattctgctggtaggcgcagcgccaagaaaagcagggatggagcgcaacgaccttcttcgtgtcaacggaggtatctttgtcggacagggcaaagccatcgaggaacaagctggagatcgggcaaaaatcctcgtcatcggcaatccatgcaataccaattgcatgatcgccatgagccatgccccaagcatccccaaagaaccgctggttcgccatgaccgcacttga

SEQ ID NO: 207285 - DNA, 574 bp, Unknown
  Bacterial polypeptide expressing nucleotide sequence isolated from the Sargasso Sea
aaataacataaaggaacaatcccctaatgcatttttgattgtaatatcaaaccctcttgatgccatggtatacgcattccacaaagtatctgaatttccaaaaaatcaggtagttgggatggctggggcactagatagtgcacgatttcgtgcctttattgcaatggaaactggatactccgtccaagatgtaacctgtatggtattaggcgggcatggtgacacaatggtacctatttctagacttgccactgtgggaggagttcctgtcactgaccttattaatgctgagaaactaaaagagatcgaagacaggacacgggtagctggtggtgagatagtaaagttgtttggtaatggctctgcattttatgctccagctcaatctgcaattgaaatggctgaatcatatattatagataagaaaagagtcataccgtgtgcttctttgtgtgaaggtgagtttggtatagacggatatttcattggtgtgccaactgtaattggaagcaatggagttgaaaaaatattggaattcacattgaatgatgatgaaaaaactgaattgaacaaa

SEQ ID NO: 207286 - DNA, 643 bp, Unknown
  Bacterial polypeptide expressing nucleotide sequence isolated from the Sargasso Sea
tatgaaagcacccgttcgcgttactgtcaccggagccgcaggacaaatcggttacgccctgctatttcgcatcgcttcggggtcgatgctgggtgatgaccaacctgtcattctgcaactgctcgacatcacccccgcgatgggcgcgctcgggggcgttaagatggagctcgatgactgcgcgtttccgctactggcagacgtgatctgtaccgacgacccggaggtcgcgttcaaagattcggattacgcgctactggtcggcgcgcgtccccggggtcccggcatggagcgtaaagaccttctcgaggccaacgccgctatttttggcgtgcagggcaaggcaatcaacgccgtggccagcaaggagatcaaggtgctggtggtaggtaaccccgccaataccaatgcgctaatcactcagcgcaacgcgccggatattgatccccgccagttcaccgccatgacacggctcgaccataatcgcgctaaaacccagctcgctcagaaaaccaagactaccgtgaacgacattcgccaaatgacgatctggggcaatcattccgcaacgcaatatcccgaccttcaccacgccttggtgtctggcgagtctgccatgaatggtctggacatagattggtac

SEQ ID NO: 207287 - DNA, 706 bp, Unknown
  Bacterial polypeptide expressing nucleotide sequence isolated from the Sargasso Sea
tatgaaaaaaatatctttaattggtgcaggtcagatcggtggaaccttaactcacttaattggtttaaaagaatttgtaaatgaagttgttttatttgacgttgttagtggtgttgcaaaaggaaaagctttagatattgctcaatcttcatcagttgatggttttaatgttaaattgtttggaacagataattatgaagatataaaaaactctaatgtaattattgtaacagctggtattccaagaaaacctggaatgagcaaagatgatttgcttggaattaatttaaaaattataaaacaagtagccgaaggtataaaaaaaaatgcacccagcgcatttgttatatgtataaccaatcctttagatgttatggttatggcttttcaaaaatattcaggcctaccaaccaacaaagttgttggaatggcaggaatacttgacagttcaagatttaaattatttttatcacaagagctaaaagttccagtaagagaaattgaagcaatggttatgggtggtcatggagatacaatggttcctttgccaagatttactaaagtttcaggtaaaccattattagatcttgtaaaagagggaaagctgtcgagtgaaaaattggaagaaattaatcaaagaacaagggatggtggagctgaaattgttaaatatctagaaaagggttctgcattttatgctccagca

SEQ ID NO: 207288 - DNA, 789 bp, Unknown
  Bacterial polypeptide expressing nucleotide sequence isolated from the Sargasso Sea
tggcgggcgtggtgtgcacagatgaccctgacgtggctttcaaagacagcgactatgcgctgttggtaggcgccagaccgcgcgggcccggcatggagcgcaaggatcttttggaggccaacgccgccatcttcggcgttcagggaaaagcgatcaatagcgtcgccagccggagcatcaaggttttggtcgtagggaaccctgccaataccaatgcgctgattacgcagcgcaatgcaccggacgttaactcgcgtcagtttaccgcgatgacgcgcctagaccataaccgcgctaaaacgcagctggcacaaaagaccggcactaccgtcaacgatatttgccagatgaccatctggggtaatcactccgccactcagtaccctgatttgcatcatgcgctggtgaggggtgactcggcgatgggtgatgtggatatggactggtatcgcgccgaattcattcccactgttcagcagcgaggagcagcaattatcgaggcccgaggtgcgtcatcagctgcttcagcggcaaatgccgcaatagatcacatgcgcagttgggcgctgggttcacccaaggatgattgggtatcgatgggcgttatttccgacggatcctacgacgtcgagcccggcttgatttattccttcccctgtcggtgtcacgacggtgaatgggagatcgttcagggactcgagatctctgagttcagccgggaaaaaatggaagcgacggcgcaggaactgatcgaggaacgcgacgcggtctcgcatctactgagctagc

SEQ ID NO: 207289 - DNA, 314 bp, Unknown
  Bacterial polypeptide expressing nucleotide sequence isolated from the Sargasso Sea
aatgaaaaaaaaaatttctttaataggagcaggacaaattggcggaaccttagcgcatctgattgctttaaaagaattaggagatattgttctttttgacgtagctgaaggtatagcaaaaggaaaagcgttagatatagcccagtcatcaccggtaagtaaatttgatataaatgtaaccggtaccaacaattatgaagatacaaaaaattcagatgtaataatcatcacagcaggagtacctagaaaacctggaatgaccagagatgatttgctaggtattaatctaaaaataattaaagaagttgcagaag

SEQ ID NO: 207290 - DNA, 820 bp, Unknown
  Bacterial polypeptide expressing nucleotide sequence isolated from the Sargasso Sea
atcttagtcagtcatctgccgttgagggctttacaaggaaagataacaggaaccaatgatttctctcatatgagaaactctgatgtcattatcattaccgctggtttacctagacagcctgggatgagcagagatgatcttttggagaccaatggaaagattatcaaaaagataggtcttgatatcaaaaagcactcacctaaagcattcgttatttgtattaccaatcctcttgatgcaatggtctatgtcttacaaaagtattcaaaacttccaaaaaatatgtgtgttggtatggcaggagttcttgactcttcacgtatgaaattctttttatctgaagccttagatgtctccattaatgatgttgagacctttgttttgggaggccatggagacgacatggtacctttagttaactatacaaccattgggggcattcctctgatggactacattaaaattaaaaaagtaccaacctctaaaattaaaaaaattgttgatcgcactcgaatgggtggaggtgaaatagttaaacttttaaaaagaggttctgcattttatgcccctgctagctcagctattcaaatggctgaagcttacttacttaatcaaaaaaaattattaccttgtgctgcatttctcagtggccaatatggtttaaaaaatatgtatatgggcgttcctacaataattggaaacaaaggaattgaaaaaattattgaggttaaaatttcagctaatgaaaagtctatgttaaagaaatctgtaaaatcagttcagggattggtaaatgcagttgagaaaatactaaaatagc

SEQ ID NO: 207291 - DNA, 268 bp, Unknown
  Bacterial polypeptide expressing nucleotide sequence isolated from the Sargasso Sea
atggctaagcccgcaaagcgcgttgccgtcaccggcgccgcaggtcaaatcgcttactccctgctgttccgcatcgcgaacggcgacctgctcggcaaggaccagccggtcatcctgcaactgctcgacctcccgcaagcccaagccgccgtcaaaggcgtcgtgatggaactcgacgattgcgcgttcccgctgctcgcgggcgtcgtgatcaccgacgatccgaaggtcgcattcaaggatgccgacgtcgcactgctggtcggcg

SEQ ID NO: 207292 - DNA, 325 bp, Unknown
  Bacterial polypeptide expressing nucleotide sequence isolated from the Sargasso Sea
atgagaaaaaaaattgctctcattggagcaggcaatatcggcgggactcttgcacaacttgttagtttaaaagaattaggtgatgtagttttattagatatttttgaagggatgccaaagggtaaatctttagatttggctcagtcatcttccattgagggatttcatgctgattttaaaggtacttcaagttttagagatatcaaaaattctgatgtagtaatagtcactgcaggttttccaagaaaaccaggtatgtctcgagatgatcttgtagaaaaaaattctataatcattcaaaatgttgggaaaaatattaaaaaat

SEQ ID NO: 207293 - DNA, 766 bp, Unknown
  Bacterial polypeptide expressing nucleotide sequence isolated from the Sargasso Sea
tatgattctaaattatctagggacttctaattttgaagacattaaaaactcggatgttgtcgtaattactgctggatttccccgaaaacctggtatggatagagcagatcttctttcaaaaaatttagacattatgacaaatgttgctaacaaagttcgaaagtttgcacctgaagcatttgttattgttgtttctaatcctcttgatgctatggtatatgctttttataaaatttctggttttccaaagaacagagttgttggaatggctggagctcttgatagcgcaagatttagagctttcattgctgatgctacaaatttgtcatcacaagatgttaattgtatggttcttggaggtcatggagatacaatggtaccagttagtagattagcaactgttggtggtgttccattatcttctttattaagcaaaaaagagattatagctattgaaaatagaactcgtgttggtggaggagaaattgttaagctttttggtaaaggttctgcgttttatgctccagcacaatctgctgtagaaatgattgaaagttttgtaagagacaaaaaaagagttataccatgcgcatcattatgtgaaggtgaatttgatattgatggttactttattggagtaccaacagtcatcggctctggaggtgtagaaaaaatacttacttttgatcttaacgacgaggaaaaatcttctctaaacaatactcttgttgaagtaaaaaaaactgttagtgaaactggtttataa

SEQ ID NO: 207294 - DNA, 613 bp, Unknown
  Bacterial polypeptide expressing nucleotide sequence isolated from the Sargasso Sea
aatgaaaaaaatttctttaattggagctggacaaattggaggcacattggcacatttaattgcactgaaaaagctagcaaatgttgtcttatttgatgttgccgaaggtattgctaaaggtaaagctttggatatttcacagtcatcggccgttgaaaaattcgaaattaatgttgtaggaacaaatagttatgaagatacgaaaaactcagatgtgatcattatcaccgcaggcgtcccaagaaagccaggaatgtcgagagatgatctattaggaataaatcttaaaataataaaagaagttgcagaaggtataaaaaaaacatctccaaatgcctttgttatttgcattacaaatccattagatattattgtaatggctttacaaaaatacacaggatttaaagaaaataaagtggtgggcatggcaggaattcttgatacatcaagatttaaatattttttatcaaaagagttaaatatttcaatcaatgaaattaaatcattcgttttaggagggcacggggataccatggtagctatgctgaaccatacttatataaaaaataaacctattaaagaatatataaaaagcggacaacttaaagaaaaa

SEQ ID NO: 207295 - DNA, 506 bp, Unknown
  Bacterial polypeptide expressing nucleotide sequence isolated from the Sargasso Sea
aaagaaaaatgctcctaatgcttttgtgatctgtatcaccaatcctttagatgttatggttatggcatttcaaaaattttcaggtatgccatcaaataaagtagttggtatggcaggtattttagatagttcgagatttaaattatttttatcattagaactaaatgtgcctgtaagagaaattgaggcaatggttatgggtggtcatggtgacaccatggttcctatgccaagatttacaaaaatttcaggtaaaccattgttggatcttgtaaaggatgaaaagatatcttcagaaagagttgaggaaattaatcaaagaacacgagatggtggtgcggaaatagttaaatatttagaaaaaggatcagccttttatgcaccatcagcttcaggtgtccaaatggcagaagcatatttaaatgatcagaaaaaattattaccctgcgctgtacaattaaatggagaatatggcgtgaaaaatgtttatgcaggtgttcctgttg

SEQ ID NO: 207296 - DNA, 538 bp, Unknown
  Bacterial polypeptide expressing nucleotide sequence isolated from the Sargasso Sea
aatgattgttggtatggctggaatattagactcagcaagatttaagttttttctgtctaacgagttacacatttcaactgattctatccaaactatggttttaggaggacatggagatacaatggtgccattattaagatttacatctatatcaggaattccattagctgaatttattaaaaaaaaaaaaataagcaaagaaaaagttgagcaaataatttcaagaaccagaaacggtggtggtgaaattgttgcattaatgaaaaacagctctgcattttattcgccagctacaagtgctcttgaaatgcttgaatcttattttttcgataacagaagaatcttaccttgtagtgcttatctggaaggtgaatataatgttaatggtttgtgtgttggagtacctgttgttataggaaaagatggggtcgaagaaataattgaattaaaattacaagattttgaaaaaaaagagctagataattctattgaggctgtccaagagcttgttgaaaaatgtaagaaattactagtctaa

SEQ ID NO: 207297 - DNA, 340 bp, Unknown
  Bacterial polypeptide expressing nucleotide sequence isolated from the Sargasso Sea
catgaaaaaaaaaatttctttaattggagcaggacaaataggtggaactcttgcacacttgattggaacaaaagaacttgttgatgaagttgttctttttgatgtagcaagtgggatagctaaaggaaaagcattagatatcgctcaatcatcatcagttgatggttttaatgtaaaattttcaggcactgatgattataaggacatcaaagactctgatgtaattattattactgcaggggttccgagaaaacctggaatgagtagagatgacttacttggtataaatttaaaaattattaaacaagttgctgaaggggttaaacagaatgcacctaac

SEQ ID NO: 207298 - DNA, 490 bp, Unknown
  Bacterial polypeptide expressing nucleotide sequence isolated from the Sargasso Sea
catgagaaagaaaattgcactcgttggagcaggaaatattggcggaactcttgcgcatttgattggattaaaagaacttggtgatgtcgtccttattgatattgctgacggtatgactaaaggaaaagctcttgatttagtccaatcttcctcaattgagaaatttaatgcaaagattggtggttcttcaaattaccgtgagatgaaaggtgcagatgttgtcatagtaacagcaggtttccaaagacgacctggtatgactagggatgatttagttgaaaaaaattcagcaattattcaaacagttggaaaaggaattaaattaaactgtcctaaagcctttgttatttgtattactaatcctcttgatgcgatggttagtgttctacaaaaagcagctggtttaaaaactaacatgtgtgttggtatggcggggtgttctgatagtgcacgactaaaatatttcttagctgaagaatcaaagtttctg

SEQ ID NO: 207299 - DNA, 712 bp, Unknown
  Bacterial polypeptide expressing nucleotide sequence isolated from the Sargasso Sea
atgacaaaaatatctttaattggtgcaggccaaataggtggaactcttgcacatttaataggaacaaaagaattagtaaatgaagtggttttatttgatgtagctagtggtattgcaaaaggaaaagcattagatattgcacaatcatcatctgtagatggtttcaatgttaggttttcaggaactgataactatgaggatataaaaaattcagatgtaattataattacagcaggtgttccaagaaaacccggaatgagccgagacgatcttcttggaattaatttaaaaattattaaacaagttgctgagggggtaaagaaaaatgctcctaacgcttttgtgatctgtatcactaatcctttagatgttatggttatggcatttcaaaaattttcaggtttgccatcaaataaagttgttggtatggcaggtattttagatagttcgagatttaaattatttttatcattagaactaaatgtgccagtaagagagattgaggcaatggttatgggtggtcatggtgacactatggttcctatgccgagatttacaaaaatttcaggtaaaccattgttggatcttgtaaaggatggaaagatttctttagaaagagttgaggaaattaatcaaagaacgcgagatggtggtgcggaaatagttaaatatttagaaaaaggattcagcccttttatgcacccagcagctt

SEQ ID NO: 207300 - DNA, 703 bp, Unknown
  Bacterial polypeptide expressing nucleotide sequence isolated from the Sargasso Sea
atgaaaaaaaaaatttcattaatcggagcaggtcaaattggcggaacattagcgcatcttataagcattaaagagctcgccgacgtagttctttttgatgtggcggaaggaatagctaagggtaaagctttagatatagctcaatcaacatcagttgatggatttgatgtaaatattttaggaactaataattatgaggatacaaaaaactcagatgtaattattattaccgcgggtgtaccgagaaaaccaggaatgacaagagatgatttgcttggcactaatttaaaaataataaaacaagtcgctgaagggattagaaaaacttcacctaatgcatttgtgatttgtattacaaacccacttgacgttatggtgatggcgttacaaaaatactcgaaactacctactaataaggttgtaggaatggcaggaatattagattcttcaagatttaaatattttctttcacaagaactaaaggtgccagtcaaaaaaatagatactttagtattgggcggtcatggagacacaatggttccaatgccaaactatacaaaaattaacggaatttcattaaaccaacttattaaagaaaacaaaattgataataaaaaattaaactcaataattgatagaacacgcaaaggtggagctgagataattaaattttggaaaaaggttcagcattttacgcacccgc

SEQ ID NO: 207301 - DNA, 603 bp, Unknown
  Bacterial polypeptide expressing nucleotide sequence isolated from the Sargasso Sea
cattagatgttatggttatggcgtttcaaaaatattcaggcttaccaactaataaagtagttggaatggcaggaatattggatagttcaagattcaaattatttttatctaatgagcttcaagttccagtaaaagaaatcgaagcaatggttatgggtggccatggagatacaatggttcccttaccaagatttacaaaagtttcaggcaaatcattattagaccttgttaaagaaggaaagttaacagcagaaagattagaagaaattaatcaaagaacaagagatggaggtgctgagattgttaaatttctagaaaagggttctgcatattatgcaccagcagcttcaggtgttcagatggctgaagcatacttaaaagatgaaaaaaaattacttccctgcgccgtttatcttaatggggaatatggtgttacaaatatttttgcaggagctccagttattattggaaaaaatggtgtagaaaaaatagaagaaattagtttagacgaaaaagaaaaaagtcaatttatgcattcaattgatgcagtaaaaaaattatgggagtccgcttcagcaatcgataaagatctttctaaataat

SEQ ID NO: 207302 - DNA, 588 bp, Unknown
  Bacterial polypeptide expressing nucleotide sequence isolated from the Sargasso Sea
ttatggcattacaaaagtattccagtttagcaaaaaataaagtggttggaatggcaggcattcttgactcatctaggtttatatattttctctctaaagaattaaatgtgccagttaataaaatcaaatcatttgtactcggtggtcatggagatagtatggttgcaatgctgaactctacagaaatagggggtaaaaaaatattgagcctagtagaaagtggcaaacttaaaaaggaaaaattgaatgaaattgttgaaagaacaaaaaaaggtggcgccgaaattgtaaaatatttagagaaaggctctgctttttatgctccagcagcatcgggagttcaaatggcagaaagttacttgaaagatgaaaagaaacaacttccatgcgctgtatatttaaatggagaatatggagtaaaaggtatttacgcaggtgtacccgcaataattggtaaagaaggtgtagaaaaaataattgaactatctttatcagatgaagaaaaaaggaatttcgaaaactcagtgaaatcagttaaagagctttttgaagctgcagctaaaattgatccatttttaaaatcataat

SEQ ID NO: 207303 - DNA, 529 bp, Unknown
  Bacterial polypeptide expressing nucleotide sequence isolated from the Sargasso Sea
atgagaaaaaaaattgctctcattggagcaggcaatatcggcgggactcttgcacaacttgttagtttaaaagaattaggtgatgtagttttattagatatttttgaagggatgcctaagggtaaatctttagatttggctcagtcatcttccattgagggatttcatgctgattttaaaggtacttcaagttttagagatatcaaaaattctgatgtagtaatagttaccgcaggttttccaagaaaaccaggtatgtcccgagatgatcttgtagaaaaaaattctataataattcaaaatgttgggaaaaatattaaaaaatattgcccaaaagcatttgttatatgcattacaaatccactggatgcaatggtaagtgttcttcagaaatcatcaggccttaagacaaatatgtgtattggcatggctggtgttttggatagtgcaagattaaaatacttcttatccaaggaatttagtgtgtcaattaacgatatcagcgcttttgtcttaggggtcaggagac

SEQ ID NO: 207304 - DNA, 734 bp, Unknown
  Bacterial polypeptide expressing nucleotide sequence isolated from the Sargasso Sea
cgttgtgattgtcaccgctggtgtggctcgcaagcctggcatgagccgtgatgatttgattggtattaacaccaaagtgatgaacgaggtcggggctgggatcaaatcacattgccctgatgcctttgtgatttgtatcaccaacccgcttgatgtgatggttggcgttttgcaaagagcgtctggtttaccagcggcaaaggtggttggcatggctggggtgctggattcggcgcgtttccgtttgttcttggcagaagaatttaacgtttcagtggaagatgtgacggcatttgttctgggcggacatggcgatactatggtaccgctggtgcgctattcggctgttgctggcataccggttccagatttgattaagatgggttggtcaagtgacgatcgcatcgccgatattgtacagcgtacacgtgatggcggggctgaaattgttggcttgttgaaaacaggctctgcattttatgcaccggcatcatccgccattgacatggccgatgcatatctaaaagacaaaaaacgcctgttgccatgcgccgcttatgttgatggtgcttatgggctgaatggcctttatgttggcgtgccagtgattattggtgctgctggtgttgagcgcattgtggagattgatttaaatgctggagaacaggcgatgttcgataattcggttggagcggtcaaggcgcttaatgatgttgtcgctgggcttgagtaat

SEQ ID NO: 207305 - DNA, 487 bp, Unknown
  Bacterial polypeptide expressing nucleotide sequence isolated from the Sargasso Sea
tatgaaaaaaatatctttaattggtgcaggtcagattggtggaactctagcccacttgattggtttaaaagaattagtggatgaagttgttttatttgatgttgttagtggtcttgctaaaggaaaagctttagatattgaacaatcttcatcggtagatggttttaatgttaaattatctggaacaaacaattatgaggacattaaaaattcagatgtaattgttattacagcgggcgttccgagaaaaccaggaatgagcagagatgacctattagtaattaatttaaaaattataaaacaggtagccgaaggtataaaaaaaaatgcacctaattcatttgtaatatgtataactaatcctttagatgttatggttatggcgtttcaaaaatattcaggcttaccaactaataaagttgttggaatggcaggaatacttgatagttcaaggtttaaattatttttatctcaagaacttaaagtt

SEQ ID NO: 207306 - DNA, 738 bp, Unknown
  Bacterial polypeptide expressing nucleotide sequence isolated from the Sargasso Sea
tttgatactcttggagatatcagcatttcagatgatccaaatgaagcatttaaagagactgaatatgcttttttggttggggctaagcccaggggacctgggatggaaagaagtgatttattacaagaaaatgcaaaaatattttcagctcagggcaaggcaatcaatgataatgcatcaagagatataagagttcttgtcgtaggtaatccagcaaatacaaatgccctaatcgctatgtcaaatgcaccagatatcaatcaaaatgcattcactgcaatgatgagactagatcacaatcgggcacttgcccagcttgcatcaaaactagattgtcattcaagtgaactacttaatatgaccatatggggcaatcattctacaactcaatatcctgatataagcaatttgaaactctcaggtgagttaatatcaaaaagacttgatgaaagatgggtaaaggatgagtttattcctcgagttcaaaatagaggtgcagaaattattaaagcaagaggactatcaagtgcagcatctgcagcatctgctgcgattgatcatatgagagactggacattcggaacaaaaaacaatgattgggtcagcatggctattcagagtgatggatcttatggtatctgtgatggaattatcttttcctttccagtgacatgtcaaaatggatcctacacaattgtacaagatcttgagatcgatgatttcagcaagaaatgtttg

SEQ ID NO: 207307 - DNA, 246 bp, Unknown
  Bacterial polypeptide expressing nucleotide sequence isolated from the Sargasso Sea
aatgagaaaaaaaattgctttaattggagctggaaatattggtggaacacttgcacaccttatatgtcttaaagaactagctgatgtggttctaattgatattgctaaaggtataccacaagggaaggccctcgatattgcacaatcttctgcaattgaatcatttaatattaatattcaaggttcaaataactataaagatataaaaaactcagatgttataattgtcacagcaggttttgctag

SEQ ID NO: 207308 - DNA, 340 bp, Unknown
  Bacterial polypeptide expressing nucleotide sequence isolated from the Sargasso Sea
atgaccaaaatatcattaataggagcagggcaaattggtggaactttagctcatttaattggtctcaaagaattagccaatgaggttgtactatttgatgtggctagtggaattgcaaaaggaaaagcacttgatatcgcacaatcttcatcagtagatggatttaatgtaaaattttcaggaacagataattatgaagatattaaagattcagatataattattattactgcaggcgttcctcgaaaaccagggatgagtagagacgatcttctaggaattaatctaaaaataataaaacaagttgcagaaggaattaaaaaatattcacctaatgctt

SEQ ID NO: 207309 - DNA, 772 bp, Unknown
  Bacterial polypeptide expressing nucleotide sequence isolated from the Sargasso Sea
atgagcaaaatatcgttaataggagcaggacaaattggtggaactttagcccatttaattggtcttaaagaattagctgatgaagttgtgctatttgatgtagccagcggaattgcaaaaggtaaagcacttgatattgcacaatcttcgtcagtagatggatttaatgtaaaattttcaggaacagataattatgaagatattaaagattcagatgtaattattattacggcaggtgttcctcgaaaaccaggaatgagtagagatgaccttctaggaattaatctaaaaataattaaacaagttgcagaaggtattaaaaaatattcacctaatgcttttgtaatatgtattactaatcctttggatgtaatggttatggcatttcaaaaatactcgggattgccaacaaacaaagttgttggtatggctggtattttggatagttcaagatttaaattatttttgtctttagaactgaatattccagttaaagaaattcatgcaatggtaatgggaggtcatggagatacgatggtccctttaccaagatttacaaaaatctcaggaaaaccacttaatgaattagttaaacagggaaaaatatcagaggagagactagaaagtattaatcaaaggactagagacggtggagctgaaattgtaaagtacctagaaaagggttctgccttttatgcaccagctgcctctggtgttgagatggcaaaagcatacatgaataatgagaataaagttttaccatgtgctgcat

SEQ ID NO: 207310 - DNA, 961 bp, Unknown
  Bacterial polypeptide expressing nucleotide sequence isolated from the Sargasso Sea
atgagaaaaaaaattgctctaattggagctggaaatattggaggaaccctcgcacatcttatttgtttaaaagaattaggtgatgtagttttaattgacgtagctgaaggagtacctcaaggaaaagcacttgatattgctcagtcatctgcaattgaatcttttaattccaatataactggatcaaataactataaagatataaaaaactctgatgtagtaattgttacagcaggttttccaagaaaaccaggaatgtcaagagatgatttagttgaaaagaatgcatttattataaaacaagttgggaaagcaattaagtcttattgtccaaaatcatttgttatttgtattacaaatccacttgatgccatggtaagtgttcttcaaaaattttctggtttaaaaaataaaatgtgtgttggtatggcgggtgttttagatactgcaagattagaatattttttatctaaagaatttaatgtttctattgaagatgtccaagcaattgttcttgggggtcatggagatacaatggttcctttaataagatattcaaatatttctggcgtacctattcctgaattaattaaattgaaatttacaacaagcaaaaaaattgatgaaattattaaaagaactagagatggaggtggtgagattggaaaacttatgaaaacatcttcagctttttatgctcctgcatcttctgcaatttcaatggcagaatctttcctgagggatcaaaaaagagttttgccttgtgcggcttatttaaatggagaatatggagtaaaaggattttacgtaggagtccctactataattggcagtaaaggtgttgaacaaatcatggaatttaaattgaatacaccagaaaaaaaacaatttaaaaaatcagttaatgctgttaaaaaattaaccaagcttgccagcaaattagttaataaaaataaatgaa

SEQ ID NO: 207311 - DNA, 533 bp, Unknown
  Bacterial polypeptide expressing nucleotide sequence isolated from the Sargasso Sea
tttgattggactaaaagagcttggtgatgttgttcttatagatatcgcagatggtatgacaaaaggaaaagcccttgatttagcccaatcttcatctattgaaagttttaatgcaaacctaaatggctcttcaaaataccgtgacatgaaagatgctgatgttgtaattgtaacagcaggctttcaaagacggcctggaatgacgcgagatgatttagttgaaaaaaattccacaattattcaaacagtaggaaaaggaataaaaatgaattgccctaaagcatttgttatttgtataactaatccacttgatgcgatggtaagtgttttacaaaaagttgctggcttaaaaactaatatgtgtgtaggtatggcaggcgttcttgatagtgcaagattaaaatatttcttagccgaagagtttaaagtttctgtagaagatgtaagtgcttttgttctcgggggtcatggtgatacgatggttccaattattagatatgcgactgttgcaggtattcctgttccagaactaa

SEQ ID NO: 207312 - DNA, 964 bp, Unknown
  Bacterial polypeptide expressing nucleotide sequence isolated from the Sargasso Sea
aatgagcaagatatctttaattggtgcaggccaaataggtggtactcttgcacacttaattggaataaaagaattagtaaatgaggtagtcctatttgatgttgctcgtggaattgcgaaaggtaaagcattagatattgctcaatcatcttccgttgacggttttaatgtaaaattttctggaactgatgattataaagatattaaaaactcagatgtaataatcatcacagcaggagttccaagaaaacctggcatgagtagagacgatctacttggtattaatttaaaaataatcaaacaggttgctgaaggaataaaacagaattcgcccgatgcatttgttatatgtataacaaatcctttagatgtaatggtaatggcatttcaaaaattttcaggtctttcacccaataaagttgttgggatggctggtattttggacagttcaagatttaaattattcttatcagaagaatttaacatcccagtaaaaaaaatagatgcaatggtaatgggaggccatggggatacaatggttccactgccaagattcacaaaagtttctggaaaacctttattagatttagtcaaagatggaaaaatttcacaagaaagattggaagaaataaatcaaagaacaagagatggtggagcagaaattgttaaatttttagaaaaaggctcagctttttatgctccagcagcttcaggggtagaaatggcaaaagcgtatcttcaagatgaaaaaaaaatacttccatgtgctgcttatctgaatggcgaatatgggattaaaaatatctatgccggtgttccaattattattggtaaaaaaggtgttgaaaaaattgaggagattgacttggatgaaaaagaaaaatctgaatttcttcattccattgatgctgtaaaaaaactttgggaagcagcatctaaaatagatccggatttagttaaataa

SEQ ID NO: 207313 - DNA, 773 bp, Unknown
  Bacterial polypeptide expressing nucleotide sequence isolated from the Sargasso Sea
ttataaagatattaaaaattctgatgttattattattacagctggtgttccaagaaaacctggtatgagtagagatgatcttttaggtataaatttgaatataataaaacaagtagctttaggaattaaagataattctccagatgcatttgttatatgtattacaaatccccttgatgtaatggtaatggcttttcaaaaatattcaggcttagccccaaataaagttgtaggtatggcaggtatacttgatagttcaagatttaaactatttctatcattggagttaaatgtccccgttaaagaaatagaggccatggtcatggggggtcatggagatactatggtgccactaccaaggtttacaaaagtttcaggaagaccgcttcttgaaattgttaaagaaggaaaaataagtattgaaaaacttgaagaaataaatcaaagaactagggatggtggcgctgaaatagtaaaatttttagaaaaaggatcagcctactatgctcccgctgcatcaggggtgcaaatggctgaagcatatttaaaagatcagaaaaaacttttaccttgcgctgtatacctaaagggtgaatatggtgtaagtaatatttatgcgggagttcctgttataattggaaaaaatggtgttgaaaaaattgaagaaattagtttagatccaaaagaaaaaaagcaatttttgcattcaattgattcagttaaaaagctatgggatgctgcaaaaaatattgatataagtttatctaaataaa

SEQ ID NO: 207314 - DNA, 688 bp, Unknown
  Bacterial polypeptide expressing nucleotide sequence isolated from the Sargasso Sea
tggtattaatctcaaaataattaaacaagttgctgaaggagtaaaactaaatgcacccaatgcttttgtaatatgtataacaaatccattagatgtaatggtaatggcatttcaaaagttttctggtttatcaccaaacagagttgtcggcatggcaggtatattagatagttcaagatttaaattatttttatctgaagaattcaatgttccggtaagagaggttgaggcaatggtaatgggaggacatggagacactatggtgcctctaccaagatttactaaagtttctggaaaacctttgcttaatttagttaaagacggaaaaatttctgaaaaaagattagaggaaataaatcaaagaaccagagatggcggggctgaaattgttaaatttttggaaaaaggttcggctttttatgctcctgctgcatcaggggttgaaatggcaaaagcatatttaatggatgagaaaaaaaaacttccatgtgcagcatacttaagtggtgaatatggaattaaaaatatttacgctggtgttccagttgtgatcggcaaagatggagttgaaaaaattgaggaaataaatcttgatgaaaaagaaaaatctgaatttctccattctgttgatgcggttaaaaaactttgggatgctgcatccaaaatagatccagatttagctaaataa

SEQ ID NO: 207315 - DNA, 721 bp, Unknown
  Bacterial polypeptide expressing nucleotide sequence isolated from the Sargasso Sea
agattcagatgtgtttattataaccgctggaattcctagaaaacctggtatggatcgagaggatctactagaaatcaacttaggtataatgaaagatgtagcaaacaacataaaggtacaatcccctaatgcatttgtgattgtaatatcaaatcctcttgatgccatggtctacgcattccacaaagtatctgaatttcctaaaaatcaggtagttgggatggctggggcactagatagtgcacgatttcgtgcctttattgcaatggaaactggatactccgtccaagatgtgacctgtatggtattaggcgggcatggtgatacaatggtgcctatttctagacttgccactgtgggtggagttcctgtcactgaccttattaattctaatagactaaaagagatcgaagacaggacacgggtagctggtggtgagatagtaaagttgtttggtaatggctctgcattttatgctccagctcaatctgcaattgaaatggctgaatcatatattagagataagaaaagagttataccgtgtgcttctttgtgtgaaggtgagtttggtatagacggatatttcattggtgtgccaactgtaattggaagcaatggagttgaaaaaatattggaattcacattgaatgatgatgaaaaaactgaattgaacaaaacactagaagccgtgaaaaaaactgtagctgaaactgagctttaa

SEQ ID NO: 207316 - DNA, 454 bp, Unknown
  Bacterial polypeptide expressing nucleotide sequence isolated from the Sargasso Sea
atgaaaaaaaaaataacattgattggagcggggcaaattgggggtactttagctcatcttatagcccttaaaggtttagcagatgttgttttatttgatgttgcttcaggattggcaaagggaaaagctttagatatagctcaatcgtccccagtgagcggattcaatgttaatttatatggaactgacaattaccaagatacaaaaaattctgatgtagttataattactgcaggcgtacctagaaaaccaggtatgacaagagatgacttgctaggaattaatctaaaaattatcaaacaagttgcagaaggaattaaaaatacatctccagatgcttttgttatatgcattacaaatcctttagatgtaattgtcatggctttgcaaaaatattctgggctacctaaaaataaagttgttggaatggctaggtatattagattcttctagg

SEQ ID NO: 207317 - DNA, 883 bp, Unknown
  Bacterial polypeptide expressing nucleotide sequence isolated from the Sargasso Sea
tgggcatgttgttttgtttgatgtagctgaaggtatagcaaaaggaaaggcattagatatagctcaatcatctcctataaataattttaatacaagtctttcaggtacaaacaattatgaggatactaaagattcagatgtaataattataacagcaggtgttccaagaaaacctggaatgaccagagatgatcttttaggaataaatttaaagataattaaacaagtagcacaagggataaaaaatacttctccaaatgcttttgtgatttgtattacaaaccccttagatgtaatagttatggctttgcaaaaatactctggtcttcctaaaaataaagtcgtaggaatggcaggaatactagattcttcaagatttatatattttttatcacaagagatgaaaattcccacttctaaaatagaatctttagttttgggtggtcatggagatagcatggttgccatggtaaaccatacgaagatagacggaaaatttttaagagaactaatcaaagaaggaaaaataaaacaagaaaaaatagatcaaatagttgatagaacgaaaaaagggggggcggaaatagtaaaatatttagaaaaaggttccgctttttatgccccagcctcttcgggagtcgaaatggcagaaagctacctaaagaatttaaaaaaacaacttccttgtgcagcctatctcaacggagaatatggagtaaaagatttatatgtaggagtgcctgttgttattggcaacaaaggtgttgaaagagtaatcgagctaaatttaaacgatgaagagaaaaaaaattttaataactctataaaagcggttaaagatctttttgaggcagcaaaaaaaatagacaaagaattagtttaa

SEQ ID NO: 207318 - DNA, 646 bp, Unknown
  Bacterial polypeptide expressing nucleotide sequence isolated from the Sargasso Sea
atgacaaaaatatctttaattggtgcaggccaaataggtggaactcttgcacatttaataggaacaaaagaattagtaaatgaagtggttttatttgatgtagctagtggtatcgcaaaaggaaaagcattagatattgcacaatcctcatctgtagatggtttcaatgttaggttttcaggaactgataactatgaggatataaaagattcagatgtaattataattacagcaggtgttccaagaaaacctggaatgagccgagatgatctgcttggaattaatttaaaaattattaaacaagttgctgagggggtaaagaaaaatgctcctaacgcttttgtgatctgtatcaccaatcctttagatgttatggttatggcatttcaaaaattttcaggtttgccatcaaataaagttgttggtatggcgggtattttagatagttcgagatttaaattatttctatcattagaacttaatgtgccagtaaaggaaattgaggcaatggttatgggtggtcatggtgacaccatggtgcctatgccaagatttacaaaaatttcaggtaaaccattgttaaaccttgtaaaggatggaaaaatttcttcagaaagagttgaggaaattaatcaaagaacacgag

SEQ ID NO: 207319 - DNA, 964 bp, Unknown
  Bacterial polypeptide expressing nucleotide sequence isolated from the Sargasso Sea
atgacaaaaccaaaaatttctttaattggagctggccaaataggtggaactttagctcatttaattgctctaaaagagttaggtgatgtagttttatttgatgtagctgaaggtatagcaaaaggtaaggctctagatttatcccaatcaacagcaattgacggattgaatgtaagcatcactggaacaaataattataacgatacaagtgattcagacgtaatcattataaccgcaggtgttccaagaaaacctggaatgacaagagatgacctgctgggcataaacttgaaaattattaaacaagtagctgagggaattaaagatacttctccaaatgctttcgtaatatgtattacaaatccactagatgtcattgttatggcgctacagaaatattctggacttccaaaaaataaagttattggtatggcaggtgttttagatacatcaagatttaaattttttctatcacaagaattaaatgttccaataagtgaagttgactcatttgttttaggtggacatggtgatactatggtcccggtaccaaatcgtacaactgtatctggaaaaccacttcttgattttgttaaggagggtaaaatttctgaagaaaaattaaatgagataatagatagaacgcgtaatggaggtgcagaagttgtaaaacttttagagactggttctgctttttatggacctgcagcatcaggcattgagatggcagagtcttatttaaaaaatttaaaaaagacccttccttgtgccgctcatttaaatggtcaatatggagtgaaggatctttatgtaggagtacctgttataattggttctaacggaatagaggaggttgtagaattgaccttagatgatgaagaaaaaagatattttgatatttcaattgatgctgttaaagaactttttgatgctgctattaatattgatacaaatctaaaataat

SEQ ID NO: 207320 - DNA, 910 bp, Unknown
  Bacterial polypeptide expressing nucleotide sequence isolated from the Sargasso Sea
ttgattggtttaaaagaattagcaaatgaagttgttctattcgatgtagcaagtggtatcgctaaaggaaaagctttagatattgctcaatcttcttcagttgatggttttaatgttaaattttcaggaacagataattatcaagatattaaaaactctgacgttatcattataactgctggagttccaagaaaacccgggatgagcagagacgatcttttaggaattaatttaaaaattattaaacaggtcgcagaaggcataaaaaaaaatgcacctaatgcttttgtaatatgtattacaaacccattagatgttatggtaatggcattccaaaaatattcaggtcttccagtaaataaagtagttggaatggcaggagtattagatagttcaagatttaaattatttttgtcacttgaactaaaagttccagttaaagaaatagaagcaatggttatgggtggtcacggggacacgatggttccgctgccaagatttacaaaagtttcgggcaaatcactattagatttagtaaaagatggcagattatcattagaaagattagaaaaaattaatcaaagaactagagatggaggtgctgagattgttaaatttttagaaaaaggttctgcattttatgcgccagccgcttcaggagtacaaatggcagaagcttatttaaaagatgaaaaaaaattacttccttgtgcggtttatctaggtggcgaatatggagtgaaagatatttttgcaggtgttccagttttaattggaaaaggtggagtggaaaaaatagaagaaataagtttagatgaaaaggaaaaaagtcaatttatgcattcgatagatgcagttaaaaaattatggcaagcagcctcagctattgataaagatcttttaaaataat

SEQ ID NO: 207321 - DNA, 530 bp, Unknown
  Bacterial polypeptide expressing nucleotide sequence isolated from the Sargasso Sea
gatattagattcttcgagatataagttgtttttatcagaagaatttaatgttcccgtaaaaaaaatagaagcgctggtaatgggaggtcatggggacacaatggttccattacctggttttacaaaaattgacggaaaaaaacttttagacttagttgatgacggaaaaataactaacgaaaaaattgagagcataaatcaaagaactcgagatggaggtgcagaaatagtaaaatacctagaaaaaggatcagcatactatgcaccagcggcatctggtgtagaaatggctaaaagttatctgaatgatgaaaaaaaactattaccatgcgcagtttatattaatggagagtacggtgttaaagatatttatgctggagttcctgtaatcatcggaaaaaaaggtgttgaaaaaattgaagaaataaatttaagagataatgagaaagcggaatttcaaaaatcagtagaagcagtgaaaaaactttggcaagctgctatcaaaattgatccagatctaaataattaat

SEQ ID NO: 207322 - DNA, 822 bp, Unknown
  Bacterial polypeptide expressing nucleotide sequence isolated from the Sargasso Sea
aaggcatggtaaaaggtaaagcactagatataatgcaattacgtcctcatgatggatatgactcagaattatcaggaacatcagattatagtgatattgcaggatcagatgttataattatcactgcaggtataccaagaaaaccaggaatggatagggaagatctaatgtcgattaatttaggcattatgaaagatgtagcatcaaatgtaaaaaaacatgctcctgatgctttcgtaatcgtaatctctaaccctcttgacgcaatggtatatgccttccacaaagtatccgggtttgctaaaaataaagtagtaggaatggctggtgcgctggattctggaagattccgagcattcttagcaatggaaactggattatcagtacaagatgtaagttgtatggtgctaggaggccatggtgatagcatggtaccaataactagattagctacgataggcggcgtaccagtaacagatcttattagctctgaaaggctaagagaaattgaagaccgtactagatttgcaggaggagaacttgtaaaattgtttggaaatgggtcagctttttacgctcctgcgcaatgcgcaattgaaatggccgaggcatacctaaaagacaaaaaacgcgtaattcctagcgccgcgttatgtgaaggtgaatttggtatacatggttattttattggcgtacccaccgttataggtgcaagcggtatagaaaaaattatcgagtttaaccttacagatgaagaaaaatctgcattagataacactttggatgcagtaaaaaagactgttgaggagactaagctataat

SEQ ID NO: 207323 - DNA, 478 bp, Unknown
  Bacterial polypeptide expressing nucleotide sequence isolated from the Sargasso Sea
atgaaatctaaagttacagttgtaggtgcaggaaacgttggagcaacaacagctcaaagaatttttgaaaagggtcatagtgatgttgttttaattgatgtagtagaaggaatccctcagggaaaagctctagatattttagaaagtggcccaattgtaaaatccgatgcaaaaattgttggaacaaatacttatgaagaatctaaagattctgacattgttgtaatcactgctggaattgcaagaaaacctggaatgagcagagatgatttattaataactaatatgaatattgttggttcagttactgaaagcataatgaagtattctaaaaaccctataattattgttgtttccaatccacttgatgcaatggttcagcacagttttttaaaaagtggtctttctaaggaaagagttattggaatggctggaattttagatacaggaagatttagaacttttctagctgaggaat

SEQ ID NO: 207324 - DNA, 967 bp, Unknown
  Bacterial polypeptide expressing nucleotide sequence isolated from the Sargasso Sea
catgaaaaaaaaaatttctttaatcggagctggacaaattggtggaacattagcacatttaattggtataaaagaattagcaaacgaagtagttttatttgatgttgctagtgggatagcaaaaggaaaggcattagatattgcccagtcgtcatctgtagatggttttaatgttaatttttttggaactgataattataaagatattaaaggttctgatgtaatcataattacagcaggagttccaagaaaacctggaatgagtagagacgatcttcttggtataaatcttaaaataattaaacaagttgctgagggtataaaacaaaacacacctgatgcatttgtaatatgtattacaaatcccctagatgtaatggtaatggcatttcagaaatattcaggactttcagcaaataaagttgtcggaatggcaggcatattagatagttcaagatttaaattatttttggcggaagaatttaatgttccagtaagagaaatagatgcaatggtaatgggaggacatggagacacgatggtgccattgccgagatttactaaagtttcaggaaaacctttgttagatttagttaaagaaggaaaaatttctaaagaaagacttgaagagattaatcaaagaactagagatggaggagctgaaattgttaaatttttagaaaaaggttcagcttactatgctccagcagcttcaggggttgaaatggctaaagcttatctaaaagatgagaaaaaaatgcttccttgtgctgcttatttaaatggtgaatatggaataaaaaatatttatgccggagttccaactataattggcgaaaaaggcgttgagaaaattgaagaaataaatttagatgataaagaaaaatctgaatttcttaattcagttgatgcagtaaaaaaactttggatagcagcatcaaaaatagatacagacttatctaaataa

SEQ ID NO: 207325 - DNA, 649 bp, Unknown
  Bacterial polypeptide expressing nucleotide sequence isolated from the Sargasso Sea
atggggatcaaaaatacttccccaaatgcttttgtaatttgtatcactaatcctctagatgttatcgtgatggccttacaaaaatattctggattaccaaaaaataaagttgttgggatggctggaattttagactcatcaagatttatttattttttatcacaagagcttaatttgtctgtaaaaaaaattaaatccctagttttaggtggtcatggagacagtatggtagctatggtaaatcataccactgttgatggaatgaaattaattgatctggttaaggggggaaaattaaaaaaagaacagctagataagattattgatagaacaaaaaagggaggagcagaaatagtaaaatatttagaaaaaggctctgcattttatgcaccagcttcctctggtgtagagatggcggagagttatttaaaagatttaaaaaaagaattgccttgtgccgcatatttgaatggtgaatatggtgttaaagatttatacgcgggagtgcctgtgataattggaaagaatggagttgaaaaagttatcgagttagaattaaataatactgaaaagataaattttgaaagctcaattaagtcagttcaagagttatttaatgcagctaaaaaaattgacaaagaactataaa

SEQ ID NO: 207326 - DNA, 958 bp, Unknown
  Bacterial polypeptide expressing nucleotide sequence isolated from the Sargasso Sea
atgagaaaaaaaataactttgattggagcaggacaaattggcggaacacttgctcatttaatagctttaaaaaaacttgcagatgttgttttatttgatgtagcttctggaattgccaaaggtaaagcattagatattgcacaatcatctcctattgatgagtttgatattaatttgtccgggactgataattatgaggatacaaaaaattctgacgtaattatcataactgctggtgtaccaagaaaacctggaatgacaagagatgatcttttgagtgtaaatctaaaaatcatcaaacaagtcgctgagggtataaaaaaaacatctcctaatgcttttgttatctgtattactaatccacttgatgtaatggttatggctttacaaaaatattctggattaccaaaaaataaaatagttgggatggctggaattttggactcctctagattcatttattttttatcccaagagctaagagtctctgtaaagaaaataaaatcatttgtacttggaggtcacggtgacagtatggttgcaatgttaggatctacggtggttgatggaaaaaaaattgatgttttggtcaaagagggaaaaatatcaaaacaaaaattggatgaaattgtggagagaactaaaaaaggtggagccgagattgttaaatatttggaaaaagggtctgcattttatgcgcctgctgcctcaggagtggaaatggcagagagttatttaaaagatttaaaaaaacaattaccttgtgcagtttatctcaaaggagaatatggggcaaaagacatttatgctggagttccagttataatagggtctcagggagtagaaaagatcatagaattagatttgtctgctgaagagaaaaaaaattttgataaatcaattaaatctgttcaagatttattcgaaatggcaaaaaagatagacccatctctttaat

SEQ ID NO: 207327 - DNA, 627 bp, Unknown
  Bacterial polypeptide expressing nucleotide sequence isolated from the Sargasso Sea
atgtagcaaacaatattaaggaacaatcacctaatgcatttgtgattgtaatatcaaaccctcttgatgccatggtatacgcattccacaaagtatctgaatttccaaaaaatcaggtagttgggatggctggggcactagatagtgcacgatttcgtgcctttattgcaatggaaactggatactccgtccaagatgtgacctgtatggtattaggcgggcatggtgacacaatggtgcctatttctagacttgccactgtgggtggagttcctgtcactaaccttattaatgctgatagactaaaagagatcgaagacagaacacgggtagctggtggtgagatagtaaagttgtttggtaatggctctgcattttatgctccggctcagtctgcaattgaaatggctgaatcatatattagagacaagaaaagagttataccgtgtgcttctttgtgtgagggtgagtttggtatagacggatatttcattggcgtaccaactgtaattggatgtaatggagttgaaaaaatattggaattttcattgaatgatgatgaaaaaactgaattgaataaaacactagaagccgtgaaaaaaactgtagctgaaactgagctttaag

SEQ ID NO: 207328 - DNA, 958 bp, Unknown
  Bacterial polypeptide expressing nucleotide sequence isolated from the Sargasso Sea
atgaaaaaaaaaattactttaataggagctggtcaaatcggcggaacattggcccatttaatagcacttaaggaattaggtgatgttgtattatttgatgtagcggctggcatagctaaaggaaaagcactcgatatagcccaatcttcgcctgttaatgaatttaatataaatttaactggaacagataaatatgaagatacaagggactcagatgtgattattattactgccggagttccaaggaaaccaggtatgacaagagatgacttattggggattaaccttaaaatcattaaacaagttgctgagggaattaacaaaacatctccaaatgcttttgtaatatgcattacaaaccctttagatgtaattgtaatggctcttcaaaaatactcaggattaccaaaaacaaaaattgttggcatggcaggaatattagactcttcaagatttatttattttttatcacaagaattaaaagttccagtaaaaaaaattaaatctttcgtcttaggcggacatggcgatagtatggtagcgatgcttgggtctacagaagttgaaggaaaaaatattttgaaactagttgaagaaggaaaaatcagtcaaaaaagacttgatgaaataattaacagaacaaaaacagggggagcagaaatcgtaaaatatttagagaaagggtctgctttttatgcacccgcagcctcaggtgtcgagatggctgaaagttatttaaaagatctaaaaaagcaattaccttgcgctgcttacctaaatggtgaatatggatttaaagatatttacgctggagttccggttattattggaaaaaacggagttgaaaaaatcatagaaattgaattaagcaaaaatgaaaaaaatgattttgataagtctatagaagcagttaaagatttgtttgacgcagcaaaaaaaatcgatagctcactgtaat

SEQ ID NO: 207329 - DNA, 611 bp, Unknown
  Bacterial polypeptide expressing nucleotide sequence isolated from the Sargasso Sea
aatgtttgatgtggcaagtggagtagccaaaggcaaagcccttgatattgcacaatcttcatcagttgatggatttaatgtcaaattttctggcacagataattatgaagatattaaaaattcagatgtgataattataactgcaggagttcctagaaaaccagggatgagtagagatgatttactgggaattaatttaaaaattataaaacaagttgccgaaggaattaaaacctactctccagatgcgttcgtaatttgtattacaaatcctttagatgtgatggttatggcatttcaaaaatattcagaattaccaacaaataaagtggtaggtatggcaggaatattagatagctcaagatttaaactttttttatctaaagaattaaaagtaccagttaaaaaaattgatgcaatggtgatgggtggccatggagatactatggtacctttgccaagatttacaaaggtatcaggcaagcctttattagacctcgtaaaggatggaaaaattagttcagaaaaattagagagcataaatcaaagaactagagatggaggagctgaaatagttaaatatttagagaaaggttcagccttttatgcac

SEQ ID NO: 207330 - DNA, 484 bp, Unknown
  Bacterial polypeptide expressing nucleotide sequence isolated from the Sargasso Sea
atgagaaaaagaattactttgattggggctggacagattggtggaacattagctcacttaatagccttaaaagggataggggatgttatcttatttgatgtagctgaaggaatagccaaaggaaaggcattagacatagctcaatcatcccccgttaacaaatttaatataaatttgtctggaacaagtaattacgaagatacaagaaattcagatgtaattataattactgctggggtccctagaaaacctggtatgacaagagacgatcttctgggtataaatttaaaaataatcaaacaagtagcagaaggaattaagaaaacctctccaaatgcatttgtgatatgcataactaaccctctcgatgttatggttatggctttacaaaaatactctggtttgcctaaaaataaagttgtgggtatggccggaattttagactcctccaggtttatatattttttatctcaagaaacttaaa

SEQ ID NO: 207331 - DNA, 1048 bp, Unknown
  Bacterial polypeptide expressing nucleotide sequence isolated from the Sargasso Sea
atgagcaaaaaatggctgaagaatggggcgaagctgtcagagcgttcaaatcaaaataatcatagggatcaaatagtgtcaaaaactgtaaccatcactggtgcagcaggtcagattggatatcagcttgcattcagaattgcttctggccaacttcttggagcaaatgaaaaaatcaatttaaaccttctagaaatttctcctgcattagatgccttaaaaggtgtcgcaatggagttagaagactgtgcctttgaaacactggaaaatattagttttacagatgatccaaatgaagcatttaaaaatactgactatgcatttctagtaggcgctaagccaagggggcctggcatggagagaagcgatctattaaaagaaaatgcaaaaatattttcagctcaaggtaaagcaataaatgaaaatgcatccagagatattaaagtgctcgtagtaggtaatccagcaaatacaaatgcactgatcgctatgtcaaatgcaccaaatattaaccaaaatgcattcactgcgatgatgaggcttgatcacaatcgcgcacttgctcagcttgcatcaaaacttgattgtcattcaagtgagctttccaatatgactatttggggtaatcattcaacaacccagtatccagatgtaaataatctgatgctctcaggcgaagctatatcaagcatgctagatgaaagatgggtaaaggatgagtttattccaaaagttcaaaatagaggtgcagagattattaaagccagaggcctatcaagcgcagcatcagctgcatctgctgctattgatcacataagagattgggcattgggaacaaaagatagtgattgggtcagcatggctattcctagtgatggatcttatggcatcaagaaaggaattatttattcctttcctgttacatgtcaaggcggatcatattcaattgttcagaaccttgaaattaatcaattcagtaaagaatgcatgcaaataactgaaaaagagcttctcgaggaaaaggcagcaatcgaacatctgctctaaa

SEQ ID NO: 207332 - DNA, 438 bp, Unknown
  Bacterial polypeptide expressing nucleotide sequence isolated from the Sargasso Sea
tatgagaagaaataaaatagccttaatagggggagggcaaataggtggtactcttgcccatcttgcaggtttaaaagagcttggcgatgtagtaatttttgatattattaaaggtatccctcaaggtaagtcacttgatttagcagagtcttctcctgtcagctcctttaattctcaaatgaaaggatcaaatagttattctgccattaagggttcggatgttgtaatagttacagctggagtgccaagaaaacctggaatgagcagagatgatttattatcaattaatttaaaagttatgtcagatgttggtaaaggtataaagaagtatgctccaaatgcatttgttatttgtattaccaatcctctggacgcaatggtatgggcattaagaaaattttcaggtcttccagcaaaaaaagtagttggtatggctgg

SEQ ID NO: 207333 - DNA, 985 bp, Unknown
  Bacterial polypeptide expressing nucleotide sequence isolated from the Sargasso Sea
catgaaaaccgtaaaagtagctgttacaggtgcagccggacagataggctatgctatgctgttccgactggcttccggagcagttttcggccaagacacggctgttgaacttagactgcttgagttagagcaggcacttcctgcactggaaggagtgaagatggaattggacgactgcgcctttcccttgctggaaaatattgtgactacttcagatacagatgaagcttttaaaggcgttgattgggctctcctagtaggatcagttccacgaaaagctaatatggaacgcaacgaccttttgaaggtcaacggcggaatttttgtgggtcaggggaaagcaattaataagaatgcaggctccaatgtacgaattgttgtggtaggcaatccctgcaatacaaactgcctaattgcaatgaacaatgcaccggatattcctcgtgaacgctggtttgcaatgacggctcttgacgaaaatagggctaagagccaacttgcttggaaagctggtgttccagtgaaggacgttaccaatatgacaatctggggcaatcacagtgcgacccaatatcctgattatacaaatgcactgataaaagggatgccagccagtcaattaataaaggatgaggaatggctaaagggggatttcataaaaacggttcagcagcgtggatccgagatcattaaggcccgtggagcgtcttctgcagcttctgcagccaatgccgctctggatacaattacaaaaatcatcacaccgaccaataaaatggactggtttagtgcagcaattccaagtgatggaagctacggagttacccagggactaattttcagctacccacttagaagttcaggaaacggtgactacgaggtggtgcaaggaatcgaacttgatgagttttctcagcagaaaatcaaggccactcgagaagaacttgaaatggagcgtgatgcagtaaaggaaatgctgaactga

SEQ ID NO: 207334 - DNA, 946 bp, Unknown
  Bacterial polypeptide expressing nucleotide sequence isolated from the Sargasso Sea
tctgattggagcaggtaatattggcgggactcttgcacaacttgttagtcaaaaagaattaggtgatatagtcttattagatatatttgagggtatgcctaagggtaaatctttagatctcgcccagtcatcttccattgagggatttcatgcagattttaaaggtacttcaagttttagagatattaaaaattctgatgtcgtaatagttactgcaggttttccaagaaaaccaggtatgtctcgagatgatcttgtagaaaaaaattctataatcattcaaaatgttgggaaaaatattaaaaaatattgtccaaaggcatttgttatatgcattacaaatccacttgatgcaatggtaagtgtcattcagaaatcatcaggccttaagacaaatatgtgtattggcatggcgggagttttggatagcgcaagattaaaatactttttatccaaggagtttaatgtttcaattaacgatatcagcgcatttgtattaggtggtcatggagataccatggttccacttatgcgatactcaacagtatcaggtattcctgtacctgagttaataaagatgaagtggacaacaaaaaaaattataaacaaaattattcaaagaacacgtgatggtggtgctgaaattgttaaactcatgaacacatctgcctattatgcaccagcttcctctgcagtacaaatggcagagtcatttttgttagatcaaaaaagattattaccatgtgctgcacatcttaatggtgaatatggagtaagaggactttatgttggagttccagttatcattggcaaaaaaggtgttgaaaaaattattgaattaaaacttaataataatgaaaagaaagaatttaatcattctgttaaagcagtaaaatcattaactacattgtctaacaagcttctaaataagaaaaataaaaaataa

SEQ ID NO: 207335 - DNA, 964 bp, Unknown
  Bacterial polypeptide expressing nucleotide sequence isolated from the Sargasso Sea
aatgagaaaaaaaattgctcttattggagcaggtaatatcggcggaactcttgcacaacttattagtttaaaagaattaggagatgtagttttactagatatttttgaaggtatgccgaaaggtaaatctttagatttagcacagtcatcttccattgaaggatttcatgctgattttagaggtacttcaagttttaaagatattaaaaattctgatgtagttatagtgactgctggatttccaagaaaaccaggaatgtcaagagatgacttggtagaaaaaaattcagtaattattcaaaatgttggaaaaaatataaaaaaatattgtcctaaagcatttgtgatatgtattacaaatccccttgatgcgatggtaagtgttcttcagaaatcatctggattaaaaacaaatatgtgtgttggtatggcaggcgttcttgatagtgcaagattgaaatattttttatcaaaagaatttaatgtttcaattaacgatattagtgctttcgttttaggtggccatggagatacaatggttccacttatgagatatgcaactgtatctggtattccagtgcctgaattaattaaaatgaaatggacttcaaaaaaaaatatagacaaaattattaaaagaactcgtgaaggtggtgcagaaattgttaaacttatgaaaacctctgcatactacgcaccagcttcatcagcagtacaaatggcagagtcatatttattagatcaaaagagattattaccctgtgctgcatatcttaacggtgaatacggtgttaaagggctttatgttggagttccagttgttattggaaaaaaaggagttgaaaaaattattcaattaaaacttaacaataatgaaaagaaagaatttcattactcagttaaggcagtgaaatcactaacaacattatctaataatcttttaagtaagaaaaataaaaaataa

SEQ ID NO: 207336 - DNA, 997 bp, Unknown
  Bacterial polypeptide expressing nucleotide sequence isolated from the Sargasso Sea
tatgaaagaaataaacgtactagttactggagctgcaggtcagatctcttattctttactccctaggttaattagtggagaaacctttggtccaaatacaaaggtaaacctaaagttagtcgaaattcctccagtgttagataaattacaaggaaccgttttagagcttgaggattgtggattttcgaattgcggatcaattatgtctacgtctgatataaatgaagcggctgaagattgtgactgggctttgctagtgggcagtataccgagaggaataacaattaacggtaaaaagattgaagaaagaggtgatcttttacacgttaacggaggtattttcacagatcaagggaatgccattggaactaaaggaaaagaagacgcaaaaattcttgttgttggaaatcctgcaaataccaatgcgcttattggaaaatctaactcgaataacaactctcagttgtggatggcaatgaccgcattggatgcaaatagagcaaaagctcaggtttctatcaaaactaatcgatccatagaggatataaaaggaatgactatatggggaaaccacagtccaactatgtatcccgacctagataatgcatctattgatgggaaatcagtttcagagatcataaatgataataattggatagagaatgacttcctagtcagagttcaacaaaggggaaaagaaatcatagatgctagaggagcttcttcagcagcatctgctgcaaatgctgccatagataccgtgaaaaatgtagaaaatgatactgaagctggtacttggttcagtgctgctgttgcatctgatgggagttatggcgtccctgaaggactgatatttggttatccactcaggacgaaaaatggaaaagtcaaaatcgttcaagatcttgagctgaacgactatgcaaagggaaaaattgaaattactactaatgaactcttagaagagaaagaagaagtaaaagaccttatagcctaa

SEQ ID NO: 207337 - DNA, 997 bp, Unknown
  Bacterial polypeptide expressing nucleotide sequence isolated from the Sargasso Sea
atgaatacgcctgttcgtgttgctgtcacaggtgctgccggtcaaattagttattctttattatttcgaatagcatctggacaaatgcttggaccagatcagccagttatttttcagttacttgaaataacgcctgctatgaaggcattagagggtgtagttatggaaattgacgattgcgcttttcctttagttgaagatttcatcttaacagatgatattaatactgcctttaatgatgttaattatgcgttattagtcggagcaaaacccagaggaccgggtatggagcgtagtgatttattagaggccaacggtggtatttttaagctacaagggaagggtttaaatgaaaatgctaatcgcgatgtaaaagttttggttgttggaaatccagctaacacaaatgcttatacagctatggttagtgcccccgatttaaattcgcgtaattttagtgcgatgactcgacttgatcataatcgtgcactagcacaactagcagcgataacgaagtttcctgtcaaagatattaagaagatgacgatatggggcaatcactcaacaacacagtatccagatatatctaacattgaaatctcaggtatgccagattctggacagcgcattaaagatgatattgatattgattggtataagaatacatatattcctcgagttgcgaaacgaggggctgaaattattgatgcgcgtggtgcttccagcgctgcatcagcagcacatggcgctgttgagcatatgcatgactgggtattaggcactccagataatgactgggttagtatggcagttccaagtaatggaagttatggaatcccagaaggattggtgttttcttttccggttacttgcaaagacggtgattatcatattgttcagggtttagaatttgatgagtttggtcagtcaaaaatagatgctacacgaaaagagcttgaggaagaaaaagcagcattatcaagtattcttgattaac

SEQ ID NO: 207338 - DNA, 985 bp, Unknown
  Bacterial polypeptide expressing nucleotide sequence isolated from the Sargasso Sea
aatgaatacagtcaaagttgctgttaccggtgctgctggtcagatcggatatgctcttttatttaggattgcatccggatccgtttttggtccagataccaaggtcgagttgcagcttttggaattggaacctgcacttccgtcactcgagggagtcaaaatggaattggacgattgcgcctttccacttctccaaaaaatcaccaccacctccgatgcgggtgtcgcattcaaagatacagattggattctgctggtgggtgctgcaccaagaaaagcagggatggagcgcaacgacctccttcgtgtcaacggaggtatctttgtcggacagggcaaagccatagagaaacaagccggagatcgggcaaaaatcctcgtcatcggcaatccatgtaatactaattgcatgatcgccatgagccatgccccaagcatcccgaaaaaccgctggttcgccatgaccgcacttgatgagaatcgtgctcgtcgacaactggctgagagatcaggcagcgatatcagtgatgtgaaaaatctttgcatctggggcaaccatagtgcgacccaatatccggatttctataatgccagcatccatgggaagccggtaacagaagtcattcaggatgaaggctggcttcagggagattttatcaaatccgtccagcaacgtggtgcagccatcatcaaagcccgtggagcttcatccgcagcatctgctgccaatgctgtcgtcgataccattcagcggctcaacaaccccacccctgacggagaatggttcagtactgccatccccagtgatggaagttacgggattcctgaaggaatcatgttcagctatcctttgagaagtctgggtaattacgagtacgaagttgttcaaagtctggaactgaatgaatttgggcaacaaaaagtccaggctacccgggaagaacttgaaatggaacgcgaagccgtcagtgatataatgggctga

SEQ ID NO: 207339 - DNA, 964 bp, Unknown
  Bacterial polypeptide expressing nucleotide sequence isolated from the Sargasso Sea
catgacaaataaaaaaatatcacttataggagctggacaaattggaggcacacttgctcatttagctgccatgaaagagcttggagatatagttctttttgatctgatgtctggactggcgaaaggtaaagctcttgatatagcacagtcctcagccatagatggttttaacgtttccttgtctggtactgataattatgaggatacaagtgactctgatgttataattataacagctggagttcctcgaaaaccaggaatgaccagagatgaccttttgggaacaaacttgaaaatcatcaagcaagtagctgaaggtataaaatcaacttctcctaacgccttcgttatttgtattacaaatccactggatgtaatcgttatggctcttcaaaaatattcagggcttccaaaaaataaagttgttggtatggctggagttttagatacttcacgttttaaatatttcttatcacaagaattgaatgttccaattagcgaagtagactcatttgttcttggtggccatggtgatacaatggtaccagttccaaatcgaactatggttagtggtgaaaatctgactgatttagtgaataaaggaaaaatttcaaaggctaggcttgacgagatcattgataggacgagaaaaggtggagccgaagttgttaagttattagaaaccggatccgctttttatgggccggcagcctcaggaattgaaatggccgactcatatctaaatgataagaaaaaaacgttaccatgcgcagcatatttaaatggtgaatacggtatttcagatttatatgttggagttcctgttgttattggctcagcaggaattgaaaaagttgttgaacttgatttagacgaagaagaaaaaaaattttttaaaacttcaatcgaagcagtcagtgagctatttgaagccgcaaaaaatattgatccttcacttaaataa

SEQ ID NO: 207340 - DNA, 715 bp, Unknown
  Bacterial polypeptide expressing nucleotide sequence isolated from the Sargasso Sea
aatgtctaaaaaaagaatagcattaattggtggaggccaaattggtggtaatttggctcttctagctgctcaaaaagaattaggtgatatagtaatttttgatattcctaaagctgaaggtatggttaaaggaaaggctctagatttaatgcaattacgtcctcacgatggtcatgatgtgaatattactggcacttcaaactggaaagatgtaaaagatgcagatgtatttataataactgctggaatcccaagaaaaccaggaatggacagggaagatttattggatattaatttaggaattatgaaagatgttgctgaaaatatcaaagaacaggccccaaattcttttgttatagtcatatctaatcccttagatgctatggtatatgctttttataaaacttctggatttaaaagtaataaagtggtaggaatggctggcgctcttgatagcactagatttagaactttcattgcaatggagacagggttctcagtgcaggatgtcacatgcatggttcttggggggcatggagatacgatggtgccaattactcgtttagctactattggcggggtacctgtaggagatttaattagcgaagaaaaaataactaaaattgaagagagaacacgttttgctggaggtgagattgtaaaattatttggaaacgggtctgcattttatgctcctgcacagtctgcaattgaa

SEQ ID NO: 207341 - DNA, 937 bp, Unknown
  Bacterial polypeptide expressing nucleotide sequence isolated from the Sargasso Sea
aatgtctaaaaaaagaatagcattaattggtggaggccaaattggtggtaatttggctcttctagctgctcaaaaagaattaggtgatatagtaatttttgatattcctaaagctgaaggtatggttaaaggaaaggctctagatttaatgcaattacgtcctcacgatggatatgacgtgaatattactgggacttcaaactggaaagatgtaaaagatgcagatgtatttataataactgctggaatcccaagaaaacctggaatggacagggaagatttattggatattaatttaggaattatgaaagatgttgctgagaacatcaaagaacaggctccaaattcttttgttatagtcatatctaatcccttagatgctatggtatatgctttttataaaacttctggttttaaaagcaataaagtggtaggaatggctggcgctcttgatagcactagatttagaactttcattgcaatggagacagggttttcagtacaggatgtcacatgcatggttcttggggggcatggagatacaatggtgccaattactcgtttagctactattggcggagtacctttaggagatttaattagcgaagaaaaaataactaaaattgaagagagaacacgttttgctggaggtgagattgtaaaattatttggaaacgggtctgcattttatgctcctgcacagtctgcaattgaaatggcagaatcttatcttcgcgataaaaaaagggttatcccctgcgcaacattatgtaatggtgaatttggaattgatgggtattttattggagttcctactgtaattggatccaatggagttgaaaagattttagactttaaattgaaagagaatgaacaggaagctctgaatcaaacattagaagctgtaaagaaaactgtatcagagacagggctatag

SEQ ID NO: 207342 - DNA, 961 bp, Unknown
  Bacterial polypeptide expressing nucleotide sequence isolated from the Sargasso Sea
aatgagaaaaaaaatttctcttattggtgctggtaatattggtgggaccctcgctcacctaataggtataaaagaattagctgatgtagttcttgttgatatagcaaaagggattcctcaaggaaaagctctagatattgctcaatcatcagcaattgaaacttttaatattaatataaaaggatcaaatagttacaaagatataaaaaattcagacgtaataattgttactgcaggatttgccagaaaaccaggtatgagcagagatgatttagtacaaaaaaattccactattgttcaacaagttggtcaagcaataaaaaagtatagtcaaaagtcttttgtaatttgtataactaatcctcttgatgcgatggttagtgtattacaaaaaagtgcaggattaaaaacaaatatgtgtgttggaatggctggtgtattagatagtgcgcgactaaaatattttttatcgaatgagtttaaggtttcagtagaggatgttagcgcttttgttttaggtggacatggggatacaatggttcctctaattaggtactcaactgtatctggaattccaatccccgaattaataagattaaagctgactactagcaaaaaaattgatcaaattattaaaagaactcgcgatggtggtgctgaaattggtaaacttttgaaaatagcttctgctttttatgctcctgcctcctctgctatttctatggcagagtcttttataagaaatgaaaaaagggttttgccttgtgccgcttatttaaatggagaatatggtgttaaaggattttatgtaggtgttccagtaataataggaaacaaaggtgtggaaaaaataatagaattaaaactaaattcttctgaaaaaaaacaatttaaacaatcaataaatgcagtaaaaaatttaacaaaacttgcagataaattattaaaaaaaaataaatga

SEQ ID NO: 207343 - DNA, 484 bp, Unknown
  Bacterial polypeptide expressing nucleotide sequence isolated from the Sargasso Sea
atgtcaaaaaaaatatcattaattggcacaggtcaaatcggtggaacactcgcccatttaatagggttaaaggagctagtaaatgaagttgttatgtttgatgttgcaagtggtattgccaaaggaaaagctttagatattgctcaatcatcatctgtagatggatttaatgtgaaattttcaggcacagataattatgaagatataaaaaattctgatgtagttattataaccgcaggtgttccaagaaaaccgggaatgagcagagatgatttattaggaataaatttaaaaattattaaacaagtagctgaaggtataaaaaaaaatgctccaaaagcatttgtaatatgcattactaatccactagatgttatggttatggcgtttcaaaaatactcaggacttcctacaaataaagtagttggaatggcaggaatattagatagttctagatttaaattatttttatctctcgagctta

SEQ ID NO: 207344 - DNA, 613 bp, Unknown
  Bacterial polypeptide expressing nucleotide sequence isolated from the Sargasso Sea
tattactaatccattagatgttatggttatggcatttcataaatattctgggcttccaaaaaataaagttgttggaatggcaggaatattagatagctctagatttaaattatttttatcacttgaacttaaagttccagtaaaagaaatagaagcaatggttatgggtggccacggagataccatggttcctttgccaagatttacaaaagtttcaggaaaaccattattagatttagttaaagaaggaaaactatcatcagaaaggttagaagaaattaatcaaagaactagagatggaggtgctgaaattgtcaaatatttagaaaaaggttctgctttttacgcaccagcagcatcaggtgttcaaatggctgaagcatatttaaaagatcagaaaaaattacttccttgtgctgttcatttggatggagaatatggtgtaaaaagtatttttgccggagttccagttataattggaaaagatggtgtagaaaaaatagaagaaataaatctagacgaaaaggaaaaaaatcaatttatgcattcaatagaggcagttaaaaaattatgggatgcagcctcaaaaatcgataaagatctttctaaataa

SEQ ID NO: 207345 - DNA, 964 bp, Unknown
  Bacterial polypeptide expressing nucleotide sequence isolated from the Sargasso Sea
atgagaaaaaaaattgctcttattggagcaggaaatatcggtgggactcttacacaacttgttagtttaaaagaattaggtgatgtagttttattagatatttttgaaggaatgcctaagggtaaatctttagatcttgctcagtcatcttccattgagggatttcatgcagattttaaaggtacttcaagttttagagatatcaaaaattcagatgtagtaatagttactgcaggatttccaagaaaaccaggcatgtcccgagatgatctagtagaaaaaaattctataatcattcaaaatgtagggaaaaatattaaaaaatattgtccaaaggcatttgttatatgcataactaatccccttgatgcaatggtaagtgtccttcagaaatcatcaggccttaaggcaaatatgtgtattggtatggcaggtgttttggatagtgcaagattaaaatactttttatccaaggagtttaatgtgtcaattaatgatatcagcgcttttgtcttaggcggtcatggagacacgatggttccacttatgcgatactcaacagtatcaggtattcctgtacctgaattaataaagatgaaatggacaacaaaaaaaaatatcgataaaattattcaaagaacacgtgatggtggagcggaaattgttaagctcatgaatacatctgcctattacgcgccagcttcttcagctatacaaatggctgagtcatttttgttagatcaaaaaagattattaccatgtgctgcatatcttaatggtgaatatggagtaaaaggactgtatgttggagttccagtaatcattggaaaaaaaggtgttgaaaaaattattgaactaaaacttaataataatgaaaagaaaaaatttaatcattccgttaaagcagtaaaatcattaactacattgtctaacaagcttctaaataagaaaaataaaaaataat

SEQ ID NO: 207346 - DNA, 421 bp, Unknown
  Bacterial polypeptide expressing nucleotide sequence isolated from the Sargasso Sea
aatgagtaaaatttctttaataggagcaggtcaaattgggggaactttagcacatttaattggattaaaagagcttgtagatgaagttgttctctttgatgtagctagtggaattgccaaaggaaaaggcctcgatattgcacaatcttcatcagttgatggatttaacgtaaaattttcaggaacagataattatgaggatattaaaggttcagatgtaattataataactgcaggagtaccaagaaaaccaggtatgagtagagatgatttacttggaattaatttaaaaattattaagcaagttgcaaaaggaataaaattaaacgcacctaatgcttttgtcatatgcattacaaatccattggatgtaatggtaatggcttttcaaaaatattcaggacttccggcaaaaaagtag

SEQ ID NO: 207347 - DNA, 937 bp, Unknown
  Bacterial polypeptide expressing nucleotide sequence isolated from the Sargasso Sea
atgtctagaccaaaaatagcattaattggcggtgggcaagttggaggaaacattgctcttctttcagcccaaaaagaacttggtgatatagttattttagatattccagaagctgaaaactttatgaaaggtaaagccttggatatatctcagttacttccacttgatggttatgattctaaattatctgggacttctaattttgaagacattaaaaactctgatgttgtagtaattactgctggatttccccgaaaacctggtatggatagagcagatcttctttcaaaaaatttagatattatgacaaatgttgctaacaaagttcgaaagtttgcacctgaagcatttgttattgttgtttctaatcctcttgatgctatggtatatgctttttacaaaatttctggttttccgaggaacagagttgttggaatggctggagctcttgatagcgcaagatttagagctttcattgctgatgctacaaatttgtcttcacaagatgttaattgtatggttcttggaggtcatggagatacaatggtaccagttagtagattagcaactgttggtggtgttccattatcatctttattaagcaaaaaggagattatagctattgaaaatagaactcgtgttggtggaggagaaattgttaagctctttggtaaaggttctgcgttttatgctccagcacaatctgctgtagaaatgattgaaagttttgtaagagacaaaaaaagagttataccatgcgcatcattatgtgaaggtgaatttgatattgatggttactttattggagtaccaacagttatcggctctggaggtgtagaaaaaatacttacttttgatcttaacgacgaggaaaaatcttctctaaacaatactcttgttgaagtaaaaaaaactgttagtgaaactggtttataat

SEQ ID NO: 207348 - DNA, 961 bp, Unknown
  Bacterial polypeptide expressing nucleotide sequence isolated from the Sargasso Sea
atgacaaaaaagatatcattaattggagctggtcaaattggcggaacattagcacacttaattgcaataaaagaacttggcgatgttgtcctttttgatgttgctgaaggattagcaaaaggcaaagccttagacatagcacagtcttcaggtgtaactggttttaatgtaaatatatcaggtaccaatgattatgaagatacaaaaaactccgatgtaattataataacagctggtgtcccaagaaaacctggaatgtctagagatgacttgcttgggactaatcttaagataattaaacaggtatcagatggaataaggaatacatcccccaaagcttttgttatttgtataacaaaccctctggatgtaattgtaatggctttgcagaaatattctggtctaccctctaataaagttgttggaatggcaggaattttagattcctcaagatttaaatattttttatctaaggaattaaatgaacctattaaaaatatagagtctttagttctcggtggtcacggagatacaatggttcccatgcctaaaaagactaaaattaaaaacaaaacattaatagatttagtaaatgagaaaaaaatttcaaaagataaactagatggaattataaatagaactagaaaaggtggagctgaaatcgtgaaactattagaaaaaggttctgctttttatgcaccagctgcgtcaggtgttgaaatggcggagtcttatttaaaagatttaaaaaaaacattaccatgtgcagcttttttaaatggtgagtatggttataaaaatatttacgctggggttccagttgttattggtaaaaatggtgtagaaaaaattgtggagattgaactcgaaagtactgaaaagtcaaatttcgatacttcaataaaggctgttaaagaattatgcgattcagctataaaaattgacccaagtttgtcttaaa

SEQ ID NO: 207349 - DNA, 868 bp, Unknown
  Bacterial polypeptide expressing nucleotide sequence isolated from the Sargasso Sea
atgaaaaaaaaaatttctttaataggcgctggccaaattgggggaacactcgcccacctcattgctttaaaagagcttggagatgtagttttatttgatgttgctgaaggaattgccaaaggcaaagcattggatattgcacaatcatctggggtagacaaatttaatgtatctctaatcggaactaataaatacgaagatattaaggactcggatgtaataattataactgccggtgtaccaagaaagcctgggatgagcagggatgatttattagggacaaatcttaaaattataaaacaagtagccgaaggtattaaaaaaaattcaccaaaagcatttgtaatatgtattaccaatcctttagatataatagttatggctcttcaaaaatattcaggccttccaaaaaatatggttgtgggtatggctggaatactcgacacatcgagatttaagtattttttatcttctgagtttaaagtaccaataaaaaaaattgagtctttaattctaggaggacacggtgataccatggtagcaatggtaaatcatacaaagattgatggtaaaccactttcagaatttttaaatgagggaaaaatcaagaaagagagattagaagaaatagtcaatagaacaaaaaaaggcggtgctgagattgttaagctacttgaaaagggatctgctttttatgcacctgctgcttctggggtagaaatggcagaaagttttcttaaaaatcaaaaaaaagaattaccttgtgctgcttatctaagcggtcgatacggagtaaaagatctttatgtaggggtgccagtagttataggttcaaaaggtgtagaaaaagtaatgaaatcaaattaaa

SEQ ID NO: 207350 - DNA, 964 bp, Unknown
  Bacterial polypeptide expressing nucleotide sequence isolated from the Sargasso Sea
aatgaaaaaaatagctttaattggcgcaggccaaatagggggaacactagcacatttaatcggaataaaagagcttgttgatgaggttgttttatttgatgttgcaagtggaatagctaaaggaaaggctttggatatagctcaatcatcatctgttgatggatttaatgtaaaattatcaggtacagacgattataaagatattaaagattctgatgttatcataattacagcaggagttcctagaaagccaggaatgagtagagatgatcttcttggtataaatttaaaaattataaaacaagtagctcaaggagtaaaagaaaatgctccgaatgcatttgtaatttgtatcaccaaccctttagacgtaatggttatggcgtttcaaaagttttcaggtttgcctgcaaataaagttgtcggtatggcaggaattttagatagctcaagatttaaactatttttatctttagagtttggtgtgcctgtgagagagattgaagcaatggttatgggtggtcatggagatactatggttccaatgccaagatttacaaaagtatctggcaaacctttattagatcttgttaaagagggaaagatttctcaagagagagttgaagaaatcaatcaaagaactagagacggaggagcagaaatcgttaagtatttagaaaaaggttctgctttttacgcacctgcagcatcaggagttcaaatggctgaatcatatttaaaagatgaaaaaaaattattaccttgtgcagtgcagttaaatggtgagtacggagtagaaaatgtttatgcaggagtaccagttgtaattggtaaagacggtgttgagaaaattgaagtagtggatttagatgaaaaagaaaacaaagagtttatgcactctattgatgctgttaaagctctttgggaagctgcatctaaaatagatccagatctttcaaaataa

SEQ ID NO: 207351 - DNA, 456 bp, Unknown
  Bacterial polypeptide expressing nucleotide sequence isolated from the Sargasso Sea
cttatgtttctgttgcaagtgtgaacgcatatgttcttggagggcatggagatactatggttcctgttataggagcaacaaatgtaggtggtgttcctgttgaggatatgattgaaaaaaataaattagcatcaatagttcaaagaactagagacggtggagctgaaattgttgctctactgaaaacaggatctgcattctatgcaccatcagcttcaattgttcaaatggttgaagcaatcttattagataaacaacagatactaccatgtgcagcgttattaagtggagaatatggatttaatgatgtttatgcaggagtacctgttaagcttggggcaaatggtatagaaaaagtgatcgaagttgacttaaataaagatgaacattcagctctttctaaatctgttgattcagtaattgaactgttagatattatgaaaaaaaacagctaat

SEQ ID NO: 207352 - DNA, 964 bp, Unknown
  Bacterial polypeptide expressing nucleotide sequence isolated from the Sargasso Sea
aatgagcaaaatatctttaattggtgctgggcaaattggtggaactcttgcacatttaattggaacaaaagagctagcagatgaagttgttctttttgatattgcaagtgggatagctaaaggaaaagccttagatattgctcaatcttcatctgtagatggttttaatgtaaaatttttaggcacagatgattataaagatattaaaaactcagatgtaattattattactgctggtgttccaagaaaacctggaatgagtagagatgatttgcttggtattaatttaaaaattattaaacaagttgctgaaggaattaaacagaatgctccaaacgcttttgttatttgtattacaaatcccttagatgtaatggtgatggcttttcaaaaattttcaggattacctgcaaaaaaggtagttggaatggctgggattttagacagttcaagatttaaattatttttatctttagaacttaatgttccagtaaaagaaatagatgcaattgtaatgggaggtcatggagatacaatggttcctatgccaagatttacaaaagtttcgggaaaacctttgcttgatttagttaaagaaggaaaaatttcaaaagaaagattagaagaaataaatcaaagaacaagagatggtggtgcagaaattgttaagtatttagaaaaaggatcggcattttatgctccagctgcatccggagttcaaatggctgaagcatatttaaaaaatgaaaaaaaattattgccatgtgctgtacaattagatggagagtatggagtcaaaaatgtctatgcaggtgttccagtaataataggaaaagaaggtgttgaaaaaatagaagaaattaaattagatgataaagaaaaaaaagagtttatgaactcgatagatgccgttaggggtctctgggaggcagcatctaaaattgatcctgatctttctaaataa

SEQ ID NO: 207353 - DNA, 298 bp, Unknown
  Bacterial polypeptide expressing nucleotide sequence isolated from the Sargasso Sea
atgacaaaaatatctttaattggtgcaggccaaattggtggaacccttgctcacttaattggcacaaaagagttagtaaatgaagtagtattatttgatgtagcaagtggaattgcaaaaggcaaagcattagatattgctcagtcatcatccgtagacgggtttaatgtaaaattttcaggtacagatgattataaagatattaaaggctctgatgttattataattacagcaggagttcctagaaaaccaggaatgagtagagatgatcttcttggtataaatttaaaaataaata

SEQ ID NO: 207354 - DNA, 397 bp, Unknown
  Bacterial polypeptide expressing nucleotide sequence isolated from the Sargasso Sea
atgagcaagatatctttaattggggcaggccaaattggtggaactctcgcacacttaatcggaataaaagaattagttaatgaagtcgttttatttgatgtggctagtgggatagccaaaggtaaggccctagatattgctcagtcatcatcagttgatggtttcaatgtgaagttttcaggaactgatgattacaaagatattaaaggatcagatgtaattattatcacagccggtgtaccaagaaaacctggaatgagtagagatgatctacttgaaataaatttgaaaataattaagcaagttgcagagggaataaaacaaaatgctccagatgcatttgtgatatgtattactaatccattagatgtaatggtaatggcatttcaaaaatttt

SEQ ID NO: 207355 - DNA, 658 bp, Unknown
  Bacterial polypeptide expressing nucleotide sequence isolated from the Sargasso Sea
aatgggaaaaaaaatatcattaattggcgcgggtcagattggaggtactttagctcatttactcggtcttaaagaggtagtttcagaagtagtattattcgatgttgcctctggtgttgcgaaaggtaaagctttagatatagcgcaatcatcctctgtggatggttttaatgttaaattttcaggaacaaatgattataaagatataaaaaattcagacgttattattattactgcaggcgttcctagaaaacccggaatgagcagagatgatttgcttgggataaatttaaaaataatgaaacaggttgctgaaggtattaaatcaaattgtccagatgcctttgttatttgtataacaaatccattggatgtgatggttatggctttacaaaaatactcaaatttgccaaaaaacaaagtggttggaatggctggaatattagattcttcaagatataaattatttttatctgtagaactcaatgtccctgtaaaaaacattgaagctctagtaatgggaggtcatggagataccatggttccattaccaggtttcactaaaataaatggaaaaaagcttttagatttagtcaacgacggcataattacaaaagaaagaatagaagaaataaatcagagaacaagagatggtggt

SEQ ID NO: 207356 - DNA, 137 bp, Unknown
  Bacterial polypeptide expressing nucleotide sequence isolated from the Sargasso Sea
aatgaaagttgctgtattaggtgctgcaggcggtatcggtcaagcattgtctttactattaaaaacaggcttaccagctggttctgaattatcactttacgatgttgcaccagttgtaccaggtgttgctgttgacc

SEQ ID NO: 207357 - DNA, 289 bp, Unknown
  Bacterial polypeptide expressing nucleotide sequence isolated from the Sargasso Sea
aatgaaaaaaatatctttaataggagcaggccaaattggtggtactttagctcatctaattggtcttaaagagctagttgacgaagttgtgatgtttgatgtagcaagtggaattgcaaaaggaaaggcccttgatattgctcaatcttcttcagttgatggttttaatgtcaaattttcaggtacagataattatgaagatataaaaaattcaaacgtaattattatcactgccggggttccaagaaaacctggaatgagtagagatgatttattgggaataatttaa

SEQ ID NO: 207358 - DNA, 1000 bp, Unknown
  Bacterial polypeptide expressing nucleotide sequence isolated from the Sargasso Sea
atgaaagaaataaatgttgctgtgactggcggagccggacaaatagcttattcacttctaccaagactagtaagcggtgaaacatttggtcctgatattaaagtaaatctgagactaatagaaatacctcaagttgtagacaagttacaaggaacgattatggaattaatcgactgtggttttgatcaaacgggagagttaactgccacttctgacataagcgaaggagtaaaagacgcagattgggtgcttctggtaggaagcataccaagaggaattgtaatcgatggaaagaaaattgaagagagaagtgaccttcttaaaataaatgggggaatatttacagatcaaggagctgcaattggccaagtagcaaaacctgatgcaaaaatactagtagttggtaatcctgcaaatactaatgctctgataggtatgaactcggctaaaaaccctagtcaacaatggtttgctatgactgctcttgatgccaatagagccaaagctcagctagcaaagaaagcaggtgcatctatatcttcattaaaaaatatgatcatatggggaaaccatagtccaaccatgtatccagacccttacaacgcaactattaatggagtaagtgcagcagaaacgattaatgatgaccaatggttagcagaggaataccttcccttggtccaacagcgtggaaaggcagttatagatgcaagaggtgcatcatcggctgcgtcagccgctaatgcagctattgatactgttaaagctgtgattaaccctactccagatggcgactgttttagtgcagctatagcgagtgacggtagctatggcgtaccgcaaggcctaatatttggattcccactaaggacgtctgctaacggagaagttgagatcattcaaggtatcgaacttaatgaatttgctcaatcaaaaattgcaataaccacacaggaattagaatctgaaagggaagcggtagcagatttgatagattaaa

SEQ ID NO: 207359 - DNA, 889 bp, Unknown
  Bacterial polypeptide expressing nucleotide sequence isolated from the Sargasso Sea
gcttcagaagttgttctttttgatgttgctagtggtgtggctaaaggaaaagctttagatattgcgcaatcctcatcagtagatggatttaatgttaaattttcaggtactgataaatatgaagatataaaaaattcagatgtaataattattacagctggagttcctagaaaaccaggcatgagtagagacgatctattaggtataaatttaaaaatcattaaacaagtcgcacaaggtgttaaacaacatgcacctaatgcttttgtaatatgtattactaatcccttggacgttatggttatggcttttcaaaaatattcaaatttgcctacaaataaagtagttggcatggcaggaattttagatagttcaagatttaaattatttttatcattagaactaaaagttccagtaaaagaaattgaagcaatggtgatgggaggccacggggatacaatggttcccttgcctagatttacaaaaatttctggaaaaccattattagatttagttaaagagggcaaattatcttctaatagattagaagagataaatcaaagaacaagagatggaggtgctgagattgttaagtttttagagaaaggatccgcattttatgcaccagctgcatcaggagtccagatggctgaagtttatttaaaagatgaaaaaaaattgttaccctgtgctgcctacctcaatggtgaatatggtattaataatatttatgcaggagtacctgttataattggtaaatcaggagtagaaaaaattgatgaaataaaacttgatgataaagaaaaaaaagagtttttgaattcaattgaggccgtaaaaaaattatgggaagctgcatctaaaatagatccagatctctctaaataat

SEQ ID NO: 207360 - DNA, 502 bp, Unknown
  Bacterial polypeptide expressing nucleotide sequence isolated from the Sargasso Sea
atgtcaaaaatatcattaataggagctggacaaataggtggaactttagcacatttaattggactaaaggagcttgttgatgaagtagtattatttgatgtagcaagtggaattgctaaaggtaaagcattagatattgcacagtcttcatccgttgatggatttaatgtaaaattttcaggtactgataattatgaagatataaaaaattcagatgtaatcattattacagctggtgttccaagaaaaccaggaatgagtagagatgatttattaggaataaatttaaaaattataaaacaggttgctgaaggtataaagcagcatgcaccaaatgcctttgttatatgtattacaaatccattagatgtaatggttatggcttttcaaaaattttctggactatcgcctaacaaagttgttggaatggccggaatattagacacatcgagatttaaactgtttttatctttagagttaaatgtgcctgttagagaaattg

SEQ ID NO: 207361 - DNA, 937 bp, Unknown
  Bacterial polypeptide expressing nucleotide sequence isolated from the Sargasso Sea
atgtctagacctaagatagcattaattggtggtggccaggtagggggtaatattgcccttctttcggctcaaaaagaacttggtgatatagttatagttgatattccagaagctgaaaactttatgaaaggtaaggctttggatatatctcaattacttcctcatgatggttatgattctaaattatctggtacttctaattttgaagatattcaagattcagatgttattgtaattactgctggatttcctagacaacctggcatgaatagagaagatcttcttcaaaaaaaccttgatattatgacaaatgttgcaaatcaggttaaaaaatatgcacctgaagcatttgttattgttgtttcaaacccactagatgctatggtatatgcttttcataaaatttctggttttccaaaaaacaaagttgttggaatggctggagctcttgatagcgcaagatttagagcttttattgctgaagctacaaatttatcatcacaagatgttaactgtatggttcttgggggccatggagatacaatggttcctgttagtaggttggcaacagtaggcggtgtaccattatcatctttattaagtagtgaagaaattattgcaatagaaaatagaacgcgtgttggtggtggagaaattgttaaactttttgggaaaggttctgcattttatgctcctgctcaatctgctgtagaaatgattgaaagttttataagagataaaaaaagagttataccctgtgcctcattatgtgaaggcgaatttgatgtagaaggttatttcattggagtcccaacagtcattggttcaggaggtgttgaaaaaatacttacttttgatcttgataaagatgaaaaaatagctttaagcaatacacttattgaggtaaaaaaaacggttagtgaaactggtttataat

SEQ ID NO: 207362 - DNA, 333 bp, Unknown
  Bacterial polypeptide expressing nucleotide sequence isolated from the Sargasso Sea
gatgaaaaataaaaaaatatcacttattggagctggtcaaattgggggcactttagctcatcttgcagcgatgaaagaattaggtgatgttgttctttttgatttaatggctggtttagctaaagggaaagcattagatatttcccagtcatctgcaattgatggttttaatgtttccttatcaggaacagataattacgaagatacccgagactctgatgtcataatcattaccgctggtgtgccaagaaaaccaggtatgacgagagacgatctcttgggcaccaacttgaaaattatcaaacaagttgctgagggtattcaatctacgtc

SEQ ID NO: 207363 - DNA, 861 bp, Unknown
  Bacterial polypeptide expressing nucleotide sequence isolated from the Sargasso Sea
catgaaaagaaataaaatagctttgataggtggaggtcaaataggaggcacattagcccatcttgctggactgaaagagctgggagatgttgttatatttgatattgtcaaaggtattcctcaaggaaaggcgcttgatcttgccgaagcgtccccagtaagtccttataatgtagatttaaaggggtctaataattattcagctataaaagactcagatgtggttattgtgactgctggagtcccaagaaaacctggaatgagtcgcgatgatttattatctattaacctaaaagtaatgtctgatgttggcgcaggaataaaaaaatattgtcccaaagcatttgttatctgcattactaatccactggatgctatggtttgggctcttcaaaaattttctggggttaagcctaatatgatagtaggaatggcaggtgttttggatagtgctagatttagatattttttatctcaagaattcaatgtatcagttgaagatgtaaccgcatttgtacttggaggtcatggtgactctatggtgcctcttgcaagatattcaaccgtatcaggcattcctttacctgacttggttaaaatgggttggacaactcagaaaaaattaaatgatattatacaaagaactagagatgggggagcggaaatagttggcctacttaagacgggctcagctttttatgcgcctgcagcctcagctatagaaatggctgactcttatctgaaagataagaaaagagttctgccttgtgcggctcatttatctggtgaatataagattaaagatatgtatgttggtgtgcctgtggtgattggagctaaaggagtagaaagaatatggaa

SEQ ID NO: 207364 - DNA, 751 bp, Unknown
  Bacterial polypeptide expressing nucleotide sequence isolated from the Sargasso Sea
aatgagcaagatatctttaattggagcaggccaaattggtggaactctcgcgcacttaattggaataaaagaattagtgaatgaagtagttttatttgacgttgctagtggaattgctaaaggcaaagctcttgatattgctcaatcatcgtcagttgatggttttaatgtgaagttttcaggaactgataattacaaagatatcaaaggttcagatgtaataattattacagctggagtaccaagaaaacctggaatgagcagagatgatcttcttgaaattaatttaaagataattaaacaagttgcagagggaataaaacagaatgctcctgatgcatttgtgatatgcataaccaatccattagatgtaatggtaatggcatttcaaaaattttcaggtctttcgccaaataaagttgttggaatggctggtatattagatagctctagatttaaattatttttgtctgaagaatttaatgttccagtaagagaaatagaggcaatggtaatgggtggacatggtgatacaatggttcctttaccaagatttacaaaagtttccaaaaaaccgttattagacttagtaaaagagggaaaaatttctcaaaaaagattagaggaaataaatcaaagaacaagagatggtggagcagaaattgtaaaatttttagaaaaaggttcagctttctatgcaccagcagcttcaggagttgaaatggctaaagcttatttaaatgagaaaaaa

SEQ ID NO: 207365 - DNA, 607 bp, Unknown
  Bacterial polypeptide expressing nucleotide sequence isolated from the Sargasso Sea
aatggctaagcccgcaaagcgcgttgccgtcaccggcgccgcaggtcaaatcgcttactccctgctattccgcatcgccaatggcgatctgctcggtaaggatcagccggttatcctgcaactgctcgacctgccgcaagcgcaaggcgccgtcaaaggcgtcgtgatggaactggatgattgcgcattcccgctgctgtcgggcgtcgtgatcactgacgacccgaaggttgcgttcaaggatgcagacgttgccctgctcgtcggcgcacgtccgcgttcgaaaggcatggagcgtaaagacctgctgtcggccaacgccgaaatcttcacggttcagggcaaggcgctgaacgaagtcgccagccgcgacgtgaaggtgctggtggtcggcaacccggccaacacgaatgcttacatcgcgatgaagtcggcaccggatctgccgaagaagaacttcaccgccatgctgcgtctggaccacaaccgcgcgctgtcgcaactggccgccaagtcgggcaagccggtcgcttcgatcgaaaagctggctgtgtggggcaaccactcgccgaccatgtacccggattccgcttcgcaaccgcagaag

SEQ ID NO: 207366 - DNA, 352 bp, Unknown
  Bacterial polypeptide expressing nucleotide sequence isolated from the Sargasso Sea
attgatagcgagtgaccggcttgattcaattgtggagcgtacgcgaaaaggaggcgctgaaattgtcggtttactcaagacaggtagcgcctattacgctccggctgcagcaagtgctcaaatggtcgaggccgttgttcgggacaagaaaagattggttccttgtgcggcctattgtgattctgaatacggtgttggtgggtatttcgtaggtgtcccagttatcttgggtggcagtggggtggagaagattgtcgaactctcactcttgcccgatgaaaaagcggcgttgaataaaagtattgaggcagttcgagaacttgttgctgttatggggcgactgacggcctag

SEQ ID NO: 207367 - DNA, 704 bp, Unknown
  Bacterial polypeptide expressing nucleotide sequence isolated from the Sargasso Sea
aatgtcaaaaatttctttaataggtgctggtcaaataggcgggactttagctcatttaattggcttaaaagagcttgtaaatgaggttgtgctgtttgatgttgctagtggaattgccaaaggaaaagccttagatattgcacaatcttcatcagttgatggatttaacgtaaaattttcaggaacagataattatgacgatattaaagattctgatgtaattatcataactgcaggagtaccaagaaagccaggtatgagcagagatgatttacttggtattaatttaaaaattattaagcaggttgcagaaggaataaaagtaaatgcacctaacgctttcgttatatgtattacaaatccattagatgtaatggtaatggcatttcaaaaatattcaggacttccagcaaataaagtagttgggatggctggtattttagatagttcacgttttaaactttttttatctgaggaattaaatgtacctgtaagagaaattgatgcaatggtaatgggtgggcatggagacacaatggtacctcttccaagatttactaaggtctctggaaaacctttaatggatttattaaaggatggaaaaatttctgaagaaaaattagagagtattaatcaacgaacaagagatggtggtgctgagattgttaaatattggaaaagggatctgcattttatgcaccagg

SEQ ID NO: 207368 - DNA, 964 bp, Unknown
  Bacterial polypeptide expressing nucleotide sequence isolated from the Sargasso Sea
tatgaaaaaaatatctttgattggtgcaggtcagataggtggaactttagctcatttaattggtttaaaagagttggtagatgaggttgttttgtttgatgttgcaagtggaatagcaaaaggaaaagctttagatatcgctcaatcatcctcagttgatggatttaatgttaagttttcaggaacagacaattatgaagatataaaaaaatcagatgtaataattattactgcaggcgttccaagaaaaccaggtatgagcagagatgatctactaggaataaacttaaaaataataaaacaagttgctgaaggaattaaaactcatgctcctaacgcttttgtaatatgtattaccaatcctttagatgtcatggtaatggcttttcaaaaatattcaggtttaccaaccaaaaaagtagttggtatggcaggagttttggatacctcaagatttaaacttttcttatctttagagttaaatgtaccagtaaaggaaatagaggcaatggtaatgggaggacatggagatactatggttcctttaccaagatttacaaaagtttcaggaaaaccattattagacttagttaaagaaggaaaaatttcctcagaaaaattagaaagcataaaccagagaacaagagatggtggcgcagaaatagtaaagtatttagaaaaaggatccgcattttatgctccagctgcatcaggagttgaaatggcagaggcatatttaaaagatcaaaaaaaacttttaccttgcgcagtatatcttcacggtgaatatggaattaataatgtttatgcgggtgtacccgtgataataggaaaaaatgggatagaaaaaattgaagaaattgatttagatgaaaaagaaaaatcagaatttaatcattcggtagaagcggtaataaaattgtgggaagcagcttcaaaaatcgatcctggtctaaataattag

SEQ ID NO: 207369 - DNA, 500 bp, Unknown
  Bacterial polypeptide expressing nucleotide sequence isolated from the Sargasso Sea
ggctggagctcttgatagcgcaagatttagagcttttattgctgaagctacaaatttatcatcacaagatgttaactgtatggttcttgggggccatggagatacaatggttcctgttagtaggttggcaacagtaggcggtgtaccattatcatctttattaagtagtgaagaaattattgcaatagaaaatagaacgcgtgttggtggtggagaaattgttaaactttttgggaaaggttctgcattttatgctcctgctcaatctgctgtagaaatgattgaaagttttataagagataaaaaaagagttataccctgtgcctcattatgtgaaggcgaatttgatgtagaaggttatttcattggagtcccaacagtcattggttcaggaggtgttgaaaaaatacttacttttgatcttgatgaagatgaaaaaacagctttaagcaatacacttattgaggtaaaaaaaacggttagtgaaactggtttataat

SEQ ID NO: 207370 - DNA, 652 bp, Unknown
  Bacterial polypeptide expressing nucleotide sequence isolated from the Sargasso Sea
atgagcaaaatatctctaataggtgctggacaaataggcggaactttagctcatttaattggaataaaagagttagtagatgaggtcgttctatttgatgttgcaagcggcatagcaaaaggtaaagctttagatatagcacaatcttcatcggtagatggatttaatgtaaaattcagtggaacagataattatgaagatattaaaaattctgatgtaattataattactgcaggtgttcctagaaaacccggaatgagcagagatgatttgctaggaataaatctaaaaattattaaacaggttgcccagggtattaaaaagtactcacctagcgcatttgtgatttgtataacaaatccattggatgtaatggttatggctttacaaaaatattcaggattgccatcaaataaagtgattggcatggcaggtatattagatagttccagatttaagttatttttatctttagagcttagtgttcaagttaaagacatagaaactatggttatgggtggtcatggagatacaatggttcctttgccaagatttacaaaagtttcaggaaaacctttgctagatttagttaaggaaggtaaaatttcagaagaaagattagaaagtatcaaccaaaggaccagagatggtg

SEQ ID NO: 207371 - DNA, 940 bp, Unknown
  Bacterial polypeptide expressing nucleotide sequence isolated from the Sargasso Sea
tatgaaagtagccgtgttaggtgctgccggtggtattggtcaggcgctgtctttattgttgaaaacacaattgccagcaggttcagatttagcgctatacgacgttgcgccagttgttcctggtgttgccgttgatttgagccacatccccactgcggtaaaagtaaccggtcacggtaaagatgacctagctgatgcactaactggagcagacgttgttctaattccagcgggtatgcctcgtaagccaggtatggatcgttctgatctgttcaacatcaacgccggcattgttaaaaacctaatcgaaggtgtagctgataactgcccgaacgcgtgtgttggtatcatcactaacccagttaacactactgttgctattgcagctgaaacgcttaaagcaaaaggcgtttacgacaagaacaagcttttcggtgtaacgacactagacgttatccgtgctgaaacgtttgttgctgaacttaaaggtgtagacgtatcttctgtgcacgtaccggtaatcggtggtcactctggtacaactatccttcctctactttcacaagttgaaggcgtagagttcacagacgaagaagttgctagcctaactactcgtatccaaaacgcgggtactgaagttgttgaagctaaagcgggcggcggttctgcaaccctatcaatgggtcaagcagcggcacgcttctgtctatctctagttgcagcaatgcaaggtgagaacgttgttgagtacacttatgtacaaactgacgacagcgacgacgcagcattctttgcacatccagttcgcctaggcgcaaacggtgttgaagaaatcttgccatacggcgagctaagcgcatttgaagaaaaagcgaaaaacgacatgcttgaaggcctacgtggcgacatcaagctaggcgtagacttcgtaaacggctaa

SEQ ID NO: 207372 - DNA, 616 bp, Unknown
  Bacterial polypeptide expressing nucleotide sequence isolated from the Sargasso Sea
tatgaaaaaaatatctttgattggcgcaggccaaataggtggaactttagctcatttaattggtttaaaagaattagtagatgaggtcgttttgtttgatgttgcaagtggaatagcaaaaggaaaagctttagatatcgctcaatcatcctcagttgatggatttaatgttaagttttcaggaacagacaattatgaagatataaaaaactcagatgtaataattattactgcgggtgttccaagaaaaccaggtatgagcagagatgatctactaggaataaacttaaaaataataaaacaagttgctgaaggaattaaaacccatgctcctaacgcttttgtaatatgtattaccaatcctttagatgtcatggtaatggcttttcaaaaattttcaggtttgccaactaataaagtagttggtatggcaggaattttagatacctcaagatttaaacttttcttatctttagaattaaatgttccagtaaaggaaatagaggcaatggtaatgggaggacatggagatactatggttcctctcccaagatttacaaaagtttcaggaaaaccattattagacttagttaaagaaggaaaaattcctcagaaa

SEQ ID NO: 207373 - DNA, 895 bp, Unknown
  Bacterial polypeptide expressing nucleotide sequence isolated from the Sargasso Sea
atgagtaaaatttctttaataggggcaggtcaaattggaggaactttagctcatttaattggtttaaaagaactggtggatgaagttgttttatttgatgttgtaagtggagtagcaaagggaaaaggtttagatatagcccaatcttcctcggtagacggatttaatgtaaaattttcaggaacagataagtatgaagatataaaaggatcagatgttattataattacagcaggtgttcctagaaaacctggaatgagtagagacgatctattaggaattaatttaaaaattattaaacaagttgcagaaggaataaaaaataatgcgcctaatgcctttgtaatttgtattacaaatccattggatgtaatggtaatggcatttcaaaaatattcaggactccccgttcataaggttgtagggatggcaggtatattggatagttcaagatttaaactatttttatctgaagaattaaatgtgcctgtaaaagaaatcgatgctatggtaatgggtggacatggagatacaatggtacctcttccacgatttacaaaagtctctggtcaaccattgatggagttagtgaaagagggaaagatttctgaggaaaaattagagagtattaatcagcgaactagagatggtggtgcagaaattgtaaaatatttagaaaaaggatcagcattttatgcacctgcagcatctggagttgagatggctgaagcatttttaaaagatcaaaaaaaacttttaccatgtgcagcgtatttacatggggagtatggaattaataatgtatatgcaggcgttcctgttatcattggaaatgaaggtgttgaaaaaattgaggaaatcgaccttaatgaaaatgaaaaaacagagtttaata

SEQ ID NO: 207374 - DNA, 936 bp, Unknown
  Bacterial polypeptide expressing nucleotide sequence isolated from the Sargasso Sea
aaattggcggtactctagcgcatttaattagtattaaagaaatagttgatgaagtagttttgtttgatgttgcaagcggattagcgaaaggaaaagctttagatattgcacaatcttcatcagttgatggattcaatgtaaagttttcaggaactgataattatgaagatataaaaaactcagatgtaataattattactgctggcgtaccaagaaaaccaggtatgagcagagatgatttattaggaataaatttaaaaataattaaacaagtagcagaaggagtaaaaactcatgcgcctaatgcctttgtaatatgcattaccaatcctttggatgtaatggtgatggctttccaaaaattttcaggtttaccaacaaaaaaagttgttggtatggctggtatattagatacttcaagatttaaacttttcttatctcttgaattaaatgttccagtaaatgaaattgatgcaatggtaatgggaggacatggggatactatggtccctttgccaagatttacaaaagtttctggaaaaccattattggatttagttaaagaaggaaaaatttcagaggaaagattagagagtataaatcaaagaacaagagatggaggagctgaaatagtaaaatatttagaaaaaggatctgctttttatgcccctgcagcttcaggagttgaaatggcagaggcatatttaaaagatcaaaaaaaacttttaccttgcgctgcatatcttcatggcgaatacggagtcaataatgtttatgctggagtgccagtaattattggaaaagacggaatagaaaaaattgaagaaattgatttagatgaaaaagaaaaattagaatttaataattcagttgaagcagtaataaaattatgggaagcagcttcaaaaattgatcctagtttaaataatagttgat

SEQ ID NO: 207375 - DNA, 731 bp, Unknown
  Bacterial polypeptide expressing nucleotide sequence isolated from the Sargasso Sea
aatgagcaagatatctttaattggagcaggccaaattggtggaactctagcacacttaattggaataaaagaattagttaacgaagtagttttatttgatgtagctagtggaatagctaaaggtaaagccttagatattgctcaatcatcatcagttgacggttttaatgtgaagttttcaggaactgatgattataaagatattaaaggttcagatgtaataattatcacagcaggtgtaccaagaaaacctggaatgagtagagatgatctacttggaattaacttaaaaataattaaacaagttgctgaaggaataaaacaaaatgctccagatgcatttgtaatatgtattactaatcctctagatgtaatggtaatggcatttcaaaaattttcaggtctttcaccaaacaaagttgtaggaatggctggcatattagatagctcaagatttaaactatttttgtctgaagaatttaatattcctgtaagagatatagaggcaatggtaatgggtggacacggtgacacaatggtccccttgccaagatttacaaaagtttctggaaaacccttgttagatttagttaaagaaggaaaaatttcccaaagaagattggaagaaataaatcaaagaacaagagatggtggagctgaaattgtaaaatttttggaaaaaggatcagctttttatgcaccagcagcttcaggggttgagatggctaaag

SEQ ID NO: 207376 - DNA, 754 bp, Unknown
  Bacterial polypeptide expressing nucleotide sequence isolated from the Sargasso Sea
aatgagcaagatatctttaataggagctggtcaaataggtggaactttagcacatctaatcggaataaaagaattagttgaagaagttgtgttgtttgatgtagcaagtggtatagcaaaaggaaaagctttggatattgcacaatcttcatctgtagatggtttcaatgtcaaactaagcggaaccgacaattatgaggatattaaaaattctgatgtaatcataattactgctggagtgcctagaaaacctggtatgagtagagatgacttgttaggaattaatttaaaaataataaaacaagttgcacaaggcataaaaaaaaattcaccagatgcctttgtaatctgcataacaaacccattagatgtaatggtgatggcattacaaaaatattctggattaccagcgaataaagtagttggtatggccggtatattagatagctctagatttaaattatttttatctttagaacttaatgttcctgtaaaagatatagaggcaatggttatgggtggacatggagataccatggttcctcttccaaggtttacaaaagtttcaggtaaaccattattagatttagttaaagaaggaaaaatatctgaagaaagattagaaagtatcaatcaaagaaccagggacggtggagcggagatagtaaaattcctagaaaagggctcagcattttatgcaccagcagcatctggtacccaaatggctgaagcttatttaaataactcaaaacaa

SEQ ID NO: 207377 - DNA, 967 bp, Unknown
  Bacterial polypeptide expressing nucleotide sequence isolated from the Sargasso Sea
atggctaaaaaaatttctttaattggagcaggtcaaataggaggaactcttgcacatttaatcggtactaaagagttagtaaatgaagttgttttatttgatattgcatgtggaattgcaaagggaaaagctttagatatagcgcaatcttcatcagttgacggttttaatgtaaaattttctggtacggacgattataaagatattaaagattcagatgtaatcattattacagcaggagtaccaagaaaaccgggcatgagtagagatgatctactaggtataaatttaaaaattatcaaacaagtagctaaaggaataaaagaaaatgctccaaacgcatttataatatgcattactaatccattagacgtcatggtgatggctcttcaaaaattctctggtcttcctgctaataaaattgttggtatggcaggaattttggatagttcacgatttaaactatttctatcattagaactaaatgttcctgtaaaagaaatagatgcaatggtaatgggtggccatggagatactatggttccaatgccaagatttacaaaagtttctggaaaacctttgctagatttaattaaagaaggaaaaataaccaaagaaagattagaagaaataaatcaaaggaccagggatggtggtgcagaaattgttaagtatttagaaaaaggttcagcattttacgctccagcagcatcgggtgttcaaatggcagaagcatatttaaataataaaaaaaaactactaccatgtgcagtacaattaaatggtgaatatggtgtcaaaaatgtttatgcgggtgtaccagtaattgtgggtaaagacggtgttgaaaaaatagagcaaattgatctagatgagaaagaaaaaaaagattttatgcactctatagatgcagtaaaggctctttgggaagctgcatgtaaaatcgatcctgatttagaaaaataat

SEQ ID NO: 207378 - DNA, 937 bp, Unknown
  Bacterial polypeptide expressing nucleotide sequence isolated from the Sargasso Sea
tatgggacgtaaaaaaatcacattagttggaggaggccagattggtggaaatctagcactattagctgctcaaaaagaattaggtgatgtggttatctttgatataccccaagctgaaggaatggttaaagggaaagcactggatctcatgcaacttcgcccacatgatggccatgattctgatattgtgggtacatctgattggaatgatgtgaaaaattccgatgtgttcatcataactgccggtattccaagaaaacctggcatgaatagagaagacctgcttgggattaatttgggtattatgaaagatgttgcaagtaatataaaagataaagcgcccaatgcatttgttattgttatctcgaaccctcttgatgctatggtatatgcttttcataaggtttctggattccctaaaaatcaggtagtaggtatggctggagcacttgacagtgcccgttttcgtacatttattgcgatggagaccggttactcagtacaggatgtaacatgcatggttcttggtggacatggcgataccatggtgcctatcagtaggctcgccactgtgggtggtgtgcctgttactgatctgattacagataaaaggctgaaagaaatcgaagataggacccgagtggctggtggcgaaattgtaaaattatttggtaacggatctgcattttatgcaccagcccaatctgcaatagagatggccgaatcttatataagagataaaaaaagagtcatcccatgcgcatctctgtgtgaaggtgaatttggtattgatggttattttattggtgtgccgactgttattggctcagatggtgttgaaaaaatactagaattcacactaaatgataatgaaaaaactgaattggataggaccctcgaagcggtgaaaaaaactgtagctgagacaggcctctaa

SEQ ID NO: 207379 - DNA, 961 bp, Unknown
  Bacterial polypeptide expressing nucleotide sequence isolated from the Sargasso Sea
atgactaaaaaaatatctttgataggagcaggtcaaattggaggtacactagctcatcttattgccctaaaagaacttggagatgtagttttgtttgatgtggcggaaggacttgcaaaaggtaaggcccttgatatagcacaatcatcaggtgtaagcggttttaatatagatcttaaaggaacaagcaattatgaagatactaaaaattctgatgttataattataactgccgggatacctagaaaaccaggaatgaccagagatgatttattaggcactaatctgaaaattataaagcaagtagctgatggtataagaaaaaattctccagaagcttttgtaatctgcattactaatcctttggatgtaattgtaatggctttacaaaaatattcagggttatcgacgaaaaagattgttggaatggcaggaattttagatacaagcagatttaaatattttttgtcaaaagagatgaaaattccaataggtagtattaatagcttggttcttggtggacacggtgactctatggttcctatgcagaatcatacaattgtgaatgacaagtcactttcagatctggttagagaaaaaaaaatatcagaagataaattaaaatctattatagaaagaacaaaaaatggtggcggtgaaattgggaaacttttagcaaaaggatctgccttttatgctcctgctgcatccggtgtccaaatggctgagagctacttaaaagataaaaaagaaaagctaccttgtgcagcatatttaaacggcgaatatggagtaaaaggtttatatgctggtgttcccgtgattattggaaagagtggagtggaaaaaataattgagcttgatttaaattctgaagaaaagaagaattttgaagtttctataaaagcagtacgagaattattagaaagtgcaaaaaaaattgatccagaacttaaataaa

SEQ ID NO: 207380 - DNA, 731 bp, Unknown
  Bacterial polypeptide expressing nucleotide sequence isolated from the Sargasso Sea
aggagttccaaggaaacctggaatgagcagagatgacctgcttggtataaacttaaaaataatgaaacaagtcgcagaaggtgtaaaacaaaatgcaccagatgcatttgttatttgtataacgaatcctttagacgttatggtaatggcttttcaaaagttttcaggactgccaactaataaggttgttgggatggcaggtattcttgatagttcaagatttaaattatttctatcacttgagttaaatattcccgtaaaagaaatagatgctatggtaatgggtggtcatggtgatactatggttcccctgcctagatttaccaaagtttctggaaaacctttattagatttggttaaaagtggaaagatttcaatggaaaaacttgaagccattaatcaaagaacaagagatggaggtgccgagatagtaaaatttttagaaaaaggatcagctttttatgcgccagcagcatctggtgtggagatggcacaggcatttttaaaggatgaaaaaaaaatgttaccatgtgctgcctttttaaatggtgaatatggtataaaaaatatttatgctggagttccaattatagttggaaaaaaaggagttgaaaaaatcgaagttattaatttagatgaaaaagaaaagtcagaatttatcaattctgtgaatgcagtaaaaaaactttgggaagctgcatcaaaaattgaccctgacttagctaaataat

SEQ ID NO: 207381 - DNA, 831 bp, Unknown
  Bacterial polypeptide expressing nucleotide sequence isolated from the Sargasso Sea
tagatattgcacaatcatcttcagtagatggatttaatgttaaatttagtgggactgacaattatgaagatattaaaaattctgatgtaattataattacagctggggtacctagaaaacctggtatgagcagagacgatctattagggataaatttgaaaattattaaagaggttgctcatggtattaaacagtattctccaaatgcatttgtaatctgtataacaaatccactagatgtaatggttatggcattacaaaagtattcaggtttgccagcgaaaaaagttgttggtatggctggtatactagacagttcaagatttaaattatttttatctcaagaacttaatgtccctgtaaaagaaatagaggctatggttatgggtgggcacggagattctatggtacctcttccaagatttacaaatgtttctggaaaacctttattagatttagtcaaagaagagaaaatatcccaagaaagattagaaagcattaaccaaagaactagagatggaggtgcagagattgtaaaatttcttgagaaaggttcagcattttatgcaccagccgcatcaggcgttcaaatggctgaatcatatttaaacaatacaaagcaaatattgccatgtgctgtttttttaagtggtcagtatggttttaaagatatttacgcaggagtaccagttgtcttaggtaaagatggtgtggagaaaataaaagaaattaatctcgatgataaagaaaaaaaagaattcaataattctatcgaagctgtaaaaaaactttgggaggcagcagctaatattgatccagatttaaagtaaa

SEQ ID NO: 207382 - DNA, 912 bp, Unknown
  Bacterial polypeptide expressing nucleotide sequence isolated from the Sargasso Sea
tatgagaaaaatatctttgattggttctgggcaaattggaggaactttagctcatttaattggacttaaagaattggcaaatgaagttgtgatgtttgatgttgctaatggtatagctaaaggtaaggcgttagacattgctcaatcatcatctgtagatggatttaatgttaatttttctggcacagataattatgaagatattaaaaattcagatgtaataataattaccgctggagttcctagaaaaccaggaatgagtagagacgatttattaggaatcaatcttaaaataataaagcaggtcgctgaaggaataaaaactcactctccagatgcttttgtaatttgtataacaaatccccttgatgttatggttatggcatttcaaaagtattcaggtttaccaacaaataaagtagttggtatggcaggaattttagacagttcaaggtttaagctatttttgtcacgagagttaaatgttcctgttaaagagattgatgcaattgtaatgggaggacatggagatacaatggtaccattaccaagatttacaaaagtgtcaaaaaaacctttattagatcttgtaaaagaaggaaaaatatcttcagaaaaattagaaagtataaatcagagaacaagagatggaggtgctgaaatagttaagtatttagagaaaggctcagcattttatgcaccagcagcttcaggagttgaaatggctgcagcatatttaaatgatgaaaaaaaacttttaccttgtgctgcatatatgaatggtgagtatggagttgaaaaaatttatgctggtgttccagtaattataggaaaaaatgggattgaaaaaattgaagaagtagaattggacgataaagaaaaagtagaatttaatcattctatagaagccgt

SEQ ID NO: 207383 - DNA, 964 bp, Unknown
  Bacterial polypeptide expressing nucleotide sequence isolated from the Sargasso Sea
aatgaaaaaaatatctttaattggtgcaggacaaattggtggaactcttgcacatttaataggcacaaaagaactggttaatgaagttgttttatttgatgtagctagtggaattgcaaaaggaaaagcattagatattgcacaatcttcctcagtagacggatttaatgtaaaattttcaggtactgataattataaggatatcaaagactctaatgtaattataattacagcaggcgttcctcgaaaacctggaatgagtagagacgatcttcttggaattaatttaaagattattaaacaagttgcagagggcgttaaaaaaaatgcgccaaatgcttttgtaatttgtattacaaatcctttagatgtgatggtaatggcatttcaaaaattttcaggcctaccgtcaaataaagttattggtatggcaggtattttagatagctcaagatttaagttgtttttgtctttggaattaaatgtgccagttaaagaaattgatgcaatagttatgggtggtcatggagatacaatggttcctatgccaaggtttacaaaaattgcaggcaaacctttgttagatattgttaaggaaggaaaaatttctttagaaagagttgaagaaataaatcagagaactagagatggaggtgctgagatagtaaaatatttagaaaaaggatcagcattttatgcacctgcagcagcaggtgttcaaatggcagaggcttttttaaaggatgaaaaaaaattattaccgtgtgcagcaaaattaaatggagaatatggtgttaaaaatgtatatgcgggagttcctgttattgtaggaaaaaatggcgtagaaaaaattgaagaagttgatctagatgaaaaagaaaaaaaagaatttatacattcaatagatgccgtaaaagctctgtgggaagctgcatccaaaatagatcctgatttatcaaaataa

SEQ ID NO: 207384 - DNA, 877 bp, Unknown
  Bacterial polypeptide expressing nucleotide sequence isolated from the Sargasso Sea
aatgacaaaaaaaaatagtaaaatatcattaattggtgcaggtcaaattggaggaacattagctcacttaataggaacaaaagaattggttgatgaagtagttttattcgatgtagcaagtggaattgcaaaaggaaaagctttggatattgcccagtcctcatctgtagatggatttaatgtgaaattttctgggaccgataattacaaagatattgagggatcagatgtagtaataattactgctggagttccaagaaaacctggtatgagtagagatgatttattaggtattaatttaaagataattaaacaagttgcaaatggagtaaaagaaaatgctcctgatgcctttgtaatttgtataactaatccacttgatgtaatggtaatggcattccaaaaattttcaggtttaccatctaacaaagttgttggaatggccggtattttagatagctcgagattcaaattatttttatctttagaatttgatgtaccagtaaaagagatagacgcgatggttatgggaggacatggagatacaatggttcctcttccaagatttaccaaggtatctggaaaacctttatcagatttggttaatgacggaaaaatttcaaaagaaagattagaagaaataaatcaacgaactcgagatggtggagctgaaatagtaaaatttttagaaaagggttctgccttttatgcacctgcagcctctggaattgaaatggctaaagcttatctcaatgatgaaaaaaaaatgcttccgtgtgcagcccaattaaatggtgagtatggaataaaagatatttatgctggtgtgcccattatcattggaaaaagtggagttgaaaaaatagaagaaaattaa

SEQ ID NO: 207385 - DNA, 961 bp, Unknown
  Bacterial polypeptide expressing nucleotide sequence isolated from the Sargasso Sea
atgaaaagaaataaaattgcattgattggttcaggtcagattggaggtacgttagctcatatagtaggactaaaagaattgggagatattgttttatttgatatagctgatggaatacctcagggtaaggcactagatattgctgaaagttctcctataagtacctttgatactaatataattggtactagttcttacgatgatattaaagattcagatgtttgtattgtaacagctggagtaccacgcaaaccgggaatgagtagagatgatttacttagtattaatcttagagtaatgaaatctgttggtgatggtatcaaaaaatatgctccaaattcttttgttatttgcatcacaaatccgttagatgcaatggtttgggctttacaaaaatattcaggattaccaccagaaaatgttgtaggtatggcaggcgttttagatagtggaagattttcatattttcttgctgaggagtttaatgtatcagtcaaagatgttcaaacttttgtacttggtggtcatggagatacaatggtccctttagttaggtattctacagttggaggcattccaattcctgacttagttaaaatggggtggtcttcccaaaagaagatagatcaaatcgtacaaagaactagagatggaggtgcggaaattgtagcattactaaaaactggttctgctttctatgcaccagctgcctcagcaattaacatggcagagtcgtacttgagggatcaaaaaagaattataccatgtgcagcaaatctcagtggaaagtatggatttaaggatatttatgcaggtgttcctacaattattggtaataaaggagtagagaaaataattgaaataaatctaaatgaaatagagaaactaaatttttcaaaatctatagagtctgttaaaaatctgattgatgcctgtaaaaaaattgatcaggacctctaaa

SEQ ID NO: 207386 - DNA, 958 bp, Unknown
  Bacterial polypeptide expressing nucleotide sequence isolated from the Sargasso Sea
atgagaaaaaaaatttctttaataggagcaggacaaataggaggaactcttgcacacctcattgctctaaaagaattagctgatgttgttttgtttgatgttgcagagggaattgcaaaaggaaaagccttggacattgcacaatcatctggtgtcagcggtttcaactcaagtataattggaacgaataattatgaagatattagaaattctgatgtaattattattacagctggagttcccaggaaaccaggtatgagcagggacgatttattgggtattaatctcaaaattataaaacaagtagcagaaggaataaaaaaaaattctccaaattcttttataatttgtataactaatcccttagatgtaattgttatggcactccaaaaatactcgagtctaccgacatctaagatagttggtatggcgggaatattagatacatctagatttaaatactttctttcacaagaattaaaaatttcaattaataaaattaactctttagtattaggcggccatggagatacaatggttccaacacttaaccatactataattgatggaaaatctttaacagaacttgtaaaaattaaaaaaatctcaccagaaaaattggactcaataattgacaggactagaaaagggggagcagaaatagttaaattattagaaaagggatcagcattttacgctccagctgcttcaggagtcgatatggccgaatcttatattaaagatttaaaaaaaacattaccatgcgcagcatatctaaatggagaatataatgttaagggactatatgttggagtcccagttataattggcaaaaatggggtagaaaaagttttggagctagaattaaatgatcaagaaaaaaataactttgaaaaatctgttaaagctgtagaagaattatttaattcagccaaaaaaatcgatccttctttataag

SEQ ID NO: 207387 - DNA, 335 bp, Unknown
  Bacterial polypeptide expressing nucleotide sequence isolated from the Sargasso Sea
caatcaaagaacaagagatggtggaggtgaaattgtaaaatttttggaaaaaggttctgcatattatgcgccagctgcttcgggagtacaaatggccgaagcatttttaggtgataagaaactacagttaccttgtgccgcactattagaaggtcaatatggttttaatggaatttatgcaggtgttccagttgttattggaaaaaatggagtagaaaaaatagtcgaaattcaacttgatgaaaaagaaaaggctgaatttattaattctgtgaatgccgtaaataagctttgggaggctgcagtaaaaattgacccaagcttgaaaaagtaat

SEQ ID NO: 207388 - DNA, 562 bp, Unknown
  Bacterial polypeptide expressing nucleotide sequence isolated from the Sargasso Sea
atgagttatgacaaaaaaatcagccttattggagctggaaatattggaacaattctagcttttagtctctctagaaagagattaggaaacataacacttattgataaagtaaaaggtttagctgaaggaaaatgccttgacttatctcaaagtctttcagccgaaaacttaaacacgaaaatcgttggtactgatgacatatctaaaatcaaagatagtgatgtaattatcattactgctggtattccaagaaaaccagggatgtctagagatgatttagttgaaaccaatttttcaataatgacagaattaggagatgctattaaagaatattctccaagtgcctttgtaatttgtgttactaatccacttgacgctatggtttggtctcttaaagaaattacaggaattaataaacgaatgattgttggtatggctggaatattagactcagcacgatttaagttttttctgtccaatgagttatcagtttcaactgattctatacaaacaattgttttaggtggacatggagattcaatggtgccgctattaagattaa

SEQ ID NO: 207389 - DNA, 961 bp, Unknown
  Bacterial polypeptide expressing nucleotide sequence isolated from the Sargasso Sea
atgagcaagatatctttaataggtgctgggcaaataggtggaactttagctcacctgattggaatcaaagaactagtcagtgaggtagttttgtttgatgttgcaagtggtattgcaaagggaaaggcactagatattgctcaatcatcctcagtagatggttttaatgtaaaattttcaggcacagacaaatataatgatattaaaggatcagatgtaattatcataacagcgggtgtgccaagaaaacctggaatgagtagagatgatttacttggtattaatttaaaaataatcaaacaagttgctgaaggagtaaaacaaaatgctccagatgcatttgtaatatgtattactaatcccttagatgtaatggtaatggcatttcaaaaattctcaggtttattacctagtaaagtggttgggatggctggtatattagatagctcaaggtttaaattatttttgtccgaagaatttaatactccagtaagagaaatagaagcaatggtaatgggtggccatggagatacaatggttcccttaccaagatttactaaagtttcacaaaaacctttattagatctagttaaggaagggaaaatctctaaagaaagattagaggagataaatcaaagaactagggacggtggagcagaaatagtcaaatttttagaaaaaggctctgctttttatgcccctgcagcgtcaggtgttgagatggcaaaagcatatttaaatgatgaaaaaaaattacttccttgcgcagcttatcttaatggagaatatggaataaaagacatttatgctggtgtaccaataatcattggtaaaaatggagttgaaaaaattgaggaaataaagttagatgaaaaagaaaaatctgaatttcttcattcaattgatgcagtaaaaaagctttgggaagcagcttctaaaatagatccagatttagcttaaa

SEQ ID NO: 207390 - DNA, 967 bp, Unknown
  Bacterial polypeptide expressing nucleotide sequence isolated from the Sargasso Sea
atgaaaaaaaaaatttccttaattggtgcaggacaaataggtggcacacttgctcatttaattggaacaaaagaagtagtaaacgaagtagttctttttgatgtagctagtggaattgctaaaggaaaagctttagacattgcccaatcgtcatctgttgatggttttaatgtaaaattttcaggaacagataattatgaagatattaaagactctgatgttattataattaccgcaggtgttccaagaaaacctggtatgagcagagacgatctattaggtattaatttaaaaattattaaactagttgctgaaggagtgaaaaaaaatgcacctaatgcatttgtaatatgtattacaaatccattagatgtaatggtaatggcatttcaaaaattttcaggtctaccatctaacaaagtggttggaatggctggaattttagatagttcaagatttaaattatttttatcattagagtttaatgttccagttagagaaatagaagcaatggtcatgggaggtcacggagatacaatggttcctttgccaagatttaccaaagtttctggtaaacctttattagatttagttaaagaaggaaaaatatctcagaaaagattagaagaaataaatcaaagaactagagatggtggagcagaaattgttaaatttttagaaaaaggttcagcattttatgccccagcagcttcaggagtcgaaatggcaaaagcttatttaaatgatgaaaaaaagatggttccttgcgctgcctttttaaatggagagtatggaataaagaatatttacgcaggagttccaattataattggtaaaaatggggtagaaaaaattgaagaaatagatttagatgagaaagaaaaattggaatttatgaattctgttgatgcagttaaaaggctttgggaggcagcctctaaaattgatcctgatttagctaaataat

SEQ ID NO: 207391 - DNA, 527 bp, Unknown
  Bacterial polypeptide expressing nucleotide sequence isolated from the Sargasso Sea
tattttggatagttctaggtttaaattgtttttatcattagaattaaatgtgcccgtaaaggaaatagaggcaatggttatgggcggacatggagataccatggttcctcttccaaggtttacaaaagttttaggaaaacctttattggatttagtcaaagagggaaaaatatcagaggaaagactagaaagcattaatcaaagaactagagatggaggtgccgagatagtaaaatatttagaaaaaggctcagccttctacgcgccagcagcatccggtgttcaaatggcagaagcatatttaaagaactcaaaacaaacacttccatgtgcagtatttttgaatggagaatatggttttaagaatgtttatgcgggtgcaccagttattataggtaaaaatggagttgaaaaaattcaagaaatagaacttgatgaaaaagagagaaacgagttcaatcactctgtagaatcagtaaaaaaactctggaatgtagcaaccactattgacccagatttaaagtaaa

SEQ ID NO: 207392 - DNA, 964 bp, Unknown
  Bacterial polypeptide expressing nucleotide sequence isolated from the Sargasso Sea
aatgacaaaaatatctttgattggtgcaggccaaattggtggaactctggctcacttaattggtacaaaagaattagtaaatgaagtagtgttatttgatgtagcaagcggtattgcaaaaggaaaagctttagatatagcccaatcttcatctgtagatggttttaatgttaaattttcaggtactgataattacaaagatattaaggactcagatgtaataattattactgcaggtgtacctagaaaaccaggaatgagtagagatgatttacttggaataaatttaaaaattattaaacaagttgctgaaggagttagacaaaatgccccaaacgcttttgttatatgtattactaatccattagacgtaatggttatggcatttcaaaaattttctggtttaccagctaataaagttgtgggcatggcaggcatattggatagttctagatttaaattatttttatctctagaactaaacgtgccagtaaaagagattgaggcgatggtgatgggtggacatggtgatacaatggtccctatgccaagatttacaaaagtctctggccgacctttacttgatttagtaaaagatggaaaaatatctcaaaaaagacttgaagaaataaatcaacgaacaagagatgggggagctgagatagttaagtttttagagaaaggttcagcgttctatgctcctgcagcatcaggtgttcaaatggctgaagcatatttaaacgatcaaaaaaaattattgccatgtgcggttcaattaaatggagagtacagtgtaaaaaatgtttatgctggagttcctgttatcattggaaaaagtggtgttgaaaaaattgaggaagtcagtttagatgataaagagaaaaaagagtttatgcattcaatagatgcagtaaaagctctttgggaagctgcatcaaaaatagatcctgatctttccaaataa

SEQ ID NO: 207393 - DNA, 937 bp, Unknown
  Bacterial polypeptide expressing nucleotide sequence isolated from the Sargasso Sea
aatgagaagaaaaaaaatatctcttattggaggaggtcaaattggtggaaacttagcgctaattgcatcacaaaaagaattgggggatgttatcatatttgatatcccgcagtcagaaggtatggtaaagggaaaagctttggatattatgcaattgcaacctcatgatggatatgatacagatgttatcggcacctcagactataatgatataaaagactctgatgtaataattatcactgctggaataccaaggaaacctggaatggaccgtgaagatttaatgtcaataaaccttggaattatgaaagatgttgccaccaatgtaaagaaatatgccccagaatcatttgtcatagttatttctaatcctttagatgcaatggtatatgcatttcacaaagtttctgggtttaaaaagaacaaagtaattggtatggctggcgcattagactctggaagattcagggcatttattgcaatggaaactggatattccgtgcaagatgttacctgtatggttttaggaggtcatggagacagtatggtccctataacccgtttggcaacaattggtggagtgcctgttacagatcttatatccccagatagattaaaagaaatagaagatagaactagatttgctggcggagagcttgtaaagctttttggtaacggctcagctttctatgccccagcgcaatgtgcaatagaaatggcagagtcatttttaaaagacaaaaaaagagtaataccatgtgctgcattatgcgaaggtgaatttgggattcatggttattttattggtgttccaactgtaattggatcaagcggaattgaaaagatcattgaattcaatttaacagatgatgaaaaaaacgctcttgagaatacgttaaacgcggttaaaaaaacggttagtgaaacgaaattatag

SEQ ID NO: 207394 - DNA, 841 bp, Unknown
  Bacterial polypeptide expressing nucleotide sequence isolated from the Sargasso Sea
catgagaaagaaaattgctctcgtcggagctggaaatataggaggaaccctagcgcatttgattggattaaaagagttaggtgatgttgttcttatagatattgcagatggtatgacaaaaggaaaagcccttgatttagcccaatcttcttctattgaaagttttaattcaaacctaagtggctcttcaaaataccgtgatatgaaagatgctgatgttgtaattgtaacagcaggctttcaaagacggcctggaatgacgcgagatgatttagttgaaaaaaattcaacaattattcaaacagtaggaaaaggaataaaaatgaattgccctaaagcatttgttatttgtataactaatccacttgatgccatggtaagtgttttacaaaaagctgctggcttaaaaactaatatgtgtgttggtatggcaggcattcttgatagtgcaagattaaaatatttcttagccgaagagtttaaagtttctgtagaagatgtaagtgcttttgttctcgggggtcatggtgatactatggttccaattattagatatgcgactgttgcaggtattcctgttccagaactaatcaagttaaaatggtctactacaaaaaaaataaatgcaattattgatagaacgagagatggtggtggtgaaattggacgactgatgaaaacagcttctgctttttatgctccagcttcatcagctattgccatggctgagtctttcctaaaagatcaaaaaagagttctgccatgtgcttcctatttaaatggacaatacggtgtcaaaggtttgtacgttggtgttccagttatcattggaaaaaaaggt

SEQ ID NO: 207395 - DNA, 988 bp, Unknown
  Bacterial polypeptide expressing nucleotide sequence isolated from the Sargasso Sea
aatggctaagcccgcaaagcgcgttgccgtcaccggcgccgcaggtcaaatcgcttactccctgctgttccgcatcgcgaacggcgacctgctcggcaaggaccagccggtcatcctgcaactgctcgacctcccgcaagcccaagccgccgtcaaaggcgtcgtgatggaactcgacgattgcgcgttcccgctgctcgcgggcgtcgtgatcaccgacgatccgaaggtcgcattcaaggatgccgacgtcgcactgctggtcggcgcacgtccgcgctcgaagggcatggagcgcaaggacctgctgtcggcaaacgcagaaatcttcacggtccagggcgctgcgctgaacgaagtcgcgagccgcgacgtgaaggtgctggtcgtcggcaacccggcgaacacgaacgcctacatcgcgatgaagtcggcaccggatctgccgaagaagaacttcacggccatgctgcgcctcgaccacaaccgcgcgctgtcgcaactcgcggcgaagtcgggcaagccggtcgcatcgatcgagaagctcgccgtgtggggcaaccactcgccgacgatgtaccccgacttccgcttcgcgaccgccgaaggcgaatcgctgctgaagctgatcaacgacgacgtgtggaaccgcgacacgttcatcccgaccgtcggcaagcgcggcgcggcgatcatcgaagcgcgcggcctgtcgtcggcagcgtcggccgcgaacgcagcgatcgaccacgtgcgtgactgggtcctcggcacgaacggcaagtgggtcacgatgggcatcccgtcggacggctcgtacggcatccccgaagacatcatctacggcgtgccggtcgtttgcgaaaacggcgaatacaagcgcgtcgaaggcctggaaatcgacgcgttctcgcgcgagaagatggacggcacactggccgagctgctcgaagagcgcgatggcgtcgcccacctgctgaagaactaa

SEQ ID NO: 207396 - DNA, 952 bp, Unknown
  Bacterial polypeptide expressing nucleotide sequence isolated from the Sargasso Sea
atggctagaaataaaattgcacttgtaggatctgggaatattggtgggacacttgcattattatcaggaataaaggagcttggtgatgttgctctttttgatattgctgaaggcataccctcaggaaaagctcttgatatagtccaagcatcaccagttgagaaatttgatgcaaaacttactggagggaatgactattcagtcttaaatggctctgatgttgttattgtgacggcaggtgtgccaagaaaaccaggcatgagtcgagatgacctcatagaaacaaataccaatgtaatgaaacaggttggtaaaggtatagccgataattgccctaatgcttttgttatttgtattacaaacccacttgatgccatggttggtgttttgcaaagagctgcgggattaaaaacaaataaaatcgttggtatggctggggtactggatagtgctcgatttagatattttttggctgaagaattcaatgtttctgttagggatgtttcagcatttgtattagggggtcatggtgatagtatggtccctttaataaggtattcaacagttgctggtattccagttcctgatttgattgaaatgggttggacaacacaggaaaaaattgactcaatagttcaaagaactcgtgatggtggagctgaaatagttggcctattgaaaacaggttctgcattttatgctccagcctcttcagctattgaaatggcagagtcttttttaaaagatcaacgaaggcttctaccgtgtgctgcgtggtgtaatggagaatacggattggatggcatatttgttggtgttccagctatcattggtaaaaatggtattgaaaaagttattgagatcaaattaaatgatgaagagaaaacaatgtttgataactcagttgaagcagttagacaattgaactctatcgcttctaaaatggaataga

SEQ ID NO: 207397 - DNA, 494 bp, Unknown
  Bacterial polypeptide expressing nucleotide sequence isolated from the Sargasso Sea
tatgaaggttactatcgttggtgcaggtaatgttggagcatcctgtgcagaatatattcttataaaagaaattgtagacgaaatagttttacttgacataaaagaaggtttcgctgaaggtaaggctcttgatttatctcaaactacctcaacacttggctttaaatcaaatgttattggagttacaaacgactaccccagcacctctaatagtgatgttgtagtaataacatctggaataccaagaaaacctggaatgacaagagaagagctaattggaatcaatgctggtattgtaaagtctgtttcagagaacttattgaaatattctccacaggcaataataattgttgtatctaacccaatggatacgatgacatatttagtaaacaaatcatttgatatacctaagaatagagtgattggaatggggggtatccttgatagctctagatttaagacctacatttccttagaaactaattctctcaaca

SEQ ID NO: 207398 - DNA, 988 bp, Unknown
  Bacterial polypeptide expressing nucleotide sequence isolated from the Sargasso Sea
catgaaaagaaataaaattgctttgataggcggaggccaaataggaggcacattagcccatcttgctggactgaaagagcttggagatgtagttatatttgatattgtcaaaggtatccctcaaggaaaggcgcttgatctcgccgaagcgtccccagtaagcccttataatgtagatttaaagggatctaataattattcagctataaaagactcagatgtggttattgttactgctggagtcccaagaaaaccaggaatgagtcgtgatgatttattatctattaacctaaaagtgatgtctgatgttggtgcagggataaaaaaatattgtcctaaagcatttgttatctgtatcactaatccattggatgctatggtttgggctcttcaaaaattttctggggttaagcctaatatgatagtgggaatggcaggcgttctggacagtgcaagatttagatattttttatctcaagaattcaatgtatcagttgaagatgtaactgcttttgtacttgggggtcatggtgactctatggtacctcttgcaagatattcaaccgtatcgggtattcctttacctgacttggttaagatgggttggacaacgcagaaaaagttaaatgatattatccaaagaactagagatgggggagcagaaatagttggcttgcttaagacaggttcagctttttatgcacctgcagcctcagctatagaaatggcagactcttatttaaaagataagaaaagagtcctcccttgtgcggctcatttatctggtgaatataaaattaaggatatgtatgttggtgtacctgtagttattggggctaaaggagtagaaagaatattggaaatatctcttaattctagagagactaaattgtttaaagattctattgcatctgttaaatctttaatgagagcatgcacaaagattgataagagattagccagcagaaaaaaatcttcgagaaaataa

SEQ ID NO: 207399 - DNA, 752 bp, Unknown
  Bacterial polypeptide expressing nucleotide sequence isolated from the Sargasso Sea
aatgaggaagatatctttaataggagctggacaaattggtggaactttagctcatctaattggtataaaagaattagttagtgaagtagtactttttgatgttgctaaaggaattgccaagggaaaagctcttgatatagcacaatcttcttcagttgatgggtttaatgtaaaattttcaggtactgatgactataaagatataaaagactctgatgtaattattattactgcaggtgttcctagaaaacctggaatgagtagagatgatttattgggtattaacctaaaaattattaaacaagtggctgaaggaattaaaaataatgccccaaatgcttttgtaatatgtattactaatcctctagatgtaatggttatggcttttcaaaaattttctggactagaggctaaaaaagtagttggaatggcaggaattttagatagctcaagatttaaattatttttatctttagagttaaatattcctgtaaaagaaattgatgcaatagtgatgggaggacatggagatacgatggtgcctatgccgagatttacaaaagtttcgggaagaccattgcttgatttagtaaaagaaggacaaatatcaatcgaaaaattagaagaaattaatcaaagaaccagagatggtggcgctgagattgttaaatatttagaaaaaggatcagctttctatacaccagcagcatctggtgttcaaatggcagaagcatatctaaaagacgaaaaaa

SEQ ID NO: 207400 - DNA, 688 bp, Unknown
  Bacterial polypeptide expressing nucleotide sequence isolated from the Sargasso Sea
tatgaaaaaaataagtttgattggagcaggacaaataggtggaactttagcccatttgataggagtaaaagaactagttgatgaagtagttctttttgatgttgctagtggcattgctaaaggaaaggctcttgatattgcacaatcatcctcagttgatggttttaatgtaaaattttcaggaacggataaatatgaagatattaaaaactctgatgtcattattataactgctggggtccccagaaaacctggtatgagcagagatgacttagtaggtattaacctaaaaataattaaacaagttgcagagggaattaaaaaaaactctccagatgcttttataatttgtataacaaatcccctagatgtgatggtaatggctttccaaaaatattctcagcttgcagctaaaaaagttgttggtatggcaggaatattagatagctcaagatttaaactttttttgtcagaagaattaaaggttccagtaaaagaaatagacgcaatggtcatgggcggacatggagatacgatggtaccaatgccaagattcactaaagtatctggaaaacctttattagatcttgtcaattctggtgttatttctaaagaaaaactagaaagcatcaatcaaagaacaagagatggtggaggtgaaattgtaaaatttttagaaaaaggtccg

SEQ ID NO: 207401 - DNA, 958 bp, Unknown
  Bacterial polypeptide expressing nucleotide sequence isolated from the Sargasso Sea
atgagaaagaaaattgctctagtcggagcgggaaatatcggcggaactcttgcacatttaattgtattaaaagaattaggggatgtcgtccttattgatatagcagacggaatgaccaaaggaaaagctttggatttagcacaatcctctagtgtagaaaattttaatgctagtttgactggttcctcaaattatcgtgaaatgaagggagccgatgttgtaattgttactgcaggttttcaaagacgtcctggtatgactagagatgatttagtagaaaaaaattcagcaattatacaaacagtaagaaagggaataaaagcaaactgccctaatgcttttgtcatttgtataacaaatcctttggatgctatggttagtgttttgcaaaaagcagcaggtttaaaaacaaatatgtgcgttggtatggccggtgttcttgatagtgcaagattaaaatattttctagctgaagagtttaaagtatcagtagaagatgtaactgcttttgttttgggtggtcacggcgatactatggtacctttgataagatactctagtgtagcaggcgttcctgtcccagaattaattaaacataaatggtcaacacaaaaaagaattgatgcaataattaaaagaacaagagatggaggtggtgagattggacgattaatgaaaacagcttcagctttttatgcaccagcttcatctgcaattgtaatggctgagtcttatattaaagatcaaaagagaattcttccatgtgctgcatatttaaatggtcaatatagtgttaaaggtttgtatgtaggtgttccagttgtaattggtaaaaaaggtgttgagcgagttgttgagttaaaattaaatgctttagaaaaaaagcaatttaatcactctgtcaaagcagtaaaaaatttaactgctcttgcaaaaaaactgatatcaaaaaaataat

SEQ ID NO: 207402 - DNA, 934 bp, Unknown
  Bacterial polypeptide expressing nucleotide sequence isolated from the Sargasso Sea
atgaaggttactattgttggagcaggtaatgttggtgcatcctgcgcagaatacattttaataaaggaaattgttgacgaaatagtactactagacataaaaaatggttttgctgagggcaaggctcttgatttaacacaaacaacctcaacattaggattcaaatcaaaggttacaggagtcacaaatgattataagagtacatcaaacagtgatgttgtggtaatcacctcaggtatcccaagaaagccaggtatgactagagaggagttaattggaattaatgcaggaattgtaaaatctgtttcagagaacttattaatgcactctcctgatgcaataataattgttgtatccaatcctatggatactatgacatatctagttaacaagtcattcaatatcagtaaaaatagagttattggaatgggtggtattcttgatagttctaggtttaaaacttatatctcattagcaacaaatttttctcaacatgatattgatgcaatggtgataggtgggcatggtgatacaactatgattcctctaacctcaatttcaaaatgtaataataaacttttgtcagagattgtatcgcaagatatacttcaaaaaatttcttcggatactatggtaggtggagccactctaactaaattaattggaacctctgcttggtatgctcctggggcctcagtttcatatttagtaaatgcaatcgttaatgacacaaaggaaattcttccttgttccgtttatttggagggtgaatataattctgaggacatatgtataggtgtgccagcaataattggtaagaatggctttgaggaagtagttagcttagatattaataaaaacgaaatagaaatgtttgaaaagagtgttaaagctgttaaacaaacgaacttagccttagatggtttaatctaga

SEQ ID NO: 207403 - DNA, 502 bp, Unknown
  Bacterial polypeptide expressing nucleotide sequence isolated from the Sargasso Sea
aatgaaaaaaatatctttaattggtgcgggtcaaattggtggaactttagcacatttaattgggacaaaagaattggttagcgaagtagttctttttgatgttgccgaaggaatagctaaaggaaaagccctggatattgctcaatcttcttcagttgacgggtttaatgtaaaattttcaggtactaatgattataaagatattaaggattctgatgtaattattattactgccggtgttccaagaaaacctggaatgagtagagatgatttattaggtattaacctaaaaattattaaacaagtagctgaaggaattaaaaataactctccagatgcttttgtaatatgtattaccaaccctttagatgtaatggttatggcttttcaaaaattttcaggactagatgcaagaaaagtagttggtatggcaggaatattggatagttcaagatttaaattatttttatctttagaactaaatgttgctgtaaaagaaatt

SEQ ID NO: 207404 - DNA, 799 bp, Unknown
  Bacterial polypeptide expressing nucleotide sequence isolated from the Sargasso Sea
ttggtcaacatacatacagtcttcgctagtctctcaaagagaaccgaggagaattttgtgaataatgatgctgtaaacgtgaccgtaactggagcagcaggccaaattggttatgctctattatttaggattgcaagtgggcagatgctaggtcctgaacagcaagtaaatctacggctattggaaatcactcccgcgttgggagccttagatggtgtccagatggaacttgatgactgcgcattcccgctccttggatcaatcacaaaaaccgatgacccaaacgtggcgttcgaaggaagcgactacggtctgctcgttggcgcgatgccaagaaaagatggaatggaacgagctgatcttcttgaagcgaatggaggcatcttcgggccgcaagggagagcaatagcagagaacgcaaatacaggtataaaaattcttgttgtaggaaacccagcgaacaccaatgcacttattgcacagtcggcagccgctgggattaatccagggcaatttaccgcgatgacccgactcgatcacaatcgggcgaagagtcaagttgccgacaaattaggagtctctatccaaagtgtcaagaaaatgacaatatggggaaatcattcagcgacccagtacccagatcttttccattgtgaagtagatggaaaatctgttgccgagagcgttaatgaccaagattggcttgaaaacgactttattccaactgtccaacaacgcggggcagcaattattaaagctcgaggagcctcttcagcagcttcagcagcaaatgcagcca

SEQ ID NO: 207405 - DNA, 964 bp, Unknown
  Bacterial polypeptide expressing nucleotide sequence isolated from the Sargasso Sea
aatgtcaaaaatatcattaataggagctggacaaataggtggaactttagcacatttaattggactaaaggagcttgttgatgaagtagtattatttgatgtagcaagtggaattgctaaaggtaaagcattggatattgcacagtcttcatctgttgatggatttaatgtaaaattttcaggtactgataattatgaagatataaaaaattcagatgtaatcattattacagctggtgttccaagaaaaccaggaatgagtagagatgatttattaggaataaatttaaaaattataaaacaggttgctgaaggtataaagcagcatgcaccaaatgcctttgttatatgtattacaaatccattagatgtaatggttatggcttttcaaaaattttctggactatcgcctgacaaagttgttggaatggctggaatattagacacatcaagatttaaactatttttatctttagagttaaatgtgcctgttagagaaattgaggcaatggtaatgggaggtcatggagatactatggttcctctaccaagatttacaaaagtttcaggaaaaccattattagatttagttaaagaaggaaaaatttcaaaagataaattagaaagtataaatcaaagaactagagatggaggtgctgaaattgttaaatatttagaaaaaggttcagcattttatgcaccggcagcttcaggtgttgaaatggcagaagcatacttaaaagatagcaaaaaaatgctcccttgtgctgctcatttaaatggacaatacggaataagcaatatttacgctggagtgccagtaattgttggaaagaacggtatagaaaaaatcgaagaaattgagctagatgaaaatgaaaaatctgagtttaataactcagtagatgctgtaaaaaaattatgggaagctgcatccaaaattgatcctagtttaaataactag

SEQ ID NO: 207406 - DNA, 961 bp, Unknown
  Bacterial polypeptide expressing nucleotide sequence isolated from the Sargasso Sea
atgacaaaaaaaatttcattaatcggtgcaggacaaattggtggaaccttggcacatatgatatcattgaaaggtttagctgatgtaatcttatttgatgtagcagatgggttagcaaaaggtaaagcattagacatagctcagtcgtcaggcgtaagtggatttgatgtaaagttaaaaggcacaaataactataaagatataagtaattctgatgtaataattattactgctggtgtaccaagaaagcccggtatgagcagagatgatttgttgagcacaaacttaaaaataataaagcaagtagccgaaggaataaaaaaaaattctccaaattcattcataatttgtatcactaatcccttagacgtaattgttatggctctacaaaaatactcaggtttgccctcaaacaaaattgttggaatggctggtattttagactcatcaagatttaaatattttctttcagaagaattaaaaatttctatttcaaaaattagttctcttgttctaggcgggcacggagacaccatggttccaatgccaaatcacactttggtagatggcaaatctttaacacaactagtgaaagagaaaaaaattgatcaatcaaagcttgactctataatacgaagaacaaggacaggtggagcggaaatagtaaaattattagaaaaaggatctgcattttatgccccggctgcttccggagttgaaatggcagagtcatatttaaagaatttaaaaaaaaaattaccttgcgctgcatatttgagtggtgagtatggtttcaaaaacatatatgcaggagttccagttattattggtaaaaatggtgtcgaaaaagttatagaattagatttaaatgtaaatgaaaaagaaaattttgaattatctatcaaagctgtaaaagaattatatgactcagcagtaaaattagatccaagtttaaaatagc

SEQ ID NO: 207407 - DNA, 760 bp, Unknown
  Bacterial polypeptide expressing nucleotide sequence isolated from the Sargasso Sea
ccaagtatagcattcatggatagtgattatgcgttcttagttggcgctaaacctcgtgggccaggcatggagagaagtgacttacttcaagaaaatgcaaaaatcttctcggcacaaggtaaagcaatcaatgaaaatgcgtcgagagacataaaagttcttgtagttggtaatcctgcgaatacaaatgcactgattgcaatgtcaaatgcaccggacatagataagagtgcatttacagcaatgatgaggcttgaccataatagagctcttgctcaacttgcttctcacttaaaatgtcattcaagtgaactctcaaatatgacaatctggggaaatcactcaactactcaatatcccgatgtaagcaacttaaagcttaatggaaagaacatagcttcatctcttgatagtacatgggtgaaagatgattttattccgcgtgtacaaaataggggcgcagaaattataaaagcaagaggtttatcaagtgccgcatcagcagcttcagctgctatagatcatatgagagattggactgttgataccaaaacagatgattgggtaagcatggctattccgagtgatggatcatatggtgtcagcgagggtattatctattcttttccagtgacttgtgagaatggatcttactcaataattcaaaacctagaaatcgacgaatttagcatggcctcaatgaaattaacagagaaagaacttctcgaggaaagagcagcaattgaagagttgctgtaaa

SEQ ID NO: 207408 - DNA, 682 bp, Unknown
  Bacterial polypeptide expressing nucleotide sequence isolated from the Sargasso Sea
aatttaaagattattaaacaagttgccgaaggaataaaaaaaaattcacctgatgcctttgtaatttgtataaccaacccacttgacgttatggttatggcatttcaaaaatattcaggcttaccaacaaataaagtagttggaatggcaggtattttagatagttcaagatttaaactttttttatcaatcgagcttaaaattcctgttaaagaaattgatgcaatggtaatgggtggacatggagatactatggtaccattaccaagatttactaaagtatcaggcaaaccattattggatttagttaaagaaggtaaaatttccctagaaaaattagaaagtataaatcagagaacaagagatggaggagctgagatagttaaatatttagaaaaaggatctgcttattatgctccagcagcttcaggggttgaaatggcagatgcatttttaaatgataagaaaaaaattcttccatgcgcagcttatatgaatggagaatatggtgttgataaaatttatgcaggtgttccagtggttattggaaaaaatggtattgaaaaaattgaacagatagaactagatgaaaaggagaaatcagaatttaatcattcgatagaggcagtaaaaaaattatgggatgctgcatctgcaattgatccaaatttaaaaaattgat

SEQ ID NO: 207409 - DNA, 964 bp, Unknown
  Bacterial polypeptide expressing nucleotide sequence isolated from the Sargasso Sea
aatgacaaaaatatctttaattggcgcaggccaaattggtggaacccttgctcacttaattggcacaaaagaattagtaaatgaagtagtattatttgatgtagcaagtggaattgcaaaaggcaaagcattagatattgctcaatcgtcatctgtagacggttttaatgtaaaattttcaggcactgatgattacaaagatattaaagattcagatgtaataattattactgcgggtgttcctcgaaaaccaggaatgagcagagatgacttacttggaataaatttaaaaattattaaacaagtagctgacggtgtaaaacaaaatgcaccaaatgcttttgtgatatgtattaccaacccattagacgttatggttatggcatttcaaaaattttctggtttacctgctaataaagttgtgggcatggcaggaatattagatacttctcgatttaaactatttttatccctggaattaaacgttccagttaaagagattgaggcaatggtgatgggtggtcatggagatacaatggttcctatgccaaggtttacaaaagtctcaggaacacctctgcttgatttagtcaaagagggaaaaatttctaaggaaaggctcgaggaaataaaccaacgtacaagagatggtggagccgagatagttaagtatttagaaaaaggttctgcgttttatgctcctgcagcatcaggcgttcaaatggctgaggcatatttaaacgatcaaaaaaaattattgccatgtgcagtccaattaaatggagagtactcagtcaataatgtatacgctggtgtgcctgtaataataggaaaaggtggtgttgaaaagattgaagaagtcagtttagatgaaaatgagaaaaaagagtttatgcactcaatagacgcagttaaagctctttgggaagcagcatcaaaaatagatcccgatctctcaaaataa

SEQ ID NO: 207410 - DNA, 937 bp, Unknown
  Bacterial polypeptide expressing nucleotide sequence isolated from the Sargasso Sea
atgaaagttgccgttctgggtgccgccggtggcatcggccaagccctcgctctgctgttgaaaaaccgtctgcctgctggttccgaattgagcctgtatgacatcgctccggtgaccccgggcgtggcggtcgatctgagccatatcccgactgacgtgaaagtaaaaggtttctgcggtgaagatccgagcccggctctggtcggcgccgatgtcgtgctgatctccgccggcgtggctcgcaagcccggcatggatcgttccgacctgttcaacatcaacgccggcatcgtcaagaatctggtggaaaagtgcgccgcctcctgcccgaaagcgctgatcggcatcatcaccaacccggtcaacaccacggtcgccatcgccgccgaagtgctgaagaaagccggtgtctatgacaagcgtcgcctgttcggcgtcaccaccctggacgtgatccgtgccgagaccttcgtggccgaggccaagggtctgaacgtcgacaaggtgcgcgtcaacgtgatcggtggccacagtggcgtgaccattctgccgctgctctcccagattgaaggtgccagcttcaccgctgacgaagtggccgccatgaccaagcgtatccagaacgccggtaccgaagtggtggaagccaaggccggtggcggttccgctaccctttccatgggccaggctgcctgccgtttcggcctgtcgctcatcaagggcctgcagggtgaagccaacgtcatcgagtgcgcctacgtggagggcgacggcaaacacgccaccttcttcgcgcagcccatcctgcttggcaagaacggtgtcgaaaccgtgctggactacggcaagctgagcgcctttgaacaagaggcgatggatggcatgctggccaccctgaaagccgatatccagctgggtgtcgacttcgtcaagtaag

SEQ ID NO: 207411 - DNA, 613 bp, Unknown
  Bacterial polypeptide expressing nucleotide sequence isolated from the Sargasso Sea
tattaccaatcctttggatgtaatggtaatggcatttcaaaaattttcaggcctttcaccaaacaaagttgtaggaatggccggtatattagatagctcaagatttaaattatttctgtctgaagaatttagtgttccagtaagagaaatagatgcaatggtaatgggtggacatggcgatacaatggttcctttgccaagatttacaaaagtttctggaagacctttgttagatttggttaaagaaggaaaaatctctcaaaaaagattggaagaaataaatcaaagaacaagagatggtggagctgaaattgtaaaatttttagaaaaaggttcagctttttatgccccagcagcttcaggagttgaaatggccaaagcatatttaaaagatgaaaaaaaaatgcttccgtgcgccgcctttttgaatggcgaatacgggattaaagatatttatgctggtgtaccaataattattggtaaaaatggtgtagagaaaattgatgaaatagatttagatgataaagaaaaggcagaatttcttcattctattgactctgttaaaaaactttgggatgcagcatctaaaatagatccagatttaactaaataa

SEQ ID NO: 207412 - DNA, 940 bp, Unknown
  Bacterial polypeptide expressing nucleotide sequence isolated from the Sargasso Sea
catggcaaatggagcaaagaaggtcgcagttattggagcaggaaacgtaggagcaacttgtgcgttcgttcttgcagaaaggaaggttggagaggtagtcctactggatatctatgaaggatttgccaagggcaaggcactcgatatgagccaaggaggaagggtactaaactacgatggccgtgtaacaggaacgaaggactatgcagatatcgctaattctgatgtagtggtagttacttctggatttcctaggcaacccgggatgactagggaggatctgattggaaagaacgcagacatagtctcacaggtaggtgaaggcataaggcagcacgctcccaattcgattgttgtgatggtgactaatcccttggacctgatgacttaccatatgcagaaagtaaccggatttgaacatagtagagtagtaggccaagcaggaatattggacagtgcgaggatgacgcacttcatcgcacaggctgtcggatgcagtaatgaggatgtgcaggcaatggttctgggtggtcatggagataccatggtcccacttccaagatacacgacggtgaacggaatcccagtgagtcagcttctgagcgatgaagaagtagaggcaatctgccaaaggacagccagcggtggaggagaaattgtgaagttactggagaagggcagtgcattctacgctccgggaagcgcggctgcaataatggccgaagcaattctcgaagataggaaaagggttcttccatgtagcacttacctttcgggagaatatggaatggatgacatatacattggagtaccagtagttcttggtagaaatggagtagagaggatcatagagctcgaactagctgagaaggaattggacagtctacagggttccggttccttctacaaagaacagctttctgaaatcctgggatactga

SEQ ID NO: 207413 - DNA, 964 bp, Unknown
  Bacterial polypeptide expressing nucleotide sequence isolated from the Sargasso Sea
aatgagtaaaatatctttaattggtgcaggtcaaataggtgggactttagctcatttaattggaataaaagaattagtaaatgaagtagttttatttgatgttgcaagtggtgttgcaaaaggaaaagcgctagatatagcccagtcatcatctgttgatggttttgatgttaaattttcagggactgatgattacaaagacataaagggctctgatgttattataattacagctggagtcccaagaaaacctggcatgagcagagatgatttattgggtataaatctaaaaattataaagcaagttgcagaaggaattaaaaaaaatgcgcccaatgcttttgtaatttgtataacaaatccattagatgtaatggtaatggcttttcaaaaattttcaggactcactgcaaataaagtagttgggatggcaggcatattggatagctcaagatttaaattatttttatctgaagagtttagtgtaccggttaaagaaatagaggcaatggttatgggcggtcatggtgatacaatggtacctcttccaagatttactaaagtttcaggtaaacctttattagatttagttaaagaaggaaaaatttctcaaaaaagattagaggaaataaatcaaagaactagagatggtggagctgagattgtaaagtttcttgaaaaaggttcagccttctatgccccagcagcttcaggggtagagatggcctcagcttatctaagagatgaaaaaaaattacttccatgtgctgcgtatttgaatggcgaatatggtatcaaagatatatatgccggagttccaattattgttggaaagaatggtgtcgaaaaaattgaggaaataaacttagatgagaaagaaaaatctgaatttcttcattcaattgatgcagtaagaaaactctgggaagcagcatctaaaatagatccagatttaaataaataa

SEQ ID NO: 207414 - DNA, 346 bp, Unknown
  Bacterial polypeptide expressing nucleotide sequence isolated from the Sargasso Sea
tatgaaaaaaaaaatctctttaattggcgctggtcaaataggtggtacattagcacatttgattggattaaaagaattagttaatgaagttgttttgtttgatgttgcaaaaggtattgctcaaggcaaggctttagatattgaacaatcatcttctgtagatggcttcaatgtcaaactttcaggcacagataactatgaagatattaaaaattctgatgtaataattgtaacagctggagttccgagaaaaccaggaatgagtagagacgatttgctaggaataaatcttaaaattattaaacaagttgctgaaggtataaaaaataatgcaccaaatgccctt

SEQ ID NO: 207415 - DNA, 967 bp, Unknown
  Bacterial polypeptide expressing nucleotide sequence isolated from the Sargasso Sea
atgagtaaaatttctttaataggggcaggtcaaattggaggaactttagctcatttaattggtttaaaagaactggtggatgaagttgttttatttgatgtcgcaagtggagtagcaaagggaaaaggtttagatatagcccaatcttcctcggtagatggatttaatgtaaaattttcaggaacagataactatgaagatataaaaggatcagatgttattataattacagcaggtgtccctagaaaacccggaatgagcagagatgacttattaggaattaatttaaaaattattaaacaagttgcggaaggaataaaaactaatgcgcctaatgcatttgtaatttgtattacaaatccattggatgtaatggtaatggcatttcaaaaatattcaggacttcccgttcataaagttgtagggatggcgggtatattggatagttcaagatttaaactatttttgtccgaggaattaaatgtgcctgttaaagaaatagatgctatggtaatgggtggacatggagatacaatggtacctcttccacgatttacaaaagtctctggtcaaccattaatggagttagtgaaagagggaaagatttctgaggaaaaattagaaagtattaatcagcgaactagagacggtggtgcagaaattgtaaaatatttagaaaaaggatcagcattttatgcacctgcagcatctggagttgaaatggctgaagcatttttaaaagatcaaaaaaaacttttaccatgtgcagcatatttacatggagagtatggaattaataatgtatatgcaggcgttcctgttatcattggaaatgaaggtgttgaaaaaattgaggaaatcgaccttaatgaaaatgaaaaaacagagtttaataattcagtagaagcagtaatcaaattatgggatgcggcatctaaaatagaccctgacctaaacaaagattaaa

SEQ ID NO: 207416 - DNA, 907 bp, Unknown
  Bacterial polypeptide expressing nucleotide sequence isolated from the Sargasso Sea
atggaacgtgcaaaaatctcattaattggtggcggtcaaattgggggaaacctggccttattagccgctcaaaaagaattaggtgatattgttatttttgatattccaaaagcagagggtatggtaaaagggaaggcgctcgatctaatgcagcttagacctcatgatggatatgatgcaaatatttctggcacatcaaattggaaagatctcaaagattcagatgtatttattattaccgctggattacctcgaaaacctggaatggatcgggaagatttacttgaaatcaatctaggaataatgacagatgttgctgaaaatatcaaaaaatactcacccaacgcatttgtaattgtagtttctaatcctctagatgctatggtatatgctttttataaagtttctcaacttaaaaagaatatggttgttggaatggctggggctttagatagcgctaggtttagagcatttattgccatggaggttgggtgttcagttcaagatgttacatgtatggtgcttggcggccatggcgatacaatggttccgattactcgagttggaacagtgggtggagttccaatagaatcattaattaagcctgatagattagaagaaattgttaaccgcacaaggtttgcaggtggggaaattgtcaagctatttggaaatggttctgcattctatgctccagcgcaatctgcaattgaaatggcagaatcatatcttagagataaaaaaagaattatcccttgcgcttcgctatgtgagggcgagtttggaattaatggttattttataggcgtcccatctatgataggaaaaaatggtgtcgaaaaaattctagagtttgaactacgcgataatgaaaaatcagcacttgataatacacttgaagctgtta

SEQ ID NO: 207417 - DNA, 967 bp, Unknown
  Bacterial polypeptide expressing nucleotide sequence isolated from the Sargasso Sea
atgtcaaaaaaaatatcattaattggtgctggacaaattggcggaacacttgcacacttaattggcttaaaggaactagtagatgaagttgtaatgtttgatgttgcgtgcggcattgctaaaggtaaagcattggatatagctcaatcctcatcagtcgatggttttaatgttaaactatctggaacagataattacgaagatattaaagactccaatgtaattattataactgcaggagttccaagaaaaccaggcatgagcagagatgatttattaggaataaatttaaaaattataaaacaggtggcagaaggtataaaaaaaaatgcacctaatgcatttgtaatatgtattactaatccgttagatgttatggtaatggcgtttcaaaaatattcaggacttccagcaaataaagtcgttggtatggcgggaatattggacagttcaagattcaaactatttttgtcacttgaacttaaaattccagttaaagaaatagaagcaatagttatgggcggccatggagatacaatgataccactaccaagatttactaaagtttctggcaaacctttattggatttagttaaagagggaaaattatcagcagaaagattagaggaaatcaatcaaagaaccagagacggtggtgctgaaattgttaaatatttagaaaaaggttcagcattttatgctccagcagcatcaggagttcaaatggctgaagcatacttaaaagatgaaaaaaaattacttccttgcgctgtacagcttaatggcgagtatggtgttaaaaatatttttgcgggagttccagtcataattggaaagaatggtgtagaggagattcaagaaataaatttagatgaaaaagaaaaaagtcaatttatgcattcaatagatgcagttaaaaagttatgggatgcagcttcagcaatagataaagatctttctaagtaat

SEQ ID NO: 207418 - DNA, 964 bp, Unknown
  Bacterial polypeptide expressing nucleotide sequence isolated from the Sargasso Sea
atgaaaaaaataagtttgattggagcaggacaaataggtggaactttagctcatttaataggagttaaagaactagttgatgaagtagttctttttgatgtagctagtggcattgctaaaggaaaagctcttgatattgcacaatcatcttcagttgatggttttaatgtaaaattttcaggaacggataaatatgaagatatcaaaaactccgatgttattattataactgctggggtccccagaaaacctggtatgagcagagatgacttagtaggtattaatcttaaaataattaaacaagttgcagaaggaattaaaaaaaattctccagatgcttttataatttgtataacaaatcccctagatgtgatggtaatggctttccaaaaatattctaagcttgcagctaaaaaagttgttggtatggcaggaatattagatagctcaagatttaaactttttctgtcagaagagttaaaggttccagtaaaagaaatagacgcaatggtcatgggcggacatggagacacgatggtaccaatgccaagattcactaaagtatctgggaaacctttattagatcttgtcaattcaggtgttatttcaaaagaaaaactagaaagcatcaatcaaagaacaagagatggtggaggtgaaattgtaaaatttttggaaaaaggctccgcatattatgcgccagccgcctcgggagtgcaaatggctgaagcattcttaggtgataaaaaactacaattaccttgtgctgcacaattagaaggtcaatatggctttaacggaatttatgcaggtgttccagttgttattggaaaaaatggagtagaaaaaatagtcgaaattcaacttgatgaaaaagaaaaggctgaatttattaattctgtgaatgctgtgaataagctttgggaggcagcagtaaaaattgacccgagcttgaaaaagtaat

SEQ ID NO: 207419 - DNA, 868 bp, Unknown
  Bacterial polypeptide expressing nucleotide sequence isolated from the Sargasso Sea
atgaaaaaaatctctttaatcggcgcaggtcaaattggtggaactttggctcatttaatagggataaaagaattggttgatgaagtagttttatttgatgttgcaagtggaattgctaagggaaaaagcttagatattgctcaatcatcatctatagatggatttaatgtaaaatttttggggacagataattatcaagatataaaagattccgatgtaataataattactgccggtgtacctagaaaacctggtatgagtagagatgatttgcttggaataaatttaaaaataattaaacaggtcgcagagggtgtgagatcaaatgctccagatgcttttataatttgtattacaaatccgttagatgttatggttatggcttttcagaaatactcaaaattgccaacaaataaagttgtaggtatggctggtatattagatacgtctagatttaaactattcttgtcagaagagcttaaagttccagtcagagaaattgatgcaatggtaatgggaggtcatggagatacaatggtcccacttcctagatttacaaaggttttaggaaaatctttaattgaattagtaaaagagggaaaaatttcactagataaactggaaagtataaaccaaagaactagagatggaggcgctgaaattgttaaatatttagaaaaaggatcagcattttatgctcccgctgcatctggtgttgaaatggcagaatcatatttaaaagaccagaaaaaaattttgccttgcgcagcttacttgcatggagaatatggaataaataatgtatacgcaggcgttcctgtttgtattggaaaagatggagttgaaagaattgaagaaatcaatctta

SEQ ID NO: 207420 - DNA, 964 bp, Unknown
  Bacterial polypeptide expressing nucleotide sequence isolated from the Sargasso Sea
tatgaaaaaaatatctttaataggagcaggtcaaattggtggaacattagcacatttaattggtttaaaagaattagtagatgaagttgttttatttgatgttgcaagtggaattgctaaagggaaagctttagatatagcccaatcctcatcggttgatggctttaaagtgaatttatcaggaacagataattatgaagatatcaaagactcaaatgtaataatcataaccgcaggtgttccaagaaaaccaggaatgagtagagatgatttattaggaataaatttaaaaataattaaacaagtagccgaaggtgtaaaaaaaaatgcccccaaagcttttgtaatatgtattacaaatcctttggatgttatggttatggcatttcaaaagtactctggattaccgaccaataaagttgttggtatggcaggaatattagatagttcaagatttaagttatttttatcacttgaactaaaagttccagtaaaagaaatagaagcaatggttatgggtggccatggagatacaatggtcccattgccaagattcacaaaagtttcaggtaaaccattattagacttagttaaggaaggaaaattatcattaaaaagattagaagaaatcaatcaaaggactagagacggaggtgctgaaatagttaaatatttagaaaagggttctgcattttatgcgcctgcagcatcaggagttcaaatggcagaagcatacttaaatgatcaaaaaaaattactaccttgtgctgttcatcttaatggggaatatggtgtaaaaaatatttttgctggtgttccagttataataggtaaagacggagtagaaaagatagaagaaataaaattagatgaaaaggaaaaaaatcaatttatgcattcaatagaggcagttaaaaaattatgggaagcggcctcagtaattgataaagatctttctaaataa

SEQ ID NO: 207421 - DNA, 964 bp, Unknown
  Bacterial polypeptide expressing nucleotide sequence isolated from the Sargasso Sea
aatgagcaaaatatctttaattggagcaggccaaataggtggaactttagcacatttaattggaataaaagaattagtaaatgaggtggttttatttgatgttgcgagcggtgttgcaaaaggaaaagcgttagatattgcacaatcatcatctgtagatggttttgatgttaaattttcaggtacggatgattataaggacataaagggctcagatgttattataattacagctggcgtgccgagaaaacctggcatgagcagagatgatttacttggtataaatttaaagattataaagcaagttgcagaaggaattaaaaaaaattcgcctgatgcatttgtaatttgtataacaaatccattagatgtaatggtaatggcttttcaaaaattctcaggcctttcaccaaataaagtagttggcatggcgggtatattagatagctccagatttaagttatttttatctgaagaatttagcgtcccggttaaagaaatagaggcaatggtgatgggtggtcatggtgatacaatggtacctcttccaagatttactaaagtttcaggaaaacctttattagatttagttaaagaaggaaaaatttctcaaaaaagattagaggaaataaatcagagaactagagatggtggagctgaaattgtaaagtttcttgaaaagggttcggctttctatgccccagcagcttcaggagttgagatggctaaagcttatcttagagatgaaaaaaaaatgcttccatgtgctgcgtatttgaatggcgaatatggtatcaaagatatatatgctggagttccaattatagttggaaagaacggtgtcgaaaaaatagaggaaataaacttagatgagaaagaaaaatctgaatttcttcattcaattgatgcagtaaaaaaactctgggaagcagcgtctaaaatagatccagatttaaataaataa

SEQ ID NO: 207422 - DNA, 940 bp, Unknown
  Bacterial polypeptide expressing nucleotide sequence isolated from the Sargasso Sea
tatgaagaaagttacggtagttggagcaggtaagtacggttctatgactgcattaaggatagctgaatacgatatagctaagacagtagtaatgactgatattgtagaaggtttacctcaaggtttaagtttagatataaaccaatcaagatatgttgagggcttcaacacaaaacttataggaacaaataattatgaagacacatccgatagtgacattgtagtaataaccgcaggtctgccaagaaagcctgggatgtcgagaatggatttattagaagttaacgctggaatagttagtgaagtaactaaaaatattttaaagcactctgataatccaataatagtggttgtaacaaatcctctagatcagatgacaactcttacagctgaagtatcaaatctttcaaaaaatagagttattggtcaagcaggtgtattagattcttcaaggtttgcatattttatttcagaaaaagttggtgttgatatttcaagcgtagaagctctaactcttggaagtcatggagagacaatggttccagttccttcattatgtaaggtagatggaaaaccattggaagaattattgtcatctgaagaaataaatgatttagttcaaaagacatccgatggaggagctgaaattgtaagtttacttaaaactggaagtgcatattttgcccctgcctcatctgctgcaaccatggtcaaagcaatgctaagtgattcaaatgagatatttccagtctgtgcgtggcttaatggtgaatatggcataaatgacgtataccttggtgttccagcaaggcttggagcagaaggaataactgaaatagtggaatatgatctaacagacaccgaaaaagcggctcttttaggagcttcgaactctgttaaggaaaaagtggctgaattagatagcataaaaaatcaataa

SEQ ID NO: 207423 - DNA, 988 bp, Unknown
  Bacterial polypeptide expressing nucleotide sequence isolated from the Sargasso Sea
catgaagagaaataaaattgctctaattggaggaggccaaataggaggcacattagcgcatcttgctggcttaaaggagcttggagatgtggtaatatttgatattgtaaaaggtatccctcaaggcaaggcacttgatttagcggaagcggcaccagtaagttcttacaatgttgatctaaaaggatccaataattactcagcaattaaagattcagatgtagttattgttactgcaggagttccaaggaaacctggtatgagtcgagatgatttattatccattaatttgaaagttatgtcagatgttggtgcgggtataaaaaaatattgcccgaaagcatttgttatttgcataacgaatcctctagacgctatggtatgggctcttcaaaagttttctggagttaaacctaacatgatagttggaatggctggtgttttagacagcgctagatttagatatttcttatcacaagaatttaatgtgtctgttgaagatgttacagcgtttgttcttggcggccatggagattctatggttcctttagagcggtattcaactgtttcaggaattccattacctgatttagtcaaaatgggatggacaacccaagaaagattaaaagagattattcaaaggacaagagatggtggagcagagatagttggtcttttaaagacaggttctgctttctatgcccctgcagcatctgccattgaaatggcggactcatatttaaaagataaaaagagagttctaccatgtgcagctcatttatcaggtgaatataaaattaaagatatgtatgttggtgtacctgttgtaattggaaaaaaaggtgtagaaaaaatattagaaatctctcttaactctagagaaactaaaatgtttaaagattctattgcttctgttaaatcattgatgagagcatgttcaaagattgataagagattagtaagtagaaaaaagaattccaaaaaataa

SEQ ID NO: 207424 - DNA, 967 bp, Unknown
  Bacterial polypeptide expressing nucleotide sequence isolated from the Sargasso Sea
aatgagtaaaatttctttaataggggcaggtcaaattggaggaactttagctcatttaataggtttaaaagaactagtggatgaagttgttttatttgatgttgcaagtggagtagcaaagggaaaaggtttagatatagcgcaatcttcctcggtagatggatttaatgtaaaattttcaggaacagataattatgaagatattaaaggatcagatgttattataattacagcaggtgttcctagaaaacctgggatgagcagagatgatttattaggaattaatttaaaaattattaaacaagttgcagaaggaataaaaactaatgcgcctaatgcctttgtaatttgtattacaaatccattggatgtaatggtaatggcatttcaaaaatattcaggacttcctgttcataaagttgtagggatggcaggtatattggatagttcaagatttaaactattcttatccgaagaattaaatgtgcctgttaaagaaatagatgctatggttatgggtgggcatggagatacaatggtacctcttccaagatttaccaaggtctctggaaaacctttaatggagttagtgaaagaaggaaagatttctgaaaaaaaattagaaagcattaatcagcgaactagagatggtggtgcagaaattgtaaaatatttagaaaaaggatcagcattttatgcacctgcagcatctggagttgaaatggctgaagcatttttaaaagatcaaaaaaaacttttaccatgcgcagcatatttacatggggagtatggaattaataatgtatatgcaggtgttcctgtaatcattggaaatgaaggtgtcgaaaaaattgaggaaattgacctaaatgaaaatgaaaaaacggagtttaataattcagtagaagcagtaattaaattatgggatgcggcatctaaaatagaccctgacttaaacaaagactaa

SEQ ID NO: 207425 - DNA, 961 bp, Unknown
  Bacterial polypeptide expressing nucleotide sequence isolated from the Sargasso Sea
aatgaaaaagaaaattactttaattggcgcagggcaaataggcggtacgttagctcacttaattgctttaaaagatttaggcgacgttgttctttttgatatagctgagggaatagctagaggaaaagctttagatatagcacaatcatccccagtagaagggtttaatgttaatatctccggaacaagtaattatgaagatacaaaaaattctgatgtcataattataactgcaggtattcctagaaaacctggaatgtctagggatgaccttttgggaattaatctaaaaattattaagcaagtagctctaggaataaaaaatacttcgcctaatgcatttgtaatttgtattactaaccctttagacgttattgtaatggcgcttcaaaaatattcaggtttacctaaaaaaaaagtagttggtatggcaggaattttagactcatcaagattcatatattttttatctcaagaattaaaacttccagtgaacaaaattaaatctttagttctcggtggacatggagatagtatggttgcaatgacaaatcatacttttgtagatggtaaaagtttaaaaaaattaatagaggaaggaaaaataaaaaaagaaaaactagatagtttagtagaaagaactaaaaagggtggagcagaaattgtaaaatatcttgagaaaggttctgcattttatgctcccgcagcatctggtgttgaaatggcagaaagctatttaaaagatttaaaaaaagaattgccttgtgctgcttatttaaatggcgaatatggtgtaaaagacctttatgcaggagttcctgtaaaaattggtaaagatggtgttgagaaggtaattgagataaagttgtcagaagaggaaaaaaaacagtttgataactctattaatgctgttcaagaattgtttgatgcagcaaaaaaaattgataattctttagtttga

SEQ ID NO: 207426 - DNA, 964 bp, Unknown
  Bacterial polypeptide expressing nucleotide sequence isolated from the Sargasso Sea
tatgagtaaaaaaatatctcttataggcgctggtcaaatcggaggaaccttagctcatttaattgcaataaaagagcttggaaatattgttctttttgatgttgctgaagggttggctaaagggaaggctctggatatagctcaatcatcaggcgttaccggttttaatgtaaatataattggaacaaataattataatgataccaaagactctgatgtaatcattataacagcaggagttccgaggaagcctgggatgtcacgtgatgatttacttggaacaaatcttaaaataatcaaacaagttgctgatggaattaaaaacacatcccccaaagcttttgttatttgtatcacaaacccactagacgttattgtgatggctttacaaaaatattcaggactaccaacaaatatgattgtaggaatggctggaatactagattcatcaagattcaaatattttttatctaaagaattgaacgaaccaattaaaaatatccattctatggtacttggtggtcacggtgatactatggtcccaatgccaaagcatacaaaaattaaaaataaaattttaagtgatttagttaaagaaaataaaatttccaaaagtaaattagaagaaattgtaatccgaactagaaaaggtggcgcagaaattgtcaaattgttggaaaaaggttcggcattttatgctcctgccgcttcaggtgtggaaatggcagaggcttacataaaagatcaaaaaaaaacattaccttgtgcagcatatttaaatggcgagtatggttacaaagatatatacgcaggtgtccctgtagtgattggaaaaaatggagtagaaaagattttagagatcgaacttgaaaataatgaaaaattaaattttgatgtttcaataaatgctgtaaaagagttatgtaatgctgcagcaaaaattgatccagtcttgggaaaataa

SEQ ID NO: 207427 - DNA, 946 bp, Unknown
  Bacterial polypeptide expressing nucleotide sequence isolated from the Sargasso Sea
ttgtctagtcttccaaaaatttctgtaattggtgcagggaatgttgggtcttccgcagcatatagagctcttgaattaaaccttgctgatgttgttttgttagatattgttgatggcttacctcaaggtaaggcacttgacatgactcaaatgatgtcagtaactggctcatcttcaagaatcattggtacaactgattattcagatactaaggattcagatattgttatagttacttctggtttagctagaaaacctggaatgagtcgtgacgatttaattaatactaatacaaagatcataaaagatgtaacagaaaaagttgtccaacattcacctaatagtattataatcgttgttacaaatcccctggatgcaatgacttatgtttcatataaggttagcggtttccctaaagagagagttattgggatggcaggtgtattagatgctgctagatttaaggcatttttatctttagagttgaacgttgctgtttctaaaatagatacattagtacttgggggccatggagatgatatggtgcccttgaaaaattatacttcagtttcaggagttccaatagctcagatgattcaagatagcagattagatgagataattcaaagaactagagatggtggagcagaaattgtaaaattacttaagactgggagtgctttttatgctcctggtgtctctgcaattgaaatggcagaatctatactaaaaaatcaaaataaaatattaccttgttgtactcttgctcaaggtcaatatggaatatcagaacaattcttaggacttccagttatattatcatcagagggtgtaaaaaaagtgattgaaattaaattaaccccagaggagcaaaaagaattagtagtttcagcatctcatgtcaaggaactgtgtaattttatagacgattctggtttaatttagg

SEQ ID NO: 207428 - DNA, 937 bp, Unknown
  Bacterial polypeptide expressing nucleotide sequence isolated from the Sargasso Sea
atgtctcaacctaaaatctctcttattggtggtgggcaaattggtgggaatttggctttaattgctgcgcaaaaagaattaggtgatattacaatctttgatattcctaaagcggaaggtatggtaaaaggtaaagctctagatcttatgcagcttcgaccacatgatggctatgattcaaatatatctgggacatcaaattggaatgacttgaaaaatacagatgtatttattattactgcaggaatacctcggaagccaggcatgaatcgagaggatctccttgaaattaatttagggataatgaaggatgttgctaaaaatataaaagaacaagctcctaattcatttgtgattgttatatctaatcctttagatgcaatggtatatactttttataaagtatctggctttagcaaaaataaagtagttggaatggcgggagctttagatagtgctagatttagaacatttctagccatggaaactggctgctctgttcaagatataacttgtatggtacttggtggtcatggtgatacaatggtaccaattacgcgtttagcaactataggtggagttcccttagaagaattgattccatcagatagattagatgaaatcgttgaacgaacaagattcgctggtggagaaatagtgaaattatttgggaatggatctgcgtattatgcaccagctcaatctgctatagaaatggctgaatcctatcttaaagataaaaaacgtgttataccctgtgcgtcactttgtgaaggtgaatttggtattaatggatattttattggcgtaccttctgttattggctcggggggagtagaaaaaattctagaatttgatttaaaagacgaagaaaaagctgccttagataatacattagaggcagtaaaaaatacagttcaagaaactgggttataaa

SEQ ID NO: 207429 - DNA, 847 bp, Unknown
  Bacterial polypeptide expressing nucleotide sequence isolated from the Sargasso Sea
tatgaaaaaaatatctttaattggagcaggtcaaatcggtggaacattagcacacttgattggtttaaaagaattggtttcggaagttgttcttttcgatatagctggtggaattgctaaaggcaaagctttagatattgcacaatcatcttctgtggatggatttaatgttagtttctcagggactgataaatataaagatataaaaaattcagatgtaataattattactgctggcgttcctagaaaaccaggcatgagtagagatgatctactaggtataaatttaaaaattatcaaacaagttgctcaaggaattaaacaaaatgctccaaatgcttttgtaatatgtatcacaaatccattggatgtaatggtaatggcctttcaaaaatattcaaatctacctacaaacaaagtagttggaatggcaggaattttggatagttcaagatttaaattatttttatcacaagaacttaaagttccagttaaagaaattgaagcaatggtaatgggaggtcatggagacacaatggttcctctaccaagatttacaaaagtttcaggaaaatctttgttagatttagtaaaagaaggaaaattatcactagaaagattagaagaaattaatcaaagaactagagatggaggcgctgaaattgttaaatatttagaaaaaggttctgcattttatgcacctgcagcgtcaggaattcaaatggcagaagcatatttaaaaaatgaaaaaaaattattaccttgtgctgcttatcttagtggagagtatggtataaaaaatatttatgctggagtccccagttataattggaaaatcaggtgttga

SEQ ID NO: 207430 - DNA, 753 bp, Unknown
  Bacterial polypeptide expressing nucleotide sequence isolated from the Sargasso Sea
ccttcaaagacgccgactacgcgctgttggttggtgctcgtccgcgtggtccgggcatggagcgtaaagatctgctggaagctaacgcagccatcttctccgcccaaggcaaagccatcaacgacaatgccagcaaaggcatcaaggttcttgttgtcggcaacccggccaacaccaatgccctgatcgcccaacgcaacgcgcctgacatcgatccccgtcagtttactgccatgacccgcctagaccacaaccgtgccatggcgcaactggccaacaaattgggcaaaaccgtcaatgacgtgaagaagatgctcatctggggcaaccactcttccactcagtatcctgatctgcatcactgtgaagtggatggcaaagtagccattgatcaggtcgagcaagactggtatgaaaacgactacatcccgactgtacagcagcgtggtgcagcgatcattaaggcccgtggcgcgtcttctgccgcgtctgctgctaacgctgccgtggaccacatgcgttcctgggcactgggcaccgacgaaggtgactgggtttccatgggcatctacagtgatggttcctacggcattcaggaaggcctgatctactccttcccttgcacctgcaagaatggcgactggactatcgttcagggcctagaggtcaatgacttctcccgtggcaaaatgcaagccaccgagcaggaactggccgaagaacgtgatgctgtttctcacctgctgccgtaag

SEQ ID NO: 207431 - DNA, 304 bp, Unknown
  Bacterial polypeptide expressing nucleotide sequence isolated from the Sargasso Sea
atgagaagaaaaaaaatatcactaattggatcaggtaatataggaggcactctagcacatttatttgccatgaaagaattgggtgatgtaatgttatttgatattgcagaaggtatacctcaaggtaaagcattagatttacaacaatcaggaccagttgagtcattcgatgtaaaagttgaaggaaccaacgattattcagatcttaaagatagtgacgtggttgtagttactgctggtgttcccaggaagcctggaatgagtagagatgatttagttgaaataaatacaaaagtaatgcaac

SEQ ID NO: 207432 - DNA, 967 bp, Unknown
  Bacterial polypeptide expressing nucleotide sequence isolated from the Sargasso Sea
atgaataaaaaaattgcattaattggtgcgggtcaaattggaggaacattagctcatttaataggattaaaagaattagcaaatgaagttattttgtttgatgtcgcaaaaggtattgcaaaaggaaaagctctagatatagagcaatcttcttctgtagatggatttaatgttaaaatttcaggctcagataattatcaagatatcaaaaattctgatgtaattattgtaacagcaggagtgccaagaaaaccaggaatgagtcgagatgatctgttgggtattaatctcaaaataattaaacaagttgcagaaggtataaaagaaaatgcccctaatgcgtttgtaatttgcataactaatcctttagatgttatggttatggcatttcagaaatattccaatcttccaaaaaataaagttgtaggaatggcaggtattttagactcttcaagatttaaattatttttatctagagaacttgatgttccagttaaagaaattgaggctatggtgatgggtggtcatggtgataccatggtaccattgccaagatttacaaaaatttcaggcaaaccacttttagaattagttaatcaaggaacaattagtactgaaaaacttgaaagtataaaccaaagaacaagagatggtggagctgaaattgtaaaatttttagaaaaaggatctgcattttatgctcccgcagcatctggagtagagatggcatcttcatacttaaatgattctaaaaagttgttgccatgtgcagcttatttaagtggtgaatatggaataaaagatatatttgcaggagtacctgttgtaattggaaaaaatggagttgaaaaagttgaggaaattgaactaaacgataaagagaataaggaatttttaaattctatagaggcagtaaaaaaattgtgggaagctgctgtaaaaattgatccttctttgttagcataag

SEQ ID NO: 207433 - DNA, 1000 bp, Unknown
  Bacterial polypeptide expressing nucleotide sequence isolated from the Sargasso Sea
aatgaaagaaattaatgttgcagttacaggcggagcaggacagatagcttattcactcttaccaagattgataagtggagaaacttttgggtctgatacaaaagtaaatttaagactcatcgaaatacctcaagttgttgataagttacaaggcacaattatggaattgatagactgtggttttgagcaaacaggtgagcttattgctacctccgacatcaaagaaggagtaaaagatgctgattggattcttttggtcgggagtattccaagagggattgttattgatgggaagaaaattgaagagagaagtgatcttctaaaaataaatggtggaatctttacagatcaaggatcagccataggagaactagctaagtcagatgcaaaaatattagtagtaggtaatccagctaacactaatgcacttattggaatgcactcagcgaataattcttcccagcagtggtttgctatgactgctcttgatgcaaatagagcgaaagcacagctagcagagaaagcagcagtagaaatttcatctataaaaaatatgattatatggggtaatcatagtcctaccatgtatcccgatccttataatgcaactattaatggtgttagtgctgctgaagttattaatgacaacctatggctcgaagatagttatttacctttggttcaacaaaggggtaaggccgtaatagacgcaagaggagcatcatctgctgcttccgctgctaatgctgcgatagatacggttaaagcggtaatcaaccctaccaaagaaggtgactgttatagcgcggctgttgtaagtgatggaagttatggaattccagagggattaatttttggattccctttaagtaccaattcaaatggagaaatcgagataattcaagggatagagctgaatgagtttgctcaaaccaagataaaagttactaccgaagaattagagtctgaaagagaagccgtttcagatctaataggctaa

SEQ ID NO: 207434 - DNA, 437 bp, Unknown
  Bacterial polypeptide expressing nucleotide sequence isolated from the Sargasso Sea
tatgaaaaaaatatctttaattggagcaggtcagattggtggaacgctagctcatttaattggtttaaaagaattagtgaatgaaattgttttatttgatgttgccccaggtattgctaaaggaaaagctctagatattgctcagtcttcatccgttgatggttttaatgttaaattgtcaggaacagataactacgaagacattaaaaattctgatgtgattattataaccgcaggtgttccaagaaaaccaggaatgagtagagatgatttattagaaattaatttaaaaattatcaaacaggtagccggaggtataaaaaagaatgcacctgaagcatttgtaatatgtattaccaaccccttagatgtcatggttatggcattctataaatattcaggtttaccagctaaaaaagttgttggaatggcaggga

SEQ ID NO: 207435 - DNA, 553 bp, Unknown
  Bacterial polypeptide expressing nucleotide sequence isolated from the Sargasso Sea
atgaaatttaaagtatcagtaataggagcaggaaacgtaggagcaacaactgcacaaagaatttttgaaaaaaaatatgctgatgtagtattggttgatgtagttgaagatatgccacaaggtaaagcattagatatattggaatctggtccagttttaggaacagatagtaaaataacaggttcaaatggatacgaagaaactgctaattctgacgttgttgttataactgctggaatagcaagaaaaccgggaatgagtagagatgatcttctacttactaacatgaaaattgtgggtagtgttacagaagaagtcgtaaaacactctccaaattctataattattgtagtttctaacccactagatgcgatggttcagcatgcttacaatataagtggatttgactctaaaagagttattggaatggctggtattttagatactgctagatttagtactttcattgccgaagaactcaatgtttctgttgaaagtgtgaacgcatatgttcttggaggacatggagatactatggttcctgttataggag

SEQ ID NO: 207436 - DNA, 937 bp, Unknown
  Bacterial polypeptide expressing nucleotide sequence isolated from the Sargasso Sea
atgaaagttgctgtacttggtgctgctggtggtatcggccaggctctcgccctactgttaaaaactcaattacctgcgggttctaaactgtctctatacgatatcgcaccggttactccgggtgttgcggttgacttgagccacatcccaactgcggttgaaatcaaaggttttgctggtgaagatccaacgcctgcactggaaggtgctgacgttgttctaatttctgctggtgttgcgcgtaagcctggtatggatcgttcagatctgttcaacatcaacgcaggtatcgttcgtaacctgatcgaaaaagtggcagtgacttgccctaaagccttagtgggtatcatcactaacccagtaaacactactgttgctatcgcagcagaagtgttgaagaaagccggtgtttacgacaagaaccgtctgttcggtgtgacgactctggacgttatccgttctgaaactttcatcgctgagttaaaaggcttaaacgttgctgacgttaaagtgaacgtcatcggcggccacagcggcgtgactattctgccattactgtctcaagtggaaggcgtgactttctctgatgaagaagtcgcttctctgaccaagcgtatccaaaacgcgggtactgaagtggttgaagctaaagccggtggcggaagcgcgactctgtctatgggtcaagcggcttgccgtttcggtatgtctctggttcgtggtctacaaggcgaagctaacatcgttgaatgtgcttacgttgacggcggcagcgagcacgcagaattcttcgctcaaccagtgctgttaggcaaaaacggtatcgaaaaagtactgccttacggtgaagtgagcgcattcgaagctaacgcccgtgattctatgttagatacgctgaaaggcgatatcaaactaggcgttgatttcgttaagtaat

SEQ ID NO: 207437 - DNA, 661 bp, Unknown
  Bacterial polypeptide expressing nucleotide sequence isolated from the Sargasso Sea
gttgcagaagggaataaaaaaaaatgctccaaaagcttttgtgatatgtattactaatcctttagatgtaatggtaatggcatttcaaaagttttcaggtctgtcaccaaataaagttgtaggaatggcaggtattttagatagctcaagatttaaattgtttttgtctgaagaatttaatgttccagtaagagaaatagaagcaatggtaatgggtggacatggcgatacaatggttcctttaccaagatttacaaaagtttcaggtagaccattattagacctagtaaatgaaggaaaaatttcacaaaaaagattagaagaaataaatcaaagaactagagacggaggagctgaaattgttaaattcttagaaaaaggttcggccttttacgcccctgctgcatcaggtgttgagatggctaaagcttaccttaaagatgaaaaaaaaatgcttccatgtgcagctttcttaaatggtgaatatggaattaaaaatatttatgctggtgttccaatcattgtcggtaaaaatggtgtagaaaaaattgaggaaataaatttagatgataaagaaaaagctgaatttcttcattctattgatgctgtaaaaaaactttgggacgcagcatctaaaatagatccagatttaattaaataa

SEQ ID NO: 207438 - DNA, 961 bp, Unknown
  Bacterial polypeptide expressing nucleotide sequence isolated from the Sargasso Sea
aatgagaaaaaaaatttctcttattggtgctggtaatattggtggaacccttgctcacctaataggtataaaagaattagctgatgtagttcttgttgatatagcaaagggaataccccaaggaaaggcccttgatattgctcaatcatctgcagttgaatcttttaatattaaaataaagggatcaaatagttacaaagacataaaaaactcagatgtaataattgttactgctggttttgcaagaaaaccaggtatgaacagagacgatcttgtagaaaaaaactccactattgttcaacaagttggtcaagcaataaggaagtatagtaaaaaatcttttgtaatttgtataactaatcctctagatgccatggttagcgtattacaaaaaagtgcaggtctaaaaactaatatgtgtgttggaatggctggtgtattagatagtgctagacttaaatattttttatcaaatgagtttgaagtttcagtagaagatgtcaacgcctttgttttgggtggacatggagacacaatggttcctttaattagatattcaactatatcaggaataccaatacctgaattaataagattaaaatggactacaagtaaaaaaattgatcaaattattaaaagaacccgagatggtggtgctgaaattggtaaacttttgaaaacagcttctgctttttatgctcctgcttcttctgctatttccatggcagagtcctttataagaaatgaaaaaagaattctaccttgcgctgcttacttaaatggagaatatggcataaaaggattttatgtaggtgttcctgtgataataggaagcaggggtgtggaaaagatcatagaattaaaactaaactcttctgaaaaaaaacaatttaacaaatcagtaaatgcagtaaaaaatttaacaaaacttgcagataaattattaaaaaaaaataaatga

SEQ ID NO: 207439 - DNA, 940 bp, Unknown
  Bacterial polypeptide expressing nucleotide sequence isolated from the Sargasso Sea
aatgaataaggttacagttgttggagctggaaagtatggatcgatgacagcgttaagaatagctgagtacgatattgtacaagaagttgtaatgacagatattgttgaaggccttcctcaagggcttgcccttgatatcaatcagtcacgatttgttgaacaattcaacacaaaactaataggaactaatgattataaggacacagaaggaagtgatgtagtcgttataactgctggtttaccacgtaagccaggaatgtctcgaatggatttgttagaggtaaatgcaaaaattgttgaaggtgtgactgaggaaatattaaagtattctgacaatccttcaatcgttgttgtgacgaatccacttgatcaaatgactactcttgcttcagatgtttctggtttgcctaaaaataaagtcatgggacaagcaggaattttagattcatcgaggttcgcatactttatcgctgaaaagctttctgttgatacctctgatgtatacgcactaaccttaggaagtcacggagaaacaatggtccctgttccatcactttgtacggtgaaaggagaacctcttatagatattttgagtgaatctgatataaatgagctggttgagaaaacttctaatggaggtgctgaaattgttggattgctaaaaactgggagtgcatattttgctcctgcttcttcagcggcagtcatggttaaatcaatagtaaacaattcagatgaaatatttcctgtttgtgcttggcttgaaggtcaatacggtattgatgacgtatatctaggagtgcctgcaaaactaggtaaagatggtgtcacagaagtagtagaatttgaacttaccgaacatgaaaaaaatgcactaattgatgcatcaaacgctgtaaaagctaaggttgaagagctcaataacataaaaaatcaataa

SEQ ID NO: 207440 - DNA, 1000 bp, Unknown
  Bacterial polypeptide expressing nucleotide sequence isolated from the Sargasso Sea
atgagctcatcagtaaaagtagttgtaacaggcgcagcaggtcaaatagcatactctctaataccaaggttggttgatggaagaacctttggagataagaaggtagatttaacactagtagagattcctcaggtcgtagatagacttaaagggttggtaatggaattagaagactcatattttccaaatatgggtgaagtaacttttacagataatttcgaagaagcgtcaaaagatggagattggtttttgcttgttggaagcatcccaagaggaattgtctacaacggcaaaaaaatagaggaaagatcggatcttttgagtataaatggtggaatctttgtcgatcaaggtaaagcaattggccagcatggtaaagatgatgcaaaaatacttgtagttggaaacccagctaatactaatgcttttattggaagaaatgctgccaataaagattcacagctttggatggcaatgacaatgctggattcaaacagagcgaagtctgttatttcaaaaaaaaccaatacgaacatatccgatataacaaatatgataatctggggcaatcacagtccaactatgtatcctgattctgaaaatgttcttattaatggagagctcggaagtaccataatcaatgatatgacttggattgaatctgagtttgttcctgctgttcaacaaagaggaaaagcagttattgatgctagaggtgcctcatcagcaacatctgcagcaaaagctgcaattgatacagttatagcttgtgagaatcaaactccatcaggtggttgttttagtgctgctatagccagtgacggctcttatggcgtccctgagggccttatttgcgggtatcctcttatgacccttcaggatggaactattgaaattaaaagagatataactttatcagacttcgcaaaatcaaaattccaaatatcaattgatgaactgcttgaagaaaaagaagcagtaaaacatctaataaaatgac

SEQ ID NO: 207441 - DNA, 961 bp, Unknown
  Bacterial polypeptide expressing nucleotide sequence isolated from the Sargasso Sea
tatgaccaagatatctttaattggagcaggacaaataggaggaacgctagcacatttgattggcataaaagagttagtaaatgagttagttttgtttgatgtggctagtggaattgctaaaggcaaaggtttagatattgctcaatcttcgtctgttgatggttttaatgtaaaattttctggcacggacaactacgaagatataaaaaattctgatgtcataataattacagctggtgttccaagaaaaccaggcatgagcagagatgatctattagggataaatttaaagataatcaaacaagtagctgagggtataaaaaaaaattcacctaatgcatttgtaatttgtataacaaatccattagatgtgatggttatggctttacaaaagttttctggattaccagctaataaagttgtggggatggcaggaatattagatagctcaagatataaactatttttatcattagaattaaatgtaccggtaaaagacatagaggcgatggtaatgggtggtcatggagatactatggtaccattacctaggttaacaaaaatatctggcaaacctcttttagatttagttaaagaaggtaaaatttcatctgaaaaacttgagagcattaaccaaagaactagagatggtggagcagagatagtcaagtatttagaaaaaggatcagcattttatgctccagcggcctcgggagttcagatggcagaagcttatttacaggataaaaaactaacattaccctgtgctgtcaaattagatggtcaatatggatttaaagatgtctatgcgggtgttccagtaataattggaagcaaaggtgttgaaaaaattgtggaaatagaattaaacgatcaagaaaaaaaagaatttattcactcagtagactcagttaagaaattatgggatgccgccactaaaatagatcccgaattaaaataa

SEQ ID NO: 207442 - DNA, 592 bp, Unknown
  Bacterial polypeptide expressing nucleotide sequence isolated from the Sargasso Sea
atggtaatggctttccaaaaatattctcagcttgcagctaaaaaagttgttggtatggcaggaatattagatagctcaagatttaaactttttttgtcagaagaattaaaggttccagtaaaagaaatagacgcaatggtcatgggcggacatggagacacgatggtaccaatgccaagattcactaaagtatcaggaaaacctttattagatcttgtcaattcaggtgttatttctaaagaaaaactagaaagcatcaatcaaagaacaagagatggtgggggtgaaattgtaaaatttttggaaaaaggttccgcatattatgcgccagctgcttcgggagtacaaatggctgaagcatttttaggtgataagaaactacagttaccttgtgccgcacaattagaaggtcaatatggttttaacggaatttatgcaggtgttccagttgttattggaaaaaatggagtagaaaaaatagtcgaaattcaacttgatgaaaaagaaaaggctgaatttattaattctgtgaatgctgtaaataagctttgggaggctgcagtaaaaattgaccctagcttgaaaaagtaat

SEQ ID NO: 207443 - DNA, 937 bp, Unknown
  Bacterial polypeptide expressing nucleotide sequence isolated from the Sargasso Sea
atgaaagttgctgtacttggtgctgctggtggtatcggccaggctcttgccctactgttaaaaactcaattacctgcgggttctcaactgtctctatacgatatcgcaccggtaactccgggtgttgcggttgacttgagtcatatcccaactgcggttgaaatcaaaggttttgctggtgaagatccaacgcctgccctcgtgggtgctgacgttgtgcttatctctgctggtgttgcacgtaaacctggtatggatcgttcagatctgttcaatatcaacgcgggtatcgttcgcaacctgatcgagaaagtggctgttacttgccctaaagcgctcgtgggtattatcactaacccagtaaacactacagttgctattgctgctgaagtgctgaaaaaagcaggtgtttacgataagaaccgtttattcggcgtgaccactctggacgttatccgttctgagactttcatcgctgaattaaaaggcttaaacgttgctgacgttaaaatcaacgtgatcggcggccacagtggcgtgactattctgccattactgtctcaagttgaaggcgtgactttctctgatgaagaagtggcttctttaactaaacgtatccaaaacgcgggtactgaagtggttgaagctaaagccggtggcggcagcgcgaccctgtctatgggtcaagcggcatgccgtttcggtatgtctctggttcgtggtctgcaaggcgaagctaacatcgttgaatgtgcttacgttgacggcggcagcgaacacgctgaattcttcgctcaaccagtattgttaggcaaaaacggtatcgaaaaagtactgccttacggtgaagtgagcgcattcgaagctaacgcccgtgattctatgttagatacgctgaaaggcgatatcaaactaggcgttgatttcgttaagtaat

SEQ ID NO: 207444 - DNA, 715 bp, Unknown
  Bacterial polypeptide expressing nucleotide sequence isolated from the Sargasso Sea
ttattaggtattaatttaggagttatgaagacagtaggtgaaggtataaaaaaatattgtcctaatgcctttgtaatatgtattactaacccacttgatgcaatggtatgggccttaagagcatttagcggtttgccttcaaataaggttgttggaatggcaggtgttttagatagttcaagatttagatattttttatctgaagaattaggagtttctatttctgatgtaacggcttttgttatgggaggtcatggagatactatggttcccttaattagatattcttctgttgcaggtattccattatcagagttaataaaaatgggatggattactaaaagtaaattaaatgagatagttcaaagaacaagagatggaggagcagaaattgtttctatgcttaaaacaggatctgcattttatgctcctgctacttcagcaattcagatggcagaaagttatttaaaagataagaaaaaagtattaccttgtgctgctatgttaaatggcgagtatggagttaaaggaatgtacgtaggagttccagtagtaattggaaagcaggggatagaaaaagtaattgaggtaagtttggatagaactgaaaaaactatgtttaaaaaatctgttaaggcagtaaatgaacttgtaacagcctgtaagaatatagataaatctttgaccactcattttagaaaaattaagttatagt

SEQ ID NO: 207445 - DNA, 967 bp, Unknown
  Bacterial polypeptide expressing nucleotide sequence isolated from the Sargasso Sea
tatgtcaaaaaaaatatcattaataggtgctggacaaattggtggaacactcgcacacttaattggcttaaaggaattagtagatgaggttgttatgtttgatgttgcaagtggtattgctaaaggaaaagcattagatatagctcaatcttcatcggtagatggttttaatgttaaattatctggaacagataattatgaagatattaaaaactctgatgtaattattataactgcaggagttccaagaaaaccaggaatgagcagagatgatttgttaggaataaatttgaaaattataaaacaagtagcagaaggtataaaaaaaaatgcacacaatgcatttgtaatatgtattactaatccattagacgttatggtgatggcgtttcaaaaatactcaggtctcccatcaaataaagttgttggtatggctggaatattggatagttcaagattcaaattatttttatcacttgaacttaaaattcctgtaaaagaaatagaagcaatggttatgggtggtcatggagatactatggttccattgccaagatttacaaaagtttcaggtaagccattattggatttagttaaagaagggaaattatcagcagaaagattagaagagatcaaccaaagaaccagagatggtggagcggaaattgttaaatttttagaaaaaggttctgcattttatgctccagcagcatcaggagttcaaatggctgaagcttacttaaaagatgaaaaaaaattacttccttgtgccgttcaacttaatggagaatatggagttaaaaatatttttgcaggagttccagtcataattggaaagaatggtgtagaaaagattgaagaaataaatttagatgaaaaggaaaaaagtcaatttatgcattcaatagatgcagttaaaaaattatgggaagcagcttcggcaatagataaagatctttccaagtaa

SEQ ID NO: 207446 - DNA, 688 bp, Unknown
  Bacterial polypeptide expressing nucleotide sequence isolated from the Sargasso Sea
ggtattaatttaaaaattattaagcaagttgctgaaagaataaaaaaacatgccgcagatgcttttgttatatgtattacaaatcctttagatgtaatggtgatggcttttcaaaaatattcaaatttacctacaaataaagtagttggaatggcaggaattttagatagctcaagatttaaattatttttatcgcaagaattaaaagttccagtgaaagaaatcgaagcaatggtaatgggaggtcatggagatacaatggtcccgttaccaaggtttacaaaggtttcaggaaaaccgttgttagatttagcgaaagaaggaaaattatcactagagagattagaagaaataaatcaaagaactagagatggaggtgcagagattgttaaatatttagaaaaaggttctgcattttatgcaccagcagcatcaggggttcagatggctgaagcgtatttaaaagatgaaaaaaaactattaccctgcgctgcttatcttaatggcgaatatggtgttaaaaatatttatgcaggagtacctgttatcattggaaaatcaggggtagaaaaaattgaggaaataaaactagatgataaagaaaaaaaagagtttgtaaattcaattgaagccgtcaaaaaattatgggaagctgcatctaagatagatccagaactctctaaataat

SEQ ID NO: 207447 - DNA, 832 bp, Unknown
  Bacterial polypeptide expressing nucleotide sequence isolated from the Sargasso Sea
agatattgcacagtcatcttcagttgatggttttgacgtaaaatttaaagggacagataagtatgaggatataaaagattctgatgtaataataattacagcaggagttcctagaaaaccaggaatgagtagggatgacctattgggtataaatttaaaaattatgaagcaagtagcttctggcgttaaaactaattgtcctgatgcatttgtaatttgtatcactaatcccttggatgtaatggtaatggcatttcaaaaatattcaaaattgccaacaaataaagtggttggaatggcaggcattcttgatagctccaggtttaagctttttttatctttagagttaggaattccagttaaacaaatagatgcaatggttatgggaggtcatggggatactatggttcctcttcctagatttacaaaagtaaatggtaaaaatttaaaagatttaattaaagaaggaaagatttctgaagataaagtagaaagtattaatcaaaggacaagagacggaggcgcagaaatagttaagcttttagaaaaagggtctgcttattatgcacctgctgcgtcgggagttgaaatggctatatcttttctaaatgatgaaaaaaaaattttgccttgtgcagcttatttaaatggagaatacggtgtgaaagatatttatgctggggttccagttttaattggaaataaaggtgtagaaaaaatccacgaaattgagctagatgaaaaagaaaaaaaagagtttttaaattcagtaaactctgttgaaaaactctgggaagcagctgtaaaaattgaccctgaattaagcaattaa

SEQ ID NO: 207448 - DNA, 901 bp, Unknown
  Bacterial polypeptide expressing nucleotide sequence isolated from the Sargasso Sea
actaaagttaaccttagattggtagaaatacctcaagtagtggacaagcttgaagggacaataatggagttagttgactgtggttttgatcagacaggctctatgttggcaactgctgatataaaagaaggagtagatggagctgattgggttctgctagttggcagcatacctagaggaatagtaatagatggaaaaaaaatagaagaaaggagtgacttattaaaaataaatggaggaatattcactgatcaaggatcggccattggaagcttagcaaataaggaagccaaaatattagttgtggggaatcctgctaacactaatgctcttataggaaaaaaacatgcaaataatgattctcaacaatggtttgcaatgactgctttggatgccaacagagcaaaagctcaactggctttaaaggctggatctgacataacttctgttagcaatatgaccatatggggtaatcacagtcccaccatgtatcctgatccttataacgctaaaattaatggaaccagcgctgcggaagtaattaatgataaaaaatggattgaaaacgaatatctgcctcttgttcagcaaagaggtaaagcggttatcgatgcaagaggcgcttcgtccgctgcttctgcagctaatgctgcaatagataccgttaaagctgttgagaatataactcctgaaaatgattcttttagtgcagcgattgcaagcgatggaagttatggtgtcccagaaggattaatttttggatacccactaagaacaactgctccaggaaaagtagaaattatccaaggtctagaattgaatgaatttgctaaatcaagaattaaaattactacagaggagttagaagaagaaaaggcagcagttaaagacttgctttagc

SEQ ID NO: 207449 - DNA, 391 bp, Unknown
  Bacterial polypeptide expressing nucleotide sequence isolated from the Sargasso Sea
gcaaccgcagaaggtcaagacctgaccaagctgatcaacgacgacgcatggaatcgcaacgaattcatcccgacggtcggcaagcgcggcgcggcgatcatcgaagcgcgcggcctgtcgtcggcggcatcggcggctaacgctgcaatcgaccacgtgcgtgactgggtgctcggcacgaacggcaagtgggtcaccatgggtatcccgtcggacggttcgtacggcattccggaagacatcatctacggtgtgccggttacctgcgaaaacggcgagtacaagcgcgtcgaaggcctggaaatcgatgcgttctcgcgcgaaaagatggacggcacgctgaacgagctgctcgaagagcgcgaaggcgttcaacacctgctcggctaag

SEQ ID NO: 207450 - DNA, 720 bp, Unknown
  Bacterial polypeptide expressing nucleotide sequence isolated from the Sargasso Sea
aaataagcacatttatttacgtgccattcaagataacaacgaaacgctttattaccgcttagtgcgcgatcatcttgaagaaatgatgccaattatttacacccctacagtgggtgatgcctgtgaaaagttttcggatatttaccgcagcgcacgtggtttgtttatttcgtacgaagaccgttaccaaattgacgacattttacgtaatgccacgaagggtaaagtaaaagtcattgttgtgaccgacggtgaacgtatattaggactaggcgaccaaggtattggcggcatgggtattcctattggtaaattgtcattgtacaccgcgtgtggtggcataagcccagcatatacattgccagtcatgcttgacgtagggaccaataacgaaaagcttttaaatgatcctatgtatatgggcgcgcgccataaacgtatagctcatgacgagtacgatgagtttttagatctatttattaaagcggtaaaacgccgttggccaaatgtattgcttcaatttgaagactttgcacaacctaatgctatgccgcttcttaagcgctatcgtgaagaaatttgtagctttaacgatgacattcaaggcactgcatcagtaacagttggctctttattagctgcgtgtcgtgttaaaggctcaactcttagccaacaaaaagttgtatttgttggtgcaggctctgcggggtgtggtattgc

SEQ ID NO: 207451 - DNA, 1149 bp, Unknown
  Bacterial polypeptide expressing nucleotide sequence isolated from the Sargasso Sea
gctgccaaaaggctctcaaattttacatgaaccactactaaataaaggttctgcatttagcttaaaagagcgcgaggcgctccatttaaatggccttcttcctccaagggtcctaactatcgaacagcaaaaaaatagaatcttagagaattttaacaataagcataatgacctagaaaaatatatttttttaatcgctttgcaagatagaaatgagaccctgttttacaaaacgatcaccgatgagatagaaaaaatgatgccaataatatacaccccaatcgttggtgaagcctgtcaaaaatatgggcatatatttcgtagaccacgagggctatatatttcaaaaaacgataaaggcaacataaagagtatcctaaaaaattggccaaatgataatgtggatgttattgtcgtaacagatggtgagaggattctaggactgggagaccttggggctaacggtatgggtatacctgttgggaaactatcactttatactgcctgtgctggagttgaccctgcaaaatgtttaccaattatgctagatgtaggaaccaacaatgaaaatctaaaaaatgaccctctatacataggccttactgacgaccgtatccggggcgaggaatatgatagttttattgatgaatttatgaaagagaccaatgaaaaatttccagatgcaattatacagtttgaagattttggcaatcataatgcggcaagactattagataaatataggaatagataccgtatgtttaatgatgatattcagggtacggctgctgttacactcgcgggtttgctatcaagccagagaattacaaaaagagatttagcagaagagaagattttgttttatggggcaggtactgcagggatcggtatagcaaatttgtatgttactgctctgatgaaaaaaggctattccaaagaggaggcgagcagccgatgttggtttattgatagtaagggtctagttgtttccagtagaaaaaatctcagtcaggataagcttccttttgctcatgaatattatgaaaaaaaagatctcagtgacattgttcaatctatcaggccaacagccttaatagggatttctggacaggcgaatgccttttcaaaaaatgttcttaagctgatgag

SEQ ID NO: 207452 - DNA, 811 bp, Unknown
  Bacterial polypeptide expressing nucleotide sequence isolated from the Sargasso Sea
tatggttgacttcaagcggggtatcgaagagcttccaaaaggctctcaaattttacatgaaccactactaaataagggttctgcatttagcttaaaagagcgcgaggcgctccatttgaatggccttcttcctccaagggtactaactatcgaacagcaaaaaaatagaatcttagagaattttaacaataagcataatgacctagaaaaatatatttttttaattgccctgcaagataggaatgagaccctgttttacagaacgatcaccgatgagatagaggaaatgatgccaataatatacaccccgatcgttggtgaagcctgtcaaaaatatgggcatatatttcgtagaccacgagggctatatatttcaaaaaacgataaaggaaacataaggaatatcctaaaaaattggtcaaatgataatgtggatgttattgttgttacagatggtgagaggattctaggactaggcgaccttggggccaatggtatgggcatacctgttgggaagctatcactttatactgcctgtgctggagttgaccctgcaagatgtttaccaattatgcttgacgttggaaccaacaatgaaaatctaaaaaatgaccctctatacataggccttactgaagaccgtatccgaggagaggaatatgatagttttattgatgaatttatgaaagagaccaatgaaaaatttccagatgcaattatacaatttgaagattttggcaatcataatgcggcaagactattagataaatacaggaatagataccgtatgtttaatgatgatattcaggga

SEQ ID NO: 207453 - DNA, 1021 bp, Unknown
  Bacterial polypeptide expressing nucleotide sequence isolated from the Sargasso Sea
atgacatcaaaaattatctatacaaaaacggacgaagctccggcactagcaacttactcgttgctaccgatcatccaagcatatacaaatgcagcaggtgttgaagttgaaactcgcgatatctcattagcaggtcgtgtaattgctagcttccctgattatttaacagaagaacaacgtattggtgatgcacttgctgaactaggtgagcttgcaaaaacacctgaagctaatatcatcaaacttccaaacattagtgcttcagttccacagttacgcgctgtaataaaagagcttcaagcaaaaggctatgcccttccagattaccctgtagagcctaaaaacgacgaagaaaaagcaatccaagctgcatacgacaaagttaaaggtagtgcggtaaaccctgtattacgtgaaggtaactctgaccgacgtgcacctggttctgtaaaagaatacgcacgcaataacccacattcaatgggcgcgtggagcaaagactctgcctcttacgttgcaagcatgagcgaaggcgatttctttggttcagagcaatcaacaactatcgaagaagcaactgacgtgcgcatcgagcatgttgctacaaacggtgatacaactgttcttaaacaaagcacaccactactagctggtgaagtaattgatgcttctcgcataagtgctgctaagctacaggcttttttagctgctgaaattgatgctgctaaagaaaaaggcgttttattctcgcttcacatgaaagcgacaatgatgaaagtgtctgacccaattatatttggtcacgctgttaaagtattctataaagacgtatttgcaaaacacggtgagctttttgaagagctaggtgttgatgttaataacggtttaggcgatgtttactctaaaattcaaacattagacgatgctaaacgcgctgaaattgaagccgatattcaagctgtatatgctgagcgccctgctattgctatggttgattctgaccgtggtatcacaaacttac

SEQ ID NO: 207454 - DNA, 196 bp, Unknown
  Bacterial polypeptide expressing nucleotide sequence isolated from the Sargasso Sea
atgagcaaaatcaaggtaaaaaacccagttgtcgagctggatggcgatgaaatgacacgtattatatgggagttcatcaaaaataaattagtcctcccatatttagatcttggtattgaatattatgatttaggcatgaaaagcagagatgatactgatgatcaaatcacaataaactctgcgaatgcgatcaaaa

SEQ ID NO: 207455 - DNA, 115 bp, Unknown
  Bacterial polypeptide expressing nucleotide sequence isolated from the Sargasso Sea
aatgactaaaatcaaagtaaaaaatccggttgttgaattagacggcgatgagatgacaagaattatttgggatcttattaaaaagaaacttattcttccgtatctagatattgat

SEQ ID NO: 207456 - DNA, 871 bp, Unknown
  Bacterial polypeptide expressing nucleotide sequence isolated from the Sargasso Sea
tatgcccgcccgctcgaagatcatctacaccttcgccgacgaagccccaaccctcgccacctattcggtgctgcctatcgtagaggccttaaccgcttccgctgatattgccgtggaaacccgcgacatttccctcgccgggcgcatcctcgcaagcttccccgagcaactgggcaccaaggccatcccggaccacctcgccgaactgggcgacctggccgttacgcctgaagccaatatcatcaagcttcccaacatcagcgcctcgaccccgcagctgcaagccgcgatcaaggaactgcaggcccagggctacgccctgccggactaccctgaaaccgtaaccaccgacgcggaaaaagaaacccgtgcacgttacgacaaggtcaagggcagcgccgtgaacccggtactgcgcgaaggcaactccgaccgtcgcgcaccgctgtcggtcaagaactatgcacgcaagcacccgcacaagatgggcgcctgggctgccgactccaagtcgcacattgcccacatgaacaacggcgacttctacggcagcgaaaaagccgtgcagatcgaaaccgctgacgcggtcaaaattgcgctggtcgcaaaggacggcaccaccaccgtcctgaaggaaaagaccagcgttcaggccggcgaaatcatcgacaccgccgtgctgagcaagaaagccctgcgcagcttcatcgccgctgaaatcgaagacgccaagaagcaaggcgtgctgttgtcggttcacttgaaagccaccatgatgaaggtctccgacccgatcatgttcggccagatcgttgccgagttctataaagacgccctggccaagcacgcgaccgtgctgaacagatcggct

SEQ ID NO: 207457 - DNA, 483 bp, Unknown
  Bacterial polypeptide expressing nucleotide sequence isolated from the Sargasso Sea
aatgacttataaaaaaataaaagttccaaaaaaaggtcaaaaaatttcatatgaaaatggaaagcttaatgttcctgataatcctgtaattccttatattgaaggtgatggtataggagttgatattactccacctatgatcaaagtagttgatgaagcagtaaaaattgcttacagcggaacaaaaaaaatagaatggatggaagtcttttgtggtgaaaaagctacaaaagtatatacaaaagatacatggctacctgacgaaacaatagatgctctaaaggaatatgttgtaagcattaagggacctttaactactcctgtaggaggcggaataaggtcattaaatgtgtcacttagacaattattagatttgtatgtctgtttgaggccaattaggtattttgatggcgtaccatctccagtaaaaaagcctaaagaagtggatatggtaatatttcgagaaaattcagaagatatcta

SEQ ID NO: 207458 - DNA, 91 bp, Unknown
  Bacterial polypeptide expressing nucleotide sequence isolated from the Sargasso Sea
aatgagcaaaatcacggtaaaaaacccagttgtagagctggatggtgatgaaatgactcgtattatatggaagtttatcaaaaataaataa

SEQ ID NO: 207459 - DNA, 477 bp, Unknown
  Bacterial polypeptide expressing nucleotide sequence isolated from the Sargasso Sea
tttgggataaatataatggtaaagctcctgaagaaaaaatagttataaatgatagaattgctgataatatgctacagcaaattttaacaagaactgatgaatatgatgtattagcccttccaaatttgaatggagattatatgtcagatgcatgtgctgcacaaattggtggtttaggtttagctccaggtgctaatataggggatgagatagctttatttgaagcaactcatggaactgcaccaaagtatgctggtcaagataaagttaatcctggatcagtaatactttctggagtgatgatgttcgagcatatgggttggaaagaagttggaaatttaattgtcaaagcgatggaaaaaacagttctagataaagatgttacatatgatctagaaagacaaatagagggtgcaaatttacttaaatgctctgaatttggcgatgcaataatcaaaaatatggacaaagtttagt

SEQ ID NO: 207460 - DNA, 715 bp, Unknown
  Bacterial polypeptide expressing nucleotide sequence isolated from the Sargasso Sea
aataatggccaaggtgcacctttaaccccaatttttcatcatattttatcaaaaaaaattaatcaaaattttaatattaaatttccaataggtttcttgaatattggtggtattgcaaatgttacaaaagttattaatgactcagataattttcaaaataacctttatgcttttgatataggtcctggtaattgtttaattgatgaatgggtaagaaataattccaataaaaaatttgataaaaatggcgaactatctaaagtaggtaatgttgatcaattaattctaaatcaggtaatagataattttaaaataaattcctactcccagtcattggatattaaaaatttcgatgtatcttttgcaagaggcttatctttagaagatggttgtgctactataacagatttttcagcatacttgattgcagaaggattaaaatatattagccaaaaaaataatattacatttttactttgtggtggtggtagaaaaaatagcaatttaattaattgtataaaaaattacatatcaaatgaaaataatattactttggaaattatagataattataatttaaatggtgattatattgagtcccaggcatttggatttttggctataagatcttttttaaatttaccgatttctttcacctcaacaactggatgtaaaaaatttacagtgggtggaaaactagtagaaaatttttaat

SEQ ID NO: 207461 - DNA, 847 bp, Unknown
  Bacterial polypeptide expressing nucleotide sequence isolated from the Sargasso Sea
aaagaatcattaaaaaaatataaagatcgaattgaccttgtaggtttccatggtcagacaatcttacataatccacgagaaaaaattacaatccaattaggagatgggaaactattatctcagataacaaaaaaaaaagtcatatatgattttagacaagctgatattcaaaataacggccaaggtgctccattaacaccaatttttcattatattttatcaaaacaaatcaatctaaattttaatattgaatttcctataggtttcttgaacatcggtggtatagccaatgtaacaaaagttaataataattcagataatttccaaaataatcttattgcatttgatgttggtcctggaaattgtttaatagatgagtgggtaagaaataattccaaacaaaaatttgacgaaaatggagaactagctaaatcaggtaaagttgatacattagttttgaaccaagcaatagataattttaatattaattcttattctcaatcattggatattaaaaattttgatgtatcttttgcaaaaggtttatctttagaaaatggctgtgcaacaattacaaattttactgcttacttaatttcacaaggattaaaacatattagtcaaaaaaatagtattatatttttagtttgtggtggtggtagaaaaaatagtaatttaattaatagtattaaaaattatttattagatgcgaacaatattaacttagatattatagacaattataatttaaatggtgattatatagagtcccaagcattcgcatttttagctataagatcttttttaaatttaccaatctcttttagtagtaccactggatgtgatg

SEQ ID NO: 207462 - DNA, 157 bp, Unknown
  Bacterial polypeptide expressing nucleotide sequence isolated from the Sargasso Sea
atggcaaaaataaaagttaaaaatccagtagttgagctagatggcgatgaaatgacccgtataatttgggcatttataaaagacaaattaatcaaaccttatctggatattgagcttaaatactttgatcttggtatggagaatagggataaaacca

SEQ ID NO: 207463 - DNA, 868 bp, Unknown
  Bacterial polypeptide expressing nucleotide sequence isolated from the Sargasso Sea
tatgtcgtatcaacacatttccatccccgagcagggagagcaaatcacgattgactcatctggcgtatggcatatcccttcacatcctatcgttgcttacatagaaggtgatggagtcgggcaggatattacccctgtgatgcgcagtgttgtcgattctgcggtgtaccatgcttatcacgatgaaaagaaaattcattggatggaagtatttaatggtgaaaaagcggctgtactgtatgatggtgattggtttccccaagaaaccttgcacgccgttagacaatacaaaatagcgattaaaggccctttaacaacaccccttggaggaggttttcgctctttgaatgtggcccttcgccatgaaatggatttgttcgttaatatgcggccaattcgcagctattcacgccttccttcgcccttaaaagagcctgagaaaaccaacataacagtcatccgtgatagttctgaagatgtgtattcgggaattgaatggcaggcaggaagcgttgataacgaacgcatgcttgattttttgtgtcaagaaatgggagtaacccgactgaggtttgacacacagtgtggcattggtatcaagaatagttcaaaagacggggctgagcgtttgatgcgttatgctgttaattatgcacttcaacaaaaaagcgactcactgacggtggtgcacaaaggtaatgtgcttaaatttaccgatggtgcctttaaacgatgggcgtttgcccttgcagagcaagaatttaatgcgcatcctcacgaaaatggtcgttggttagttatcaaacgcgacggcttaagtgatttaactattaaagaagtgattgctgataatatgtgcaacaagccc

SEQ ID NO: 207464 - DNA, 511 bp, Unknown
  Bacterial polypeptide expressing nucleotide sequence isolated from the Sargasso Sea
atgtcaaaaattaaagtagccaatcccatagtcgagatagatggagatgaaatggctagaatcatctggaaattcataaaagaaaaacttattctagactatctagatcttgatatagtatattatgatctaggaattgagtcaagggataaaactgacgaccaaattacaattgatgctgctaatgctattaaaaagtataatgttggtataaaatgtgcaacaataacaccagatgagcaaagggttgaagagttttctttatcaagaatgtataaatctccaaatgggacaattagaaacattgttggaggtactgtttttagagagcctattatatgtagatccatccctagatatgttcaaggttggtcaagaccaatatgtataggtaggcatgcgtttggtgaccaatatagagccactgatgtaattactcatggacctggaaaacttgaaataaaatttactcctaaagatggtggagaatcaacaacatgggaagtatata

SEQ ID NO: 207465 - DNA, 223 bp, Unknown
  Bacterial polypeptide expressing nucleotide sequence isolated from the Sargasso Sea
aatgactaaaatcaaagtaaaaaacccagttgttgagctcgatggtgatgaaatgacaagaataatatgggattttatcaaaaaaaaactaatactgccctatttagatattgatattaaatattacgacctaggtatactcaacagagataagacatctgaccaagtaacaattgattgtgctagggctattaaaaaatttggggtaggtattaaatgcgca

SEQ ID NO: 207466 - DNA, 144 bp, Unknown
  Bacterial polypeptide expressing nucleotide sequence isolated from the Sargasso Sea
tatggcaaaaataaaagttaaaaatccagtagttgagttagatggcgacgaaatgactagaattatatggtcatttatcaaagataagcttattaagccatatcttgagatagatctcaaatattatgaccttggtatggaaag

SEQ ID NO: 207467 - DNA, 124 bp, Unknown
  Bacterial polypeptide expressing nucleotide sequence isolated from the Sargasso Sea
atgagtaaaattaaggtaaaaaacccaattgtcgagttagatggcgacgaaatgacaaggataatttgggagtttataaaaaataagctaattcttccatatcttgatttggggattgaatatt

SEQ ID NO: 207468 - DNA, 202 bp, Unknown
  Bacterial polypeptide expressing nucleotide sequence isolated from the Sargasso Sea
tatgagtaaaattaaggtaaaaaacccaatagttgagttggatggcgacgaaatgactagagttatttggtctttcattaaaaaaaaattaattttcccatatattgatttaggaattgagtattatgaccttgggataaaaaatagagataacacaaacgatcaagtaacaattgattgtgcaaaagcattaaaacaatag

SEQ ID NO: 207469 - DNA, 118 bp, Unknown
  Bacterial polypeptide expressing nucleotide sequence isolated from the Sargasso Sea
atggcaaaattaaaagtaaaaaatccggtagtagagttagacggcgacgaaatgaccagaattatatggtcatttataaaagataagcttattaaaccatatcttgagatagatctta

SEQ ID NO: 207470 - DNA, 109 bp, Unknown
  Bacterial polypeptide expressing nucleotide sequence isolated from the Sargasso Sea
gatgttattggtgatgcatttcttcagcaaattttagttaaacatgaaaattttgttgtgattgctactactaatttaaatggtgattatgcatcggatgctttagcag

SEQ ID NO: 207471 - DNA, 130 bp, Unknown
  Bacterial polypeptide expressing nucleotide sequence isolated from the Sargasso Sea
aatgggtaaaattaaagtaaaaacaccacttgtcgaaattgatggagatgaaatgacaagaattatatggcaattcatcaaagacaaattaatacttccctaccttgatattgaactagactattatgat

SEQ ID NO: 207472 - DNA, 346 bp, Unknown
  Bacterial polypeptide expressing nucleotide sequence isolated from the Sargasso Sea
aatgggagattatttatcagactcagctgcagctgcagtaggaggtattggaatagctccaggagcaaatattaattataaatctggacatgctatttttgaagctactcatggaaccgcaccaaaatatgctgggcaagataaagtaaatccttcatctgtaattctttcagctgtgatgatgttagactatatcggttggaaagaagctgcaaattctatagaatatgctttggaaaaagcaatttttaataaaaaggtaacctatgattttcatcgtttaatggataacgctactttattaaaatgttctgaatttggcgatgagattatcagtaaattctaa

SEQ ID NO: 207473 - DNA, 178 bp, Unknown
  Bacterial polypeptide expressing nucleotide sequence isolated from the Sargasso Sea
agaactccaaatggtaccataaggaatattattggaggtacggtttttagagaaccaattatttgtaaaaatattcctaaacttgttccatcttggacagaacctgtaattataggaagacatgcttttggtgatcaatatagagctacagaatttaaagttccaggtaaagggaaaa

SEQ ID NO: 207474 - DNA, 237 bp, Unknown
  Bacterial polypeptide expressing nucleotide sequence isolated from the Sargasso Sea
aatgagtaaaatcaaggtaaaaaacccagttgtagagctggatggcgatgaaatgactcgtattatatgggagttcatcaaaaataaattaattctaccttatttagatctgggcattgaatattacgatttaggtatgaaaagcagagataatactgatgatcaaatcactatagactctgcaaatgcaattaaaaaaattggtgttggtataaagtgtgcaacaattactcctga

SEQ ID NO: 207475 - DNA, 346 bp, Unknown
  Bacterial polypeptide expressing nucleotide sequence isolated from the Sargasso Sea
gaatttaaatggtgattacctttcagatgcactagcggcaatggtaggtggtataggtattgctcctggtgcaaatattggtgatgaagctgcgatgtttgaagctacacatggaactgcaccaaaatatgctggcctagataaagttaatccattatctttaattctctccgctgaaatgatgcttagacatataaactggaatgaagccgcagatcttttaataaactcaattgaaaaaactattcaagatagatacgtaacttatgattttgaaaggttaatggataacgccacacttgtttcttgctcaggttttgcaaaagagatgatcaaaagaatgtaa

SEQ ID NO: 207476 - DNA, 250 bp, Unknown
  Bacterial polypeptide expressing nucleotide sequence isolated from the Sargasso Sea
atgagcaaaattaaggtaaaaaacccaattgttgaacttgatggtgatgaaatgactagagtcatatgggagttcatcaaaaaaaaattaattctacaatatttagatttaggaattgaatattatgacttaggaatgaaaagcagagatgctaccaacgaccaaattacaatagattgtgcaaaagcaataaaaaaaaatggtgtgggaattaaatgtgcaactatcactcctgatgaagcaagagaaa

SEQ ID NO: 207477 - DNA, 81 bp, Unknown
  Bacterial polypeptide expressing nucleotide sequence isolated from the Sargasso Sea
tatggcaaaaattaaagtaaaaaatccagtaatcgaattagacggtgacgaaatgaccagaattatatggtcatttatcaa

SEQ ID NO: 207478 - DNA, 485 bp, Unknown
  Bacterial polypeptide expressing nucleotide sequence isolated from the Sargasso Sea
agatgaattatgggataaatatgatggtaaggcaccagaaggtaaaattgttataaatgatagaattgctgataatatgttgcaacaaattttaacaagaaccgatgaatatgatgtacttgctcttccaaacttgaatggtgattatatgtctgatgcatgtgctgctcaaattggtggtttaggtttagcaccaggcgctaacattggagatgaaatcgcattatttgaagcaactcatggaacagctccaaaatatgctggtcaggataaagttaaccctggatctgtaattttatcaggagttatgatgtttgagcatattggttggagagaggtctctaatctgattgtcaaagctttggaaaaaacagttttagacaaagatgtcacttacgacttacatagacagattgagggagctaaccttctaaaatgttcagagtttggtgatgcaattattaaaaatatggataatgtatagt

SEQ ID NO: 207479 - DNA, 376 bp, Unknown
  Bacterial polypeptide expressing nucleotide sequence isolated from the Sargasso Sea
taaagatgtatttgactttaaagataaagggtgtgctttaagcatgtataacttagaagattctatagaaggtttcgcaagagcttgttttaattatggtcttaatttaggatggcctgtttatatgtctactaaaaatactatttcgaaagcttatgatggattattcaaagatacttttgaaaaaatttttataaaagagtttaaaagcaagtttgatgataaaggcataatttatgaacatagactaattgatgatatggttgcatgtgctatgaaatgggaaggaggtttcgtttgggcatgcaaaaattatgatggtgatgtgcaatctgatacaattgcacaaggatttggttctcttggtttaatgacc

SEQ ID NO: 207480 - DNA, 433 bp, Unknown
  Bacterial polypeptide expressing nucleotide sequence isolated from the Sargasso Sea
gtgattaaaagagatgagacaaatgatcaaatcacaatagatgctgctgaggcggttaaaaaatatggtgtaggaataaaatgtgcaacaattacacctgatgaaaatcgagtagaggaattcaaattaaaacaaatgtggcgttctcccaatggaacgataagaaatatactgggaggaacaatatttagacagccaattatatgcaaaaatgttccaagaataatcacaaactggaatcatccaattgtagttgctagacatgcctttggtgatcaatatagagcgactgacacattaattaataaaccaggaactcttaaaatggtttttgaacctaaagatggatctgaaggatttacaaaagatgtatatgaatttgaaaaacctggtgtagccctatcaatgtataatttagataattcaattaaag

SEQ ID NO: 207481 - DNA, 238 bp, Unknown
  Bacterial polypeptide expressing nucleotide sequence isolated from the Sargasso Sea
cctggtgttgcgctatcaatgtataacttggatcaatcaattaaagattttgctagagcttgtatgaattatggtcttaatagaaaatggcctgtttatctttcaacaaaaaatacgatattaaaaaattatgacggtcgatttaaagatttattcccagaagtttttgataaagaatttaaagataaatttaaagaaagagagataacttatgagcctaggcttatagatgacctgg

SEQ ID NO: 207482 - DNA, 321 bp, Unknown
  Bacterial polypeptide expressing nucleotide sequence isolated from the Sargasso Sea
catgccaaaaattgttgtaaaaaataaaattgtaaatcttaacggtgatgaaatggcaagagttttatggaataaaattgaaagtgaattaattctcccctaccttgaattaaaactatcaaatttcgatcttagtatcacaaatcgcgatgaaacaaatgatcaagtaacttctgatgctgccaatgagataaaaagaataaatgttggattgaaatgtgccacaatcactcctgacgataaaagagtcaaagaatataatttgaagaagaaatatccttctcctaatggaaccataagaaatattttgaaaggaacaat

SEQ ID NO: 207483 - DNA, 233 bp, Unknown
  Bacterial polypeptide expressing nucleotide sequence isolated from the Sargasso Sea
catgtcaaaacgtacaattaccgtaatccctggtgatgggattggacctagcattatcgattcagcattaaaaatcctcgacaaagcaggatgtgactttgaatacgaattcgccgatgcagggttaacagcactagaaaaacacggcgaattattaccacaacgcacgttagatcttatcgaaaaaaaccgcatcaccttaaaaggcccactgacgacacctgtgggtgaag

SEQ ID NO: 207484 - DNA, 138 bp, Unknown
  Bacterial polypeptide expressing nucleotide sequence isolated from the Sargasso Sea
aatgggcaaaattaaagtaaaaacaccactcgtcgaaattgatggtgatgaaatgacaagaattatatggcaattcatcagggataaattaatacttccctaccttgatatagaactagactattatgatctaggcgt

SEQ ID NO: 207485 - DNA, 212 bp, Unknown
  Bacterial polypeptide expressing nucleotide sequence isolated from the Sargasso Sea
aatgagcaaaatcaaggtaaaaaacccagttgtagagctggatggcgatgaaatgactcgtattatatgggagttcatcaaaaataaattaatcctcccatatttagatcttgatatcaaatatttcgatttaggcatgaaaagcagagataatactgatgatcagattacgattgattctgcaaaatgcattaaaaatgttggtgttggaa

SEQ ID NO: 207486 - DNA, 105 bp, Unknown
  Bacterial polypeptide expressing nucleotide sequence isolated from the Sargasso Sea
tttgagtaaaattaaagtactcaaccctgtggttgagatggacggtgatgaaatgacacgcattatttgggataaaataaaacagaacctgattctaccatttct

SEQ ID NO: 207487 - DNA, 214 bp, Unknown
  Bacterial polypeptide expressing nucleotide sequence isolated from the Sargasso Sea
tatgagcaaaataaaggtaaaaaatccaattgttgagctagatggtgatgaaatgacaagaattatttggaaattcattaaagaaaaattaattctcccttatttggatttaagaattgaatattacgatcttggaatgaaaagccgcgacgataccagtgatcaaataactgttgattgtgccaatgcaatcaaaaaaaatggagttggaatt

SEQ ID NO: 207488 - DNA, 244 bp, Unknown
  Bacterial polypeptide expressing nucleotide sequence isolated from the Sargasso Sea
cttcacttttgcatggacaagaggtcttatgcatagaggtaaattagacaataatcaagaacttattgatttctgtaaactactagaaggagtttgtatagaaacaattgaaggaggaaaaatgacaaaagaccttgcattattagtttttagagatgatatggtaagttcaaattaccttacaactgaacaattctttgaagaattaaaaagtaatctagaaagaaaaataaaaggagcataa

SEQ ID NO: 207489 - DNA, 270 bp, Unknown
  Bacterial polypeptide expressing nucleotide sequence isolated from the Sargasso Sea
catgacaaattctaaatcaataaagatggaagatggtaaactaaatgttccagtagaacccataattccatttattgagggcgatggtatcggtccagatatttggaaagctgctgtaaatgtttttgatagtgctgttcagaaagcctacggcggttctcgaaaagtggaatggttagaaatattagctggagaaaaagcatttgaaacaactggtgagtggttgcctcaaaaaacatttagatttggtaaccaaacatcatgtcgcaa

SEQ ID NO: 207490 - DNA, 868 bp, Unknown
  Bacterial polypeptide expressing nucleotide sequence isolated from the Sargasso Sea
tctggccaaatgtggggcccagatggccaattaaaagacaccaaagcgatgatcccagatcgttgttacgctggtgtataccaagaaactatcgcattttgtaaaaaacatggcgcgtttgacccaacaacaatgggtagcgtaccaaacgtgggcctaatggctcaaaaagccgaagaatatggtagtcatgataaaacatttgagattaccgcagcaggtactgtcaacgtgattaatcaagctggcgatgtgttaatgagccacaacgtcgaagtgggcgatatttaccgtatgtgtcaggtaaaagatgctccgattcgtgactgggttaagttagccgtaagacgttcacgtttaagcaatactccagctattttctggttagacagcgcgcgtgcacatgatgctgaattaatcaaaaaagtgactcaatacctagcacaagaagatacagcaggtttagacattcaaattatgtctccagttgaagcaactcgcgtaacgttagagcgtatcattaaaggccaagataccatttctgttaccggtaacgtgttgcgtgactacctaaccgatttgttcccaattcttgaattaggcacaagtgctaaaatgttatcaattgtaccgttaatgaatggcggtggcttatttgaaacaggcgcaggtggtagtgcaccaaagcatgtccaacaggtagaaaaagaaggccacttacgttgggattctttaggtgagtttttagcgctagctgcatcattagagcatttagctcaaacagctaacaaccctaaagcccaagtgcttgctgatacgttagatttggcaattggtgagttcttagacagtaataaatcgccttcac

SEQ ID NO: 207491 - DNA, 262 bp, Unknown
  Bacterial polypeptide expressing nucleotide sequence isolated from the Sargasso Sea
aatggcaaaaataaaagttaaaaatcccgtagttgaaatggatggagatgaaatgaccagaattatctgggaatacattaaagaacaattaattttgccttatcttgatatagatatcaaatattttgatcttggaataattaaaagagatgaaactaatgatcaaattacaatagatgctgccgaggcagtgaaaaaatatggggtaggaataaaatgtgcaacaattacaccagatgaaaatcgagtagaagagttcaaa

SEQ ID NO: 207492 - DNA, 373 bp, Unknown
  Bacterial polypeptide expressing nucleotide sequence isolated from the Sargasso Sea
gaagagagaatatgaagtcttcaattttcctggtcctggtgttgctttatcgatgtataatcttgacagatccatagaggattttgccaggtcctgtttcaactacggtctaattaaaaaatggcctgtttatctttctacaaaaaatacaattttaaaaacctatgacggaagatttaaagatatttttcaaaaagtttttaatgaagaattcaaaaaagattttgataaaaataatattacatatgagcatagattaattgatgatatggttgcatgtgctatgaagtggagcggaaaatatatttgggcttgtaaaaatatgatggagacgttcaatcggatacagttgctcagggatatgggtctttag

SEQ ID NO: 207493 - DNA, 744 bp, Unknown
  Bacterial polypeptide expressing nucleotide sequence isolated from the Sargasso Sea
tatataattttagacaagcagatattcaaaataatggccaaggtgcacctttaacaccaatttttcatcatattttatcaaaaaaaattaatcaaaaatttaatttaaaatttccaataggtttcttgaatatcggtggaatcgcaaatgtaacaaaagttattaatgactctgataattttcaacataacctttctgcttttgatataggacctggtaattgtttgattgatgaatgggtaagaaataattctaataaaaaatttgacacaaatggcgaaatagctaaagcaggaaaagttgatcaattaattctaaatcaagcaatagataattttaaaataaattcttactcccagtcattggatattaaaaattttgatgtatcatttgcaagaggtttatctctagaagatggttgtgctactataacagattttacagcatatttgattgcagaaggtttaaaatatattggtaaaaaaaatagtattacatttttactctgtggtggtggaagaaaaaatagtaatttaattaatcttataaaaaattatatatcaaatgaaaattatattaatttggaaaatatagataattataatttaaatggtgattatattgagtcccaggcttttggatttttggccataaggtcttttttaaatttaccaatctcatttagtacgacaactggatgtaaagaatttacagtaggtggaaaattggtagaaaatttttaat

SEQ ID NO: 207494 - DNA, 80 bp, Unknown
  Bacterial polypeptide expressing nucleotide sequence isolated from the Sargasso Sea
tatggcaaaaattaagggtcaaaatccaatagttgagctagatggcgacgaaatgactagaatcatatggtcttttataa

SEQ ID NO: 207495 - DNA, 394 bp, Unknown
  Bacterial polypeptide expressing nucleotide sequence isolated from the Sargasso Sea
atgagtaaatcaaagattaaagtcccagcgatgggtgagaaaataacttacaaaaataacaaactgattgtgccagataatccgataataccttttattgaaggagatggcataggagttgatataactcctgtaatgcttgatgtaattaatgccgctgtagaagaagcttatgaaggtaaaagaaagataagctggatggagatctattgtggtgaaaaatcagttgaagtttatggtgataatgaatggttgcctgatgaaacacttcaagcttgtaaagattacaaagtctccattaaagggccattaacaactcctgttggtggcggtattcgctctctaaatgtagctataagacaaaaattagatctatatgtatgtttgaggctct

SEQ ID NO: 207496 - DNA, 349 bp, Unknown
  Bacterial polypeptide expressing nucleotide sequence isolated from the Sargasso Sea
agaggcttatcattagaagatggttgtgctactataacagattttactgcatatttgatttcacaaggattaaaacatattagtcagaaaaatagtattacatttttaatttgtggcggtggaagaaaaaataataatttaatcaatagtattaaaaattatttagtaaatgaaaattatattaatttagaaattgtagataattataatcttaatggtgattatattgagtctcaagcatttgcatttttagctataagatcgtttttaaatttaccaatttcttttaaatcaacaactggatgcaatgaatttacagttggggggaaattggtagaaaatttttaat

SEQ ID NO: 207497 - DNA, 148 bp, Unknown
  Bacterial polypeptide expressing nucleotide sequence isolated from the Sargasso Sea
ctgtttttagagaacctaattatttgttcaaacatccctaaattagtgccttcatggtcagatccagtggtgattggtagacatgcttttggagatcaatacagagcaactgattttaaagttccaggcaaaggtaagatggaagtta

SEQ ID NO: 207498 - DNA, 510 bp, Unknown
  Bacterial polypeptide expressing nucleotide sequence isolated from the Sargasso Sea
aatgtcagaacacaaaatagcagttattccaggtgacggtataggcatcgaagtaatcacagaagcaaaacgtattatgactcatatagaagaaactaatgcaggaattaaatttaattacatcgacctaccttggggatcagaatattacaggcaaaccggtctgatgatgccagatgatggacttgaccaaatcaaagattctgatgctattttatttggagctgttggagaccctaacatcccagatcacataactttacaaggcctactgctacctatgagaaggcaatatgaccaaggtatttcaataaggccagcctatttatatcctggagtaaactctcctataaaagataaaggtcccggagagattgatatggttattttccgggaaaacacagaaggcgagtatgctcctgttggtggtagtttgtactcaggtactgaccacgaaactgtaattcaaacaaatgtatttacaagaagaggtacagagagaatcataga

SEQ ID NO: 207499 - DNA, 295 bp, Unknown
  Bacterial polypeptide expressing nucleotide sequence isolated from the Sargasso Sea
tgcccctggagcaatatcaattatacaagtgggcatgctattttcgaagcaacacatggtacagccccaaagtatgcaggaaaagatcaagtaaatccaagttccgtcatcttatctggtgtcatgatgttagaatatatgggatggcaggaagctgcagatctaatagtaaaaggcatagaaggtgctatcagcaacaaaagagttacgtacgatttccacagacttatggatggagcaacaaaattaaaatgttctgaatttggatctgagatcatttccaatatgtcctgat

SEQ ID NO: 207500 - DNA, 78 bp, Unknown
  Bacterial polypeptide expressing nucleotide sequence isolated from the Sargasso Sea
aatgacaaaaattaaagtaaaaaacccagtagttgagcttgatggcgatgaaatgacccgaataatatgggattttgt

SEQ ID NO: 207501 - DNA, 139 bp, Unknown
  Bacterial polypeptide expressing nucleotide sequence isolated from the Sargasso Sea
acatgtatcgaaactgttgaatctggcaaaatgacaaaagatctagcaattttgattagccaagatcaaaaatggctaaacactcaagatttcttaaatactctaaaagataacttggagagaagattagaaacttaaa

SEQ ID NO: 207502 - DNA, 169 bp, Unknown
  Bacterial polypeptide expressing nucleotide sequence isolated from the Sargasso Sea
gatgttagaatatatgggatggcaggaagctgcagatctaatagtaaaaggcatagaaggtgccatcagcaacaagagagttacgtacgatttccatagacttatggatggagcaactaaattaaaatgttccgaatttggatctgagatcatttccaatatgtcctga

SEQ ID NO: 207503 - DNA, 199 bp, Unknown
  Bacterial polypeptide expressing nucleotide sequence isolated from the Sargasso Sea
ccgagttccgtcatcttatctggtgttatgatgttagaatatatgggatggcaggaagctgcagatctaatagtaaaaggtatagaaggtgctatcagcaacaaaaaagttacgtacgattttcatagacttatggatggagcgacaaaattaaaatgttccgaatttggatctgagattatttccaatatgtcctgat

SEQ ID NO: 207504 - DNA, 550 bp, Unknown
  Bacterial polypeptide expressing nucleotide sequence isolated from the Sargasso Sea
aatgacttataaaaaaataaaagttccaaagaaaggacaaaaaatttcatataacaatggaaaacttattgtccttgataatcctataattccttatattgaaggagatggaataggtgttgatataactccgcctatgattaaagttgtcgatgaggcagtaaaattagcttataacggaagtaaaaagattgaatggatggaagtcttttgtggtgagaaggctactaaaatttattcaaaagatacttggcttccagatgagacaattgatgctctaaaggaatttgtagtaagtattaaagggcctttgactacgccagtaggtggaggaataagatctttaaatgtttcactaagacaattattagatttgtatgtatgtttaagaccaattagatattttgatggtgttccatctccagttaaaaacccagaacaagtagatatggttatttttagagaaaattcagaagatatttactgtggagtagagtttgaaggtaattcaaaagatgccaagaacctacttaaaatattaaaatcaaaa

SEQ ID NO: 207505 - DNA, 1221 bp, Unknown
  Bacterial polypeptide expressing nucleotide sequence isolated from the Sargasso Sea
gccgacatcaaagctgtctatgcaaaacaacccgctctgcgatgggtgaactctgataaaggcatcacgaacttgcatgttccaagcgatgtgattatcgatgcttctatgcctgctgctatccgctcttctggccagatgtggggcccggatggcaagttaaaagacaccaaagctattattcctgaccgttgctacgcaggtgtgtatcaggaaaccatcaatttctgccgtgaacacggtgcttttgaccctcgcactatgggctcagtgccgaacgttggtttaatggcgcaaaaagcggaagaatacggctcacacgataagactttcgaaattaaagctgcgggtcaggttcgtgtcgtagatgctgctggtactgtgctgattcagcataacgtggagcaaggtgatatctggcgtatgtgtcaggccaaagacgcaccaatccaggattgggtgaaactggcggtcaaccgtgcccgtttaagcaaaactcctgcggtattctggttagacaaaaaccgtgctcacgatgctcagctgattgctaaagtagaacgttacttaaaagatcacgacaccactggtttagatattcagatcatgtcgccggaagatgccacacgtcataccttaaaacgtatcaaagcaggtctggataccatttctgtgacaggcaacgtattacgtgactacttaacggacttattcccaattctggaattaggcaccagcgcgaagatgctgtctattgtgcctctgatgaatggcggtggtttgttcgaaacgggcgctggtggttctgctcctaagcacgttgaacagtttgttgaagaaaaccacttacgttgggattcgttaggtgaattcctggctctggctgcctctctggagcatttaagtcaggttacgggcaataccaaagctcaggtactggcagatgccttggatcaggccacagccaagttccttgataacgataaatctccaacccgtaaactgggtcagttggataaccgtggcagtcacttctatctggcattctactgggctgaagctctggccgcacaaagcaaagacgcagccttagcggcccgatttgcgccgctggccaaagctttgacagagaacgaagctaaaattgtgcaggagttaaattccgtacaaggcaaagcggtagatataggcggttactacaagccagacgacgcattagcg

SEQ ID NO: 207506 - DNA, 524 bp, Unknown
  Bacterial polypeptide expressing nucleotide sequence isolated from the Sargasso Sea
aatgtctgaaaagaaagctaagataatctataccgatactgacgaagcaccagctttggcaacctattcttttcttccaataattaagtcattcacagcaggatcaggtatagcggtggagacaagagacatttcgctggcgggacgaatcatagcgaattttcctgagtttcttaatgactcgcaaaaacagtctgatgctttggccgaattgggagagttaacgcaagatgaaatggcaaacatcataaaactgccgaatatctcagcgtccatacctcaaatgaaagacgcaattaaagaactccaggataagggttatgttctgccggactacccagaggagccaaacgatgatcaagagcgagacataaaggcccgctacgaccgcatcaaggggagtgctgttaatcccgtcttgcgagagggaaattctgatcgtcgtgcgccgggttctgttaaagagtatgcgagggccaacccacattcgatgggcgtttggtcggctgacagcaaaacgcacg

SEQ ID NO: 207507 - DNA, 532 bp, Unknown
  Bacterial polypeptide expressing nucleotide sequence isolated from the Sargasso Sea
tatgagttcacaaactattacggtcatcaaaggtgatggcataggtccaagcatagtagaagccgctatccaggttctggataaagtaggctgtaactttaactatgaatatgttgaagcaggtttaaccgctttagaaactactggtgaattgctgccgcagaccacgctggacgctattgcccgcaataaaatcaccttaaaaggcccgttaactacaccagtaggtgaaggtttcacttctattaacgtgactttacgtaagaaattcaatctgtactcgaacgtacgtccggtgatttcgtttaaaggcaccaaagcacgctacgaaaatatcgacatcatcacagtgcgtgaaaatactgaaggtatgtactcaggcgccggccaaatcgttaaaaacgagggcgagctggctgaggcgatgagcgtcgtcacccgcgaaggttctgaacgtattgttgagttcgcctttgaactggctcgtcgcgaaaaacgcaaaaaagtaactattgttcacaaagcgaatatc

SEQ ID NO: 207508 - DNA, 214 bp, Unknown
  Bacterial polypeptide expressing nucleotide sequence isolated from the Sargasso Sea
atgagtaaaatcagtgtaaaaaatcctattgtagagctagacggcgatgaaatgactagaataatctgggaattcattaaaaataaattaatccttccttatctagatctcggtattgagtactacgatttaggaatgaaaagtagggataacacagatgatcaagtaacagtagactcagcgaatgctatcaaaaaaattggtgttggtataa

SEQ ID NO: 207509 - DNA, 565 bp, Unknown
  Bacterial polypeptide expressing nucleotide sequence isolated from the Sargasso Sea
tatgggttataaacatatcaagatccctaaagaaggctcaaaaattaaattatccgatggaattattcaagtccctgacaatccaattatcccatacatagagggtgatggaattggaattgatattaccccagctatgctaaacgttgttgatagcgctgtcgaaaaagcttataaaggaagtaaaaaaatatcatggatggaagtttactgtggtgaaaaatctacaaaagtttatgaccctgacacatggctaccagatgaaactatagatgctttaaaagaatatatggtgagtattaaaggtccattaacaactccagttggtggcggcataagatcgttaaatgtatctttaagacaaatccttgatttgtatgtttgtctaaggccaattagatattttgctggtgtgccaagtccagtaaaaaatccttcttatgtcgatatggttatatttagagaaaattctgaggacatatatgcaggagttgagtttgaagctggttcatcagaatcagatgcaatggtaaaagttctacaagaacaatttggtgtaactcaa

SEQ ID NO: 207510 - DNA, 226 bp, Unknown
  Bacterial polypeptide expressing nucleotide sequence isolated from the Sargasso Sea
aatgaaaaagattaaagttaatacacccttagttgaaatagacggagatgaaatgactagaattatctggcagtttatcaaagaaaaactgatactcccctatctagatatagaattagattattatgatcttggggttaaaaatagagataactctaatgaccaagtaactgttgattcagcaaatgccataaaaaaatacggtgttggagttaagtgtgcaacc

SEQ ID NO: 207511 - DNA, 1144 bp, Unknown
  Bacterial polypeptide expressing nucleotide sequence isolated from the Sargasso Sea
aatgaaaaaaaaattatatactgcaattggactaatgagcggaacatctatggatggtattgatttatctataattagttcagatggatacgatgaattttcaaacattttagatgattattatgagtatgataaaaatcttcaggatcagttagttcgattaagagatttagttttaacaaagaaagatcttttacaaaattcagaaaaattaagagaattagagcgtaatttaactctttttcatgccgatgcagttaatcaatcattaaaaaaatatagagatcccattgatttgataggttttcatggtcaaacaatttttcataacccaaatgagaaaattaccaatcaattaggagatgggaaattgttatctcaaatggtcaaaaaaaaagtcatatatgattttagacaagcggatattcaaaataatggccaaggtgcacctttaactccaatttttcatcatattttatcaaaaaaaattaatcaaaattttaatattaaatttccaataggtttcttgaatattggtggtatcgcaaatgttacaaaagttattaatgactctgataattttcaaaataacctttctgcttttgatataggccctggtaattgtttaattgatgaatgggtaagaaataattctaataaaaaatttgataaaaatggtgaactatctaatgcagggaaagttgatcaattaattctaaatcaagcaatagataattttaaaataaattcttactcccaatcactggatattaaaaatttcgatgtgtcttttgcaagaggtttatctttagaagatggttgtgctactataacagattttacagcatatttgattgcagaaggtttaaaatatattagccaaaaaaatagtattacatttttactctgtggcggtggtagaaaaaatattaatttaattaattgtataaaaaattatatatcaaatgaaaattatattaatttagaaagtatagataattataatttgaatggtgattatattgaatcccaggcatttggatttttggctataaggtcttttttaaatttaccaatttcttttagcacaactactggatgtaaagattttacagttggcggaaaactggtagaaaatttttaa

SEQ ID NO: 207512 - DNA, 280 bp, Unknown
  Bacterial polypeptide expressing nucleotide sequence isolated from the Sargasso Sea
tatggaaaaaattaaagtaaaaaatcccgttgttgaaatggatggggatgaaatgactagggttatttgggagtttatcaaagataaactaattcttccatatattgatgtagatattaaatattatgatttaggagtaaaaagcagagataattcagaagatcaaattacaatagattcagctgaagctgttaagaaatatggagttggaatcaaatgcgcaacaataactccagatgaagaaagggttaaggaatttagtttaaaaaaaatgtggcgt

SEQ ID NO: 207513 - DNA, 195 bp, Unknown
  Bacterial polypeptide expressing nucleotide sequence isolated from the Sargasso Sea
tatggcaaaaataaaagttaaaaatccagtagtggagttagatggcgacgaaatgactagaattatatggtcatttataaaagacaagcttattaagccatatcttgagataaaccttaaatactatgatcttggtatggagagtcgagataaaactgatgaccaaatcactgtagatgcggcaaatgcaataaa

SEQ ID NO: 207514 - DNA, 154 bp, Unknown
  Bacterial polypeptide expressing nucleotide sequence isolated from the Sargasso Sea
atgagtaaaatcaaggtaaataacccggttgttgagctggatggtgatgaaatgacccgtattatatgggagttcatcaaaaataaattaattctaccatatttagatcttggtattgagtactacgatttgggtatgaaaagcaagagataat

SEQ ID NO: 207515 - DNA, 1228 bp, Unknown
  Bacterial polypeptide expressing nucleotide sequence isolated from the Sargasso Sea
atgtccacatcgccgaagatcatctacaccctgaccgacgaagcgcctgctctggcgacttattcgctgctgccgatcgtcaaggcgttcacgcgctcgtccgacgtgatcgttgaaacgcgcgatatctcgctcgccggccggatcattgctgcattcccggactacctgagcgcggaacagaagggttccgacgatctggcggaactgggtggactcaccacgcgtccggaagcgaacatcatcaagctgccgaacatcagcgcttcggtgccgcaactgaaggcggcgattgccgaactgcgcgatcagggcttcaagctgccgtcctatccggacgaagcgaagaccgacgaagagaaagacgtcaaggcgcgctacgacaagatcaagggcagcgcggtgaacccggtgctgcgtgaaggcaattcggatcgccgcgcgccgctgtcggtgaagaactacgcgcgcaagcatccgcacaagatgggcaggtggagcgcggactcgaagtcgcacgtggcgcacatgagcggcggcgatttctacggcagcgaaaaatcggcgctgatcgcagcagccggcaccgtgaagatcgaactcaccaccgccgacggcgcgaccagggtcctgaaagaaaagacggccgtgcaagcgggcgagatcatcgacgcatcggtgctgagcaagaacgcgctgcgcaacttcatcgaagcggaaatcgccgatgcgaaggccaagggtgtgctgttctcggtgcacctgaaagcgaccatgatgaaggtgtcggatccgatcatcttcggccacgtggtttcggtgttctacaaagacgtgctgaccaagcacgccgacgcgctggcgcaagccggtttcaatccgaacaacgggatcggcgatctgtacgcgcgcctgaaggatctgccggccgaaacgcgtgaagcgatcgaagccgacatcaaggcgcagtacgcgcaacgtccgcaactggccatggtcaactcggacaagggcatcaccagcctgcacgtgccgagcgacgtgatcgtcgacgcctccatgccggccatgattcgcgagtcgggcaagatgtggggcgcggacggcgcgctgcacgacgccaaggcggtcattccggatcgttgctacgccggcgtctaccaggctgtaatcgaagattgcaaaaagaatggcgcattcgacccggtcacgatgggcacggtgccga

SEQ ID NO: 207516 - DNA, 469 bp, Unknown
  Bacterial polypeptide expressing nucleotide sequence isolated from the Sargasso Sea
cctggagataaaatattagtacaagatgttattgcagatgcatttttacagcaaatcctaattaaaccacaaatgtttgatgtaattgctacaacgaatctcaatggagattatgcttctgacgccttagcagctcaaataggaggcattggtatcagtcctggaggaaacataaactatgaaaatggaaaagcggtttttgaagcaacacatggtactgctcctaaatatgctggtcaagataaaacaaatccaggatcattaattttgtcaggagtaatgatgtttcgatatatgggttggaatagtgctgctgatctaattgttaactcaatggagaaaacaattctcgaaggaaaagtaacttatgatcttgctcgaggaagaagtgtcaaaaaaattctctcttcatcagaatttgcaaatgctttaatcagtaatatgaaaacttcaaaaaaggagaagtagt

SEQ ID NO: 207517 - DNA, 129 bp, Unknown
  Bacterial polypeptide expressing nucleotide sequence isolated from the Sargasso Sea
gagaacctattatttgcaaaaatattccaaaattatttccatcttggaccgatccattgattattggaagacatgcctttggagatcagtacagagcaactgactttttagtacctgtgaaaaggtaag

SEQ ID NO: 207518 - DNA, 268 bp, Unknown
  Bacterial polypeptide expressing nucleotide sequence isolated from the Sargasso Sea
gatgcatcaacagggcaaagaaacatctaccaatccaatagcatccatttttgcatggacaagaggtttggctcatagaggtaaattagacaataatgataaattgattaaattctctgatattttggaaaaagtatgtatagatgctgtggaaggtggatcaatgactaaagacttggctattttattaagtacatctacaaaatatttaactactaatcaatttttagatgaattagatggtagattaaaaaaaaaattaaattaa

SEQ ID NO: 207519 - DNA, 205 bp, Unknown
  Bacterial polypeptide expressing nucleotide sequence isolated from the Sargasso Sea
tgttcaatcagatacagtcgctcaaggatatggttctttaggattaatgactagtgtattgttggcaccagatgggaaaaccatggaagctgaggctgctcatggaacggtcacaagacactttatggatgcatcaacagggcaaagaaacatctaccaatccaatagcatccatttttgcatggacaagaggtttggctcatag

SEQ ID NO: 207520 - DNA, 478 bp, Unknown
  Bacterial polypeptide expressing nucleotide sequence isolated from the Sargasso Sea
catggcaggaacagcaattacaatgaataatggagaactagtaatcccaaataatccaataatctatttcatagaaggagatggaattggagtagatattacccccgtaatgcagaaagttgtagatgctgctgtaagtaaagcatacgggaatgaaaagcaaatccactggagtgaagttttagcaggagaaaaagcatttaatgcaacaggagaatggttgcctgaatctacattaaatgctatgaagagtggtcttgtttcaattaaaggtcctttgacgaccccagtcggaggaggtatcagaagtcttaatgtggctcttcgacaaaaattagatctttttgcctgtgtacgtccagttagatggtatgaaggtactcctagccctgttcgtgatcctggtgcagttgatatgattattttccgtgaaaatagtgaagatgtatatgcaggaattgaatgggaaatgggaaca

SEQ ID NO: 207521 - DNA, 490 bp, Unknown
  Bacterial polypeptide expressing nucleotide sequence isolated from the Sargasso Sea
atggcaaaaataaaagttaaaaaccctgtagttgaaatggatggagatgaaatgaccagaatcatctgggagtacatcaaagaacaattaattttgccctatcttgatatagatatcaaatattttgatcttggagtgattaaaagagatgagacaaatgatcaaatcacaatagatgctgctgaggcggttaaaaaatatggtgtaggaataaaatgtgcaacaattacacctgatgaaaatcgagtagaggaattcaaattaaaacaaatgtggcgttctcccaatggaacgataagaaatatactgggaggaacaatatttagacagccaattatatgcaaaaatgttccaagaataatcacaaactggaatcatccaattgtagttgctagacatgcctttggtgatcaatatagagcgactgacacattaattaataaaccaggaactcttaaaatggtttttgaacctaaagatggatctgaag

SEQ ID NO: 207522 - DNA, 306 bp, Unknown
  Bacterial polypeptide expressing nucleotide sequence isolated from the Sargasso Sea
cagtagaagctgaagctgcacatggaactgttactagacattatagaaatcatcagaaagggatagaaacttcaactaatccaattgcatcaatttttgcttggacaagaggtctaagttttagaggagaatttgatggcaatattgaactaataaattttgctaaaaatttagaagatacgtgtatcaaaactgtagaaaatggtgagatgactagagatttggcaatattgataaataaagatcaaaaatggttaaatactcaagattttttaagtgcaataaaaaacaatttttcaaactaac

SEQ ID NO: 207523 - DNA, 316 bp, Unknown
  Bacterial polypeptide expressing nucleotide sequence isolated from the Sargasso Sea
atggcaaaaataaaagtaaaaaaccctatagttgaaatggatggagatgaaatgaccagaattatctgggagtacatcaaagaacaactaattttgccctatcttgatatagatatcaaatattttgatcttggagtgattaaaagagatgaaactaatgatcaaattacaatagacgcagctgaagcagtaaaaaaatatggcgtaggaataaaatgtgcaacaattactcctgatgaaaatcgagtagaagaattcaaattaaagcaaatgtggcgttcccccaatggaacgataagaaatatattgggaggaa

SEQ ID NO: 207524 - DNA, 506 bp, Unknown
  Bacterial polypeptide expressing nucleotide sequence isolated from the Sargasso Sea
aatgagtaaaattaaggttaaaaaccccattgtagagttagatggtgatgaaatgaccagagttatatgggacttcataaaaaataagctcgttttaacttaccttgatctcaaaattgagtactacgatttaggaatggaaagcagggataaaactgaggacaaaataacaattgaatgtgctaatgcaattaaaagaaatggtgtcggtattaaatgtgcaaccatcacaccagatgaaactagagtaagagaatttaatcttaaaaaaatgtggagatctccaaatggtacaataagaaatataattggaggaactgtttttagagaacccataatttgtaaaaatattccaaaacttgtgccctcatggacagatccattgatcataggtaggcatgcgtttggtgatcaatacagagcaaccgactttacagtacctggtaaaggtaagttagaaatcaaatggactgctgaagatggttctgatgagagaaagtatgaag

SEQ ID NO: 207525 - DNA, 300 bp, Unknown
  Bacterial polypeptide expressing nucleotide sequence isolated from the Sargasso Sea
ctgctcatggtacagtaacaagacattataggatacatcaacaagaaaaagaaacctcaacaaaccctattgcttctatttttgcttggactagaggattagctcatagaggtaagttagatggtaatgaagaattaattaaatttgcacaaactttagaaaaagtttgtattgaatgtgtagaaagtggatcaatgacaaaagatttagcaattcttattggtcctgatagtaagtatttaactaccaatcagtttttagatgaaattgatggtaatttgaaaaagaaattaaattaaa

SEQ ID NO: 207526 - DNA, 856 bp, Unknown
  Bacterial polypeptide expressing nucleotide sequence isolated from the Sargasso Sea
tcgagaacctataatgattgataagatacccaaaattgttgatcattggaataaacctgtaatcatagctcgtcatgcgttcggtgatatttatagatccaaagaaatagttgtagataaaaaagggaaacttacaatttgttttgaagatgaagatggaaataaggaagaaaaattaatacacaattttgaaacaggtggtgttggtcttgcatactttaatgtgtttgagtctatcaatgattttgcaaattcttgttttaattttgcatgtaaaagaaaagtttcacttttcttatcaacaaaaaatacaattttacaaaaatatgatgaaagctttaaacaaatatttgatgatgtatttaaaaaatttaaaaaagaattcgaaaaaaacaacttaacttatcaacatagattaatagatgatatggtagcgtgtcttatgaaatggagtggggggtttatatgggcatgtaaaaattatgatggtgatgttatgtctgatctagttgctcaaggttatggctcattgggattaatgacctctgtattacagagtccagacggaaaaatattgaagtcagaagcagcacacggaacaattactagccacttcagacaacaccaacagggtattcaaacttcgacaaatccaatagcatctatttttgcctggacaagagctttaaaacaaagagcaatcattgataataactctgatttattaaaattctctgaaaatttagaaaatatttgcatagacacaattgataatggttttatgacaaaagatttagcactgatgtgtggaccagagcaaaaatggattactacaaatgaatttttcgacattatt

SEQ ID NO: 207527 - DNA, 393 bp, Unknown
  Bacterial polypeptide expressing nucleotide sequence isolated from the Sargasso Sea
tatgagcaaaattaaggtcaaaaacccagtagtagagttagatggtgatgaaatgacaagggttatatgggaatttattaagaagaaattgatccttccatacttagaccttggtattgaatattacgatcttggaatgaaaagtagagacgatacctctgaccaaatcacgatagattgtgctaatgctataaagaaaaacggagttggaattaaatgtgcaacgatcacaccagatgaggccagagtaaaagaatttaacttaaaaaagatgtggcgatctccaaatggaacaataagaaatattattggaggaactgtttttagagagccaataatttgcaaaaatgttccaagacttgttccttcatggacagatcctgtaataattgg

SEQ ID NO: 207528 - DNA, 262 bp, Unknown
  Bacterial polypeptide expressing nucleotide sequence isolated from the Sargasso Sea
tatgaacaaaattaaagttaaaaatccgttagtagaaattgatggagatgaaatgactagaataatatggaagatgattaaagaaaagtttattttcccatatttagatattgatttaaaatattttgaccttggaattgagtatagagataaaacaactgacaaagttacggtagatgctgctaatgcaattaaactatatggtgttggcgttaagtgtgcaacgataacacccgatgaagaaagagttaaagaatttaac

SEQ ID NO: 207529 - DNA, 307 bp, Unknown
  Bacterial polypeptide expressing nucleotide sequence isolated from the Sargasso Sea
tatgatctttgggattgaaagtcgagataaaactgatgaccaaattaccattgatgcagctaatgctattaagcaacatggtgttggcgttaaatgtgcgactataactcctgatgaggctagagttgaggaatttaagctaaaaaaaatgtggagatcgcctaatggtactattaaaaatatattaggtggtacagtatttagagaaccaattatttgtaaaaatgttccaaagttagtacctggtatggacacaaccaattgtaataggcagacatgcttttggagatcaataccgtgcgactga

SEQ ID NO: 207530 - DNA, 273 bp, Unknown
  Bacterial polypeptide expressing nucleotide sequence isolated from the Sargasso Sea
tatgaattacggacttgtaagaaaatggccagtttatttatctactaaaaatacaatacttaaagcttatgatggaagatttaaagatttatttcaagaagtttttgaaaaagaattttatgataaattcaaaaaagcaaatattacatacgaacatagattgattgatgacatggttgcgtgtgcaatgaaatggaatggcggatttgtttgggcttgtaaaaattatgatggtgacgttcaatctgatactgttgcacaaggatttgggtc

SEQ ID NO: 207531 - DNA, 297 bp, Unknown
  Bacterial polypeptide expressing nucleotide sequence isolated from the Sargasso Sea
aatgagtaaaattaaggttaaaaacccgattgtcgagttagatggtgatgaaatgacccgagtaatctgggactttataaaaaataaacttattctgacttaccttgatctaaaaattgaatattacgatttgggtatggaaagtagagataagactgaggataaaatcaccgtagagtgcgccaatgcaatcaaaaagaacggtgtaggaataaaatgtgcaaccatcacacctgatgaagcaagagttaaagaatttaatttaaaaaaaatgtggagatcaccaaatggtactat

SEQ ID NO: 207532 - DNA, 103 bp, Unknown
  Bacterial polypeptide expressing nucleotide sequence isolated from the Sargasso Sea
ggcttgcaaaaattatgatggagacgtgcagtccgatactatcgctcagggttttggttcattgggacttatgactagtgttttaatgtcacctgcacggtaa

SEQ ID NO: 207533 - DNA, 328 bp, Unknown
  Bacterial polypeptide expressing nucleotide sequence isolated from the Sargasso Sea
cctgcacggtaatactatagagtctgaagctgctcatggtacagtaacaagacattatagactgcatcaacaaggtaaagaaacctcgacaaatccaatagcttcaatttttgcttgggcaagaggattgtatcataggggaaaactagacaacaatgaaagtttaaaaaaatttgtaaaaaccttggaaaaggtttgtatagaaactgtagaaaatggatctatgacaaaagatcttgctatgttaatcaataaaaatcaaaagtatttaactacaaatgaatttttggaaatcatagattctaatctaagaaaaagtcttaactaa

SEQ ID NO: 207534 - DNA, 283 bp, Unknown
  Bacterial polypeptide expressing nucleotide sequence isolated from the Sargasso Sea
actagacattatagacaatacccaagcaggaaaagaaacatctacaaatcctatagcttctatatttgcatggacaagaggattatctcacagaggaaatcttgatggaaatcaggagcttatcaagtttgcaagtactctcgaaaaagtttgtatagaaactgttgaaagtggttctatgactaaggatttagcggtattaataagtaaagatcaaaaatttttaacaactaatcaatttctagaagctatagactctaaccttaaaaaaaagctcaactaa

SEQ ID NO: 207535 - DNA, 358 bp, Unknown
  Bacterial polypeptide expressing nucleotide sequence isolated from the Sargasso Sea
aatggcaaaaattaaagtaaagaatccagtagttgagctagacggtgatgaaatgacgcgaataatatggaatttcatcaaaaacaaactgattcttccctatttagatataaatattaaatactacgatttaggtattaaaaatcgagacaaaacttctgatcaagtgactgttgaaagtgcaaatgcaataaaaaaaataggcgtgggcattaagtgtgcaacaattacacctgatgaaattcgtgtaaaagaattcaaattaaaaaaaatgtggagatcacctaatggaactatcagaaatattttaggtggtactgtttttcgcgaacctataatttgtaaaaatattccaaaa

SEQ ID NO: 207536 - DNA, 149 bp, Unknown
  Bacterial polypeptide expressing nucleotide sequence isolated from the Sargasso Sea
catggtagcttgtgcaatgaagtggaatggaaattatatatgggcatgtaaaaattatgatggtgatgttcaatcagataccattgctcaaggttttggatccttaggtcttatgactagtgtattattaactccagatggaaaaacta

SEQ ID NO: 207537 - DNA, 426 bp, Unknown
  Bacterial polypeptide expressing nucleotide sequence isolated from the Sargasso Sea
aaactttttatgaagtttgtggatgaagatggaaaaatagatgaaaaagaagtttttcaattttcaaatcaaggcgtagccctctccatgtataatgtagatgagtcgataagaggatttgcaagagcttgttttaattatgggctcaaattaaagtggcctgtttatctatccacaaaagatacaattttaaaaaaatatgatggaagatttaaagagatctttcatgaaatttttcagaatgaatttgcatctgattttgaaaatagcaagattgtctacgagcatcgtcttattgatgatttagttgcatcttcaatgaaatggtctggaaaatttatatgggcatgcaaaaattatgatggggatgttcaatctgatgctgtcgcacaaggtttcggctctttaggtatgatgtctagtgtt

SEQ ID NO: 207538 - DNA, 150 bp, Unknown
  Bacterial polypeptide expressing nucleotide sequence isolated from the Sargasso Sea
cggctaatcagaaaagccatccagtacgcgattgacaaccaccgagagagcgtcaccctggttcacaaaggcaacatcatgaagttcaccgaaggcgcctttaggaactggggctacgagctggccaaagaggaattcggcgatcaggtg

SEQ ID NO: 207539 - DNA, 271 bp, Unknown
  Bacterial polypeptide expressing nucleotide sequence isolated from the Sargasso Sea
aaggtctgcaatccaattgtcgagctagatggcgatgaaatgacccgtgttttctgggagtttataacaaataagctaatactttcatatttagatttaggaattgaatactatgttcttggcataaaaaatcgagataaaacaaatgaccaagtaacaattgattgcgcaaatgcaattaaaaaaaatggtgttggtattaaatgtgccacgataacaccagatgaattaagagtaaaagaatttagtttaaaaaaaatgtggagttctc

SEQ ID NO: 207540 - DNA, 300 bp, Unknown
  Bacterial polypeptide expressing nucleotide sequence isolated from the Sargasso Sea
ctgcacatggtactgttacgagacattatagacttcatcaacaaggtaaagaaacttcaacaaatccaatagcatctatttttgcatgggcaagaggtctttatcatagaggaaaaatggataataacgaggaacttaaaaaatttgtaaaaactttagaaaaagtttgcattaaaacagttgagagtggtttaatgacaaaggatttggcaattttagttggtccatcaagcaaatatctcactacaaatcaatttttagatgtaattgatggaaaccttaaaaataagttaaattaaa

SEQ ID NO: 207541 - DNA, 358 bp, Unknown
  Bacterial polypeptide expressing nucleotide sequence isolated from the Sargasso Sea
cttaggccttatgacaagtgtattaatgactcctgacggaaaaactatagaatctgaagccgcacatggaactgtaacaaggcattatagattacatcagcaaggaaaagaaacctcaacaaatccaattgcttctatatttgcttgggcaagagggctatatcatagagcaaaactggacaacaatgaagatttgaaaaaatttgtaaaaactttagaaaaggtttgtattcaaactgtagaagatggatcaatgacaaaagatcttgcaattcttattggcccttcaacaaaatttttaactactaatcagtttttagatgaaattgatggaaacttaaaaaaaaaattaaattag

SEQ ID NO: 207542 - DNA, 268 bp, Unknown
  Bacterial polypeptide expressing nucleotide sequence isolated from the Sargasso Sea
atgagcaaaatcaaggtaaaaaacccagttgttgagctggatggcgatgaaatgactcgtattatatgggagttcatcaaaaataaattaattctaacatatttagatcttggtatcgaatattacgatttaggtatgaaaagcagagacaatacgaatgatcagattacaatcgactctgcaaatgcagttaaaaaaattggtgttggaataaagtgtgcaacgattacacctgatgaagcaagagtagaagaatttgatttaaaaa

SEQ ID NO: 207543 - DNA, 346 bp, Unknown
  Bacterial polypeptide expressing nucleotide sequence isolated from the Sargasso Sea
atgagcaaaataaaggtaaaaaatccagttgttgaactagatggtgacgaaatgacaaggattatatggaaatttattaaagacaaacttatccttccttacttagatttaaaaattgaatattatgatttaggaataaaaagtcgtgacaatactggtgatcaaataactgtagattgtgcgaatgcaattaaaaaaattggcgtaggaattaaatgtgccacgatcacaccagatgaaggtagagtaaaagaatttaatttaaaaaaaatgtggagatctccaaatggtacaataagaaatatattgggaggcactgtttttagagagcctattatgtgtaaaa

SEQ ID NO: 207544 - DNA, 298 bp, Unknown
  Bacterial polypeptide expressing nucleotide sequence isolated from the Sargasso Sea
aatggcagataaaattcaaattaaagatggaaagttaattgttccagaccaaccaataattccatttattgaaggagatggtatagggccagatatatgggcagcagcacaaagagtaattgatgcagcagttgaacatacttatcatggagctagaaaaattgaatggttggaagtgctctgtggtgaaaaatcatttaataaaaatgaagaatggcttccagaagaaactttggaaactttacgatcgcattatgttggaattaaaggaccattaacaactccaattggaggggga

SEQ ID NO: 207545 - DNA, 520 bp, Unknown
  Bacterial polypeptide expressing nucleotide sequence isolated from the Sargasso Sea
atggcaaaaataaaagttaaaaaccctgtagttgaaatggatggagatgaaatgaccagaatcatctgggagtacatcaaagaacaattaattttgccctatcttgatatagatatcaaatattttgatcttggagtgattaaaagagatgagacaaatgatcaaatcacaatagatgctgctgaggcggttaaaaaatatggtgtaggaataaaatgtgcaacaattacacctgatgaaaatcgagtagaggaattcaaattaaaacaaatgtggcgttctcccaatggaacgataagaaatatactgggaggaacaatatttagacagccaattatatgcaaaaatgttccaagaataatcacaaactggaatcatccaattgtagttgctagacatgcctttggtgatcaatatagagcgactgacacattaattaataaaccaggaactcttaaaatggtttttgaacctaaagatggatctgaaggatttacaaaagatgtatatgaatttgaaa

SEQ ID NO: 207546 - DNA, 357 bp, Unknown
  Bacterial polypeptide expressing nucleotide sequence isolated from the Sargasso Sea
aatgagcaaaattaaggtaaaaaatcccattgtcgagctagacggcgatgaaatgacaagagtaatttgggaatttatcaaaaacaaattaattctaccttatttagatttaggcattgagtattacgatctgggaatgaaaagtagggatgatacagatgacaaaattaccatcgactgtgctaatgcaattaaaaagaatggagtaggtatcaaatgcgcaactattactcctgacgaggcgagagttgaagaatttaaattaaagaaaatgtggagatcaccgaatggaacaataagaaatattattggaggaacagtatttagagagccaataatttgtaaaaatattcctaa

SEQ ID NO: 207547 - DNA, 563 bp, Unknown
  Bacterial polypeptide expressing nucleotide sequence isolated from the Sargasso Sea
tatgccaaaatttgaaaaattaactttacctaatgaaggcgagataataacttttaatcaaggcaaacctaatgttcctaataatccaattgtcccatttattaggggtgatggtactggagttgatatttggcctgctactcaaatcgttcttgattcagcgattaaaaaaagctatggagatgaaagaaaaattaattggtttaaagtatatgcaggcgatgaagcttgtgaactttatggaacatataactatctaccgcaagatactattgaagcaatcaaactctttggtgtagccatcaaagggcctttaacgactcccatcggtggaggtattagatctcttaatgttgcattaaggcaaatctttgatttatatagctgtgttagaccatgcaaatattattcaggcactccaagccctcacaaaaatccccaaaatttagacgttattgtttatagagaaaatactgaggatatctacatgggaattgaatgggaagcggaggataataattgtcttgaattaattaatcacttaaataacattgtcataccaa

SEQ ID NO: 207548 - DNA, 205 bp, Unknown
  Bacterial polypeptide expressing nucleotide sequence isolated from the Sargasso Sea
ctatgatttggggatgaaaagtagagataatactgatgaccaaatcacaattgactctgcaaaagctataaaaaaaattggtgttggtattaaatgtgcaactattactcctgatgaagcgcgcgtagaagaatttaaattaaaaaaaatgtggagatctcctaacggaactataagaaaatataattggaggaacagtttttag

SEQ ID NO: 207549 - DNA, 309 bp, Unknown
  Bacterial polypeptide expressing nucleotide sequence isolated from the Sargasso Sea
aatgactaaaattaaggtaaaaaacccagttgttgagctaaatggtgatgaaatgaccagagtaatatgggaattcattaaaaacaagctgatactaacatatttagatttgggaattgaatactacgatcttggaataaaaaatcgagacaaaacaaatgaccaaattacaattgattgtgcaaatgcaattaaaaaaataggagttggaattaaatgtgcaacgattactcctgacgaagcgcgtgtgaaagagtttaacttaaaaaaaatgtggagatctccaaatggtacaatcaggaacataaa

SEQ ID NO: 207550 - DNA, 264 bp, Unknown
  Bacterial polypeptide expressing nucleotide sequence isolated from the Sargasso Sea
aatgagtaaaattaaggttaaaaacccgattgtcgagttagatggcgatgaaatgaccagagtaatctgggactttataaaaaataaactaatacttacctaccttgatctaaagattgaatattacgatttaggcatggaaagtagagataagactgaggacaaaatcactatagagtgtgccaatgcaatcaaaaagaacggtgtaggaataaaatgtgcaaccatcacacctgatgaagcaagagttaaagaatttaattt

SEQ ID NO: 207551 - DNA, 478 bp, Unknown
  Bacterial polypeptide expressing nucleotide sequence isolated from the Sargasso Sea
aatgaaaaaaattaaagtaaaaaaacccatagtagagctagatggcgacgaaatgacaagagtaatatgggattttattaagaaaaaattaattttaccctatatagacatagatattgaatattttgatttaggaataaaaaatagggataagacatccgataaagtaacaattgattgtgccaatgccataaaaaaaattggagtaggtattaaatgtgcaacgataacacctgatgaaaaccgcgtaaaagaatttaatttaagtaaaatgtggagatctccaaatggtaccatcagaaatattttggggggaactgtatttcgtgaaccaataatttgtaaaaatattccaaagttagttccaagctggactaacccaattgtaataggcagacatgcttttggtgatcaatatagagcaacagattttaaagttcctggaaaaggaaaactagaattaaaatggacttctgaa

SEQ ID NO: 207552 - DNA, 277 bp, Unknown
  Bacterial polypeptide expressing nucleotide sequence isolated from the Sargasso Sea
atgagcaaaattgccgtaaaaaatccgattgtagagctagatggcgatgaaatgactagaataatatgggaatttattaaaaataaattaattcttccttatctagatttgggtattgagtactatgacttaggtatgaaaagtagagataataccaatgatcaagttacagttgactcagctaatgctattaaaaaaaatggtgtaggtattaaatgtgcaaccattactcctgacgaagaaagagttaaagaatttagtttaaaaaaaatgtgga

SEQ ID NO: 207553 - DNA, 271 bp, Unknown
  Bacterial polypeptide expressing nucleotide sequence isolated from the Sargasso Sea
agaatggcatcaacagggaaaagaaacttcaaccaaccccattgcttcaatatttgcatggacaaggggtcttgcgcatagaggaaagttagacaataatgatgaattaataaaattctctaaaattttagaagatgtgtgtattaactgcgttgagacaggttcaatgacaaaggatttagcaattctaatcgacaaaaatcaaaagtatttaactacaaatcagtttctagattctattgatgggaatcttaagaagaaattaaattag

SEQ ID NO: 207554 - DNA, 406 bp, Unknown
  Bacterial polypeptide expressing nucleotide sequence isolated from the Sargasso Sea
tatgagcaaaattaaggttaaaaaccctgtcgtcgaattagatggcgatgaaatgaccagggtaatttgggaatttataaaaaataaactaatacttccatatctggatattggaattgaatactatgatcttggcatggaaagtcgggataaaaccaacgaccaaattactgttgatagcgctaacgccattaaaaaagttggagttggaattaagtgcgcaacaattacacctgatgaagctcgagtcgaggaattcaaattaaaaaaaatgtggcgatcaccaaacggtacaataagaaatattattgggggaacagtatttagagaaccaataatttgtaaaaatattccaaaactagttccttcatggactgaccctgttgttattggaagacatgcattt

SEQ ID NO: 207555 - DNA, 268 bp, Unknown
  Bacterial polypeptide expressing nucleotide sequence isolated from the Sargasso Sea
ttatagaaatcatcagaaaggtatagaaacttcaacaaatcctattgcatcaatttttgcttggacaaggggtttaagttttagaggagaatttgatggtaataatgaattaataaattttgcaaaaaaattggaagaaacgtgtatcaaaactgtagaaagtggcgaaatgacaaaagatttagcaatattaattaataaagatcagaaatggttaaatactcaagattttttaagcgcaataaaaaacaattttcaaattaactaa

SEQ ID NO: 207556 - DNA, 574 bp, Unknown
  Bacterial polypeptide expressing nucleotide sequence isolated from the Sargasso Sea
attgagctataaaaatataaaaattcctgaattaggtaaaaaaataactttaaaagatggtgtcttaacagttcctaataatccaataattccatttatagaaggagatggaattggttcagatataacaccagctatgattgatgttgtagatgctgctgtcgaaaaagcttatggagaagaaaaatctatatcttggatggaaatatattgtggtgaaaaatctactaaggtttatggtaaagatgaatggttgccagatgagaccttggacgctcttcgtgaatatgttgtaagtattaaaggacctttaacaactccagttggtggaggaataagatcattaaatgtttcattaagacaaattcttgatttgtatgtatgtttacgtccagttagatggttttcaggagttccaagtccagtaaaagttccaggtgatgttgatatggttatttttagggaaaattctgaggacatttacgctggcgttgagtttgcgtcagattcaaaagaatcagcagagttagtaaaaatacttcaagataaatttaatgttgatcagatcagatcc

SEQ ID NO: 207557 - DNA, 304 bp, Unknown
  Bacterial polypeptide expressing nucleotide sequence isolated from the Sargasso Sea
atgaaaaaaattgaagtaaaaacaccattagtcgagatagatggtgatgagatgacaagaattatatggcagtttatcaaagataaactcatacttccctatcttgatattgagcttgattattacgatcttggagttgaaagcagagatagaacaaatgataaaattacagtcgattctgcgaatgctatcaagaaatacggggttggagtaaaatgcgccacaatcactcctgatgaagaccgggttgaagaatttaaattaaaggaaatgtggcgatcaccaaatggaactataagaaata

SEQ ID NO: 207558 - DNA, 367 bp, Unknown
  Bacterial polypeptide expressing nucleotide sequence isolated from the Sargasso Sea
aatgatatcaaataaaaaagttgagatgaaaaaagatggactatatgttcctgatcacgtttcaataccgtacatagaaggtgatggtattggggtggatatatgggcatcatcatcaatggtccttaacagcgctgttgagaaagcatatgctggtcaaagatcaatcaattggatagaggtttttgctggtgaaaaatcttttaatttaaatggtgaatggcttcctcaagaaacacttgacattattaaagatcataaaattgcaataaaaggtccacttacaacaccaataggtggcggtatccgttctcttaatgttgctcttaggcaaaagttagatttatttgcctgtgtcagaccagta

SEQ ID NO: 207559 - DNA, 544 bp, Unknown
  Bacterial polypeptide expressing nucleotide sequence isolated from the Sargasso Sea
ggcgctttccttaatttggggaatagatttaattttaaaaaaatatcatggtttttttgatgaaaaaaataaatgttacaaatttaaaaatcctaacaatgagaaggatatcatttttaaagattgtatttgtgatgcatttcttcaaaacatattactaaaaccaaaagattatgatgttattgcaacaactaatttaaacggtgattatgtttcagattcattagcagcatgcgttgggggtattggaatctctccaggtgcgaatattaattacacaaccggagaagcggtttttgaggcaactcacggaacagctccagatattgctggggaaaatattgttaatccaagttcattaattctttccgcggaaatgatgttaagatacttagggtggaatgaagcagcaaataatataatgaatgcaattgaaaaagtaattaaacaaaaaactgttactgcggattttgcatatcaaatggaaaatgcaacattatgttcttgctctgaatttactgatttaattattgaaaaaatttag

SEQ ID NO: 207560 - DNA, 255 bp, Unknown
  Bacterial polypeptide expressing nucleotide sequence isolated from the Sargasso Sea
gaaaagaaacttctacaaatcctatcgcttctatttttgcttggactagaggattggcgcatagaggaaaattagatggtaatgatgagttaataaaatttccaagtatattagaaaaagtttgtattgattgtgtagaaaatggatcaatgactaaagatcttgctatattactaggaccttcgacaaaattcctaacaacgaatcaatttcttgatgaaattgatcgtaatctgataaaaaaattaaactaaa

SEQ ID NO: 207561 - DNA, 510 bp, Unknown
  Bacterial polypeptide expressing nucleotide sequence isolated from the Sargasso Sea
tatggcatcgtcaaaaattaaaattccatcttctggagacaaaattactcataaccaaggaaaacttgaagttcctgataatccaataattccatttattgaaggagacggaatcggaatagatattactccggtaatgaaagcagttgtcgatgctgctgtcgaaaaagcatattccggaaaaagaaaaattagttggatggaaatctactgcggagaaaaatctgttgaagtttatggaaaaggccattggatgcctgacgaaactttgaaggcatgtgaggattatgttgtttcaatcaaaggcccactaacaacaccagttggaggcgggataagatcattaaatgttgctttacgtcaagtgttagatctttatgtttgtctcagaccagtgaaatatttcaagggcactcccagtcctgttaaacgacctgaccttgtaaatatggtgattttcagggaaaactcagaagatatttatgctggtgtagaatttaaatccaactc

SEQ ID NO: 207562 - DNA, 370 bp, Unknown
  Bacterial polypeptide expressing nucleotide sequence isolated from the Sargasso Sea
atggcaaaaataaaagttaaaaaccctgtagttgaaatggatggagatgaaatgaccagaattatctgggagtatatcaaacaacaattaattttgccctatcttgatatagacattaaatattttgatcttggagttattaaaagagatgagacaaatgatcaaatcaccatagatgctgctgaggcagtgaaaaaatatggtgtaggaataaaatgcgcaacaattactcctgatgaaaatcgagtagaggaattcaaattaaaacaaatgtggcgttctccgaatggaacaataagaaatatactaggaggaacaatatttagacagccaattatttgcaaaaatgttccaagaataatcacgaact

SEQ ID NO: 207563 - DNA, 431 bp, Unknown
  Bacterial polypeptide expressing nucleotide sequence isolated from the Sargasso Sea
tatgagtaaaattaaggtaaaaaacccaattgttgaactagatggtgatgaaatgaccagggtaatatggggtttcataaaaaataaattaattctaccctatcttgatcttgaaattaaatactacgatctcggaataaaaaatagagataatacaaatgaccaaataacaattgattgtgctaaagcaattaaagaaaatggtgttggaattaaatgtgcaacaataactccagatgaattaagagtagaggaatttaatcttaaaaaaatgtggagatctcctaacggaacaataagaaatatcattggtggaactgtttttagagaaccaatattgtgtaaaaatataccaaaattagttccgagttggactaacccaatatgtattggaagacatgcgtttggtgatcaatatagagcaacagatt

SEQ ID NO: 207564 - DNA, 364 bp, Unknown
  Bacterial polypeptide expressing nucleotide sequence isolated from the Sargasso Sea
gatgacttcagtgcttgtttgtcctgatggaaagacctttgaatctgaagctgcgcatggtactgtcacccgtcattaccgtcagcatcagcagggcaagtccaccagcaccaatcctgttgccagtatctttgcctggacatcaggacttacccaacgagggaatctggacgaaaatcaggaattaatagatttttgcaaaactctggaaaaagtctgtgtggatacagttgaagaaggcacaattaccaaggatctggcctctgcaattcattccagttccaaccctgacccttcaacgtatgtaagcactcaggaatttctggatgctcttactgcaggattgcaaaaggccgtaaattga

SEQ ID NO: 207565 - DNA, 232 bp, Unknown
  Bacterial polypeptide expressing nucleotide sequence isolated from the Sargasso Sea
atgactaaaatcaaagtgaaaaatccggttgttgaattagacggcgatgagatgacaagaataatttgggatcttattaaaaagaaacttattcttccgtatttagatattgatctccattattatgacttaggtgttgaatacagagatcaaacaaatgatcaagttactatagatgctgcagaagctatacaaaaacatggtgtaggagtaaagtgcgctactataactc

SEQ ID NO: 207566 - DNA, 282 bp, Unknown
  Bacterial polypeptide expressing nucleotide sequence isolated from the Sargasso Sea
ccagacattttagaatacatcagcaaggtaaagaaacttctactaatccaatagcctcaatatttgcttggacaagaggattatcacatagaggcaagctagacggaaataatgaacttattaagtttgcaaatacaattgaacaagtttgcatcaagtgtgtagaaaatgggtctatgaccaaagacctagctattttaattggtccatcaagtaaatatttaacaacaaatcaatttctagatgaaatagataaaaatttaaaaaaaaaattaaattaaa

SEQ ID NO: 207567 - DNA, 359 bp, Unknown
  Bacterial polypeptide expressing nucleotide sequence isolated from the Sargasso Sea
aatggaaagcaaagtagttgttccggcggaaggtaagaagatcaccctgcaaaacggcaaactcaacgttcctgaaaatccgattatcccgttcattgaaggcgacggtatcggcgttgatgtaaccccaccgatgatcaaagttgtcgatgctgctgtcgagaaagcctataaaggcgagcgtaaaatctcctggatggaaatctacaccggcgagaaatccactcaggtttatggccaggacgtctggctgcctgctgaaaccttagatctgattcgtgaatatcgtgttgccattaaaggccctctgaccacccctgttggcggcggtattcgctctctgaacgtagctctgcgtc

SEQ ID NO: 207568 - DNA, 823 bp, Unknown
  Bacterial polypeptide expressing nucleotide sequence isolated from the Sargasso Sea
aatggctgaaaacttaaaaagaacagatctaattaatgctattgaggaaacaagaaaatcttttgatactgacaatcctactgttcctttcattgagggggatggaattggtatcgatatttggccagctgcaaaaaaagtttttgatgctgcagtcgaaaaaacttacaaaaatgacagaaagattaattggatagaagttttggcaggacaaaaagcttatgatacaacttctgagtggcttcctgataaaactttagaaacatttaatgaatatggtgtgggtataaaaggtcccttaactacacctgtaggtgaaggaataagatctatcaatgtagcaataagacaagagcttgatttatatgtttgcttgaggcctatcaaatatttcaaaggcattcaaactcctacaaaaaatccacaagatgtagatatcactctatttagagaaaacaccgaagatgtctatgcaggaaaagaactagaaaattcctcagaagatgttgaaaaacttaataattttttaaaacaggaatttggatgggatataagaatagacagcgggattggaataaaaccaatatctcagactgcttctgaaaggctgataagagcagcactcaattatgcagtggaaaatgataaaaaaaatgttgctttagtgcataaaggaaacattatgaagtttactgaaggtgcatttagaaaatggggttacgaccttgtaaagtcagagttttcagatgttgcagtttcatgggaggattgtggtggtgatcctggagataaaatattagtacaagatgtaattgcagatgca

SEQ ID NO: 207569 - DNA, 589 bp, Unknown
  Bacterial polypeptide expressing nucleotide sequence isolated from the Sargasso Sea
ttagtgcataaaggaaacattatgagttttactgaaggtgcatttagaaaatggggttacgaccttgtaaagtcggagttttcagatgttgcagtttcatgggaggattgtggtggtgatcctggagataaaatattagtacaagatgttattgcagatgcatttttacagcaaatcctaattaaaccacaaatgtttgatgtaattgctacaacgaatctcaatggagattatgcttctgacgccttagcagctcaaataggaggcattggtatcagtcctggaggaaacataaactatgaaaatggaaaagcggtttttgaagcaacacatggtactgctcctaaatatgctggtcaagataaaacaaatccaggatcattaattttgtcaggagtaatgatgtttcgatatatgggttggaatagtgctgctgatctaattgttaactcaatggagaaaacaattctcgaaggaaaagtaacttatgatcttgctcgaggaagaagtgtcaaaaaaattctctcttcatcagaatttgcaaatgctttaatcagtaatatgaaaacttcaaaaaaggagaagtagt

SEQ ID NO: 207570 - DNA, 574 bp, Unknown
  Bacterial polypeptide expressing nucleotide sequence isolated from the Sargasso Sea
agcgtgcaggccaacgcccgcatgatcgagcccggctacgacagcctcactccagagaagaaagccgacattgatgccgaggtgcaggcggtgatcgacgccatcggcagcagccacggtggcggcaagtggaggtcgatggtgctggtggatgaccgcatcgccgacagcattttccagcagatccagacccgccctcaggagtattcgatcctcgccacgttgaacctcaacggcgattacatctccgacgccgccgccgcgatggtcggtggcctgggcatggcccccggcgccaacatcggcgagaacgccgccatcttcgaagccacccacggcaccgccccgaaacacgctggcctcgaccggatcaaccccggttcggtgatcctcagcggcgtgatgatgctggagttcctcggctggcaggaggctgctgatctcgtgaccaagggcctcagtgccgccattgccgacaagcaagtcacctacgacctggcccgactgatggagccccaggtggatccggtgagctgcagcggcttcgccgaagcgatcatccagcgcttctgat

SEQ ID NO: 207571 - DNA, 322 bp, Unknown
  Bacterial polypeptide expressing nucleotide sequence isolated from the Sargasso Sea
tggtaaaatagcagaagctgaggcagcccatggatttgttactaggcattatagacaacatcaacaaggtaaagaaacatcaacaaatccaattgcatctatttttgcatggactagaggtttggctcatagaggtcaattagacggtaatgatgaattaattaagttttcagatactctagagaaagtttgcattgaaacagttgaaagtggatcaatgactaaagacttggcaattttaattagtaagagtcaaaaatttcttactacaaatcaatttttggaagcaatagactccaatcttaaaaaaaaacttaactaa

SEQ ID NO: 207572 - DNA, 205 bp, Unknown
  Bacterial polypeptide expressing nucleotide sequence isolated from the Sargasso Sea
atggcaaaaatcaaagtaaaaaatccagtagtagagctagatggagatgaaatgacccgtataatttggtcatttataaaagacaaattaatcaaaccctatctggatattgaacttaaatactttgatcttggtatgaagaacagagataaaactaatgatcaagtaacaatcgattgtgctaaagcaattcaaaaatatgggg

SEQ ID NO: 207573 - DNA, 569 bp, Unknown
  Bacterial polypeptide expressing nucleotide sequence isolated from the Sargasso Sea
catggcccagttcgagaagctcaccgcccccagccagggcacaccgattcgcttcgagaacggccaaccagtcgtggccgaccatccgatcattcccttcatccgcggtgatggcaccggtgtggatatctggcctgccacccagaaggtgctggatgccgccgtggccaaggcctatggcggagccaaaaccattgagtggttcaaggtgtatgccggcgatgaggcctgcgacctctacggcacgtatcagtacctgcccgaagacacccttgaagcgatccgcacctacggcgtggcgatcaagggccccctcaccacccccgtgggtggcggcatccgttcgctgaacgtggccctgcgccagatcttcgatctttactcctgcgtgcgcccgtgccggtattacgagggcactcccagcccccacaagcgtccccaggatctggacgtgatcgtctatcgggagaacaccgaagacatctacatgggcgtggagtgggaggccgatgacgcggttggtcaggagctgcgcaagcacctcaatgaggtggtgatccctgccaacg

SEQ ID NO: 207574 - DNA, 256 bp, Unknown
  Bacterial polypeptide expressing nucleotide sequence isolated from the Sargasso Sea
ggtaaagaaacttcaacaaatcctattgcatctatttttgcatggacaagagggttggctcatagaggaaaattagatggaaatgagcaattaattaagtttgcagaaacactagaaaaagtatgtgtcgattgtgttgaagaaggctcaatgactaaggacttagctattttgataggaccttcaacaaagtatttaacaactaatcaatttttagatactttagatggtaagttgagacaaaaattaaattaaa

SEQ ID NO: 207575 - DNA, 532 bp, Unknown
  Bacterial polypeptide expressing nucleotide sequence isolated from the Sargasso Sea
tttagagattggggatatgagctttgtaaagaagaatttgatggtgatgatcttgatggtggcccatggcattactttattaatcccaataacggaagaaaaataatagtaaaagatgttatttgtgatgcttttttacagcaaatactattaagaccaagagaatatgatgttattgcaacaatgaatttaaatggtgactacctttcagatgcattagcggcaatggttggtggtataggtattgctcctggtgcaaatattggtgatgaagctgcgatgtttgaagctacacatggaactgcaccaaaatatgctggcctagataaagttaatccattatctttaattctttccgctgaaatgatgcttagacatataaactggaatgaagccgcagatcttttaataaactcaattgaaaaaactattcaagatagatacgttacttatgattttgaaagattaatggataacgccacacttgtttcttgctcaggttttgcaaaagagatgatcaaaagaatgtaaa

SEQ ID NO: 207576 - DNA, 604 bp, Unknown
  Bacterial polypeptide expressing nucleotide sequence isolated from the Sargasso Sea
atggcaaaaataaaagttaaaaaccctgtagttgaaatggatggagatgaaatgaccagaatcatctggaagtacatcaaagaacaattaattttgccctatcttgatatagatatcaaatattttgatcttggagttattaaaagagatgaaacaaatgatcaaatcacaatagatgctgcacaggcggtgaaaaaatatggcgtaggaataaaatgtgcaacaattactcctgatgaaaatcgagtagatgaattcaaattaaaacaaatgtggcgttctcccaatggaacaataagaaatatactgggaggaactatatttagacagccaattatatgcaagaatgttccaagaataatcacaaactggaaccatccaattgtggttgctagacatgcctttggagatcaatatagagcgactgacacattaattgataaaccagggacacttaaaatggtttttgaacctaaagatggatctgaaggatttacaaaagatgtatatgaatttgaaaaatctggtgtagccctatcaatgtataatttagataattcgattaaagattttgctagagcttgttttaattatggacttaacc

SEQ ID NO: 207577 - DNA, 466 bp, Unknown
  Bacterial polypeptide expressing nucleotide sequence isolated from the Sargasso Sea
aatgagtaaaatcaaggtaaaaaaccccattgttgagttaaatggtgatgaaatgactcgaattatttgggagtttataaaaaacaaattaatacttccttatcttgatcttagtattgattactacgatttaggtataaaaaatcgagataagactgataatcaaattacaatagactctgccaatgcaataaaaaaaattggtgttggaattaaatgcgcgactataactccagatgaagagcgtgtgaaagaattcaatttaaaaaaaatgtggagatctccaaatggaactataagaaatataattggaggtactgtgtttagagaaccaattatttgtaaaaatattccaaaactagttccttcatggaaagatcctgtggttattggaagacacgccttcggtgatcaatatagagcaacagattttaaagttcctggtaaaggtaaaatggaaataaaa

SEQ ID NO: 207578 - DNA, 592 bp, Unknown
  Bacterial polypeptide expressing nucleotide sequence isolated from the Sargasso Sea
atgactaaaattaaggtaaaaaacccaattgttgagttagatggtgatgaaatgactcgagtaatatggaaatttataaaaaataaactcattcttccatatctagatttaggaattgaatactatgatcttggaatcgaaagcagagacaaaacagaagaccaaattacaattgattctgctaaagcaattaaaagagttaacgtaggaattaaatgcgcaaccattactccagatgaagggcgtgtgaaagaatttaaccttaaaaagatgtggagatctcctaatggaaccatcagaaatattataggaggcacggtatttcgtgaacctattctttgtagcaatattccaaaacttgttccaagttggacaaatcctatttgtataggaagacatgcatttggtgatcaatatagagcaacagattttacagtgccaggaaaaggtaaattagaaatcaaatggacctctgaggatggtaaagaaaaaaaagaatttgaagtttttaattttcctggtccaggaattgcattatctatgtataatttagacaaatcaataaaggattttgctagggcatgtatgaact

SEQ ID NO: 207579 - DNA, 469 bp, Unknown
  Bacterial polypeptide expressing nucleotide sequence isolated from the Sargasso Sea
atgccaaaatttgaaaaattaactttacctaatgaaggcgagagaataacttttaatcaaggcaaacctaatgttcctaataatccaattgtcccatttattaggggtgatggtactggagttgatatttggcctgctactcaaatcgttcttgattcagcgattaaaaaaagctatggagatgaaagaaaaattaattggtttaaaatctatgcaggtgatgaagcttgtgaactttatggaacatataactatctccctcaagatactattgaagcaatcagacactttggtatagcgatcaaaggtcctttaacgactcccatcggtggaggtattagatctcttaatgttgcattaaggcaaatctttgatttatatagctgtgttagaccatgtaaatattattcagggactccaagccctcacaaaaatccccaaaaatttagacgttatgtttatagagaaa

SEQ ID NO: 207580 - DNA, 481 bp, Unknown
  Bacterial polypeptide expressing nucleotide sequence isolated from the Sargasso Sea
atgacctataaaaacattaaagtaccaaaagaaggaaccaaaatttcctataaaaaaggaaaattaattgttccctcaaatcctattattccttttatagaaggtgacgggataggtgtagatataaccccaccaatgataaatgttgtaaatgaagctgtaaaaatagcttataacggtgataaaaaaatagaatggatggaggtatattgcggtgaaaaagcaacaaaagtatattcaaaagatgattggttgccagatgaaactatcaaggctttaaaagaatttgtaattagtattaaaggtccattaacaactccagttggtggtggaattagatcactaaatgtctcattaagacaaatacttgatttatatgtttgtttaagaccaattagatattttaatggcgtaccttcacctgttaaacgacctcaagatactgatatggttatttttagagaaaattctgaggatatat

SEQ ID NO: 207581 - DNA, 328 bp, Unknown
  Bacterial polypeptide expressing nucleotide sequence isolated from the Sargasso Sea
tatggaaaaaattaaagtgaaaaatcctgtcgttgaaatggatggagatgaaatgacaagaatcatctggaagtttataaaagataaactaattcttccatatattgatatcgatttaaaatattatgatttaggggtccaaaatagagatagtacagaagatcaagttaccattgactctgctgaagctgttaaaaagtatggtgtaggaataaaatgtgcaacaattactccagatgaagacagggttaatgaatttaatttaaaaaaaatgtggcgttcccccaaatggaacaataagaaatattttaggtggaactatttttag

SEQ ID NO: 207582 - DNA, 2227 bp, Unknown
  Bacterial polypeptide expressing nucleotide sequence isolated from the Sargasso Sea
catgaaagataactcaccaacaattatttataccgaaaccgatgaagcaccagcgctagcaacgctttctctgttacctatcatcaaaacctttaccgatgcagcgggtgttgcggttgaaacccgtgatatttctttatcgggccgtgtgattgctaatttccctgaaaaactgactgacgcgcaaaagattggcgatcacttagctgagctgggtgaattagcgaaccaacctgaagctaacatcattaaactgccaaacatcagtgcctcaatcccgcagttaaaagcttgtattttagagctgcaacagaaaggttacgacattccaaattatcctgacgagccaaagactgacgaagaaaagtcaattaaagcccgttacgacaagatcaaaggcagtgcggtaaacccagtgctgcgtgaaggtaactctgatcgccgcgcgccgctgtcagtgaaaaacttcgccaagaaaaacccacactcaatgggtaagtggaccaaagagtctcaatcacatgttgctcacatgagcgaaggtgacttctacggcagcgagcagtcagtgacgctggctaacgcagacacagttaacatcgtactgtcgcaaaaagacggtcaagaagtggtattgaaatctggcctgaaactgctagctggtgagatcatcgacgcgtcagtgatgagcaaaaaagccttagtgagcttctttgagcgtgaaatcgccaatgccaaggccgaaaacgtgttgttatcactgcaccttaaagccaccatgatgaaagtgtctgatcccattatgttcggccacgcagtgaaagtgttcttcaaacctgtgtttgataaacatgcgtcattatttgctgagctaggcgttgatgtgaacaacggctttggcgatgtatacgccaaaatcgctggtttaccagccgatgtccgtgcacaaattgaagcggatatcgccgccgtttatgctgagcgtccagcgctggcgatggtagattctgacaaaggtatcaccaacttacacgtaccaagcgacatcattatcgatgcttctatgcctgctgcgattcgttcatcaggccaaatgtggggccctgatggcaagttgcacgacactaaagcgctgatcccagaccgttgctacgcgggtgtgtatcaagaaactatcgctttctgtaaagaacacggtgccttcgatccaagcactatgggcagtgtgccaaacgttggtctgatggcgcaaaaagccgaagaatacggtagccacgataaaaccttcgaaatcccagccgatggcgtggttaacgtgatcgatgccagtggcaaagtgttaatgagccacaacgtcgaagcgggcgatatttggagaatgtgccaagttaaagatgcgccaattcgcgactgggtgaaattagccgtacgccgtgcacgcttaagcaatacccctgcggtattctggttagatgcgaatcgtgcccacgatgcccagctgatcgctaaagtgaagcaatatctgcctgagcatgatactaacggtttagaaatcagcatcatgtcaccagaagaagcaacacgtttctcattagtacgtattaaagaaggtaaagatactatttctgttaccggtaacgtactgcgtgactacctgactgacttgttcccaatcctcgaactggggaccagtgctaagatgctgtctatcgtgccattaatgaatggtggcggcctgttcgaaacgggtgcgggcggtagtgcgcctaaacacgtacaacaggttgaaaaagaaggtcacttacgttgggactctctgggcgaattcctagctttagcggcttctttagagcatttgagccaaactgtgggtaatcctaaggcacaagtactggcggatactttagatcaagccatcggtcagttcttagatagcaacaagtcgccatcaagacgtgttggtgagttggataaccgtggtagccatttctatctggcgatgtactgggcacaagcgttagccgctcaaaccaaagacgagcagttacaagctcactttattccattagcgcacgctttaagcgccaatgagcaagtgattgttgctgaactaaacaacgcgcaaggtgcaccagtggatttaggcggttactaccgtttagacgctgcaaaagccgaaaaagccatgcgtccaagcgagacactgaacaagctattaattgcttaa

SEQ ID NO: 207583 - DNA, 464 bp, Unknown
  Bacterial polypeptide expressing nucleotide sequence isolated from the Sargasso Sea
ggttacgattaaaaatccaactaatggaaaaaatattattatcaaagatgttatatgtgatgcttttcttcaacaaatacttactagaccaaaagaatatgacgtaattgcaactatgaatttaaatggtgattatgtttcagatgccctagctgcatgtgttggtggtataggtatagcgccaggtgcaaatattggagatgaatctgcgttatttgaagccactcatgggacagcgcctaaatatgctggccaagataaagtaaatccaggatcgcttattctttcagctgaaatgatgttaagacatttgggttgggttgaagcagcagatttaataatatcctcaatggaagcagcaataaccgataaaatggttacttatgactttgaaagattaatggatgatgctcaattagtatcttgctctggctttgctaaggaaatgattaaaagaatgtgag

SEQ ID NO: 207584 - DNA, 685 bp, Unknown
  Bacterial polypeptide expressing nucleotide sequence isolated from the Sargasso Sea
aatgggagaaaatttaaatagagcagacttagaaagcgcaattcagcgaaccagagaatcttttgacacagataatccaacagtgccttatatagagggagacgggataggtgtcgacatatggccagctgcacaaggagtatttgatgcagtagtagaaaaagcttataagggggaaagaaaaataaattggttggaggtgctagcagggcaaaaagcttttgataatgtaaatgaatggttacccgaagaaacaacaaataaatttgaagaatatggagttggaataaaagggcctttgacaacgccagttggagaaggaattagatctataaatgtctcaatcagacagataatggatttgtatgtatgcttacgaccaattaaatactttaatggaattcaaaccccaacaaaaaatcctcaagatgtagatataactttatttagagaaaacacagaagacgtatacgctgggaaagagctagaagaaggaagcgaagacgttcaaaaattaaacaaatttttaaaatctgagtttggatgggaaataagagaagatagtgggattggaataaagcctatatctaaaacagctactgagagattagttcgagcttcattaaattatgctgttgagaacaataaaaaaaatcttgcactagttcataaaggtaacattatg

SEQ ID NO: 207585 - DNA, 398 bp, Unknown
  Bacterial polypeptide expressing nucleotide sequence isolated from the Sargasso Sea
aatgagtaaaattacggttaaaaaccccattgtagagttagatggcgatgaaatgaccagagttatatgggacttcataaaaaataagctcattttaacttaccttgatctcaaaattgattactacgatttaggaatggaaagtagagataaaacagaagataaaataacaattgaatgtgcaaatgcaattaaaagaaatggtgttggtattaaatgtgcaaccatcacgccagatgaagcgagagtaagagaatttaatcttaaaaaaatgtggagatctccaaatggtacaataagaaatattataggaggaactgtttttagagaacctataatttgtaaaaatattccaaaacttgtaccctcgtggacagatccattgatcataggtagac

SEQ ID NO: 207586 - DNA, 802 bp, Unknown
  Bacterial polypeptide expressing nucleotide sequence isolated from the Sargasso Sea
atgagtaaatcaaatattaaagttccagcaacaggcgagaaaataacttacaaaaacaacaagctagttgtgcctgataatcccataataccttacattgaaggggatggtataggggtggatataactcctgtgatgcttaatgtcattgatgcagctgtagaaaaagcatatgacggcaaaagaaaaataagctggatggagatttattgtggtgaaaaatcagtaaaaatttatggtgatgatgaatggttgccagatgaaactcttcaaacctgtaaagattataaagtttcaattaaaggtccattaaccactcctgttggtggtggtattcgttcattaaacgtagctataagacaaaaattagatctatatgtatgcttgagaccagtgaagtattttaatggtactccaagtccagttagacgccctgatctagtagatatggtgatttttagggaaaactcagaggatatatatgcaggcgttgagtttgaatcaaatacagatgcagcaaacaagttaattaaagtgcttcaagatgacttcggagtagaaaaaataaggtttacagagaattgtggaataggaattaaacctgtttcagaagaaggaacaaaaagattagtcagaaaagcttatgaatatgctattcagaatgaaaaagattctgtaacgcttattcacaaaggaaatattcagaagtttacagaaggcgccttcatggattggggttatgaactagcacgagaagaaatggcggaaagcctctcgatggcggaccttggcatacattaaa

SEQ ID NO: 207587 - DNA, 1717 bp, Unknown
  Bacterial polypeptide expressing nucleotide sequence isolated from the Sargasso Sea
agcaaagtatgacaaagtcaaaggaagtgcagtaaaccctgtcttaagggagggtaactcagaccgaagagcaccgaaatcagtcaagcagtatgctaaaaataatcctcattccatgggagattggagcaaagactctctctctcatgtatctaccatgtccgagggagacttctttggcagtgaaaagtctatcaccgttgctgaagcaactaccgttgatatacgtcacacaaatgctgctggtgagacagtgctattgaagcaagacattgcgttgctacccggagaagtgattgatgcagcagtaatgagtaaagtagctctgagagcatttctcgagcaaaacctggtggaagccaagcagcaaggagtattgttttcagtacatctgaaggcgaccatgatgaaggtttcagatccaatcctgtttggtcatgctgtatcagttttcttcaaagacgtttttgagaaacatggcgcactgcttgatgacataggcgtgaatccaaacaatgggatgggagatttgctcaaacgtttggaatccttgcctgatgaagagaaaaatgctgttttagcgaccatcgaccagtgctatgcacaaggaccagatatcgctatggtcaactcagacaaagggatcactaacctgcatgtgccttcggatgtaatcatcgacgcaagtatgccagcagctatccgaacttcagggcaaatgtggaatgcagcaggtaagctacaggacatgaaggccatcataccagataggtcatacagtggagtctatcagacagtgatcgatttttgtaaagagaacggagcttttgatccgacaaccatgggaactgttcctaacgttggattgatggctcaaaaggccgaagaatatggctcgcatgacaagacttttgagctgtcttctggcggtagagtagaagtagtagatgcagctgggaatgtgttgctctctcacgaggtagaggaaggagatatttggaggatgtgtcaagtcaaagatgcaccagtacaggattgggtaaaactagctgtaagcagggcgcgcgcaacggaggtgccggctgttttttggctggataaaaaccgcgcacatgatgcagaactgattaaaaaagtcgagaaatatctaaaagaccatgataccgagggattggatatcagtatccaagctccggtagatgctaccttgttctcctgcaaaagagccaaggaaggaaaagatacgatatcggtcacaggcaatgtcttgagagactacctcactgatttatttcccattcttgaattaggtaccagtgcgaagatgttgtcgatagtaccactgatgaatggtggcggactgtttgaaaccggagcaggagggtctgcgcccaagcacgtccagcaatttgaaaaggaaggccacctgcgatgggattctttaggagaatttttggcgttggctgcctctctggaacatatgagcgtcaccacaggtgatcgtacagcggcgatacttgctgctgcactagatcaggctaccggcaagtttttgctggagggaaaatcaccaagtagaaaagtaaacgaaatcgacaaccgtggaagtcatttctaccttgcaaagtactgggcagaggcgctggcctctcaggaagaagatcaaacgctcaaagtgaagtttgatcaattggcgagtagtctgcgtgcaaatgaa

SEQ ID NO: 207588 - DNA, 2230 bp, Unknown
  Bacterial polypeptide expressing nucleotide sequence isolated from the Sargasso Sea
catgtccacttcgcccaagatcatctacaccctcaccgacgaagcgcccgcgctcgcgacctattcgctgctgccgatcgtcaaggcctttacgcgctcgtccggcgtcgccgtcgaaacgcgcgacatctcgctcgccggccgcatcatcgcggcattcgcggacatcctgccgcccgagcagaagggttccgacgatctggccgaactgggccagctcacgctgaagccggaagcgaacatcatcaagctgccgaacatcagcgcatcggtgccgcagctcaaggccgcgatcgccgaactgcaggcacagggctacaagctgccggcctatccggaagatccgtcgacggacgaagagaaggcggtcaaggcccgctacgacaagatcaagggcagcgcggtgaacccggtgctgcgcgaaggcaactccgaccgccgcgcgccgctgtcggtcaagaactacgcccgcaagcatccgcacaagatgggcgcgtggaaggccacgtcgaaggcccacgtcgcgcacatgaccgaaggcgacttctacggcagcgagaagtcggcgctgatcgccgatgccggcagcgtgaagatcgaactgacgacgaccgacggcgcgaagaaggtgctgaaggaaaagacggccgtgaaggccggtgaagtgatcgacgcgtcggtgatgagccgcaacgcgctgcgcagcttcatcgaagcgcagatcgccgacgcgaaggcgcaggacgtgctgttctcggtgcacctgaaggcgaccatgatgaaggtctcggacccgatcctgttcggtcacttcgtgtcggtgttctaccgcgacgcgctcgcgaagcacgccgacgtgctggcgcaggtcggcttcaacccgaacaacggtatcggcgacctgtacgcgcgcctgaaggacctgccggccgacacgcgcgaagcgatcgaagccgacgtcaaggccgaatacgcggtgcgtccgcgcctggcgatggtcaactcggacaagggcatcacgaaccttcacgtgccgagcgacgtgatcgtcgacgcatcgatgccggcgatgatccgcgattcgggcggcatgtggggcccggacggccagttgtacgacgcgaaggccgtgattccggaccgctgctacgcaggcgtctaccaggctgtgatcgaggactgcaagcagcatggcgcgttcgatccggtcacgatgggcagcgtgccgaacgtcggcctgatggcgcaggcggctgaagaatacggttcgcacgacaagacgttccagatcccggcggatggcgtcgtgcgcgtcaccgacgaagcgggcaacgtgctgctcgagcatgccgtggaagcgggcgacatctggcgcatgtgccagacgaaggatgcaccggtgcaggactgggtcaagctcgcggtcaaccgcgcacgcgcgaccggcgcaccggccgtgttctggctcgatccggctcgcgcacacgacgcgcagatcatcgcgaaggtcgagcgttacctgaaggatcacgacacgaacggcctcgacatccgcgtgatgacgccggtcgacgccacacgtttctcgctcgaacggatccgcgcgggcaaggacacgatctcggtgaccggcaacgtgttgcgcgactacctgaccgacctgttcccgatcatggaactcggcaccagcgcgaagatgctgtctatcgtgccgctgatggccggcggcgggatgttcgaaacgggtgcaggcggctccgcgccgaagcacgtgcagcagttcgtcgaggaaggcttcctgcgctgggattcgctcggcgaattcctcgcgctggccgcgtcgctcgaacacctcggcaacgcataccggaacccgaaggcggtcgtgctcgcgaagacgctcgaccaggcgaccggcaagttcctggacgagaacaagtcgccggcgcgcaaggtcggcggcctcgacaaccgcggcagtcacttctacctgtgcctgtactgggcgcaggcgctggccgagcagaccgaggacgcggcgctgaaggcacagttcgaaggcgtggcgaaggcgctgtccgacagcgaagcgcgcatcctggaagaactggcggctgcgcagggcaaggcgcaggccatcggcggctactaccgtccgaatgtcgacctgacgagccaggccatgcgcccgagcgcgacgctgaacggcatcgtcgacgcggtcgcctga

SEQ ID NO: 207589 - DNA, 2227 bp, Unknown
  Bacterial polypeptide expressing nucleotide sequence isolated from the Sargasso Sea
atgaaagataactcaccaacaattatttataccgaaaccgatgaagcaccagctcttgcaacgctttctctgttacctatcatcaaaacctttacggatgcggcgggtgttgcggttgaaacccgtgatatttctttatcgggccgtgtgattgctaatttccctgaaaaactgactgacgcgcaaaagattggcgatcacttagctgagctgggtgaattagcgaaccaacctgaagctaacatcatcaaactgccaaacatcagtgcctcaattccgcagttaaaagcttgtattttagagctgcaacagaaaggttacgacattcccaattatcctgacgagccaaagactgacgaagaaaagtctatcaaagcgcgttacgacaagatcaaaggcagtgcggtaaacccagtactgcgtgaaggtaactctgatcgccgcgcgccgctgtcagtgaaaaacttcgctaagaaaaacccacactcaatgggtaagtggaccaaagagtctcaatcacacgttgctcacatgagtgaaggtgacttctacggtagcgagcagtcagtgacgctggctaacgcagacacagttaacatcgtactgtcgcaaaaagacggtcaagaagtggtattgaaatctggcctgaaactgctagctggtgagatcatcgacgcgtcagtgatgagcaaaaaagccctagttagcttctttgagcgtgaaatcgccaatgccaaggccgaaaacgtgttgttatcactgcaccttaaagccaccatgatgaaagtgtccgatcccattatgtttggtcacgcagtcaaagtattcttcaaacctgtgtttgataaacatgcgccattatttgctgagttaggcgttgatgtgaacaacggctttggcgatgtatatgccaaaatcgctagtttacctgccgatgtccgtgcacaaattgaagcggatatcgccgccgtttatgctgagcgcccagcgctggcgatggtggattctgacaaaggcatcaccaacttacacgtgccaagcgacatcattatcgatgcttctatgcctgcggccattcgttcatcaggccaaatgtggggtcctgatggcaagttgcacgatactaaagcgctgatcccagaccgttgctacgcgggtgtgtatcaagaaactatcgctttctgtaaagaacacggtgccttcgatcctagcactatgggcagcgtgccaaacgttggtctgatggcgcaaaaagccgaagaatacggtagccacgataaaaccttcgaaatcccagcggatggcgtggttaacgtgattgatgccagtggcaaagtgttaatgagccacaacgttgaagcgggcgatatttggagaatgtgccaagttaaagatgcgccgattcgcgactgggtgaaattggccgtacgccgtgcacgcttaagtaatacgcctgcggtattctggttagatgcgaatcgtgcccacgatgcgcaactgattgctaaagtgaagcaatatctgcctgagcatgatactaacggtttagacatcagcatcatgtcaccagaagaagcgactcgtttctcactagtgcgcattaaagaaggtaaagatactatttctgttaccggtaacgtactgcgtgactacctgactgacttgttccctatcctcgaactgggtaccagtgctaagatgctgtctatcgtgccgttaatgaatggtggcggcctgttcgaaacgggtgcgggcggtagtgcgcctaaacacgtacaacaggttgaaaaagaaggtcacttacgttgggactctctgggtgaattcctggctttagcggcttcgttagagcatttaagccaaactgtgggtaatcctaaggcacaagtactggcagatactttagatcaagccatcggtcagttcttagatagcaacaagtcgccatcaagacgcgttggtgagctggataaccgtggtagccatttctatctggcgatgtactgggcacaagcgttagccgctcaagccaaagatgagcagttacaagctcattttattccattagcgcacgcgttaagcgcaaatgagcaagtgattgttgctgagctaaacaatgcgcaaggtgcgccagtggatttaggcggttactatcgtttagacgcggcaaaagctgaaaaagccatgcgcccaagcgagacactgaacaagctattaattgcttaac

SEQ ID NO: 207590 - DNA, 496 bp, Unknown
  Bacterial polypeptide expressing nucleotide sequence isolated from the Sargasso Sea
tatgagtaaaattaaggtaaaaaacccagttgttgagctagatggcgacgaaatgactagagttatttgggatttcattaagaataaattaatacttccttatatcgacttagatataaaatattacgacttaggcattaaaagtagagataaaacttctgatcaaataacaattgacagtgctaatgctataaaaaaatatggtgtaggaattaaatgtgcaactatcacgcctgacgaaaccagagtaaaagagtttagtttaaataaaatgtggagatcacctaacggaacaattagaaatatattaggtggtacagtttttagagaaccaattctgtgtaaaaatattccaaagctggtaccaagttggactaacccaatttgtattggcagacacgcatttggagatcaatatcgggcaacagattttaaagtgcctggtaaaggaaaattagaaatgaaatggatttctgaggatggcaaggaaaagtaa

SEQ ID NO: 207591 - DNA, 460 bp, Unknown
  Bacterial polypeptide expressing nucleotide sequence isolated from the Sargasso Sea
atggcaaaaataaaagttaaaaaccctgtagttgaaatggatggagatgaaatgaccagaatcatctgggagtacatcaaagaacaattaattttgccctatcttgatatagatatcaaatattttgatcttggagtgattaaaagagatgagacaaatgatcaaatcaccatacatgctgccgaggcggttaaaaaatatggtgtaggaataaaatgtgcaacaattactcctgatgaaaatcgagtagaggaattcaaattaaaacaaatgtggcgttctcccaatggaacaataagaaatatactgggaggaacaatatttagacagccaattatatgcaaaaatgttccaagaataatcacaaactggaatcatccaattgtagttgctagacatgcctttggtgatcaatatagagcgactgacacattaatttataaaccaggaactcttaaaa

SEQ ID NO: 207592 - DNA, 280 bp, Unknown
  Bacterial polypeptide expressing nucleotide sequence isolated from the Sargasso Sea
tagacactttagacaacatcaacaaggaaaagaaacttcaacaaatcctattgcatctatttttgcttggactagaggattggcccatagaggaaaattagatagcaatgatgaattgataaaattctcaaatactttagagaaagtttgtattgattgcgtagagaatggatcaatgactaaagaccttgctatattagtagggccttcaacaaaatatcttacaacaaatcaatttcttgatgaaattgaccataatttgttaaaaagtttaaactaa

SEQ ID NO: 207593 - DNA, 760 bp, Unknown
  Bacterial polypeptide expressing nucleotide sequence isolated from the Sargasso Sea
catgctaaaagattatcagggagataaaaggcatgtgactcttgtacataaagggaatattatgaaatataccgaaggcgcatttagagattggggttatgaattggcagtcaatgaatttagagaagattgcattacggaaagagaaagctggattttagataatattcataaaaatccagaaattacaattgaaaataatgcccgaaaaatcgaaccaggttttgacaagcttacaaataacaaaaaagcattcatttgcgaagaaattaaagaagtaattgcatcaatttcaaattcgcatggagacggaaaatggagagaacttattcttgttgatgatcggatagctgatagtatatttcaacaaattcaaactagacctcaagaatattcaattcttgcaacattaaacctcaatggagactatgtttctgatgcagctgcagcaattgttggaggcctaggtatggctcctggtgcaaatattggggataatgcagcaattttcgaagctacccatggtactgcgccaaaacatgcaggcttaaataagattaatccaggctcagtaattcttagtggtgtaatgatgcttgaatattttggttgggatgaagcagctaacttaattacaaatggtttaagcaaggcaatagagcaaaaaaaagtcacctatgatctagcacgcttaatggaacctaaagtagaacctttgtcttgcagtagttttgctgaagaaattatctcaaatttctaa

SEQ ID NO: 207594 - DNA, 649 bp, Unknown
  Bacterial polypeptide expressing nucleotide sequence isolated from the Sargasso Sea
tatgagcaaaattaaggtaaaaaatccaattgtagagctagatggtgacgaaatgactcgtgtaatctgggagtttataaaaaataaactaatcctaccttacctagatttaaaaattgaatattatgatttaggaataaaaagccgcgacaaaaccagtgatcaaataacaactgactgtgcaaaagcaataaaaaaaatcggtgttggaattaaatgtgcaactattacacctgatgaagaaagagtaaaagaatttaacttgaaaaaaatgtggagatctccaaatggtaccattagaaatattttaggtggaactgtttttagagaaccaataatatgtaaaaatattccaaaattagttcccagctggactaatccaatttgtatagcaagacatgcttttggggatcaatatagagcaacagatttcaaagtacctggaaaaggtaaattagaaattaaatggacatctgaggatggaaaagaaaaaaaagaatttgaagtgtttaattttcctggaccaggtgttgcgttatcaatgtataatttagatcaatctattaaagattttgcaagagcttgcttgaactatggtcttaatagaagatggccagtatatctttctacaaaaaatacaattttttaa

SEQ ID NO: 207595 - DNA, 357 bp, Unknown
  Bacterial polypeptide expressing nucleotide sequence isolated from the Sargasso Sea
aatggctgataagattacaattaaagatggcaaattaatagtacctgataatccaataattccatttattgaaggagatggaattggacctgatatttgggctgcttctcaacgagtaattgacgctgccgttgagcatacgtatcatggtgctagaaaaattgaatggcttgaagtattgtgtggagaaaaatcatttaataaaaatggtgaatggcttcccgaagaaacactagaaacattacgatctcatctagtaggtattaaaggacctttaacaactccaattggaggaggtattcgatcattaaatgttgctttaaggaaagaattagacttatatgcatgcgttagacc

SEQ ID NO: 207596 - DNA, 772 bp, Unknown
  Bacterial polypeptide expressing nucleotide sequence isolated from the Sargasso Sea
atgtcaaaaattaaagtagccaatcccatagttgagatagatggagatgaaatggctaggattatctggaaatttatcaaagagaagcttattctagattatttagatcttgatatagtttactatgatcttggaattgagtcaagagataaaactgatgaccaaataactattgatgctgcaaatgctattaaaaagtataatgttggtattaagtgtgcaacaataacaccagatgaacaaagggttgaagagttttcgttgtcaagaatgtataaatctccaaatggaacaattagaaatattgttggaggtactgtttttagagaacctattatatgtagatctataccaagatatgttcagggttggtcaagacctatatgtataggcagacatgcatttggtgatcaatacagggcaactgatgtaattacacatggaccaggtaaacttgaaatgaaatttaccccaaaaaatggtaaagaatctaaaacatgggaagtatataattttgaagaggatggaattgcaatgtcaatgtataatattgactcctcaatttacggatttgcaagatcatgtatgaatatggcacttaccaagagatggcctctatacttatcaacaaaaaatacaatacttaaggcatatgatggtcgatttaaagatatttttcaggaagtatatgataatgagtttaaagacagatttgagaacgaaaatataacctatgaacacagattaattgatgatatggtagctgctgcta

SEQ ID NO: 207597 - DNA, 349 bp, Unknown
  Bacterial polypeptide expressing nucleotide sequence isolated from the Sargasso Sea
tatgacaagtgtattaatgacacctgatggaaaaacaatagagtctgaagctgcacatggaactgtaacaagacattatagattacatcaaaaaggtgaggaaacttccacaaatcctattgcatctatatttgcttgggcaagaggtttataccatagagccaaattagataataatgaagatttaaaaaagtttgtaaaaactctggagaaagtttgtatccaaacagtcgaagatggattgatgacaaaagatctagcaattcttattagctcatcaaccaaatatttaacaactaatcaatttttaaatgaaattgatggaaaattaaaaaataaattaaattaa

SEQ ID NO: 207598 - DNA, 1939 bp, Unknown
  Bacterial polypeptide expressing nucleotide sequence isolated from the Sargasso Sea
aatgactgaagaacaaaagattatttataccgagaccgatgaggctcccaggctggctaccttctcgctactaccaataattaaggctttcacggattctgcaggggtcactgtcgaaacaagagatatatctctcgcgggtcgcatactctcagctttcccagagtacctcaaagaagagcagcggataccggatgatcttgctgaacttggcgcgctaacattagaaaggagtgccaacatcattaagctgcccaatatcagtgcctcaaacccgcaaatgcacgaagcgattaaggaattgcaagatcagggtttcgcgataccagattacccggaggatgccaccgaaggagaagctctagagattcgcagcagatacgatgcaataaaagggagtgcagttaatcccgttttgcgagaaggtaattctgatagacgagcaccgatttcagtaaagaattttgcaaaaaaattcccacataagatgggtgaatggtcgcccgactcaaaaacctcagtggcgcacatggattctggtgatttctatgaatcggagaaatcttttatcgcagagaacgaaagcgctttgactattacattcattggagaggatgagactcggattgttttgtcagagggtataaaagtgacaaaaggcgaggtagtcgatgccgccgcaatgagtaagaagaaactttgttcatttttccggaaagaaatcgattcaacgccggatggtgttctgttctcgcttcatttgaaagcgacaatgatgaaagtatcagaccccatcattttcgggcacgccgtacgagaatattatgcgaaggcgttgtcagagaatgaagaggtgttatctcaattggccatagatccaaacaacgggattggagatgtgtacgagaaaatagaatttctctcggatgccgataaagagaaaatcaaagcggatctggattcttgtttggagaaaggacctgacctcgcaatggttgattcagatagaggtattacaaatttgcacgttcccagtgatgtcatagtcgatgcctcgatgcctgcagccataagagagtctggcaagatgtggggccccgatggtgaattgcacgacatgaaggcagtcatcccggaccgatgttacgcaagagtttatcaggctgtgattgaggactgtcaggagcatggagcgttcgatccgacgactctcgggaccgtcccgaacgtgggtttaatggcgcaaaaagccgaagaatatggatcacatgacacgacttttgaatcgcctggaattggtcgcatagaagtcgaaatggctggggttggtgtggtgctcagtcattcagttgaagagagtgacatatggagactgtgtcgcgtcaagcatgcagctattgagaattggtttaacctggcgctcgaaagggcctcacttactggatggcctcttgtgttttggttagacaagaacagagcgcatgacgctcggttgatcgaaaaaatcgatcacttccttcgaacgcacgaaggaaatactccggaattggaaattttggcgcctgaagaggcgacgaagtattcactaaaaaggatgagagcaggtcagaacacgatctctgtgacggggaacgtactcagggactatttgaccgatctcttcccgattatggagcttggaacaagcgcaaaaatgctatcgatcgtcccgctaataaatggaggcgggctttttgaaacaggagctggcgggtctgcaccaaaacatgtgcaacagtttgaaaaagaagggcatctaaggtgggatagtttgggtgaattcctcgctttggcagcatctctcgagcatttggcacgggtctttgataataaacccgccgcgctactcgcaacaacgctagacgaagcgatcgcaaaattcttagaaagcaacaaagcg

SEQ ID NO: 207599 - DNA, 301 bp, Unknown
  Bacterial polypeptide expressing nucleotide sequence isolated from the Sargasso Sea
cagctcatggaacagttacaagacattatagaatgcatcaacaagggaaaagaaacatcaaccaatcctattgcctcaatttttgcctggacgagaggtttagctcaccgaggtaaattggacggaaatgatgatcttataaagtttgctaacactattgagcaagtttgtattgattgtgtcgaaagtggttctatgaccaaagatctggcgatattagttgggccatcaagtaagtacttaactacaaatcaatttctagatgaaattgataataatttaaaaaagaaattaaattaaa

SEQ ID NO: 207600 - DNA, 196 bp, Unknown
  Bacterial polypeptide expressing nucleotide sequence isolated from the Sargasso Sea
aaaagaagaatttggatgggaaataagaacagatagtggaattggtattaagcctatatcccaaactgcatcagaaaggctcatcagagcttctttaaattatgcagtagagaacaacaaaaagaatgttgcgatagtacataaaggtaacattatgaaatataccgaaggtgcatttagaaaaatggggttatga

SEQ ID NO: 207601 - DNA, 469 bp, Unknown
  Bacterial polypeptide expressing nucleotide sequence isolated from the Sargasso Sea
acatttaaaaatcctaatacaggtaaagatatcgtcattaaagatgtaatttgtgatgcttttttacaacaatgccttttaagaccagctgattacgatgttttggcaacgcctaacctaaatggggactatctttcagatgcgctagcagcacaagttggtggaattggaatagcgcccggagctaatctaggtgatgaagttgcagtatttgaagcaacacatggaactgctccaaaatatgcaggacaagatagagtaaaccctggctctctaatactttcagctgaaatgatgttaagacatatgggttgggtagaagctgctgatttaataattgaagctatgcaaaaaaccattagcaaaaagagagttacttatgattttgctcgactaattgatgatgcagaagaagtaagttgttctaagtttggtgatttgctaattaaaagaattcaaaaacaataaa

SEQ ID NO: 207602 - DNA, 340 bp, Unknown
  Bacterial polypeptide expressing nucleotide sequence isolated from the Sargasso Sea
atggcagataaaattcaaattaaagatggaaagttaattgttcctgatcaaccaattataccatttatagaaggagatggtattggacctgatatttgggcagcagctcaacgagtaattgatgcagcagttgaacatacttatcacggggctagaaaaattgagtggttggaagttctttgcggtgaaaaatcctacgataaaaatggtgaatggcttcctgaagaaacattggaaactttacaatcacacttagttggaattaaaggtccattaacaactccaattggcggaggaattcgttctttaaatgttgcattgaggaaagaactagacttat

SEQ ID NO: 207603 - DNA, 292 bp, Unknown
  Bacterial polypeptide expressing nucleotide sequence isolated from the Sargasso Sea
ttcagtagtaattggcagacatgcttttggcgatcaatatagagcaaccgattttaaagttccaggcaaaggaaagatggaagttaagtggacatcagaggacggtaaagatgaaattaaatacgaggtatttaattttactggaccaggagttgctctttctatgtataacttagataagtccatcgaagactttgctagatcttgctttagctacggtcttataaaaaagtggccagtctatctttcaacaaaaaatacaatccttaaagaagtacgatggacgttttaa

SEQ ID NO: 207604 - DNA, 806 bp, Unknown
  Bacterial polypeptide expressing nucleotide sequence isolated from the Sargasso Sea
agtgagtaaaactggtagccaaaggcatattagaaaagctattgaacatgctaaaagattatcaggagataaaaggcatgtcactcttgtacataaagggaatattatgaaatacacagaaggtgcatttagagattggggatatgaattagcagtaaatgaatttagagaagattgcattacagaaagagaaagctggattttagacaatattcagaaaaacccagaaattacaattgaaaataatggtcgaaaaattgaaccaggttttgacaagctaacaaataacaaaaaagcattcatttgcgaagaaattaaagaagttattgcatcaatatcaaattctcacggagatgggaaatggagaaaacttgttcttattgatgatcggatagctgatagtatatttcaacaaattcaaactagacctcaagaatattcaattcttgcaacattaaaccttaatggagactatgtttctgatgcggctgcagcaattgttggaggcctaggtatggctcccggtgcaaatattggagataatgcagcaattttcgaagctacgcacggtactgctccaaaacatgccggcttaaacaagattaatccaggctcagtaattcttagtggtgtaatgatgcttgaatattttggttggaatgaagcagctaacttaattactaatggtttaagtaaggcaatagagcaaaaaaaagtcacctatgatctagcgcgcttaatggaaccaaaagtagagcccctatcctgcagcagttttgctgaagaaattatctcaaatttctaat

SEQ ID NO: 207605 - DNA, 989 bp, Unknown
  Bacterial polypeptide expressing nucleotide sequence isolated from the Sargasso Sea
catggcccagttcgagaagctcacagcccccagccagggcacgccgatccgcttcgagaacggtcagcccgtggtggccgacaacccgatcatccccttcatccgcggcgacggcaccggtgttgacatctggcccgccacccagaaggtgctggatgccgccgtggccaaggcctatggcggtgcgaaacggatcgaatggttcaaggtgttcgccggcgacgaagcctgtgacctctacggcacctatcagtatctgccggaggacacgctcgaagccatccgcagctacggcgtggcgatcaagggccccctcaccaccccggtgggtggcggcatccgctccctgaacgttgccctgcgacagatctttgatctgtattcctgtgtccgcccctgccgctattacgagggcaccccaagtccccacaagcgtccgcaagatctggacgtgatcgtttaccgggagaacaccgaagacatttatatgggtgtggaatgggaggccgatgacgccgtcggccaggagctgcgcaagcatctcaatgaagtggtgattcccgccaacggcaagctgggcaagcgccagattccggaaggctccggcatcggcatcaaaccggtgagcaagcacggcagccagcgccacatccgcaaggccatccagcacgctctgcgccttgagggcagcaagcgccacgtgaccttggtgcacaagggcaacatcatgaaattcacggaaggcgccttccgcgactggggctacgagctggccaccaccgaattccgcgacgtgtgcatcaccgagcgggaaagctggatcctcggcaacctcgagaaggattcagacctgagcgtgcaggccaacgcccgcatgatcgagccgggctacgacagcctcaccccagaaaagaaggccgacatcgatgccgaggtgcaggcggtgatcgacgccatcggcagcagccacggtggtggcaagtggaaag

SEQ ID NO: 207606 - DNA, 877 bp, Unknown
  Bacterial polypeptide expressing nucleotide sequence isolated from the Sargasso Sea
aatgtcaaaaattttagtgaaaaatcctgtggttgaattagatggcgatgaaatgaccaggatcatatgggattttattaagcaaaagctcatacttccatatcttgacatagacctaaaatattacgacttatctgtgcaaaatagagatcaaacaaatgatgaaattacagttgaggctgcaaaagcaattaaaaaatttggggttggtataaaatgtgcaacgatcactcctgacgataatagagtatcggaatttaagctaaaaaaaatgtggcgttctccaaatggaactataagaaatattttagatggaactgtttttagacaaccaattatatgtaaaaatattccaagaattgtaagaacatgggatgctcctatcgttgttggtaggcatgcgtttggtgaccaatataaagctacagaaatgaaaatcaataaaccagggaaactctttatgaaatatgttgatgaggatggaaaaatagaggaaaaagaagtttttcaatttcaaaatcagggtgttgccctctctatgtataatatagacgagtcaattagaggttttgcaagagcttgttttaactatggattaaaattaaaatggcctgtgtatctctcaacaaaagatactattttaaaaaaatacgatggaagatttaaagagatatttaatgaaatttttcggaaagaatttaaaagtgattttgaaaataatcaaatagcttacgaacaccgtctcattgatgatttggttgcgtcttccatgaaatggtcaggtaactttatttgggcgtgtaagaattatgacggagatgttcagtcagatgcagttgcacaggggtttggttctttaggtatgatgtctagtgtt

SEQ ID NO: 207607 - DNA, 795 bp, Unknown
  Bacterial polypeptide expressing nucleotide sequence isolated from the Sargasso Sea
tatgcctaaaattcacgttaaaaaccccattgtagaattagatggagatgaaatgactagagtaatttgggaatttataaaaaataagttaattcttccatatttagaattagatattaaatattatgatctgggtattaaaagtagagacaagacctcagacaaaataactgttgattgtgcacatgctataaaaaaatatggtgttggcataaagtgtgccacaattactccagatgaaggcagggtagaagaatttaatttaaaaaaaatgtggcgatctcctaatggcactataagaaatattttaggaggaactgtttttagagagccaatactttgtaaaaatattcctaaattagttccaagttggaaaaatccaatttgtataggtagacatgcatttggcgaccaatatagagcaacagactttcaagttccaggcaagggtaaattagaaattaaatggacctcagaagatggaaaagaaaaaaaagaatacgaagtttttaactttccaggaccaggtatagcattatcaatgtataatttagatcaatcaattagagattttgcaagagcttgcatgaattatggattaaatagaaaatggcctgtttatctttctacaaaaaatactattttaaaaaaatatgatgggagatttaaagatctatttcaagaaatatttgaaactgaatttaaggaaaaatttaaagaaagaaatattacttacgaacatagactcatagatgacatggtagcatgtgcaatgaaatggaatggaaattatat

SEQ ID NO: 207608 - DNA, 922 bp, Unknown
  Bacterial polypeptide expressing nucleotide sequence isolated from the Sargasso Sea
attaatgttaggattaggcagaaattagatttatttgcatgtgttaggcctattaaatatttccctggaactagcacacctatggccgagtcaggccttacagatatggtggtgtttagggaaaatacagaggatttatattctggtatagaatgggagccaaattcccctggggctaagagaattatagattttataaataaagagctaggtcgttcaccatttagatttgaaaataactgtggaattggcattaaaccagtatctgaagagggcacaaaaagacttataaggatggcaatagattattcattggcaatgaataagtctagtatcaccattgtgcataaaggaaacatcatgaaatatacagaaggtgcttttcgtgattgggcatatgatgttgttacaaatgaatataatggaataatccaaaaggataatacgtatattatcgagaattctgaatttaactcagaaataatagtcaaagactgcattgctgataattttctccaacaaattattctagctcctgaacagcatgatgtaattgcaacattgaatcttaatggtgattacatttcagatgcactagctgcacaggttggaggtattgggatggctcctggaggtaatataggagatggctgtgctgtttttgaggcaactcatggttctgctgagccatttgctggtaaaaatagagtaaatcctggctctattattctttcaggtgaaatgatgttgagatatctaggatggactgaagctgcagacctcgtcattaaaggcgtcaaaggtgctatacagaagaaacagctaacttatgatctagcacgagctcgtgcaggtaagaggttaattagggttaaaacatctgaaaaacataaaactattgatgttaaggaagaaatagcaa

SEQ ID NO: 207609 - DNA, 1003 bp, Unknown
  Bacterial polypeptide expressing nucleotide sequence isolated from the Sargasso Sea
atttccgttcctgaaaccggcgagataatcgttgtcaacgccgacaacagcttgtcggtgccggataacccgatcattccctacatcgaaggggacggtatcggggttgatatctcacccgtgatgatcgcggtggtcgacgcggcggtggccaaggcctacgacggcgggcggcagatatcctggatggagatctacaccggcgaaaaagcagccgaactctatgatggcgactggtttcccgaagagacgctggacgccatcaagacctatagcgtggcgatcaagggcccgctgacaacacccgtcgggggcgggttccgctcgctcaacgtggccttgcgccaggaactggacctgtacacctgtctgcgacccgtgcggtggttcgagggcgtaccgtcgccggtcaagaacccgggtgattgcaatatggtgatcttcagggagaactcggaagatatttacgcgggcatcgagtaccaggcgggcaccgatgaggctcaaaaggtcgtcgacttcatcattaaggagatgggtgccaccaagatccgcttcccagagaatgtcggtatcggtatcaagccggtctctgcggagggcacgcagcgtttggtgcgcaaggcgatccaatacgcgattgaccaggacttgccctcggtcacgctagtgcacaagggcaacatcatgaagttcacggagggcgccttccgagactggggctacgagcttgcgcagcaggagttcagcggtgagttgctagatggcggcccttgggtgagcattaagaaccctcgcacgggcggcgacattttgatcaaggatgtgatcgccgacgcgatgctgcagcaggtgctgacccgcccgagggactacagcgtggtagccacgttgaacttgaacggtgactacctgtccgacgcgctggctgcgcaagtgggaggcattggcatagcgcccggcgccaacctctcggacacggtggcgctgtttgaagccactc

SEQ ID NO: 207610 - DNA, 355 bp, Unknown
  Bacterial polypeptide expressing nucleotide sequence isolated from the Sargasso Sea
atgagcaaaatcaaggtaaaaaacccagttgtagagctggatggtgatgaaatgactcgtattatatgggagttcatcaaaaataaattaatccttccatatttagatcttggtattgaatattacgatttaggcatgaaaagcagagataataccgatgatcagattacggtcgattctgctaatgctattaaaaaaattggtgttggaattaagtgtgcaacgatcacacctgatgaagcgagagtagaggaatttgatttaaaaaaaatgtggagatctcctaacggaacgataagaaatataattggaggaacagtatttagagaaccaattatttgtaaaaatattccaa

SEQ ID NO: 207611 - DNA, 970 bp, Unknown
  Bacterial polypeptide expressing nucleotide sequence isolated from the Sargasso Sea
atatgacggcaaaagaaaaataagctggatggagatttattgtggcgaaaaatcagtaaaaatttatggtaatgatgaatggttgccagatgaaactcttcaagcttgtaaagattacaaagtttcaattaaaggtccgttaaccactcctgttggtggtggtattcgttcattaaacgtggctataagacaaaaattggatctatatgtatgtttgagaccagtgaagtattttgatggcactccaagtccagttagacgccctgatctagtagatatggtgatttttagggaaaactcagaggatatatatgcaggtgttgagtttgaatccaatacagatgcagcaaacaagttaattaaagtgcttcaagatgactttggggtagaaaaaataaggtttacagagaattgtggaataggaatcaagcctgtttcagaagaggggacaaagagattagtcagaaaagcttatgaatatgctattcagaatgaaaaagattctgtaactctgattcacaaaggaaatattcagaagtttacagaaggcgccttcatggattggggttatgaactagcacgagaagaattcggcggagagcctcttgatggcgggccttggcatacatttaaaaacccaaataccggtaaagatatcattgttaaagatgtaatctgtgatgctttcttgcaacagtgtcttttaagacctgcagattacgatgttttagcaacaccgaatcttaatggcgattatctttcagatgctcttgctgcacaagttggtggaattggaatagctcctggtgcaaacttaggtgatgaagttgccgtatttgaagcgacacatggaactgcaccaaaatatgcagggcaagacaaagtaaaccctggctcattaatactttcagctgaaatgatgttaagacatataggttgggtagaagctgcagaccttataataagcgcc

SEQ ID NO: 207612 - DNA, 1043 bp, Unknown
  Bacterial polypeptide expressing nucleotide sequence isolated from the Sargasso Sea
gacaagagtaatttgggaattcatcaaaaacaaattaattctaccttatttagatttaggcattgagtattacgatctaggaatgaaaagcagggatgatacagatgacaaaattaccatcgactgtgctaatgcaattaaaaagaatggagtaggtatcaaatgcgcaactattactcctgacgaagcgagagttgaagaatttaaattaaagaaaatgtggagatctccgaatggaacaataagaaatattattggaggaacagtatttagagaaccaataatttgtaaaaatattcctaaacttgtaccatcttggacggatccattaattattggaaggcatgctttcggtgatcaatatagagctacagattttttagttccaggaaaaggtaaattagaagttaagtggacatcggaagatggaagtgatgaaaaaaaatatgaagtatttgactttccaggacctggtattgctctttcaatgtataatttagataaatcaattgaggactttgcaagatcatgtttcaattacggtctaattaaaaaatggcctgtatatttatcaactaagaataccatactaaaaaaatatgacggtagatttaaagatatatttcaaaatgtttttgaaaaagattttaaatcagaatttgaaaaaaataacataacttatgaacataggttaatcgatgatatggttgcttgtgctatgaagtggcacggtaaatatatatgggcttgtaaaaactacgatggcgatgttcaatcagatactgttgctcaaggttatggttcattaggtttaatgactagtgttttattggcacctgatggccgaacaatggaagcagaagcggctcatggaactgtaactcgacattttagaatgcatcagcaaggtaaagaaacatcaaccaatccaattgcatctatatttgcttggacaagaggtttagcacacagaggaaagttagatactaatgatgaattaattaaatttgctaaaacacttgaggaagtatgcgttgagtcag

SEQ ID NO: 207613 - DNA, 397 bp, Unknown
  Bacterial polypeptide expressing nucleotide sequence isolated from the Sargasso Sea
gatgttcagtcagacacgcgttgctcaaggttatggttctttaggtttaatgacaagtgttctattagcgcctgatggtagaacaatggaagcagaagcggctcatggaactgtaactcgacattttagaattcatcagcaaggtaaagaaacatcaactaatccaattgcatctatatttgcttggacaaggggtttggcacacagaggaaagttagatagcaatgatgaattaattaaatttgccaaaactcttgaagaagtatgtgttgagtcagttgaatcaggttcaatgactaaagatttggctatactaattggtccttctacaaaatatttaacaactaaccagtttttagatgtaattgatggaagtttaaaacaaaaattaaattaa

SEQ ID NO: 207614 - DNA, 595 bp, Unknown
  Bacterial polypeptide expressing nucleotide sequence isolated from the Sargasso Sea
atggctaaaattaaagtaaaaaatccagtagtagagctagatggcgatgaaatgacacgaataatttggtcttttataaaaggcaaattaatcaaaccatatttagacgttaatattaaatattttgatctaggtatggaaaatagagataaaacaaacgatcaagtaactattgattgtgctaaagctattcaaaaatatggtgcaggagttaaatgtgcaactataactccagacgaagcacgtgttaaagagtttaaattaaaaaaaatgtggagatctccaaatggtacaattagaaatattgttggtggaacaatttttagagaacctataatctgtaaaaatgttcctagactagttccacattggactgaaagtgtcatagtaggaagacatgcttttggagatcaatatagagctacagattttaaagttcctggaaaaggaaaaatgacaattaagtgggagtctgaagatggaaaagataaaattgaacatgaagtttttaaatttaatgaatcggggatagctctttcaatgtataatttggataactcaatcaaagattttgcaagagcatgtttaaattatg

SEQ ID NO: 207615 - DNA, 257 bp, Unknown
  Bacterial polypeptide expressing nucleotide sequence isolated from the Sargasso Sea
tatggcaaaaataaaagtcaaaaatccagtagttgagctagacggagacgaaatgactagaatcatatggtcgtttattaaagataagcttattaagccctacttggaaatagacctaaaatattttgatttaggtatggaaaatagagatataacaaacgatcaggtcactatagattgtgctaaagcaattcagcaatacggtgctggagtaaaatgtgcaacgatcacacctgatgaagcgcgtgtaaaagaat

SEQ ID NO: 207616 - DNA, 826 bp, Unknown
  Bacterial polypeptide expressing nucleotide sequence isolated from the Sargasso Sea
atgccaaaatttgaaaaattaactttacctaatgaaggcgagataataacttttaatcaaggcaaacctaatgttcctaataatccaattgtcccatttattaggggtgatggtactggagttgatatttggcctgctactcaaatcgttctagattcagcgattaaaaaaagctatggagatgaaagaaaaattaattggtttaaagtatatgcaggcgatgaagcttgtgaactttatggaacatataactatctcccacaagatactattgaagcaatcaaacattttggtgtagccatcaaaggtcctttaacgactcccattgggggaggtattagatctcttaatgttgcattaaggcaaatctttgatttatatagctgtgttagaccatgcaaatattattcaggaactccaagccctcacaaaaatcctcaaaatttagacgttattgtttacagggaaaatactgaggatatctacatggggattgaatgggaagcggaggataatgattgtcttgaattaattaatcacttaaataactttgtcataccaaaaagtaaaaatttaaaaaatagatcgataccaaacggatcaggtattggaataaaaccagtgagtaaatctggaagccaaaggcatattagaaaagctattgaacatgcgaaaagattatcaggagataaaaggcatgtgactcttgtacataaagggaatattatgaaatatacagaaggtgcatttagagattggggatatgagttagcagtaaatgaatttagaaaagattgcattacagaaagagaaagctggattttag

SEQ ID NO: 207617 - DNA, 873 bp, Unknown
  Bacterial polypeptide expressing nucleotide sequence isolated from the Sargasso Sea
tattaggggtgatggtactggagttgatatttggcctgccactcaaatcgttcttgactcagcgattaaaaaaagctatggagatgaaagaaaaattaattggtttaaagtctatgcaggcgatgaagcttgtgaactttatggaacatataactatctacctcaagatactattgaagcaatcaaacactttggtgtagctatcaaaggtcctttaacgactcccatcggtggaggtattagatctcttaatgttgcattaaggcaaatctttgatttatatagctgtgttagaccatgcaaatattattcaggaactccaagccctcacaaaaatccccaaaatttagacgttattgtttatagagaaaatactgaggatatctacatgggaattgaatgggaagcggaggataataattgtcttgaattaattaatcacttaaataacgttgtcataccaaaaagtaaaaatttaaaaaatagatccataccaaacggatcaggtattggaataaaaccggtgagtaaatcaggtagccaaaggcatattagaaaagctattgaacatgctaaaagattatcaggagataaaaggcatgtgactcttgtacataaagggaatattatgaaatatacagaaggtgcatttagagattggggatatgaattagcagtaaatgaatttagagaagattgcattacagagagagaaagctggattttagataatattcagaaaaatccagaaattacaattgaaaataatgctcgaaaaattgaaccaggttttgacaagcttacaaataacaaaaaagcattcatttgcgaagaaattaaagaagttattgcatcaatatcaaattctcacgg

SEQ ID NO: 207618 - DNA, 1027 bp, Unknown
  Bacterial polypeptide expressing nucleotide sequence isolated from the Sargasso Sea
cttccctatgttgatattgacataaaatactatgatttaggtgttactattcgtgataatactgacgatcaaattacaattgatgcagctgaagctgtaaaaaaatatagagttggcattaaatgtgcaactattacccccgatgaagatagagtaaaagaatttaatttaaaaaaaatgtggcgttctcctaatggaacaataagaaatatattaggaggtacaattttcagacaacccattatctgcaagaatgttccaagaattgttacaaactggaataaacctattgtagtagcaagacatgcttttggagatcagtatagagctacagacacactaatatcaaaacctggaaaactaaaaatggtatttgaaccatcagatggaagtgaaggtttcacaaaagatgtttataattttaaaaaagaaggaatagctctatcgatgtacaatcttgatcagtctattattgattttgcaagagcatgttttaactatggattagaactaggttggccagtttatctatctactaaaaacacaattttgaaagtatatgatggaagattcaaagatttattcgaagatgtctttcaaactgagtttgctgaaaaatttaaagaaaaaaatatagtttacgagcatagattgatagatgatatggttgcaacagctcttaaatgggaaggtaattttatttgggcttgtaaaaactatgatggagatgtccaatctgactctgttgcacaaggatatggatcacttggattaatgacaagtgttttgatgacacctgatggtaaaacagtagaggctgaagcagctcatggaacagtaacaagacattatagaaatcatcaacaaggtttagaaacatcaaccaacccgatagcgtcaatatttgcatggactaggggtttgcaatttagaggtaaatttgatgacaatattaatttggtcaattttgctaaaagccttgaagatacatgtataaatactgttcaatcagggaaaatgacaaagg

SEQ ID NO: 207619 - DNA, 689 bp, Unknown
  Bacterial polypeptide expressing nucleotide sequence isolated from the Sargasso Sea
aatgagtaaattaaaggttaaaaatcccattgtagagcttgatggtgatgaaatgactagagtcatatgggacttcataaaaaataagttaatcctaacttaccttgatctaaaaattgaatactacgatttaggaatggaaagtagagataagactgaagataaaatcactatagaatgtgctaatgcaattaaaaaaaatggtgttggcatcaaatgcgcaaccatcactccagatgaagctagagtaaaagaatttaatctaaaaaaaatgtggagatcacctaatggaacaataagaaacattattggaggaactgtttttagagaacctataatttgtaaaaatataccaaaacttgtgccttcttggactgatccgttaattattggaagacatgcttttggtgatcaatacagagcaacagatttcactgttccaggtaaaggtaaattagaaattaaatggactgctgaggacggaacagatgaaagaaagtatgaggtattcaattttcctggtccagggatagctttatctatgtataacttagataaatcaatagaagattttgcaagatcttgctttaactatggtttaataaaaaaatggccagtgtatctatctacaaagaatacgattttaaaaagatatgatggaagatttaaagatatcttccaagaagttt

SEQ ID NO: 207620 - DNA, 850 bp, Unknown
  Bacterial polypeptide expressing nucleotide sequence isolated from the Sargasso Sea
atgagcaaaattaaggttaaaaaccccatcgttgagttagatggtgatgaaatgacaagagtgatatgggattttatcaagaacaagctcatacttccttatcttgaactagatattaaatattacgatcttggaataaaaagtagagacaacacgtcagataaaattactattgattgtgcacatgcaattagaaaatatggtgtaggtattaagtgtgccacaattacccctgatgaagcaagagttgaagaatttaaactaaaaaaaatgtggcggtcgcctaatggaactatacgaaatattttaggaggaactgttttcagagaaccaatactttgtaaaaatattccaaaattagtgccgagctgggagaatccaatttgtattggaagacatgcgtttggagatcaatacagagcaacagattttcaagttccaggaaaaggtaaattagaaataaaatggacgtcggaggatggaaaagataaaaaagaatttgaagtttttaattttcctggtccaggagtagctctttcaatgtataacttggatcagtctattatagactttgcaagatcttgtatgaattatggtctaaacagaaaatggccagtatttctatcaactaaaaatacaatattaaaaaaatatgatggaagatttaaagatttatttcaagaagtatatgaaaaagaatttaaagaaaaatttaaagaaagagagataacgtacgaacacaggcttatcgatgatatggttgcatgcgcaatgaaatggaatggaaattatatatgggcatgtaaaaattatgatggagacgtttcatctgatactgtttgctcaggct

SEQ ID NO: 207621 - DNA, 937 bp, Unknown
  Bacterial polypeptide expressing nucleotide sequence isolated from the Sargasso Sea
tctccaaatggtaccataagaaatattattggagggacagtttttagagaacctattatctgcaaaaatattccaaaactggttccatcatggactgaccctgtaattattggaagacatgcttttggagaccaatatcgagctacggattttaaagtacccggaaaaggtaaaatggaggttaaatggacatcagaggatggaaaagatgagattaaatatgaagtatttaattttacaggtccaggtgttgctctttcaatgtataatttggacaaatctattcaggattttgcacgatcttgtttcagttatggtttaataaaaaaatggccagtttacatgtctacaaagaatacaattttaaaacaatatgatggaagatttaaagatatattccaagaagtatttgaaaatgaatataaaaaagaattcgaaaaaaataatttaacttacgaacatagattaattgatgacatggttgcttgtgcaatgaagtggagtgggaaatatatttgggcatgtaaaaattatgatggagatgtccagtctgatactatggctcaaggttatggttcactaggtctgatgacaagtactcttttaactcctgatggaaaagtaatggaagcagaagcggctcatggaactgtaactagacattatagaatgcatcaacaaggtaaagaaacttcaactaaccctattgcatcaatttttgcatggacgagaggacttgcacatagagggaagctagacaacaaccaagaattaattaattttgctcaaacacttgaaaaagtttgtatagaatgtgttgaaaatggttctatgacaaaagacttagccatcctagttggtcctgacagcaaataccttacgacaaatcaatttttggatgaaattgatagtaatttgaaaaaaaaattaaactaaa

SEQ ID NO: 207622 - DNA, 730 bp, Unknown
  Bacterial polypeptide expressing nucleotide sequence isolated from the Sargasso Sea
attgagctataaaaatataaaaattcctgaatcaggtaaaaaaataacattaaaagatggagtcttaacagttcctaataatccaataatcccatttatagagggtgatggtattggatcagatataacgccagctatgattgaagttgttgatgctgctgttgaaaaagcttatgggaaagaaaaatctatatcttggatggaaatatattgtggcgaaaaatctactaaggtttatggtaaagatgaatggttgccagatgagaccctagatgctcttcgtgagtatgttgtaagtattaaaggacctttaacaacaccagttggtggaggaataagatcattgaatgtttcattgagacaaattcttgatttgtacgtatgtttacgtccagttagatggtttactggtgttcctagtccagtaaaagttccaggtgatgttgatatggttatctttagagaaaactcagaagatatttatgctggtgttgagtttgcgtctgactcaaaagaatcaactcagttagttaaaatacttcaagataaattcaatgtcgatcaaataagattcccgcaaaatgttggattgggtgtaaaacctatatctgaagagggaacaaaaagactagtaaaaagagcttttgaatatgctatcgaacatgatagatcctctgttactttagtgcacaaaggaaatattatgaaatttactgaaggtgcattttag

SEQ ID NO: 207623 - DNA, 607 bp, Unknown
  Bacterial polypeptide expressing nucleotide sequence isolated from the Sargasso Sea
atggaaagcaaagtagtagttccggcggaaggtcaaaaaatcaccctgcaagatggcaaactgaatgtccctaacaacccgatcatcccgtttatcgagggtgatggtattggtgttgacgtgactccggcgatgctgaaagtggtggatgccgccgttgagaaagcctataaaggcgagcgtaaaatttcctggatggaaatttacaccggcgaaaaatcgacccaggtgtatggccaggacgtctggctgcctgccgaaactcttgatctgattcgtgactatcgtgttgctatcaaaggccctctgacgacgccagttggcggcggtattcgttctctgaacgttgcgctgcgccaggagctggacctctacgtctgcctgcgcccggttcgttactaccagggtactccgagcccggttaaacaccctgagctgaccgacatggttatcttccgtgaaaactccgaagacatctatgcgggcatcgagtggaaagcggactctgctgaagcagaaaaagtgatcaaattcctgcgtgatgagatgggcgtgaagaaaattcgcttcccggaacattgcggtatcggcatcaagccgtgctctg

SEQ ID NO: 207624 - DNA, 879 bp, Unknown
  Bacterial polypeptide expressing nucleotide sequence isolated from the Sargasso Sea
caaaaaatgtacctaggttagtgcctggatggaccaagcctattgtaattggccggcatgcatttggtgatcaatatagagctacagatacaataataccaagctcaggcaggctaagtatggtttttgaaccagaggatggaagtaaaaaaatacagcatcaaatttttaactttcctggtcctggcatagccatgacaatgtacaatcttgatgaatctattaaaggatttgcgagagcatgctttaattacggattggatttaggttggcctgtatacctatcaacaaaaaatactattttaaaagtttatgatggcagatttaaagatatttttaatgacgtttatgaaagagagtttaagtctaaatttaaaaaaaagaaaattacttatgagcatagattaattgatgacatggttgcttgtgctttaaaatgggatgggggctttgtatgggcttgcaaaaattatgatggtgatgttcaatctgatacggttgctcaaggctttggctcacttggccttatgacttcagtgcttctcacaccagacggcaaaaccgtagaagcagaggctgcacatggaacagtaacaagacattacaggcagcatcaagctggaaaacagacttctactaacccaattgcatcaatttttgcttggacacgtggcctttcttatagagccaagtttgacaatagtgaaaaagttgagaagtttgctaaaaacctcgaaagggtctgtattgaaactgttgaaagtggatacatgacaaaagatttggctctgcttgttggcagtgaccaaccatggttaacaacaacccaatttttaaataaaattgatgaaaattttaaaaaagtaatgtctgattagt

SEQ ID NO: 207625 - DNA, 415 bp, Unknown
  Bacterial polypeptide expressing nucleotide sequence isolated from the Sargasso Sea
tgatgttcaatcagatgtagttgctcaaggttttggatcgcttggtttaatgacttccacattagtaacacctgacggaaaaacacttgaggctgaagctgctcatggaaccgtaactagacattatagaagacatcaaaaaggagaacagacatcgacaaatccaatagcttcaatatttgcttggacaagaggtctaatgcacagaggaaagcttgataataatgaaaatcttattaagttttgtaaaactttagaggaggtatgtattgaaactgttgaagatggaaaaatgacaaaagatctagctttattagttttcagagatgatttggttgaatctaattttcttactacacatgagtttttagatgaattaaaaagtaatctggataaaaaattagctattcaataa

SEQ ID NO: 207626 - DNA, 646 bp, Unknown
  Bacterial polypeptide expressing nucleotide sequence isolated from the Sargasso Sea
gatggagttcagcatgggatacaagaagattcaggttccggcagtcggcgacaaaatcaccgtcaatgcagaccattctctcaatgttcctgaccaaccgatcatcccctacatcgaaggagacggtattggcgtcgacatcagcccggtgatgatcaaggtggtcgatgccgctgttgaaaaggcttacggcggcaagcgcaaaatctcctggatggaggtgtacgctggtgaaaaggccactcaagtttacgaccaggatacgtggctgccccaggaaaccttggatgcggtcaaggattacgtggtgtccatcaagggtcctctgaccacgccggtcggtggcggcatccgctcgctgaacgtggccctgcgccagcaacttgatctctacgtgtgtcttcgcccggtgcgctggttcgaaggcgtgcccagcccggtgaaaaagcctggcgacgtggacatgaccatcttccgtgagaactccgaggatatttacgcgggcatcgaatggaaggccggttcgccggaagcgatcaaggtgatcaagttcctcaaggaagaaatgggcgttaccaagatccgtttcgaccaggattgcgggattggcgtcaagccggtctccaaagagggtaccaagcgctgg

SEQ ID NO: 207627 - DNA, 499 bp, Unknown
  Bacterial polypeptide expressing nucleotide sequence isolated from the Sargasso Sea
atatgagcatagacttattgatgatatggtagctgctgctattaaatggaaaggcggatttgtctgggcatgtaagaattatgatggtgatgttcaatcagatgtagttgctcaaggttttggatcacttggtttaatgacttctaccctagtaacacctgatggaaaaactcttgaggcagaagctgctcatggaacagtaacaaggcactttagaagacatcaaaaaggtgaacagacatcgacaaatccaatagcttcaatatttgcttggacaagaggtttaatgcatagaggcaaacttgataataatgaaaaacttattagtttctgtaaaactttagaggaggtctgtattgaaacagttgaagatggaaaaatgactaaagatttagctttattagtttttagagatgatttggttaactctaattttcttacaacacacgaattcttagatgaattaaaaagtaatctggataaaaaattagctatttaa

SEQ ID NO: 207628 - DNA, 678 bp, Unknown
  Bacterial polypeptide expressing nucleotide sequence isolated from the Sargasso Sea
accaatttgtataggaaggcatgcatttggtgatcaatatcgtgcaacagatgtagcaactcatggtcctgggaaattagaaatgaaatttacaccttcagatggctctgagtcaaaaacctgggaagtttataattttgaagaggacggtatcgcaatgtctatgtataacatagactcatccatttatggttttgcaagatcttgtatgaacatggctttaaccaaaagatggcccctttatctatcaaccaagaatacaatattaaaagcttatgatggtcgcttcaaagatatatttgaagaagtttttataaaagagtttaaagataaatttgaaaaagaaaacataacatacgaacacagactaattgatgatatggttgctgctgcaatcaagtggaaagggggttttgtgtgggcttgtaaaaattatgatggagatgttcaatccgatattgtagctcaaggatttggatctttaggactaatgacatcaacgcttgttacacctgacggaaaaactttggaagcagaagcagctcatggcactgtaactagacattataggagacaccaacagggtgaggaaacatctacaaatcctatcgcatcaatttttgcttggacaagagggttaatgcacagaggtaaacttgataataataaggagttaat

SEQ ID NO: 207629 - DNA, 794 bp, Unknown
  Bacterial polypeptide expressing nucleotide sequence isolated from the Sargasso Sea
agaaaattcagaagatatatattgtggtgtagagtttgagggaaattcaaaagaagcaaagagtttgattaaaacacttaaaacaagatttgatgtttcaaaaattagatttgatgagaacgtgggcataggtgttaaaccaatatctaaaagtggaacctcaagacttgtaaaaaaagcaatagactatgctattgataataatcgttcatcagtaaccctagttcataaaggtaatattatgaaatacaccgaaggtgcatttagagattggggatatgaattagcaaaaaatgaatacggtggcattgaaattgacgatgggccatggcaggagattgttaatccaaataatggtaaaaaaatcgtaattaaagatgtaatttgtgatgcatttcttcagcaaatattattaagacctactgaatatgatgtcatagcaacaatgaatcttaatggcgactatatatctgatgctttggctgcaatggtaggtggtattggtatagcgccaggagcaaatatatcagatgaatatgcagtttttgaagccactcatggaaccgcaccgaaatatgctggacaaaataaagtaaatccaggaagtcttattctttctgcagagatgatgttaagacatatgggttggatagaagcagcagatttaattatgtcatcaatggacagagcaattggtgcaaaaaaggtaacctatgattttgcaagaatgatgagtgatgcagatcttgtttcttcatcaggatttgcagatgagatgatcaaaagaatgtaat

SEQ ID NO: 207630 - DNA, 535 bp, Unknown
  Bacterial polypeptide expressing nucleotide sequence isolated from the Sargasso Sea
gaaatttttgataaagaatttaagcaaaaatttgaagaaagaaaaataacttatgaacatagattaattgatgacatggttgcatgtgcaatgaaatggaatggaaactatatttgggcatgtaaaaactatgatggtgatgttcaatcagatacaattgctcaaggatttggatcattaggtctaatgtcaagtgtattaatgactcctgatggtaaaactttagaagctgaagctgcacatggcacagtaaccagacattatagattacaccaacagggtaaagaaacctcaaccaacccaatagcttcaatatttgcctgggcaagaggactttatcatagaggtaaattagatggaaacgacgagttaaaaaaatttgtaaaaaatttagaaaaagtttgtatagaaacagtcgaaagtggatctatgacaaaagacttggccattttgattggtccatctacaaaatacctaactactaatcagttcttagataaattagataacaatttaaagaaaaaactaaattaag

SEQ ID NO: 207631 - DNA, 583 bp, Unknown
  Bacterial polypeptide expressing nucleotide sequence isolated from the Sargasso Sea
aatacaatttttaaaaaagtatgatggtagattcaaagatttatttcaagaaatttatgagaaagaatttaaagaaaaatttaaagaaagaaatataacatacgaacatagacttatagatgacatggttgcatgtgcaatgaaatggaatggaaactatatttgggcgtgtaagaactatgatggagatgttcagtctgatacaatagctcaagggtttggatcacttggtttaatgacaagtgtattgatgtctccagatggtaaaactatcgaggctgaagctgcgcacggtactgtaactagacattttagattacatcaacaaggaaaagaaacctcaacaaatcccattgcctctatttttgcatgggcaagagggctttaccatagaggtaaattagacggaaacgaagatttaaaaaaatttgtaaaaactttagaaaaagtatgtattgaaacagttgaaaatggatctatgacaaaagatttggctattttaattagtccttctgaaaagtatcttactacaaatcaatttttagataagatagataataacttaaaaaaaaaactaaattaa

SEQ ID NO: 207632 - DNA, 643 bp, Unknown
  Bacterial polypeptide expressing nucleotide sequence isolated from the Sargasso Sea
cagggcacagaaaggctcgttaaacaagcacttgattatgcaatcaaaaatgatagatcctcagtaaccctagtgcacaaaggaaatattatgaaatttacagaaggtgcatttagagattggggatatgaattaagcatgaattcttataatggacaactattagatggaggcccttgggttacaattaaaaatccaactaatgaaaaaaatattattatcaaagatgttatatgtgatgcttttcttcaacaaatacttactagaccaaaggaatatgacgttattgcaacaatgaatttaaatggtgattacgtttcagatgccctagctgcatgtgttggtggtattggtatagcgccaggtgcaaatattggagatgaatctgcgttatttgaagccactcatgggacagcacctaaatatgctggccaagataaagtaaatccaggatcgcttattctttccgctgaaatgatgttaagacatttgggttgggttgaagctgcagatttaataatatcctcaatggaggcagcaataaccgataaaatggtaacttatgactttgaaagattaatggatgatgctcaattagtttcttgctcaggctttgcaaaggaaatgattaaaagaatgtgag

SEQ ID NO: 207633 - DNA, 922 bp, Unknown
  Bacterial polypeptide expressing nucleotide sequence isolated from the Sargasso Sea
tccccgaatggcacgatccgcaacattctcggcggcaccgttttccgccagccaatcatctgtcagaatgtgccacggctggttcctggctggacacggccgattgtcattggccgccatgccttcggcgaccaatatcgggcaaccgactttgtcacacctggtgccggcaagctgacgatgaccttccagccagccgatggcagcccagccatcacgcatgatgttttcgatttcccggagggcggcgtggcgatggccatgtacaacctcgatgagtcgatccgtggctttgccagagcctgcatgaattatggccttgatcttggctggcctgtctatctgtcgactaagaacaccattctgaaagcctatgacggacggttcaaggacctgtttgaagaagtctttgagactgagtttgccgtcaaattcaaggacgcgggattgatctatgagcaccgcttgatcgatgacatggtggcctgcgcgatgaaatgggacggcggctttgtctgggcctgcaagaactatgacggcgatgtgcagtccgataccgttgcccagggatttggctcgcttggcctgatgacatcggtgctgatgaccccggacggaaagaccgtcgaggccgaggctgcccatggcacggtcacccgtcattttcgccagcaccagcagggcaagacaacctcgaccaacccgatcgcctcgatctttgcctggacacgtggcctttcctaccgtgcaaaatttgatgacacgccggatgttgccgcctttgccgacatcgtagagaaagtctgcatccagacagttgaacgaggccagatgactaaggatctcgccctgctgatctcgaatgagcagccgttcctgacgactgacggcttccttgatgcgattgacgaacatctgcaaa

SEQ ID NO: 207634 - DNA, 301 bp, Unknown
  Bacterial polypeptide expressing nucleotide sequence isolated from the Sargasso Sea
atggccaaaattaaggtaaaaaacccaatagttgagctcgatggagacgaaatgacaagaataatttggtcttttattaagaaaaagctaataaaaccatatctagaaatagatttaaaatattatgacttaggtatggaaaatcgtgataatacaaacgatcaagttacagtggattgtgccaaagcaattcaaaaatttggggtaggtgtaaaatgcgcaacgataactccagatgaggctcgcgttaaagagtttaatttaaaaaaaattgtggagatctccaaaacggtacaataag

SEQ ID NO: 207635 - DNA, 839 bp, Unknown
  Bacterial polypeptide expressing nucleotide sequence isolated from the Sargasso Sea
attgcgaggaactgtatttagagagcccattatttgtaaaaatgttccaaggttggtaccatcatggactgatcctgtgattattggaagacatgcatttggtgaccaatatagagcaaccgattttaaagttcctggtaaaggaaaacttgaaattaaatggacttctgaagacggtaaagataccaaaaattacgaagtatttaatttccctggatcaggggtggctttgacaatgtacaatttagataaatcaatagaagattttgctcgatcttgttttaactatggattaattaaaaagtggccagtttacctttcaacaaaaaacactattttaaaaacttacgatggaagatttaaagatatatttcaaggtgtttttgaaaaagaatttaaatcgtcatttgaaaaaaataatttaacctatgaacataggcttatagatgacatggttgcctgtgcaatgaagtggagcggtaaatatatttgggcttgtaaaaactatgatggtgacgttcaatcagatactgttgctcagggatatggttctcttggacttatgacaagtgtcttgctcgcaccagatggaagaacaatggaagcagaagctgctcatggaactgtaacgagacattttcgaatgcatcaacaaggaaaagagacttcaacaaatcctatagcatcaatttttgcatggactagaggacttgctcatagaggaaaattagacgcaaatgatgagctaataaaatttgcaaatacgttagaaaaggtttgtattgattgtgttgaaactggatcaatgaccaaagatttagcaattttaattgatgcaa

SEQ ID NO: 207636 - DNA, 912 bp, Unknown
  Bacterial polypeptide expressing nucleotide sequence isolated from the Sargasso Sea
cttattaagccttatttagaaatagaccttaagtatcatgatttaggtatggaaagccgtgacaaaacaaatgatcaaataactgtcgatgcagctagagcaattcaaaaacacggcgcaggggtaaaatgtgcaacaataactcctgatgaagctcgtgtgaaagaatttaatttaaaaaagatgtggagatctcctaacggcactataagaaatattgtaggaggtacaatttttagagagcctataatatgtaaaaatgtgcctcgtttagtgcctcattggaccgatagcgttatagttggaagacacgcttttggagatcagtataaagcaacagattttaaagttccaggaaaaggtaaagtcacagttaaatgggaatcagaaaacggaaaagataaaatagaacatgaagtttttaattttgatggacctggtgttgctctttcaatgtataatttagataattcaattaaagatttcgcaagggcatgcatgaactatggtttggttagaaaatggccagtttatttttctactaaaaatacaattttaaaagcttacgacgggaggtttaaagatatctttgaagaggtttttcagaaagaatttaaaaagaagtttgaagaagttggaattacttatgaacatagattaatagatgatatggtagcatgtgctatgaaatggagtggaaaatatatctgggcatgcaaaaactatgatggagatgttcagtctgacacaattgctcaaggatatggttctttaggattaatgacaagtgtgcttagaacaccggacggaaaagtggctgaagcagaagctgcgcatggaacagtaacaagacattacagacaacatcaagctggaaaagaaacttcaacaaatccaatagcttctatattg

SEQ ID NO: 207637 - DNA, 323 bp, Unknown
  Bacterial polypeptide expressing nucleotide sequence isolated from the Sargasso Sea
tcctgatggtaaaacagtagaagctgaagctgcacatggcactgttactaggcattatagaaatcatcagaaaggtatagaaacttcaactaatcctattgcatcaatttttgcttggacaaggggtttaggttttagaggagaatttgatggtaataatgaattaataaattttgcaaaaaaattggaagaaacgtgtatcaaaactgtagaaagcggtgaaatgacaaaagatttagcaatattaattaataaagatcagaaatggttaaacactcaagattttttaagcgcaataaaaaacaattttctaattaactaat

SEQ ID NO: 207638 - DNA, 679 bp, Unknown
  Bacterial polypeptide expressing nucleotide sequence isolated from the Sargasso Sea
atcattatgaaaaatattccaaggtatgtgcaaggttgggttaaaccaatttgtattggtagacatgcttttggtgaccaatataaggcaactgattttcttacccatggaaaagggagattaaccatgacatttacacctgaaaatggtgatgaagaaaagacatgggaaatatacaattttcaagaggatggtattgcgatgggaatgtacaacatagaatcttcaatttatggttttgcaagatcatgtatgaatagagctgtatcaaaaggatggcctctatatttatcaacaaaaaatactattttgaaagcttacgatggaagatttaaggacatttttcatgaggtttatgagaacgaattcaaagaaaagtttgaagaaataggtattacatatgaacacagattaattgatgatatggttgcagctgcgatgaaatgggagggtggtttcgtctgggcgtgtaaaaattatgatggtgatgtacaatctgatactgttgctcaaggatttggatcattgggattgatgacttcaacattactaacaccagatggtaaaactatggaagctgaagctgctcatggaacagttacaagacattatcgattacatcaaaaaggaaaagaaacttcaaccaacccaattgcatcaatttttgcttggactagag

SEQ ID NO: 207639 - DNA, 834 bp, Unknown
  Bacterial polypeptide expressing nucleotide sequence isolated from the Sargasso Sea
agaaatatcttaggcggaacggtttttagagaaccaattatttgtaaaaatgttcctaaactagttcctggttggaccaaaccgattgtcataggaagacatgctttcggtgatcaataccgagctactgattttctgataccaggtgagggaaatttagaagtcaaatggacttcaaaggatggtaaagataaaaaagaatttaaagtttttgattttcctggatctggaactgctcttacaatgtataatctggatgactctattaaaaactttgcaagggcatgtatgaattatggcttaggaagaaagtggccagtttatttatcaactaaaaatacaatccttaaagcttatgatggtagatttaaagatcttttccaagaagtttttgaaaaagaattttctaataagtttaaaaaagcaaatattacatacgaacatagattaattgatgacatggttgcatgtgctatgaaatggaatggtggatatgtttgggcatgtaagaattacgatggtgacgttcaatctgacactgttgcacaaggatttggatccttaggcctcatgacaagcgtattaatgacaccagatggcaagacagtagagtccgaagcagcccatggaacagtgactagacactatagaatgcaccagcaaggaaaagaaacctccacaaacccaatagcttctatttttgcatggacaagaggtttagctcatagaggaaagcttgatgggaatgatgagttaattaaattttcaactaatgttgaggaagtatgtgtaaaaacagttgaaagtggttcaatgactaaagatttggcaatt

SEQ ID NO: 207640 - DNA, 800 bp, Unknown
  Bacterial polypeptide expressing nucleotide sequence isolated from the Sargasso Sea
aatgagtaaaatcaaggtaaaaaacccaatcgtagagttagacggtgatgaaatgactcgaattatatgggagttcattaagaataaacttatcttaccatatcttgatctaggaattgaatattacgatcttggtatgaaaagccgtgacaatactgatgatcaaatcacaatagactcagcaaatgctattaaaaaaattggtgttggcatcaaatgcgcaactattacgcctgatgaagcaagggtagaagaatttgaactaaaaaaaatgtggaggtcaccaaatgggacaatcagaaatataataggcgggactgtatttagagaacctattatttgtaaaaatatcccaaaacttgttccatcttggacagatccagtaattataggaagacatgcttttggagaccagtacagagcaacagattttaaagtacctggtaaaggaaaaatggaagttaagtggacatcagaagatggaaaagacgaaataaaatacgaggtatttaatttcactggtccaggagtagcactttcaatgtataatttagataaatccattcaagattttgcaagatcctgttttagttatgggctaattaaaaaatggccagtttacatgtctacgaaaaatacaattctaaaacaatatgacggtcgatttaaagatatattccaagaagtatttgagaatgaatataaagaagattttgataaaaataatttaacttatgaacatagattaattgatgacatggttgcatgtgcaatgaaatggagtggtaaatatatttggg

SEQ ID NO: 207641 - DNA, 499 bp, Unknown
  Bacterial polypeptide expressing nucleotide sequence isolated from the Sargasso Sea
atgagtaaaatagaggttaaaaaaccaattgttgaattagatggtgatgaaatgaccagggtaatctgggaatttataaaaaaaaaactaatccttccatatttagatttaaaaattgagtatttcgatttagggattaaaaaccgtgataaaacagatgaccaaataacagttgattgtgcaaatgcaattaaaaaaattggcgtaggtattaaatgcgcaacaattactcctgatgaagccagagtaaaggaatttaacttaaagaaaatgtggagatctccaaatggaactataagaaatattattggtggaacagtatttagagaaccaataatatgtaaaaatattccgaaattagttccaagttggacaaaccctatatgtataggaaggcatgcatttggtgatcaatatagagcaacagatttccatgtgcctggaaaaggtaaattagaaattaaatggacatcagaagatgaaaagaaaaaaaagaatt

SEQ ID NO: 207642 - DNA, 667 bp, Unknown
  Bacterial polypeptide expressing nucleotide sequence isolated from the Sargasso Sea
ccttggtgtaaaacctatatcgaagcaggggactgagagactggtaaaacaagcacttgattatgcaatcaaaaatgatagatcgtctgtgacacttgtacacaagggaaatattatgaagtttactgagggagcatttagagattggggatatgagttaagcatgaatttatataatggagaacttttagatggtggaccatgggtaacagtcaagaatccgaagactaataaaaatatcatagtcaaagatgtaatttgtgacgcctttcttcaacaaatcctcactaggcccaaagagtatgatgttatagcaacaatgaacttgaatggtgattatgtttcagatgcgcttgcggcttgtgttggaggtattggtattgcccctggagcaaatattggagatgattctgcattatttgaggcaacacatggtactgcaccaaaatatgctggtcaggataaggttaatccaggttcgttaattttgtcagctgaaatgatgttaaggcatatgggttggactgaagcagctgacctaatcatttcatcaatggaagctgcaattactgataagatggtcacttacgattttgagagactaatggatggcgcaaatttggtttcttgttcaggctttgcaaaggaaatgattaaaagaatgtga

SEQ ID NO: 207643 - DNA, 511 bp, Unknown
  Bacterial polypeptide expressing nucleotide sequence isolated from the Sargasso Sea
catgggttatgagcacattaaagtgccagattatggcgagaaaatagtagttaacgacgaccacagtttaagtgtgcccgatcaacctataattccttacattgaaggagatggcattggcgtagatatctctccggtcatgattaacgtcgtcaatgctgctgttgaaaaagcgtatggcgcaggccgaaaagtttcgtggatggaaattttcacgggtgaaaaagctgcagaattatacgatggagaatggtttccagcggaaactctcgatgccatcagggaattctctgtcgcaattaaaggccctcttacaacccctgttggaggtgggttccgatctctaaatgtggctttgcgacaagagcttgatctttatacctgcttgcgacctgttcgttggtttgatggagtcccttcacctgttaaagatcctggttcctgtgacatggttatttttcgggagaattctgaagatatttatgccggtattgaatatcaagctggctca

SEQ ID NO: 207644 - DNA, 796 bp, Unknown
  Bacterial polypeptide expressing nucleotide sequence isolated from the Sargasso Sea
tattatgatcttgggttggaaaatagagataaaactaacgaccaaataacaattgaatgcgccaacgcaattaaaaaatttggagttggaattaaatgtgcaacaataactcctgatgaagaaagagtaaaagaatttaatttaaaaaaaatgtggagatctccaaacggtacaattagaaatatattaggtggtactgttttcagggaaccaattatttgtaaaaacgttcctaagttagtcccaagttggactaatccaatttgtataggaagacatgcgtttggtgatcaatatagagcaactgacttcaatgttcccggaaagggtaaattagaaataaaatggacatctgaagatggaaaagaaaagaaagaattcgaagtatttaattttcctggtccgggtgttgcattatcaatgtacaatttagatcaatcgataaaagattttgcaagatcctgtatgaattatggtcttaatagaaaatggccagtatatctttctactaaaaatacgatattaaaaaaatatgatggaaaatttaaagatttatttcaagaagtttatgaaaaagaatttatagataaatttaaacaaagaaaaattacatacgaacatagacttattgatgacatggttgcttgtgctatgaaatggaatggaaactatatttgggcatgtaaaaattatgatggtgatgtacaatctgacactatagcacagggatttggttctttaggtcttatgactagtgtgctgatgtctcccagatggcaaaataatagaatctgaa

SEQ ID NO: 207645 - DNA, 906 bp, Unknown
  Bacterial polypeptide expressing nucleotide sequence isolated from the Sargasso Sea
ctattgaagctgcagaatcagtaaaaaaatatggtgttggaataaagtgtgcaacaattacacctgacgaagacagagtaaaggaatttcaattaaaaaaaatgtggaggtctccaaatggaacaataagaaacatacttggaggtacgatatttagacaaccgataatttgtaaaaatattccaagaatcattaccaattggaataaacctattatagttgctagacatgcatttggagatcaatacaaggcaacagatacaataatagacaagccaggtacacttaaaatggtttttcaacctaaggatggatctaatggctttacaaaagatgtatatgattttgaaaaagcgggtgtagcattatcaatgtacaatcttgatgattcaataaaagattttgcaagagcatgctttaattacggtcttgatttaggttggcctgtatatctatctactaaaaacactattttaaaagtttatgatggaagatttaaagatatatttcaagaaatttttgataaagaatttaaagataaatttatcgaaaaaaatattatttatgagcacagattaattgatgatatggttgcatctgcacttaaatgggaaggtaattttatttgggcgtgtaaaaactacgatggagatgttcagtctgactccgtagctcagggttttggctcattaggtttaatgacaagtgttttaatgactcctgatggtaaaactgttgaagcagaggctgctcatggaacagttacaagacattttagaaatcatcaaaagggtttagagacttcaactaatcctatagcttcgatatttgcttggacacgagggcttaaatttagaggaaaatttgattcaaataatgaattaattaaattgcaaaaaatttaga

SEQ ID NO: 207646 - DNA, 844 bp, Unknown
  Bacterial polypeptide expressing nucleotide sequence isolated from the Sargasso Sea
gataattggctccccccagaaacgttaagagcccttgaaatctatttagtaggaattaaaggacctctaacaacacctgtaggaggaggaataaggtctctaaatgtggctttaaggcaagagctagatttatatgtttgtcagagacctgtcagatactttgatggtgttcctagtcctgtgacatctcctgaaaagacagatatggtcatttttagagaaaactcagaagatatttatgctggtattgaatgggaagccggatctgagggagctgaaaaagttataaagttcttaacagaagaaatgggtgttacaaaaattaggttccttgaagagtgcggtattggagtcaagcctgtatcaaaacagggaacagaaagacttgtcgataaggcaattcaatatgcgattgccaacgatagagattcagttactcttgttcacaagggcaatattatgaaatttactgaaggctccttcaaagattggggttatcagtttgcagcttcaaaatatggcgcaattgaattagatggaggcccttggcattctcttacaaatccagttacaggaagagaaattgttataaaagatgtgattgcagatgccttcttacagcaaatactcacaagacctgacgaatatagcgttattgcaacacttaatcttaatggtgattacatttctgatgctctggcagctgaagtgggtggaataggaatagcaccaggagctaaccttggtgataagattgcgttatttgaagctacacatggtacagctccaaagtatgcaggtttagataaagttaatccaggctccctgatactctcagcagaaa

SEQ ID NO: 207647 - DNA, 829 bp, Unknown
  Bacterial polypeptide expressing nucleotide sequence isolated from the Sargasso Sea
acgccctgatctagtagatatggtgatttttagggaaaactcagaggatatatatgcaggtgttgagtttgaatccaatacagatgcagcaaacaagttaattaaagtgcttcaagatgactttggggtagaaaaaataaggtttacagagaattgtggaataggaatcaagcctgtttcagaagaggggacaaagagattagtcagaaaagcttatgaatatgctattcagaatgaaaaagattctgtaactctgattcacaaaggaaatattcagaagtttacagaaggcgccttcatggattggggttatgaactagcacgagaagaattcggcggagagcctcttgatggcgggccttggcatacatttaaaaacccaaataccggtaaagatatcattgttaaagatgtaatctgtgatgctttcttgcaacagtgtcttttaagacctgcagattacgatgttttagcaacaccgaatcttaatggcgattatctttcagatgctcttgctgcacaagttggtggaattggaatagctcctggtgcaaacttaggtgatgaagttgccgtatttgaagcgacacatggaactgcaccaaaatatgcagggcaagacaaagtaaaccctggctcattaatactttcagctgaaatgatgttaagacatatgggttgggtagaagctgcagaccttataataagcgccatggaaaaaaccatcggtaaaaagaaggttacttatgattttgctagattaatcgacgatgctgaagaagtaagttgctctaaattcggtgaattattaattaaaaagtttaaataa

SEQ ID NO: 207648 - DNA, 505 bp, Unknown
  Bacterial polypeptide expressing nucleotide sequence isolated from the Sargasso Sea
tttgagaaaaatatatttaacctacgagcatagactgattgacgatatggttgcgtgtgcaatgaaatggagtggaaaatatatttgggcttgtaaaaattatgatggtgatgtccaatctgataccatggcccaaggttatggatccttaggattaatgacaagcacattattgacaccagacgggaaaatcatggaagctgaggctgcacacgggactgtaactagacactatcgtttacaccaacaagggaaggaaacttcaacaaatccgattgcttcaatatttgcttggactagaggtttggctcataggggaaaattagatggaaataatgagttaataaaatttacaaatactcttgaacgagtttgtattaattgcgttgaaagtggatcaatgactaaagaccttgcaatattagttggtccatcaagtaaatatcttacaactaatcaatttttagatgcgattgataataatcttaagaagaaattaaattag

SEQ ID NO: 207649 - DNA, 814 bp, Unknown
  Bacterial polypeptide expressing nucleotide sequence isolated from the Sargasso Sea
gtttggtgatcaatatagagcaactgacttcaatgttcctggaaaaggtacattagaaataaaatggacatctgaagatggaaaagaaaagaaagaatttgaagtatttaattttcctggtccaggtgttgcattatcaatgtacaatttggatcaatcaataaaagattttgcaagatcttgtatgaattatggtcttaatagaaaatggccagtatatctttctactaaaaatacgatattaaaaaaatatgatggaagatttaaagatttatttcaagaagtttatgaaaaagaatttatagataaatttaaacagagaaaaattacatacgaacatagacttattgatgacatggttgcttgtgctatgaaatggaatggaaactatatttgggcatgtaaaaattatgatggcgatgtacaatctgatactatagcacagggatttggttctttaggtcttatgactagtgtgttgatgtctccagatggcaaaacaatagaatctgaggctgcacacggcacagtgacaagacactttagaatgcatcaaaaaggaaaggaaacttcaacaaatccaattgcttctatttttgcatgggcaagaggtctctaccatagaggcaagatagacggcaacgaagatttaaaaaaatttgttaaaaatttggaaaaagtttgtatcgaaactgttgaaaatggatcaatgacaaaagatttggcagttcttattgggccatcaacaaaatatctaaacacaaatgaatttttaaatgaattagatattaatttaaaaaaaaaattaaactaa

SEQ ID NO: 207650 - DNA, 439 bp, Unknown
  Bacterial polypeptide expressing nucleotide sequence isolated from the Sargasso Sea
aatggcaaaaattaaagtaaaaaaccctatagttgagctagatggcgatgaaatgacccgcataatatgggatttcattaaaaaaaaactaattcttccctatttagaattgaaaattgagtattttgatttaggtgtcgaaaatagagataaaacttcagataaagtaactatagaaagtgccaatgctataagaaaaattggagttggaattaaatgcgcaacgattactcctgacgaaaaccgtgtaaaagaatttaatttaaaaaaaatgtggagatcgcctaatggtacaataagaaatatattaggtggaactgttttccgagagccaataatttgtaaaaatattccaaaattggttcctagctggacaaatcctatcgttataggaaggcatgcttttggagatcaatacagagctactgattttaaagtt

SEQ ID NO: 207651 - DNA, 541 bp, Unknown
  Bacterial polypeptide expressing nucleotide sequence isolated from the Sargasso Sea
atgagcaaaattaaggtaaaaaatgcaatagtcgagttagatggtgatgaaatgacaagagtcatctgggactttataaaaaaaaagctaattcttccatatttagatctagggattgaatattacgatctaggtatgaaaaatagagatgcaaccaatgaccaaattacagttgattgtgctaatgcaataaaaaaaaatggagttggaattaaatgtgcaactataactccagatgaatcgagagtgaaagaatttaatttaaaaaaaatgtggagatctcctaacggaactataagaaatattttaggagggactgtttttagagagccaataatatgtaaaaatattccaaaattagtcccgagttggactaatcctatttgtattggaaggcatgcttttggtgatcaatatagagctactgattttaaagttccaggtaagggaaaattagaaataaaatggacatctgaggatggaaatgaaaaaaaagaatttgaagtatttaactttcccagggcctggaaaattgcaatta

SEQ ID NO: 207652 - DNA, 433 bp, Unknown
  Bacterial polypeptide expressing nucleotide sequence isolated from the Sargasso Sea
aatgtcgaaaattatagtaaaaagaccggtagtagaactggatggtgatgaaatgacccgaataatatgggattttatcaaaaaaaaactaattttgccttatcttgatctagaaataaaatattatgatctagggataaaaagtagagattcatcttctgatcaaattacaatcgatagtgctaatgccattaaaaaatttggtgttggtataaagtgcgcaacaataactcctgatgaaaatcgtgttaaagaatttaaactaaaaaaaatgtggagatctccaaatggcactattagaaatattcttggcggtacagtgtttagagaaccaataatttgtaaaaatattcctaagttggttcctagttggacaaatcctattgtgattggaagacatgcttttggtgatcaatataaagctacagatttt

SEQ ID NO: 207653 - DNA, 724 bp, Unknown
  Bacterial polypeptide expressing nucleotide sequence isolated from the Sargasso Sea
aatagaacatgaagtttttaattttgatggacctggcgtagcactttcgatgtataatttagataattcaattaaagatttcgcaagagcatgtatgaattacggtttagtcagaaagtggccagtttatttttctactaaaaatacaattttaaaagcttacgacggaagatttaaagatatttttgaagaggtttttcagaaagaatttaaaaagaagtttgaagaagttgggattaattatgaacatagattaatagatgacatggtagcatgtgctatgaaatggagtggaaaatatatttgggcatgcaaaaattatgatggggatgttcagtctgatactgttgctcaagggtatggttctttggggttaatgacaagtgtgcttagaaccccggatggaaaagtggcagaagctgaagctgctcatggaacagtaacaagacattacaggcagcaccaagctggtaaagaaacttcaacaaatccaatagcttctatatttgcttggacaagaggtttatcccatagagggaaccttgatggaaacaaagaattaataaaatttgcagagacacttgaaaaagtttgtatagaaactgttgaaagtggatccatgactaaagatctagcaatattagtaaacaaagaccaaaagtttttaactacaaatcaatttttagaagcaataaactctaatcttaaaaaaaaacttaactaa

SEQ ID NO: 207654 - DNA, 385 bp, Unknown
  Bacterial polypeptide expressing nucleotide sequence isolated from the Sargasso Sea
atgagcaaaatcaacgtaaaaaaccctattgtcgaattagacggggatgaaatgacccgaattatatgggagttcataaagaataaactaatcctcccctatttagatcttggtattgaatattacgatttgggaatgaaaagtagagacaacacagatgataaaatcacaatagactcagcaaatgcaattaaaaaaattggtgtgggtattaaatgtgcaactatcacacctgatgaagcaagagtagaagaattcgatctaaaaaaaatgtggagatctcccaatgggacaataagaaatattattggaggcactgtttttagagagccaattatctgcaaaaacattccaaagcttgttccatctggacagatcctgtaat

SEQ ID NO: 207655 - DNA, 711 bp, Unknown
  Bacterial polypeptide expressing nucleotide sequence isolated from the Sargasso Sea
tatttaatttcactggtccaggggtagcgctttcaatgtataatttagataaatctattcaagactttgcaagatcttgttttagttatggactaattaaaaagtggccagtttacatgtcaaccaagaatacaattttaaaacagtacgatggtagatttaaagatatttttcaagaaatatttgaaaatgaatataaagaggaatttgaaaaaaataatttaacttatgagcacagattaatcgacgacatggttgcatgtgcaatgaaatggagtggtaaatatatttgggcttgtaaaaattatgatggtgatgtgcaatcagatactatggcacaaggttatggttcgttgggattaatgactagtacacttcttaccccagatggaaaaattatggaagcagaagccgctcatgggactgtaacgagacactacagaatgcatcaacaaggtaaagagacttcaacaaatcctatcgcatctatttttgcttggactagaggactagcgcacagagggaaactagatagtaataatgaattaattaaatttgcacaaacaattgaaaaagtttgtattgagtgtgttgaaaacggagctatgacaaaagatttagcaatactaattggtccctcaagtaaatacttaacgactaatcaatttttagatgaaattgatggtaatctaaaagcgaaattaaattaga

SEQ ID NO: 207656 - DNA, 775 bp, Unknown
  Bacterial polypeptide expressing nucleotide sequence isolated from the Sargasso Sea
ttagatcttggtatcaaatattacgatttagggatgaaaagcagagataatactgatgatcagattacaatcgactccgcgaatgcaataaaaaaaattggagtaggaattaagtgtgcaacaattacccctgacgaagcaagagtagaagaatttgatttaaaaaaaatgtggagatctcctaacggaaccataagaaatataattggaggaacagtatttagagaaccaataatttgtaaaaatattccaaaacttgttccctcttggacagatccagtaattataggaagacatgcttttggagaccaatatagagcaacagattttaaagttcctggcaaaggaaaaatggaagtcaaatggacatcagaagatggaaaagatgaaattaaatacgaagtatttaattttactggacctggtgttgcgctttcaatgtacaatttagataagtcaatagaggactttgcaagatcttgttttagttatggattaattaaaaaatggcctgtttatatgtcgactaaaaatacaattttaaaacaatacgatggaagatttaaagatattttccaagaaatttttgacaaagaatacaaacaagagtttgaaaaaaataatttgacttatgaacacagattaattgatgacatggttgcctgtgctatgaaatggagcggaaaatatatttgggcttgtaaaaattacgatggagatgttcaatcggatactatggctcaaggttatggatctttaggattgatgacaagta

SEQ ID NO: 207657 - DNA, 751 bp, Unknown
  Bacterial polypeptide expressing nucleotide sequence isolated from the Sargasso Sea
cagacatgcatttggtgaccagtatagagctacagattttgaagtacctggtcgaggaaaattagaaataaaatggtctgcagaagatggaagtgacgaaataaaatatgaagttttcaattttcctagctctggaattgctctttcaatgtataatttagataaatcaatcgaagattttgcaaaatcatgttttaattatgggttgataaaaaaatggcctgtctatctatctactaaaaatacaattttaaaaaaatatgatgggaggtttaaagacatttttcaaaagatatatgaaaatgaatttaaatctgattttgaaaaaaataatattttatatgagcatagattaatcgatgatatggttgcctgtgcaatgaaatggagtggcaaatacatatgggcttgtaaaaattatgacggagatgttcaatcagatactgttgctcaaggttacggatctttaggtttgatgacaagtgtattgctagcgcctgatggaaaaacaatggaagcagaagcagcacatggaacagttacacgtcattttagaatgcatcaacaaggaaaagaaacatcaactaatcctatagcgtcaatttttgcatggactagggggttggcgcatagaggaaaattagactttaatgatcaattaatagaattttcagaaagtttagagaaagtttgtattgatactgttgaagatggacatatgacaaaagatttagctatattaattggacca

SEQ ID NO: 207658 - DNA, 356 bp, Unknown
  Bacterial polypeptide expressing nucleotide sequence isolated from the Sargasso Sea
aggtttaatgacgagtacattattaactcctgatgaaaaaataatggaagctgaggcggctcatggaactgtaacaagacattttagattacaccagcaaggaaaagaaacatcaacaaatccaatcgcctctatatttgcatggacaaggggcttagcgcatagaggaaaattagataataatgattcactaattaaattttcaaataaaatagaagaagtctgtattgagtgtgtagaaagtggtgcaatgacaaaagatcttgctattttaattggaccttcaagtagatacctaacaactaatcaatttttagatgaaattgatgggagattaaaaaaaaagttaaactaaa

SEQ ID NO: 207659 - DNA, 814 bp, Unknown
  Bacterial polypeptide expressing nucleotide sequence isolated from the Sargasso Sea
tttggtgatcaatatagagcaacagattttcaagttcctggaaaaggtaaattagaaattaaatggacttctgaagacggtaaagaaaaaaaagagtttgaagttttcaattttcctggaccaggcgtcgctctatcaatgtataatcttgatcaatctataaaagattttgctagagcctgtatgaattatggtcttaatagaaaatggcctgtttatctttctacaaaaaatactattttaaaagaatacgatggtagatttaaagatttatttcaagaaatttatgaaaacgaatttaaaaaacaatttattgaaaaaggaataacttacgaacacaggctaatagatgacatggttgcttgtgcaatgaaatggaatggaaattatatttgggcatgcaaaaattatgatggagacgttcaatctgacactgtagcgcaaggatttggttctttaggtctaatgactagtattttaatgtctccagatggcaaaactatagagtcagaagcggcgcacggaactgtaaccagacactacagattgcatcaaaaaggaaaggaaacctcaacaaaccctatagcttctatttttgcatgggcaagaggcctttaccatagagctaagttagataataacgaagatttaaaaaagtttgtaaaaacactagaaaaagcatgtgtagattgtgtagaaaatggatcaatgacaaaagatcttgcaattcttgtgggtccttcaactaaatacttaacgacaaatcaatttctagatgaaattgaaggaaaactaaaacaacaactaaattaaa

SEQ ID NO: 207660 - DNA, 403 bp, Unknown
  Bacterial polypeptide expressing nucleotide sequence isolated from the Sargasso Sea
tgatggtgatgttcagtctgatactatggcacaaggttatggttcattaggattgatgactagtaccctattaacaccagacggaaaaattatggaagcagaagctgcacatggaacagtaacaagacattataggatgcaccaacaaggcaaagaaacttcaacaaatcctattgcatctatttttgcctggacaagaggacttgctcatagaggaaaactagatagcaatgatgaattaattaaatttgcacaaacaattgaaaaagtatgtattgagtgtgtagaaaacggagctatgacaaaagatttagcaatactaattggcccatcaagtaaatacttaacgactaatcaatttttagatgaaattgatggcaatcttaaagcaaaattaaattaa

SEQ ID NO: 207661 - DNA, 430 bp, Unknown
  Bacterial polypeptide expressing nucleotide sequence isolated from the Sargasso Sea
aaatatatttgggcctgcaaaaactatgatggagatgttcaatcagatactgtagcacaaggatatggttctttaggtttaatgacaagcgttttaagaactccagatggcaaagtggctgaagctgaagctgctcatgggactgtaactagacattatagacaacaccaagcaggtaaagaaacatctacaaatcctatcgcatctatatttgcatggacaagagggctatctcacagaggaaacactgatggaaatcaagaattaattaaatttgcagaaactcttgagaatgtttgtgtggagactgttgaaaaaggttttatgacgaaagatttagcaatattaattagtaaaaatcaaaaatttttgacaactaatcaatttttagaagctatagactcaaatcttaaaaagaaacttaattaat

SEQ ID NO: 207662 - DNA, 879 bp, Unknown
  Bacterial polypeptide expressing nucleotide sequence isolated from the Sargasso Sea
tatgaagcctactcaggttcgcgaaaaataaactgggtgaaagtctatgcgggcgagaaagcatttgactcgactggagagtggttaccccagaaaaccttagatactatcttagaacaccttatagcaatcaaggggccactaacaacaccagttgggggaggaattcgctcacttaatgttgctttaagacagaaacttgatctttatgcttgtgtaaggccagtacgatggtttaatggcgtaccgtcaccagtgaaagaacctggcctagtagacatggttatttttcgagaaaacacagaggatatatatgctggcattgagtggatgaatggctccaatgaggttgaaaaagtaaaatcttttctaatgaatgaaatgggtgtaacaaatattagatttccaaatacctcaagtctaggtgtaaaacctgtatcaaaagaagggacaagtagactggttagggctgcaattgattatgccttaaaacaaaaaagagattctgttactctggtacacaaggggaacattatgaaatttactgaaggggcttttagagattggggttatgagctttcgaaggatgaatatggagcaaaagatcttgatggtggtccttggcagataatcaaaaaagatgggcatgaactaatcatcaaggatgtgatagctgatgccttcctacaacaaatccttctccgaccctcagaatatgatgtgatagctacacttaatcttaatggagactatgtctctgatgctcttgctgccatagtgggaggaataggtatagcacctggggcaaacattaattatgttagcggacatgctatttttgaggcaacacacggaacagcacctaaatacgcaggtaag

SEQ ID NO: 207663 - DNA, 886 bp, Unknown
  Bacterial polypeptide expressing nucleotide sequence isolated from the Sargasso Sea
cggcggaaaaaagaaaattgaatggatggaaatctactgcggagagaaatcaactgttgtatacggtgaagataactggcttcctccagaaactttaagggcacttgaaatctatcttgtaggcattaaaggacccctgactacacctgtaggtggaggtatcagatctttgaatgtagctttaagacaagaattagacctctatgtctgccaaagaccggttagatattttaatggagtgcctagcccagttatttctcctgaaaaaaccgatatggtaatttttagagaaaactcagaagatatttatgccggtgttgaatgggaggccggatcagagggtgccgagaaacttataaagtttcttactgaagaaatgggcgtaaacaagatccgttttacagaagaatgtggtatcggaattaaaccaatatctaaacaaggaactgaaagattagtagataaagcaatccaatatgcaatagcaaatgatagagactctataacctttgttcacaaaggtaatattatgaaatttacggagggatcatttaaagactggggatatcagtttgccgcatccgaatacggtgcagttgaactagatggaggtccatggcataccttaactaatccagttaccggcagagagatagttattaaagatgttatagctgatgcatttttacaacaaatattaactagacctgatgaatacagtgtcatagctactatgaatcttaatggagattatatatccgatgctcttgctgcagaggtgggtggtattggtattgctccaggagccaacctaggagataaaatagctttatttgaagccactcatggaactgctcctaaatatgctggtttagataaagttaac

SEQ ID NO: 207664 - DNA, 621 bp, Unknown
  Bacterial polypeptide expressing nucleotide sequence isolated from the Sargasso Sea
tagaccttggctggccagtttacttatcaacaaagaatacaattttaaaaatctacgatggtagatttaaagatttatttgaaaatgtttttaatactgagttagcagaaaaatttaaagaacaaaatatagtttatgaacatagattaatagatgatatggttgcaacagcactcaaatgggaaggtaattttatttgggcttgtaaaaattatgatggtgatgttcaatccgactcagttgcacaaggttatggttcactaggattaatgacaagcgtactgatgacacctgatggcaaaactgtagaagccgaagcagctcacggaacagtaacaagacattttagaaatcaccaaaaaggattagagacttcaactaatccaatagcatcaatatttgcatggactagaggattgcaatttagaggtaaatttgatgaaaatcaagatttgatcaattttgctaataatcttgaagacacatgtatagacacagttcaatctggaaaaatgacgaaggatttagcaattctaattcactctgatcaaaaatggttaaatactcaaaattttttagaaacattaaaaggaaatttagaagaaaaactaaaagtttaaa

SEQ ID NO: 207665 - DNA, 828 bp, Unknown
  Bacterial polypeptide expressing nucleotide sequence isolated from the Sargasso Sea
aaaccaataatagtagcaagacatgcttatggagatcaatataaagctactgatacattaattacaaaacctgggatattaaaaatgaaatttgaaccaacggatggcacagaaggttttgagaaagaagttttcacctttaatgaagaagggatcgcattatctatgtataacttagatcaatctattattgattttgcaagatcatgttttaattatggattgaatttaagatggccagtatatctttcaactaaaaataccattcttaaagtttatgatggaagatttaaagatttgtttcaaaaagtatttgatcaagaattttcagaaaaatttaaagaaaaaagtatagtttatgaacaccgtttaatagatgatatggttgcagcagcattgaaatgggaaggtaattttatttgggcttgtaaaaattatgatggtgatgttcaatctgactcagttgcacaaggatttggatctttaggactaatgactagtgtgctaatgacacctgacggaaaaactgttgaagctgaggcagctcatggaacagtaacaagacattatagacaacatcaacaaaaaaaaatgacttctactaatccaatagcttccattttcgcttggaccagaggattaaaatttagaggaaaatttgatgaaaatttagaattatctaattttgcaaaacttttagaagagacttgcattgaaactgtagaatctggaaaaatgactaaggatttagcaattttaataagcaataatcaaaaatggttaaacacagaagaatttctttctgttataaatgaaaatcttcgaaag

SEQ ID NO: 207666 - DNA, 586 bp, Unknown
  Bacterial polypeptide expressing nucleotide sequence isolated from the Sargasso Sea
tatgagcaaaattaaggtaaaaaacccagtagttgagctagatggagatgaaatgacaaggattatttggtcatttatcaaagacaaactcattaagccatacttagatattgatctaaaatactacgatctgggtatggagaatagagataagactaatgatcaagtaactatagactgtgctaaagcaattcaaaaatatggagctggagttaagtgtgcaactatcactcctgatgaagcccgtgttaaagaattcaaattaaagaaaatgtggagatctcctaatggaacaattagaaatattgttggtgggacaatttttagagaaccaataatttgtaaaaatgttccaaggttagtccctcattggactgatagcgtaatagttggaagacacgcttttggagatcaatataaagctacagattttaaagttcctggaaaaggaaaaatgactgttaaatgggaatcggaaaatggaaaagacaaaattgaacatgaagtttttaattttgatggcccaggtattgctctttctatgtataatttagataattctattaaagatttttgcaagagcgtg

SEQ ID NO: 207667 - DNA, 766 bp, Unknown
  Bacterial polypeptide expressing nucleotide sequence isolated from the Sargasso Sea
agttttttgtggtgaaaaatcagtaaaagtttatggttctgatgaatggcttccaaaagaaactttagagttgtgtaaagaatacatcgtgtctataaaagggccacttacaacaccaattggtgggggcataagatcattgaatgtagctttgagacaagaactagatctatatgtttgcttaagaccagttaagtattttaaaggaactccaagccccgtgaaacgtcctgagcttgtagatatggtgatttttagagaaaactctgaagatatttacgctggtgttgaatttgaatctaatactgaggaagcaaataaacttattaaagttctaaaggagcaatttgatgtgcaaaaaatacgatttcctgaaaattgtggaataggaattaaacctgtttcagaagagggtagcaaaagactcataaggaaatcatttgaatatgcaataaaaaatgacaggaagtcagtttctttaattcataaagggaatattcaaaaatttactgagggtgcatttagagattggggttacgaacttgcagaagaagagtttgatgcaaagccaattgatggtggtccatggcattcaatgataaatccaatcaacggaaatgaaattattattaaggatgtaatctgtgatgcattcttacaacaaattcttcaccggcctgcagagtatgatgtgctagcttcaccaaatttgaatggtgactacatatctgatgctttggctgcacaagttggaggtattggaata

SEQ ID NO: 207668 - DNA, 808 bp, Unknown
  Bacterial polypeptide expressing nucleotide sequence isolated from the Sargasso Sea
tatggcaaaaataaaagttaaaaatccagtagttgagctagatggtgacgaaatgactagaattatatggtcatttataaaagataagctaattaagccctatcttgaagtaaatctgaaatactacgatttaggaatggaaagccgtgataagtctgacgatcaaatcacaattgatgcggcaaaagcaatcaaacagtacggcgtaggtgttaaatgtgcaactattacgcctgacgaagctcgtgtagaggaatttaagctgaaaaaaatgtggaggtccccaaatggtaccattagaaatattttaggcggtacggtttttagggaaccaattatctgtaaaaatgttcctaaactagttcctggttggaccaaaccaattgtaataggaagacatgcttacggtgatcaatatcgagccactgattttctggtacctggtgagggaaatttggaagttaaatggacttcaaaggatggtaaagataagaaagaatttaaagtttttaattttcctggatctggaactgctcttacaatgtataatctggatgagtctattaaaaactttgcaagggcatgtatgaattatggcttaggaagaaagtggccagtttatttatcaactaaaaatacaatccttaaagcttatgatggtagatttaaagatcttttccaagaagtttttgaaaaagaattttctgataagtttaaaaaagtaaatattacatacgaacatagattaattgatgacatggttgcatgtgctatgaaatggaatggtggatatgtttgggcatgtaag

SEQ ID NO: 207669 - DNA, 775 bp, Unknown
  Bacterial polypeptide expressing nucleotide sequence isolated from the Sargasso Sea
tagcatgaagagcagagacaacactaacgatcaaataactgtagattgtgcaaaggcaataaaaaaaaatggagttggtattaagtgcgcaacaataactgcagacgaattaagggtaaaagaatttaatttaaaaaaaatgtggagatcaccaaatggaacaataagaaatattattggaggaacagtgttcagagaaccaattatttgtaaaaatattccaaaacttgttccatcttggacagacccattaattataggtagacatgcctttggagatcaatatagggcaactgattttttagttcctggaaaaggcaaacttgaaattaaatggacctcagaagatggtaaagaccaaaaaaattatgaagtatttaattttccagggcctggaattgcattatcaatgtacaacttagataagtctattgaagactttgcgagatcttgtttcaattatggtttaataaaaaaatggcccgtttatctttcgacaaaaaatacaattttaaaaaaatatgatggaagatttaaagatatttttcaaaagatatttgatgaagattttaaagctgaatttaataaaaataatataacttatgaacacaggttgattgatgatatggttgcttgtgcaatgaaatggagtggaaaatatatttgggcatgtaaaaactatgatggagatgtccaatctgatactgtggctcaaggatatggttcattgggtttaatgacaagtgttttattagctccagatggtagaacaatg

SEQ ID NO: 207670 - DNA, 487 bp, Unknown
  Bacterial polypeptide expressing nucleotide sequence isolated from the Sargasso Sea
atgagcaaaattaaggtaaaaaatccaattgtagagttggatggcgatgaaatgaccagggtaatatgggaatttattaaaaataagcttattctaccttatttggatctagatataaaatattatgacctaggtattaaaagtagagataatacatctgataatataactatcgaatgtgctaaagctataaaaaaatatggagttggtattaagtgtgcaacaattactcctgatgaatcaagagtaaaagaatttaatttaaaaaaaatgtggagatctcctaatggaactattagaaatattttaggtggaactgtctttcgagaacctatactttgtaaaaatattccaaaactagtacctagttggactaatccaatttgcattggaaggcacgcttttggagatcagtatagggctacagattttaaagttccaggtaagggcaagttagaaatgaagtggacatctgaagacggaaaag

SEQ ID NO: 207671 - DNA, 515 bp, Unknown
  Bacterial polypeptide expressing nucleotide sequence isolated from the Sargasso Sea
tatgagcaaaattaaggtaaaaaatccaatagtagagctagatggtgacgaaatgaccagaataatttggaaatttataaaagataaattaatttttccatatttagatcttaaagttgaatattacgacttgggcatgaagagtcgtgatgaaactgaagatcaaataactatcgattgtgctaatgcaattaaaaaaaatggtgttggaattaaatgcgcaacaataactcctgacgaaggaagagtaaaagaatttagtttaaaaaaaatgtggagatctccaaatggcacaatacgaaatatattgggaggaactgtttttagagaacctataatgtgtaaaaatattccaaaattagttcctagctggactaatccaatttgtataggaaggcatgcttttggtgatcagtatagggcaacagattttaaagttccaggtaaaggaaaattagaaatgaaatggacatcagaagacggaaaagaaaaaaagaatttgaagtttttaactt

SEQ ID NO: 207672 - DNA, 928 bp, Unknown
  Bacterial polypeptide expressing nucleotide sequence isolated from the Sargasso Sea
attgatcaagacatacttagatatagacataaaatactatgatcttgggatggaaaatagagatgaaacgaacgatcaggttacggtggatagtgctagagcaattcaaaaatttggtgcaggggttaagtgtgcaacaattactccagatgaagcacgtgtaaaagaatttaatttaaaaaaaatgtggagatcaccaaatggtacgattagaaatattgttggaggaacgattttccgtgaaccaataatttgtaaaaatgtgcctagacttgttccgcattggactgaaagtgtaatagttggaagacatgcttttggggatcaatataaagctacagattttaaagttcctggcaaaggtaaaatgacaattaaatgggagtctgaagatggaaaaaataaaatcgaacatgaagtatttaaatttaatgattcaggaattgctttatcaatgtataatttagatagttcaataaaggattttgctagagcatgtttaaattatggtttagtaagaaaatggccagtttatttttcatctaaaaatacaattttaaaagtttacgatggaaggtttaaagatatttttgaggatatctatcaaaaagaatttagaaaaaagtttgaagaagctggaatttcctatgaacatagattgattgatgacatggttgcgtgtgcaatgaagtggagtggcaaatatatttgggcctgcaaaaattatgatggagatgttcaatctgatacggtagctcagggttatggttcattaggtttaatgactagtgtacttagaacaccagatggtaaaatagcagaagctgaggcagcccatggaactgttactaggcattataggcaacatcaacaaggtaaagaaacatcaacaaatccaattgcatctatttttgcatggactagaggt

SEQ ID NO: 207673 - DNA, 791 bp, Unknown
  Bacterial polypeptide expressing nucleotide sequence isolated from the Sargasso Sea
agattttaaagttcccggtaagggtaaaatggaagtaaagtggacatcagaggatggaaaagatgaaatcaaatatgaggtttttaatttcactggtcctggtgttgctttatcaatgtacaatttagataagtcaatagaagactttgcaagatcttgttttagttatgggttaattaaaaaatggcctgtttacatgtcaacgaaaaatacaattctaaaacaatatgatggaagatttaaagatatcttccaagaaatttttgacaaagaatacaaaagtgaatttgaaaaaaataatttaacttatgaacacagattaattgacgatatggtcgcgtgtgcaatgaagtggagtggtaaatatatttgggcatgcaaaaattatgatggagatgttcagtctgatactatggctcaaggttatggatctttaggattaatgacaagtacattgttaaccccagatggaaaaataatggaagcagaagcagcacacggtacagtaacaagacactataggatgcatcaacaaggaaaagaaacctcaacaaacccaatagcatctatttttgcttggactagaggattagctcatagaggtaagttagatgacaatggtgctctaattaaatttgcacaaactttagaaaaggtttgtattgaatgtgtagaaagtggatcaatgacaaaagatttggcaattcttattggtcctgatagaaagtatttaactaccaatcagtttttagacgaaatagacggtaatttaaaaaagaaattaaattaaa

SEQ ID NO: 207674 - DNA, 773 bp, Unknown
  Bacterial polypeptide expressing nucleotide sequence isolated from the Sargasso Sea
aaaaggaaaaatgaccgttaaatgggagtcagaaaatggaaaagataaaatcgaacatgaggtttttaattttgatggcccaggtatagctctttctatgtataatttagacaattctattaaagattttgctagagcgtgcttgaattatggtctagcaagaaagtggccggtttacttttcttcaaaaaatacaattttaaaagtatacgatggtagatttaaagatatttttgaagaagttttccaaaaagagtttaaaaataaatttaatgaatcgggtataacttatgaacatagattaattgatgacatggtcgcctgtgcaatgaaatggagtggaaaatatatttgggcttgtaaaaattatgatggtgacgtgcagtctgatacagtcgcacaaggatatggttccctaggtttaatgacaagtgtgcttagaacacctgacggaaaagtagctgaagctgaagctgcacacggaacagttacaaggcattatagacaacaccaagcaggtaaagagacctctactaatcctatagcttctatttttgcatggacaagaggtttgtctcatagaggaaaccttgatggaaaccaagaattgattaaattcgctgtgtctcttgaaaaagtttgtatagaaactgttgaaagcggttctatgactaaagatttagcaatattaatcagtaaagatcaaaaatttttaacaactagtcaatttttagaagcaatagattctaatcttaaaaaaaagcttaattaat

SEQ ID NO: 207675 - DNA, 707 bp, Unknown
  Bacterial polypeptide expressing nucleotide sequence isolated from the Sargasso Sea
gatggaaaatagagataaaactaatgatcaagtaacaattgattgtgctaaagcaattcaaaaatatggagctggggtaaagtgtgcaactatcactcctgatgaggctcgtgttaaagagtttaaattaaaaaaaatgtggagatctcctaacggtacaataagaaatattgtaggtggaacaatttttagagagcctataatttgtaaaaatgttccaagattggtgcctcattggactgatagtgtaatagttgggagacatgcttttggggatcaatatagggcaacagattttaaagttcctggaaaaggtaaaatgatgattacttgggaatcggaagatggaaaaaataaaattgaacatgaagtatacagttttaaaggacctggcattgctctttcaatgtataacttagatgactctataagggattttgcaagagcgtgtatgaattacggtttggtaagaaaatggccagtttatttttcaacaaaaaatacaattttaaaagcttacgatggaaggtttaaagatatttttgaagaaatttttaaaaaagaattcgaaaaaaaattcaataaagcaggtattacttacgagcatagattaatagatgatatggtggcatgtgcaatgaagtggagtggaaaatatatttgggcctgcaaaaattatgatggtgatgttcaatctgacactgttg

SEQ ID NO: 207676 - DNA, 787 bp, Unknown
  Bacterial polypeptide expressing nucleotide sequence isolated from the Sargasso Sea
tctcggtatggaaaatagggataaaactaatgatcaagttactgttgattgtgccaaagcaattcaaaaatttggtgcaggagtaaagtgtgcaacaatcactccagatgaggcacgtgtaaaggaatttggtttaaagaaaatgtggaggtctccaaatggtacaataagaaatattgttggtggaactatttttcgtgaaccaataatttgtaaaaatgtacctagacttgttccacattggactgaaagtgtaatagttggaagacatgcttttggtgatcaatatagagctacagacttcaaagttcctggaaaaggcaaaatgacaattaagtgggaatctgaggatggaaaaaataaaattgaacacgaagtatttaaatttaaagacgctggcatcgctctatcaatgtataatttagatagttcaataaaggattttgcaagagcatgtttaaattatggtttagtaagaaaatggccagtttatttttcatcaaaaaatacaatcttaaaagtatatgatggaaggtttaaagatatatttgaagatatttatcaaaatgaatttaagaaaaagtttgatgatgctgggattacttatgaacatagattaattgatgacatggttgcatgtgcaatgaaatggagtggtaaatatatttgggcatgtaagaattatgatggagatgttcaatccgatacggtagctcagggttatggttcattaggtttaatgactagtgtgcttagaacaccagatggcaaagtagcagaagctgag

SEQ ID NO: 207677 - DNA, 782 bp, Unknown
  Bacterial polypeptide expressing nucleotide sequence isolated from the Sargasso Sea
agtgccaggtaagggtaaaatggaagtcaaatggacctcagaagatggaaaagatgaaatcaaatatgaagtgttcaattttacgggtccaggagttgcgctatccatgtataatttagacaaatcaattgaagattttgcaagatcttgtttcagctatgggctaataaagaattggcctgtttatttatctacaaaaaatacaattcttaaaaaatatgatggaagatttaaagatatatttgaggaaatttataacaaagaatttaaagataaatttgaaaaaataaatattacatatgaacatagattaattgacgacatggttgcttgtgcgatgaaatggagtggaaaatatatctgggcatgtaaaaattatgatggtgatgttcaatctgatactatggctcagggatatggttcattaggtttgatgactagtacattgcttacacctgatggaaaaataatggaagcagaagctgcacatggaacggtaaccagacactacagaatgcatcaacaaggaaaagaaacatctactaatccaattgcatcaatttttgcctggacgaggggattggcacacagaggtaaactcgatgctaataatgagcttatcaaattcgccaatactatagaaaaagtttgtattgaaagcgttgaaaatgggtcaatgacaaaagatcttgcgatattggttggaccctcaagcaaatatctgacaactaatcagtttttagatgtgattgataacaatctaaaaaagaaactaaattaaa

SEQ ID NO: 207678 - DNA, 823 bp, Unknown
  Bacterial polypeptide expressing nucleotide sequence isolated from the Sargasso Sea
gagacatgcttttggtgatcaatatagagcaacagatttccaagtaccggggaaaggtaagttagaaatgaagtgggtttctgaggacggaaaacaaaaaaaggaatttgaagtttttaattttcctggaccaggtgttgctttgtcaatgtacaacttagatcaatctataaaagattttgctagagcatgcatgaactatggacttaatagaaaatggcctgtttatttatctacaaaaaatacaattttaaaaaaatacgatggaaggtttaaagatttatttgaggaaatatatgaaaatgaattcaaagaaaaatttaaagaaagaggcttaacttacgaacatagacttatagatgatatggttgcttgtgcaatgaaatggaatggtaattatatatgggcatgtaaaaattacgatggagatgtacaatcagatacaattgcgcaaggctttggttctttgggattaatgactagtgtattaatgacaccagatggtaaaactattgaatctgaagctgcacatggaactgtaacaagacactacagattacaccaacagggaaaagaaacttcaacaaatcctattgcatctatttttgcttgggcaagaggtctttatcatagagcaaaaattgataacaatgatgatttaaaaagatttgtaaaaactcttgaaagagtttgtatagaaactgttgagagtggctctatgacaaaagatttagcaattttaattggacattctacaaagtatcttacaactaaccaatttttagatgtcataaataaaaatttaaaatcaaaattgaaataa

SEQ ID NO: 207679 - DNA, 572 bp, Unknown
  Bacterial polypeptide expressing nucleotide sequence isolated from the Sargasso Sea
gaaaaaatatgatggtagatttaaagatttatttcaagaagtttatgaaaaagaattcaaagaaaaatttaaagaaagaaaaataacttacgagcatagacttattgatgatatggtagcatgtgcaatgaaatggaatggaaattatatttgggcatgcaaaaactatgatggagatgtacaatcggatacagtagctcaaggatttggttctttgggtcttatgacaagtatgttgatgtcacctgacggtaaaacaatagaatctgaagctgctcatggtacagttacaagacactacagattacatcaacaaggtaaagaaacctcaacaaacccaatagcttctatttttgcatgggcgagaggtctgtatcatagaggaaaactagatggcaacgaagatttaaaaaagtttgtaaaaactctagaaaaagtttgtatcgaaacggttgaaaatggatcaatgactaaagatttagctgttcttataggtccctctacaaaatacctaaacactaatgaatttttagacttattgtcaaataatttaagtaaaaagctaaattaaa

SEQ ID NO: 207680 - DNA, 425 bp, Unknown
  Bacterial polypeptide expressing nucleotide sequence isolated from the Sargasso Sea
caaaaactacgacggagatgtacaatctgatactgttgctcagggatttgggtcgctaggtctcatgacaagtgtattaatgactccagatggaaaaacaatcgaggcagaggctgctcatggaacagtcacaaggcattacagattgcatcaagagggtaaacagacctcaactaacccaattgcctctatatttgcatggtcaaggggtcttaaatatcgtgggaaactggatgagaatgatgaactaattaaatttgcagataagttagaaaaagtatgtgttgagacagttgaaagtggatcaatgacaaaagatctagctttattaatgccccatgaacaagattggcatagtactgaggattttttagaaattattgaacgaaaccttaataaaaaacttactgtaacttatcaataat

SEQ ID NO: 207681 - DNA, 316 bp, Unknown
  Bacterial polypeptide expressing nucleotide sequence isolated from the Sargasso Sea
acaattgaagctgaggcagcacacggcacagttactcgacattatcgtcttcatcaagaaggaaaggctacttcaacaaatccaatagcatctatttttgcatggactaggggtttaagttataggggaaaaatggatgacaatagtagactcatagattttgctgaaactattgaaaaagtatgtgttgatactgttcagagtgggttcatgactaaagatttagcaatattagtatctaaagaacaagagtggcttaatactcaagactttcttgaaaaaataaactcaaaccttcaatctgcattatcctaat

SEQ ID NO: 207682 - DNA, 791 bp, Unknown
  Bacterial polypeptide expressing nucleotide sequence isolated from the Sargasso Sea
aacaatcgaaatgtttgatgaatttggaatcggcataaaaggaccgctcacaaccccagtcggaggaggaattaggtcaatcaatgttgcaattaggcaaaaattagacttatatgcatgtttgaggccacttagatggtttaagggggttgaaacgccaacaaaaaatccaggaaacgtagatattgcattatttcgtgaaaacactgaagatgtttattcaggaaaagagttagaagtgaactcagaagatgttggtaaattaaataaattcttaaaagaagaattcaattgggaaattagacatgatagtggaattggaattaaacctatttcaaaaactgcctccgagagacttattcgatctgcacttaattatgctgttgaaaataataaaaaaaatctagccattgtacataagggaaacattatgaaatttacagaaggagcttttagagcctggggttatgaactagtaaaaaatgaattttctgatgtagcaatttcttgggaagactgtagtggtgatgcaggagataaaattttggtacaggatgttattgcagatgcatttttacagcaagtattaatcaaacctcatgaatttgatgttatagcaacaacaaatttaaatggtgactacgcatctgatgcattagctgcacagataggtggaattggaattagtcctggaggaaatattaattatgaaaatggtaaatcagtttttgaagctactcatggaactgcaccaaaacatgctggacaagataaagccaatcccggttcgt

SEQ ID NO: 207683 - DNA, 773 bp, Unknown
  Bacterial polypeptide expressing nucleotide sequence isolated from the Sargasso Sea
tggaaaattaaaaatggttttcgaaccaacagatggtagtgaaggatttgttaaggaagtatttcactttgaaaaagaaggtatagcattatcaatgtacaatctagatcaatcaattattgaatttgcaagagcatgttttaattatggactaaatctaggttggcctgtttatttatctacaaaaaatactattttaaaagtttacgatggaagattcaaagatttgtttgagagtgtttttcaaaatgagtttgcaaacaagtttaagaaaaaaaatatagtttatgagcataggttaatagatgatatggttgctactgccttaaaatgggaaggtgacttcatttgggcatgtaaaaattatgatggtgatgttcaatctgactccgtcgcccagggttatggttctcttggattaatgacaagtgttttaatgactcctgatggaaaaactgtagaagctgaagcagcgcatggaactgttactagacattttagaaatcatcaacagggtctagaaacatccacaaatccaattgcttctatttttgcatggtcaagaggtttgtattttaggggaaaatttgatgataatcaaaatttaatgaatttttcaaaaaaacttgaagagacttgcatcgaaactgttgagtctggaaaaatgacaaaagatctggcgattttagttagtgaaaaccaaaagtggttaaacactcaagattttttaaatactctaaaggataacttggaaaaaaaattaggatcttaaa

SEQ ID NO: 207684 - DNA, 384 bp, Unknown
  Bacterial polypeptide expressing nucleotide sequence isolated from the Sargasso Sea
tatggcaaaaattaaagttaaaaatccagtagttgagttagatggcgacgaaatgactagaattatatggtcattcataaaagacaagcttattaagccatatcttgaaatagatcttagatactatgatcttggtatggagagtcgagataaaactgatgatcaaatcacagtagatgcggcaaatgcaatcaaacaatacggagtaggtgtcaaatgcgcaactatcacacccgacgaggctcgagtagaagagtttaaattaaaaaaaatgtggagatcgccaaacggtactattaggaatatccttggaggtacagtttttagagagccaattatttgtaaaaatgttcctaaactagttcccggttggacgaaccaata

SEQ ID NO: 207685 - DNA, 370 bp, Unknown
  Bacterial polypeptide expressing nucleotide sequence isolated from the Sargasso Sea
tcaaggatttgggtctttaggattgatgacaagtgtattaatgactcctgatggaaaaactattgaagcagaggctgcacatgggacagtaacaagacactttagaatgcatcaagaaggaaaagaaacgtctactaatcctattgcatctatttttgcttggacacgtggtctttttcacaggggcaagttagatgataataaagatttaatgaagttctctcaaacaattgaaagagtatgcattgatactgttgagtcaggggctatgacaaaagatctagctatcttaatttcaaataatcaaagatggcaaagtacgcagcaatttttatctaccattgataaaaatttgcaaaacaatatctaa

SEQ ID NO: 207686 - DNA, 870 bp, Unknown
  Bacterial polypeptide expressing nucleotide sequence isolated from the Sargasso Sea
accccagatgaagtaagagttaaagaatttagtctcaaaaaaatgtggagatctccaaatgggactataagaaatattattggaggaacagtttttagagaaccaattatttgtaaaaatattccaaagctagttccatcttggaccgatccattaataataggcagacatgcttttggggatcaatatagagcaacagattttgtagtgcctggcaaaggtaagcttgaagtcaaatggactgctgaagatggtagtgatgaaaaaaaatatgaagtattcaatttcccaggtccaggaattgcactttcaatgtataatttagataaatcgatagaagattttgcaaggtcttgtttcaattatggattaattaaaaaatggcctgtttatctatcaacaaaaaatacaattttaaaaaaatatgatggaagatttaaagatatatttcagaaagtttacgatcaagagtttaaatctgagtttgaaaaaaacaatattatttatgaacatagattaattgatgatatggttgcttgcgcaatgaaatggagtggtaaatacatttgggcttgtaaaaattatgatggcgatgttcaatctgatactgtcgcacaaggatatggatctctaggacttatgacaagtgtgcttttagcacctgatggaaaaactatggaagcagaagctgcccacggaacagttactcgtcattttagaatgcatcagcaaggaaaagaaacttcaacaaatccaattgcctcaatttttgcatggactagaggactggcgcacagaggaaaattagataacaatgaagagcttattaaatttgctcaaagtttagagaccgtatgtattgatgctgta

SEQ ID NO: 207687 - DNA, 760 bp, Unknown
  Bacterial polypeptide expressing nucleotide sequence isolated from the Sargasso Sea
atggtttttgaaccaactgatggaagtgatggttttataaaagacgtatatgagtttgaaaaagaaggaatagctctttcaatgtataatcttgatcaatcaattattgattttgctagagcttgttttacttatgcactaaacttgggatggcctgtttacctatctacaaaaaatacaattttaaaagtttatgatggaagatttaaagatatatttgaaaatatttttcaaaatgagtttgctcaaaaatttaagcaaaaaaatatagtttatgaacatagattaatagatgatatggttgctactgcccttaaatgggaaggaaattttatttgggcttgcaaaaactatgatggtgacgtccaatcagactccgttgctcaaggatatggttcacttgggctaatgacaagtgtacttatgacacctgatggtaaaacagtagaagctgaagctgcgcatggaacagtaacaaggcattatagaaatcaccaaaaagatttagaaacatcaacaaatccaatagcttcaatatttgcatggtctagaggactttattttagaggaaagtttgataagaatgataatttgatacaattcaccaaaaaacttgaagaaacttgtattgaaactgttgagtccggaaaaatgacaaaagacctagcgattttaattaattcagatcaaaattggttaaatactcaagattttcttaaaactttaaaagaaaatttagaaaataaattaaaattctaga

SEQ ID NO: 207688 - DNA, 319 bp, Unknown
  Bacterial polypeptide expressing nucleotide sequence isolated from the Sargasso Sea
taaaatagcagaagctgaggcagcccatggaactgttactaggcattataggcaacatcaacaaggtaaagaaacatcaacaaatccaattgcatctatttttgcatggactagaggtttggctcatagaggtcaattagacggtaatgatgaattaattaagttttcagatactctagaaaaaatttgcattgaaacagttgaaagtggatcaatgactaaagacttggcaattttaattagtaagagtcaaaaatttcttacgacaaatcaattcttagaagcaatagactctaatcttaaaaaaaagcttaactaa

SEQ ID NO: 207689 - DNA, 607 bp, Unknown
  Bacterial polypeptide expressing nucleotide sequence isolated from the Sargasso Sea
atgacaaattctaattcaataaaaatggaaaatggcaaactaaatgttccagatcaacccataattccttttattgaaggtgatggaattggccctgatatttggagagcctccgtaaatgtatttgatagcgctgttgaaagcgcctacgatggtggtaggaaaatagattggttggaaattctcgcaggcgaaaaagcgcaccagcagacaggggagtggttaccccaaaaaacactagacctagtaacagagcaccatgtcgccattaaggggcctttgacaacccctgttggtggtggcatacggtcgttaaatgtcgccctcagacaaaagttagatctttatgcatgtgtgagacctgttagatggtttgaaggcgttccatctccggttaaagaaccagggctggttgatatggtgatttttagggagaatactgaggatatctacgctggaatagagtggatgcacggcaccgatgatgttgagaaagtcaaatcatttttgatggatgaaatgggggtaacaaatatccgtttccctgatacctctagtctaggcgtgaagcccgtatcgaaagagggcaccacgcggttggtgaaag

SEQ ID NO: 207690 - DNA, 541 bp, Unknown
  Bacterial polypeptide expressing nucleotide sequence isolated from the Sargasso Sea
gttcattaaaaataaactaatcctaccctatcttgacctaggaattgaatattatgatcttggtatgaaaagccgtgacaatacggatgatcaaatcacaatagactccgcaaatgccatcaagaaaattggggttgggattaaatgtgcaactatcacgcctgatgaagcaagagtagaggaatttgacctaaaaaaaatgtggagatcgccaaatggaacaatcagaaatatcattgggggaactgtttttagagaaccaatcatctgtaaaaatattccaaagcttgttccttcttggacagatcctgtaattataggaagacatgcttttggagatcagtatagagcaacagattttaaagtgcctggtaaaggaaaaatggaagttaaatggacatcagaagatggaaaaaatgagataaaatatgaagtatttaattttactggtccaggagtagcactttcaatgtataatttagataaatctattcaagattttgcaagatcatgtttcagctatggattaataaaaaaatgg

SEQ ID NO: 207691 - DNA, 873 bp, Unknown
  Bacterial polypeptide expressing nucleotide sequence isolated from the Sargasso Sea
gagtttatcaagaataaattaattctcccatatcttgatttaggaattgaatattacgaccttggtatgaaaagtagagatgatacggatgatcaaattactattgattgtgcaaatgcaattaaaaaaaatggtgttggaataaagtgtgcaacaataactccagatgaagcaagagttaaagaatttagtctcaaaaaaatgtggagatctccaaatgggactataagaaatattattggaggaacagtttttagagaaccaataatttgtaaaaatattccaaagctagttccatcttggactgatccattaattataggcagacatgctttcggggatcaatatagggcaacagattttgtagtacctggtaaaggtaagcttgaagtcaaatggactgcagaagatggtagtgatgaaaaaaagtatgaagtattcaatttcccaggtccaggaattgcactttcaatgtataatttagataaatcgatagaagatttcgcaaggtcttgtttcaattatggactaataaaaaaatggcctgtttatctatcaacgaaaaatacaattttaaaaaaatatgatggaagatttaaagatatttttcagaaagtttacgagcatgagtttaaatctgagtttgaaaaaaaccatattatttatgaacatagattaatcgatgacatggttgcttgtgcaatgaaatggagtggtaaatacatttgggcctgtaaaaattatgatggcgatgtccaatctgatactgtggcacaaggatatggatctctaggacttatgacaagtgtactgttagcacctgatggaaaaactatggaagcagaagctgcccacggaacagtcactcgtcat

SEQ ID NO: 207692 - DNA, 452 bp, Unknown
  Bacterial polypeptide expressing nucleotide sequence isolated from the Sargasso Sea
tatggctaagattaaagtaaaaaaccctgttgttgagctagatggtgacgaaatgactaggattatatggtcatttatcaaagataagctgatcaaaccataccttgatataaatcttaaatattatgaccttggaatggaaaacagagacaaaacagatgaccaaattacggttgatgcagctaatgcaattaaagaacatggtgttggagtaaaatgtgcaactataactccagatgaagcacgagttgaagaatttaaactaaaaaaaatgtggcgatctcctaatggaactataagaaatattttaggtggaacggtttttagagaaccaatcatttgtaaaaatgtaccaaagttagtgccaggttggacgcaacctattgttataggaaggcacgcttttggtgatcaatatagagctacagattttttgattcttggtgagggaa

SEQ ID NO: 207693 - DNA, 441 bp, Unknown
  Bacterial polypeptide expressing nucleotide sequence isolated from the Sargasso Sea
agtggaatggtaaatatatttgggcgtgtaaaaattatgatggagatgttcagtctgacactatggctcaaggttatggatctttaggattaatgacaagtacattgttaaccccagatggtaaaataatggaggcagaagctgcacatggtacagtaacaagacactataggatgcatcaacaaggaaaagaaacctcaacaaacccaatagcatctatttttgcttggactagaggattagctcataggggtaagttagataataatgatgcactaattaaatttgcacaaactttagaaaaagtttgtattgaatgtgtggaaagtggattaatgacaaaagatttggcaattcttattggtcctgatagtaagtatttaactaccaatcagtttttagacaaaattgacggtaatttaaaaaagaaattaaattaaa

SEQ ID NO: 207694 - DNA, 483 bp, Unknown
  Bacterial polypeptide expressing nucleotide sequence isolated from the Sargasso Sea
aaaaaataatttaacttatgagcacagattaattgacgacatggttgcatgtgcaatgaaatggagtggtaaatatatttgggcttgtaaaaattatgatggtgatgtgcaatcagatactatggcacaaggttatggttcgttgggattaatgactagtacacttcttaccccagatggaaaaattatggaagcagaagccgctcatgggactgtaacgagacactatagaatgcatcaacaaggtaaagagacttcaacaaatcctatcgcatctatttttgcatggactagaggactagcgcacagaggaaagctagatagtaataatgaattaattaaatttgcacaaacaattgaaaaagtttgtattgagtgtgttgaaaacggagctatgacaaaagacttagcaatactaattggtccctcaagtaaatacttaacgactaatcaatttttagatgaaattgatggtaatctaaa

SEQ ID NO: 207695 - DNA, 376 bp, Unknown
  Bacterial polypeptide expressing nucleotide sequence isolated from the Sargasso Sea
atggctaaaatcaaggttaaaaatccagttgttgagctagatggtgacgaaatgacaagaatcatttggtcctttatcaaagataagttgatcaaaccatatttagacataaatctgaaatattacgatttaggcatggaaagtagagataaaacttctgaccaaataactatagattgcgctaacgctataaagaaatatggagtaggcattaaatgcgctaccattactcccgatgaagcgagggttgaggaatttaaattaaaaaaaatgtggagatcacctaatggtactattcgaaatattcttggaggaacagtgtttagagaacctataatttgtaaaaatgtgcccaagcttgtcccaggttggacaa

SEQ ID NO: 207696 - DNA, 448 bp, Unknown
  Bacterial polypeptide expressing nucleotide sequence isolated from the Sargasso Sea
tatggctaaaattaaagttaaaaacccagttgttgagctagatggtgacgaaatgacaagaattatttggtcattcattaaagataaactcattaaaccctatctagatattgatttgaaatactatgatttaggtatggaaaatagagataaaaccaacgaccaagtaactattgattgtgcaaaagccatacaaaattttggtgctggtgttaaatgcgcaactatcacgcccgatgaggctcgtatgaaagaatttaatttaaagaaaatgtggagatcgcctaatgggaccataagaaatatagttggaggaactatatttagagaaccaataatttgtaaaaatgttccaagattagtaccacattggaccgatagtgtaattgtgggtagacatgcttttggtgatcaatataaagcaactgattttaaagttccagggtaa

SEQ ID NO: 207697 - DNA, 676 bp, Unknown
  Bacterial polypeptide expressing nucleotide sequence isolated from the Sargasso Sea
atgagtaaaataaaggttaaaaaccccattgtagaattagatggcgatgaaatgaccagagttatatggaacttcataaaaaacaagctgatcttaacttacttagatctaaagattgaatactatgatttaggaatggaaagcagagataagactgaagataaaattacaatagagtgtgctaacgcaattaaaaagaatggtgttggtataaagtgtgcaaccataacacctgatgaagcaagagttaaagaatttaatctaaaaaaaatgtggagatctccaaacggtactataagaaatattattgggggtactgtttttagagaacctataatctgtaaaaatattccaaaactcgtaccttcatggacagatccattaattataggcagacacgcatttggtgatcagtatagagcaacagattttacagtacctggcaaaggtaaattagaaattaaatggactgctgaagatggtactgatgaaaggaaatatgaggtattcaactttcctggtcctggaattgctttatcaatgtataacctagataaatccatagaagattttgcaagatcatgctttaattatggtttaattaaaaaatggccagtttatctatctaccaaaaatacaattttaaaaagatatgatggaagatttaaagatattt

SEQ ID NO: 207698 - DNA, 611 bp, Unknown
  Bacterial polypeptide expressing nucleotide sequence isolated from the Sargasso Sea
aaaatggcctgtttatatgtctacaaaaaatacaattctaaagcaatacgatggaagatttaaagatattttccaagaaatttttgacaaagaatataagagtgaatttgaaaaaaataatttgacttacgaacacagattaattgatgacatggttgcatgtgcaatgaagtggagtggaaaatatatttgggcttgcaaaaattatgatggagatgtgcaatcagacactatggcacaaggttatggatctttaggattaatgacaagtacattattaactccagatggaaaagtaatggaagcagaagctgcacatggaacagtgactagacattatagaatgcaccaacaaggaaaagaaacttcaacaaaccctatagcatcaatttttgcttggactagaggattagctcacagaggtaaattagatagtaatgaagaactaattaaatttgcaaaaactttagaaaaagtttgtattgaatgtgtagaaaatggttcaatgacaaaagatttagcaattcttgttggtccaaatagtaaattcttaactacaaatcaatttctagatgaaattgatggtaatttaaaaaagaaattaaattaaa

SEQ ID NO: 207699 - DNA, 736 bp, Unknown
  Bacterial polypeptide expressing nucleotide sequence isolated from the Sargasso Sea
aaagagtttggttaaaacacttaaaacaagatttgatgtttcaaaaattagatttgatgagaacgttggcataggggttaaaccaatatcgaaaaatggaacctcaagacttgtaaaaaaagcaatagactatgcgattgataataatcgctcatcagtaacgctagttcataaaggtaatattatgaaatataccgaaggtgcatttagagattggggatatgaattagcaaaaaatgaatatggtggcattgaaattgacgaagggccatggcaagagattgttaatccaaataatggtaaaaaaatcgtaattaaagatgtaatttgcgatgcatttcttcagcaaatattattgagacctaccgaatatgatgtcatagcaactatgaatcttaatggtgactatatatctgatgctttggcagcaatggtaggtggaattggtatagcgccaggagcaaatatatctgatgaatatgcagtttttgaagctacacatggaaccgcaccaaaatatgctggacaaaataaagtaaatccaggaagtcttattctttctgcagagatgatgttaagacatatgggttggatagaagcagcagatttaattatgtcctccatggacagagcaattggtgcaaaaaaggtaacctatgattttgcaagaatgatgagtgatgctgatcttgtttcttcatcaggatttgcagatgagatgatcaaaagaatgtaa

SEQ ID NO: 207700 - DNA, 820 bp, Unknown
  Bacterial polypeptide expressing nucleotide sequence isolated from the Sargasso Sea
tattccaaaacttgtgcctcctggaccgatcctgttattatagggtcgtcatgctgttttggagatcaatatagagctacagattttcaagttcctggcaaaggtaagttagaaattaaatggacatcagagaatggtaaagatgagaagaagtatgaagtcttcaattttcctggtcctggtgttgctttatcgatgtataatcttgacagatcgatagaggattttgccaggtcctgtttcaactacggtctaattaaaaaatggcctgtttatctttctacaaaaaatacaattttaaaaacctatgacggaagatttaaagatatttttcaaaaagtttttaatgaggaattcaaaaaagattttgatacaaataatattacatatgagcatagattaattgatgatatggttgcatgtgctatgaagtggagcggaaaatatatttgggcttgtaaaaattatgatggagatgttcaatcggatacagttgctcagggatatgggtctttagggttaatgacaagtgtattgcttgccccagatggaaaaactatggaagcagaggcagcacatggcactgtgactagacattatagaatgcatcaagaaggtaaagaaacttcaacaaatccaattgcatcaatatttgcctggacaagagggttagcacacagaggtaaattagatgataaccaagaattaattaaattttcaaacactttagaacaaatttgtgttggctgtgtggaaactggatcaatgacaaaagacttagcaatattagtgggatcttcacaaaaatatttgactacta

SEQ ID NO: 207701 - DNA, 810 bp, Unknown
  Bacterial polypeptide expressing nucleotide sequence isolated from the Sargasso Sea
gtgaccaatacagagctacagattttttagttccaggaaaaggtaaattagaagtcaaatggacatcagaagatggaagtgatgaaaagaaatatgaagtatttaatttcccaggaccaggtattgctctttcaatgtataatttagataaatcaatagaagattttgcaagatcgtgtttcaattacggcctaataaagaaatggcctgtatatttatcaactaagaataccatactaaaaaagtatgacggtagatttaaagatatatttcaaaatgtttttgaaaaagattttaaatcagaatttgaaaaaaataacataacttatgaacataggttaatcgatgatatggttgcttgtgctatgaagtggcacggtaaatatatatgggcttgtaaaaactacgatggcgatgttcaatcagatactgttgctcaaggttatggttcattaggtttaatgactagtgttttattggcacctgatggcagaacaatggaagcagaagcggctcatggaactgttactcgacattttagaatgcatcagcaaggtaaagaaacatcaaccaatccaattgcatctatatttgcgtggacaagaggtttggcgcacagaggaaagctagatagtaatgatgaattaattaaatttgccaaaacacttgaagaagtatgtgttaattcggttgaatcaggatcaatgaccaaagatttagctatactaattggtccttcaacaaaatatttaacaactaaccagtttttagatgtaattgatggaagtttaaaacaaaaattaaattaag

SEQ ID NO: 207702 - DNA, 448 bp, Unknown
  Bacterial polypeptide expressing nucleotide sequence isolated from the Sargasso Sea
atggcaaaaattaaggtaaaaaatccaatagttgagctagatggcgatgaaatgactaggataatatggtcatttattaaaaaaaaactaattgagccctatcttgaaatagatattaaatattttgatttaggaatagaaagtagagacaaaacctctgatcaaataactgttgattgtgcaaaagcgattaaagaatttggggtaggtattaaatgtgcgactatcacccctgatgaggcaagagtagaagaatttaaattaaaaaaaatgtggagatcaccgaatggtacaattcgaaatatacttggtggtacagttttcagagagcccattatttgtaaaaatgtaccaaaattagttccaggttggactaatccaattattatcggcagacatgcttttggagatcaatacaaagcaacagattttctgttccaggaaaagg

SEQ ID NO: 207703 - DNA, 633 bp, Unknown
  Bacterial polypeptide expressing nucleotide sequence isolated from the Sargasso Sea
tatgagtaaaattaaggtaaaaaatccagttgttgagttaaatggtgatgaaatgaccagagttatatgggagtttattaaaaataaattaatacttccatatcttgatcttggaattgactactacgatcttggaataaaaaaccgtgataaaacaaatgatcaaataacaatagactgtgcaaaagcgattaaaaaaaatggtgtgggtattaaatgtgcaacaatcactccagatgaagcaagagtaaaagaatttaatttaaaaaaaatgtggagatcaccaaatggaactattagaaacatattgggtggaactgttttcagagaacctattttatgtaaaaatatccctaaattagttcctagctggacaaaccctatttgtataggacgacatgcctttggagatcaatacagagctactgattttaaagttcctggaaaaggtaagcttgaaataaaatggacttcagaagatggatctgaaaaaaaagaatatgaagtatttaattttccaggtcctggaattgcattatcaatgtataacctggataaatctattaaagattttgcaagagcgtgtatgaattatggtcttaatagaaaatggccggtttatttatctacaaa

SEQ ID NO: 207704 - DNA, 817 bp, Unknown
  Bacterial polypeptide expressing nucleotide sequence isolated from the Sargasso Sea
tttggagatcaatatagggcaacagacacaattataccatcagcaggtaaattaagtatgacatttgaaccttcagatgggtctgaaaaaattcataaagaaatatttgattttcctgggtctggaatagctatgacaatgtataatcttgacgaatcaataaaaggttttgcaagagcttgttttaattatggattagatcttggatggccagtttatttgtctacaaaaaatacaattcttaaggtttatgatggtagatttaaggatatttttaatgatatttatgagaacgaatttaaaaccaaatttgaaagtaaaaaaataacatatgaacaccgattaattgatgacatggttgcatgtgctcttaaatgggacggcggatttgtatgggcgtgtaaaaattatgatggagatgttcagtctgatacagttgctcaaggttttggttccttaggactgatgacatcagttcttttaacaccagatggaaaaacggttgaatcagaggctgcacatgggacagtaacaagacactaccggcaacatcaagcaggcaatcaaacatcaacaaatccaatagcttcaatctttgcttggactagaggtttatcatatagggcaaaattcgataatacaccagaggtagatagatttgcaaaaacacttgaaaatgtttgcattgaaacggttgagagtggttatatgactaaagatttggcattattagtaagtaaagatcaaaaatggcttactacaaccgaatttttaaataaaattgatgagaactttaagaaagttatgagtgtttagt

SEQ ID NO: 207705 - DNA, 718 bp, Unknown
  Bacterial polypeptide expressing nucleotide sequence isolated from the Sargasso Sea
gaaatttttactttcaaggttcccggcattgctatgactatgtataatgtggatgaatcaattaaagggtttgcaagagcatgtttcaattacggattagatttaggttggcctgtatacctatcaacaaaaaatactattttaaaagtttatgatggcaggtttaaagatatttttaatgatatttatgaaagagagtttaagtctaaatttgaaaaaaagaaaataacttatgaacatagattaattgatgacatggttgcttgtgctttaaaatgggatggtggatttgtatgggcatgcaaaaattatgatggtgatgttcaatctgataccgttgctcaaggttttggatctttaggtcttatgacttcagtgctactcacaccagacggcaaaactgttgaggcggaagctgctcatgggacagttacaagacattataggcagcatcaagctggaaaacagacatctactaatccaattgcatcaatttttgcttggacacgcggcctttcatatagagcaaaatttgacaatagtgaaaaagttgaacagtttgctaaaaacctcgaaaaggtctgtattgaaagtgttgaaagcggatatatgacaaaagacttagcattattggttggtagtgaccagccatggctaactacaactgaatttttaaataaagttgatgctaattttaaaaaaataatgttaaactagc

SEQ ID NO: 207706 - DNA, 484 bp, Unknown
  Bacterial polypeptide expressing nucleotide sequence isolated from the Sargasso Sea
atggcatttgagcacattcaagaaccaaaaagtggttcaaaaatatctatagactcttcagggaaactaattgttccagacaatccaataattcctttcatcgaaggagatgggataggttcagacatcactcctgcaatgattagagttgtagacagcgcagtagagaaatcttacggcggaaaaaagaaaattgaatggatggaaatctactgtggagagaaatcaaccgttgtatacggtgaagataactggcttcctccagaaactttaagggcacttgaaatctatcttgtaggcattaaaggacccctgactacacctgtaggtggaggtatcagatctttgaatgtagctttaagacaagaattagacctctatgtatgccaaagaccagttagatattttaatggagtgcctagcccagttatatctcctgaaaaaacggatatggtaatttttagagaaaactcagaagatattt

SEQ ID NO: 207707 - DNA, 637 bp, Unknown
  Bacterial polypeptide expressing nucleotide sequence isolated from the Sargasso Sea
atggcaaaaattaaagtcaaaaacccagtagtagagctagacggagacgaaatgactagaattatatggtcatttattaaagaaaagctgattaagccttacttggaaattgatcttaaatactacgatctgggtatagaaaatagagataaaacgaacgatcaaataacaatagactgtgctaaagccattcaaaaatatggggctggggttaagtgtgcaacaataactcctgatgaagctcgtgtaaaagaattcaggttaaagaaaatgtggagatcgcccaatggaacaataagaaatattgttggaggcacaatttttagagaaccaataatttgtaaaaatgttccaagattagtttctcattggacagatagcgttatagtcggaaggcatgcttttggggatcaatataaggctacagattttaagattccaggaaaaggaaaaatgactgttaaatgggagtcagaagatggaaaaaataaaattgaacatgaggttttcaattttgatggtccaggtatagctctgtctatgtataacttagataattcaattaaagatttcgctagagcgtgcatgaattacggcctggtaagaaaatggcctgtttacttttcatctaaaaata

SEQ ID NO: 207708 - DNA, 323 bp, Unknown
  Bacterial polypeptide expressing nucleotide sequence isolated from the Sargasso Sea
aatgcctaaaattaaagtaaaaaatccagttgttgagcttgatggcgatgaaatgacccgaattatttggtcttttataaaagataaattaattaaaccttacttagatattgatctcaaatactacgaccttggaatgaaaaatagagataaaactaatgaccaagtaacaattgattgtgctaaggcaattcaaaaatatggtgccggcgtaaagtgtgcaacgattacacctgatgaagctcgtgttaaggaatttaatctaaaaaaaatgtggagatcccctaatggtacaataagaaatattgtaggtggaacaattt

SEQ ID NO: 207709 - DNA, 829 bp, Unknown
  Bacterial polypeptide expressing nucleotide sequence isolated from the Sargasso Sea
tggaataggcccggatatctgggaagcatctgtaaatgtttttgacagtgcagttaagcacgcatacggaaatactaaaaaaattgactggttagaagtccttgcaggagaaaaagcctatgaatcaaaaggcgaatggttaccccaatcaacactcgatactatttttgagcatctaattgctattaaaggacctcttactactcccgtgggtggtggtatacggtcactgaatgttgcacttagacaaaaactagatctttatgcttgtgtgcgtcctgttcgatggttcgaaggtgttccctcgcctgtaaaagaaccaggattagttgacatggttatttttagagaaaatactgaagatatatatgccgggatagagtggatgcatggaggtgatggtattgaaaaggtaaagtcatttttagttaacgaaatgggtgttacaaacatacgatttcctgaaacctctagtttaggtgtgaaaccagtatcaaaagaaggaacagaacgattggtcagatctgctctggaaatggctcttaagcaaaaaagaaagagtcttactctggttcataaaggtaatataatgaaatatactgaaggggcattcagagattggggatatgaactggcaaaaaaagagtatggagctcaagatctagatggaggtccttggcagataattaatgataatggccatcaattaatcgttaaagatgttatcgcagatgcatttttacagcagatactgcttcggccctctgaatatgatgttattgctactttaaatttaaatggagattatatatctgatgctctagctgct

SEQ ID NO: 207710 - DNA, 788 bp, Unknown
  Bacterial polypeptide expressing nucleotide sequence isolated from the Sargasso Sea
tatggcaaaaataaaagttaaaaatccagtagttgagttagatggcgacgaaatgacaagaattatatggtcattcataaaagataagcttattaagccatatcttgatgtaaatcttaagtactttgacttaggaatggaaagtcgagataaaactgatgaccaaatcacagtagatgcggcaaatgctatcaaacagcacggagtaggtgttaaatgtgcaactattacacccgacgaagctcgagtagaggaatttaaactaaaaaaaatgtggagatcacctaatggtaccattagaaatatattaggcggtacagtttttagagaaccaattatttgtaaaaatgttcctaaactagttcctggttggaacaaaccgattgttataggaagacatgcctacggtgatcaatatcgagccactgactttttaataccgggtgagggaaatttagaagtcaagtggacttcaaaagatggaagagacaagaaagagtttaaagtttttgattttcctggatctggaactgctcttacaatgtacaatttagatgattctattaaaaattttgcaagagcttgtatgaattatggcctcggaagaaaatggccagtttatttgtctactaaaaatacaatccttaaagcttacgatggtaggtttaaagatcttttccaagaagtttttgaaaaagaattttctgataaatttaaaaaaaacaatatatcttacgaacatagattaattgatgacatggttgcctgtgccatgaaatggaatggtg

SEQ ID NO: 207711 - DNA, 763 bp, Unknown
  Bacterial polypeptide expressing nucleotide sequence isolated from the Sargasso Sea
aatggaaataaaatggacatcagaagatggtaaagatgaaataaaatatgaggtatttaattttacaggtcctggaatagcgctttcaatgtataatttggataaatctattgaagattttgcaagatcttgttttagctatggtttaattaaaaagtggccagtttatatgtcaacaaaaaatacaattttgaaacaatatgatggaagatttaaagacatattcgaagaaatttttaataaagaatataaaaaagaatttgataaaaacaatttaacttatgaacatcgattaattgatgacatggttgcatgtgcaatgaaatggagtggtaaatatatttgggcttgcaaaaattatgatggagatgttcagtctgatacaatggcacagggatatggttctttaggtttgatgactagtacactgttaacaccagatggaaaagtaatggaagcggaagctgctcatggaacagttacaagacattatagaatgcaccaacaaggtaaagaaacatctacaaatccaattgcctctatatttgcctggactagaggattggctcatagaggaaaattagatagtaatgatgaacttattaatttttcaaaaactattgaaaaagtttgtattgattgtgtagaaaatggtgcaatgacaaaagatttagctattcttgtcggtccatcaagtaaatatttaactactaatcagtttttagatgaaattgatggtaatcttaaaaaaaaattaaattaa

SEQ ID NO: 207712 - DNA, 763 bp, Unknown
  Bacterial polypeptide expressing nucleotide sequence isolated from the Sargasso Sea
atgagcaaaataaaggtaaaaaacccaattgtagagttagatggcgatgaaatgactagagtcatttgggaattcataaaaaaaaagttggtacttccttatattgatcttggtattgaatactatgatttaggtatgaaaagtagagatgatactaatgatcaaataacaattgattgtgcaaatgctataaaaaaagtgggggtaggaattaaatgtgcaactattactcctgatgaagaaagagtaaaggaatttaatttaaaaaaaatgtggagatcacctaacggcactattagaaatattattgggggtacagtatttagagaaccgataatatgtaaaaatgttccaaaacttgttccttcatggactgatccattaataattggaagacatgcattcggagatcaatacagagctacggattttttagttcctggcaagggaaaccttgaaattaaatggacatctgaggatggtaaagaagaaaaaaaatatgaagtttttaaatttccaggaccaggaattgcattatctatgtataatttagacaaatcaattggcgatttcgctcgatcttgttttaattatggtctaataaaaaaatggccagtatatttgtcaacaaaaaatactattctcaaaaactatgatggaagatttaaagatatatttcaggaaatatatgaaaaagaatttaagtcagagttcataaaaaataaaataatttatgaacatagattgattgatgaccatggtt

SEQ ID NO: 207713 - DNA, 699 bp, Unknown
  Bacterial polypeptide expressing nucleotide sequence isolated from the Sargasso Sea
tatgaaatttgagcatatcgtggaaccaaaaaacggttcaaaaattacagtagataaatcaggtaaattgaatatccccgataatccaattatcccatttatagaaggcgatggtattgggtcagatattactcctgcaatgatacaggtagtagatagcgcagttgaaaaatcctataacggtaaaaggaaaatagaatggatggaaatatattgcggagaaaagtctactgtagtctacggtgaagataattggctgccacctgaaacgttaaaagcattagaaatttatttagttggaattaaaggtcctttaaccactcctgtagggggcgggataagatcacttaatgttgctttaagacaagagctggatctttatgtttgtcaaagacctgtaaggtatttcgacggagtacctagtcccgttactaaccctgaaaaaacagacatggtaatctttagagagaattcagaagatatttatgcaggcatagaatgggaggcaggttctgacgaggctaaaaaggtaattgaatttttaacaaaagaaatgggcgttaccaaaattagatttcctgaagattgtggaataggagtaaaacctgtttctaaagaaggcacagagcgattagttgataaggctatccaatatgcaatagcgaataatagagattcagtaactcttgttcataaagg

SEQ ID NO: 207714 - DNA, 768 bp, Unknown
  Bacterial polypeptide expressing nucleotide sequence isolated from the Sargasso Sea
aattaaaaatggtatttgaacctacagatggcagtgaaggatttgttaaggaagtatttaactttgaaaaagaaggtatagcattatcgatgtacaatctagatcaatcaattattgaatttgcgagagcatgttttaattatggcctaaatctaggttggcctgtttatttatctacaaaaaatactattttaaaagtttacgacggaagattcaaagatttgtttgagaacgtatttcaaaatgagtttgcggataagtttaaggaaaaaaatatagtttatgaacatagattaattgatgacatggttgctactgctttaaaatgggaaggtgagttcatttgggcatgtaaaaattatgatggtgatgttcaatctgactcggtagcccagggctatggttctcttggattaatgacaagtgttttaatgactcctgatggaaaaactgtagaagctgaagctgcgcatggaactgttactagacactttagaaatcatcaacagggtttagaaacatccacaaatccaattgcttctatatttgcatggtcaagaggtttgcattttaggggaaaatttgatgataatcaaaatttaatgaatttttcaaaaaaacttgaagagacttgtatcgaaactgttgagtctggaaaaatgacaaaagatttggcgattttaattagcgaaaaccaaaaatggttaaacactcaagattttttaaatactttaaaggataacttggaaaaaaaattagaatcttaaa

SEQ ID NO: 207715 - DNA, 349 bp, Unknown
  Bacterial polypeptide expressing nucleotide sequence isolated from the Sargasso Sea
aatgacaagtgtattaagaacacctgacggtaaaatagctgaggctgaagcagcacatggaacagtcacaaggcattataggcaacaccaagaaggtaaggaaacttctactaatccaattgcatctatttttgcttggactaggggtttggctcatagaggtcaattagatggaaataaggaattaattaaattttcaaacacacttgaaaaagtttgtgtagaaacagttgagagtggtaacatgacaaaagatttagcaattcttattagtaaagatcaaaaatttttaacaacaaatcaatttttagaagcaataaattcaaatcttaaaaagaaacttaactaa

SEQ ID NO: 207716 - DNA, 863 bp, Unknown
  Bacterial polypeptide expressing nucleotide sequence isolated from the Sargasso Sea
aaatacagaggatatatatgctggaattgagtgggctgcacaaactgatgatgtaaagaaagttttaaactttttaatagaagaaatgaaagttagtggaattagatttcctgaaagttctggtataggtataaaaccagtttctgaagaaggttcaaaaagactgataataaaagcgatagagtatgcaattgataatgatagaaaatcagtatcattagttcataaaggaaatattatgaagtttactgaaggagcttttagaaattggggttatgagcttgcagttaatgagtttaatggccagataattgatgatggtccgtggtgtaaaattataaatccgaataatggaaatgaaattattgtaaaagatgttatagctgataactttcttcaacaaatacttttacgtcctgaggattatgatgtaattgcaaccttaaatttaaatggggattatatttctgatgctttggccgcacaagttggaggtattggaatagcacctggcgcaaatatatcaaataaagttgctgtttttgaagcaactcatggatctgctcctaagtatgctggaaaaaatagggtgaaccccggttcaataatcttgtcagccgaaatgatgcttcgttatataggatggactgaggcggcagacaaagtcatgaatggtgttgctcaagcaatagcaaataaaaccgtaacttatgacttagcaagagtgagagcaggtatgcagacacttgtgaaaaaacacgagcacggacaggagatacgaaaagatcttgaagaattaatgccaggtgctacattagttacatgtagtggatttggagatgctattatagattgcatgtaat

SEQ ID NO: 207717 - DNA, 772 bp, Unknown
  Bacterial polypeptide expressing nucleotide sequence isolated from the Sargasso Sea
tgcaggtattgaatttgcagctaatagtaatgatgcaaataaactagtcaatattctgacaaaagacttttctgttgatcaaatacgttttcctaaaaatgtaggtttgggtgtaaagcctatttctgaagaaggttctaaaagattaatctcaagagcatttgaatatgcaattgaacatgatcgttcctctgtaacacttgtgcacaaaggtaacattatgaaatttacggaaggatcctttcgagattggggttacgagttatgtcgtgaaaaatttgagggtgatgatcttgatggtggaccttggcattacttcgttaatccaaatactaaaagaaagatcattgtaaaagatgtcattactgacgcttttttacaacagattttattaagacctagagaatatgatgttatcgcaacaatgaacttaaatggtgattatctttccgatgcacttgcagcttgtgttggaggtattggcattgcgccaggagcaaatattggtgatgattctgctttgtttgaagctacacacggaactgctcccaaatatgcaggacttgataaagtaaatccattatcattaattttatctgcagaaatgatgttaagacatattggttggtcagaagcagcagatatcttgatacaatctattgaatctactatcaaagaaaaatatgtaacatatgattttgaaagacttatgaaaaaagcaactttggtttcttgctcaggttttgcaaaagaaatgattaaaagaatgtga

SEQ ID NO: 207718 - DNA, 833 bp, Unknown
  Bacterial polypeptide expressing nucleotide sequence isolated from the Sargasso Sea
tggtgttcctagtccagtaaaagtccctggtgatgttgatatggtaatctttagagaaaactcagaggatatttacgctggtgtagagtttgcatctgactcaaatgaatcagcagaattagtgaaaatacttaaagataaattcaatgtcgatcagataagattcccacaaaatgttggattgggtgtaaaaccaatatcagaagagggaacaaaaaggctagtaaaaagagcatttgaatatgctatcgaacaagatagatcctctgttactctggtgcataaaggaaatattatgaaatttactgaaggcgcttttagagattgggggtatgagctttgcagagaagaatttgatggtgatgatctcgatggtggtccatggcattactttattaatcccaacaacggaagaaaaattatagtaaaagatgttatatgcgatgcttttttacagcaaatactactaagaccaagagaatatgacgttattgcaacaatgaatctaaatggtgactacctttcagatgcattagcagcaatggttggtggtataggtattgctcctggtgcaaatattggtgatgaagctgcgatgtttgaagctacacatggaactgcaccaaaatatgctggcctagataaagttaatcctttatctttaattctttccgctgaaatgatgcttagacatataaactggaatgaagccgcagatctattaataaattcaattgaaaaaactattcaagatagatacgtaacctatgattttgagagattaatggataacgctacacttgtttcttgctcaggcttgcaaaagagatgat

SEQ ID NO: 207719 - DNA, 664 bp, Unknown
  Bacterial polypeptide expressing nucleotide sequence isolated from the Sargasso Sea
aatgacagaaaatactagtaaatcatatgataaaataaaagtaccagcaggtagctggattagtcttaacgatgatggatctttaaatgttccaaatgaccctataattgcgtttattcgcggggatggaattggcatggatattactcctgtgatgattaaagttgtggacgctgcagtagaaaaagcatatggcggcgagaaaaagatcaattggatggaagtttatgccggcgagcttgcaaatgaagtgtatggcgaaggcacctggttgccagatgaaactttaactgctttaaaagatactcatgtttctattaagggcccattaacaactcctgtaggcggaggttttagatctttaaacgttgctttaagacaaatgcttgatttatacatatgtttgcgcccagtaaaatattatgaaggcacaccaagcccgcttaaaaaccctgagtatactgatatggtgatttttagagaaaattctgaagatatttatgctggtattgagtgggaggcaggtacttctgaatctagaagattaattcagactctacaagagcaatttgatgttaagaaaataagattcacaaataactgcggaattggtatcaagccaatttcaaaagagggtacgcaaaggctagttcgaaaagctatt

SEQ ID NO: 207720 - DNA, 460 bp, Unknown
  Bacterial polypeptide expressing nucleotide sequence isolated from the Sargasso Sea
tatggttgcttgcgcaatgaagtggcaaggcaaatatatctgggcttgtaaaaattatgatggtgatgttcagtcagatactgttgctcaaggttatggttcattaggtttaatgactagtgttttattagcacctgatggcagaacaatggaagcagaagcggctcatggaactgtaactcgacattttagaatgcatcagcaaggtaaagaaacatcaaccaatccaattgcatctatatttgcttggacaagaggtttggcgcatagaggaaagttagatagcaataatgaattaattaaatttgccaaaacacttgaagaagtatgtgttaattcggttgaatcaggatcaatgacgaaagatttggcaatacttattggtccttctacaaaatatttaacaactaatcagtttttagatgtaattgatggaagtttaaaacaaaaattaaattaa

SEQ ID NO: 207721 - DNA, 585 bp, Unknown
  Bacterial polypeptide expressing nucleotide sequence isolated from the Sargasso Sea
aaaatacaattctaaaacaatatgatggaagatttaaagatatttttcaagacattttcgataaagaatacaaaaacgaatttgaaaaaaataatttaacttacgaacatagattaattgatgacatggttgcatgtgcaatgaagtggagtggtaaatatatttgggcttgtaaaaattatgatggagatgtgcaatcagatactatggcacaaggttatggatctttaggattgatgacgagtacattgttaactccagatggaaaagtaatggaagcggaagctgcacacggaacagtaactagacattatagaatgcatcaacaaggaaaagaaacttcaaccaaccctatcgcatcaatttttgcttggacaagaggattagctcacagaggtaaattagatggtaatgaagaattaattaaatttgcacaaactttagaaaaagtttgtattgaatgtgtggaaagtggatcaatgacaaaagatttagcaattcttgttggtccaaatagtaaattcttaactacaaatcaatttttagataaaattgatagtaatttaaaaaagaaattaaactaaa

SEQ ID NO: 207722 - DNA, 446 bp, Unknown
  Bacterial polypeptide expressing nucleotide sequence isolated from the Sargasso Sea
aatgtctaagattaatattaaaaatccagtagttgaattagatggtgacgaaatgacacgaattatttggaaatttattaaagaagaattaatacttccttatttagacattgatattaaatattacgatttaggagtagaatcaagagataaaacaaatgaccaaattactattgactctgcagaagcaataaaaaaaattggagttggaattaaatgcgcaacaataactccagatgaagaaagagttgaagagtttaatctaaaagaaatgtggagatctcctaatggaacaataaggaatattctaggaggaactgtattcagagaacctatcatttgtaaaaatattcctagactcgtacctggatggacagacccaattataattggaagacatgcttttggtgatcagtaccgagctacagatattaaggtacaaggta

SEQ ID NO: 207723 - DNA, 720 bp, Unknown
  Bacterial polypeptide expressing nucleotide sequence isolated from the Sargasso Sea
aatgagcaaaattaaggtaaaaaactctatcgttgagctaaatggtgacgaaatgactagagtcatatgggagttcataaagaacaagctaatccttccttatttagatctaggtatcgaatactatgaccttagcatgaagagcagagataacaccaacgatcaaataactatagattgtgcaaaggcaataaaaaaaaatggagttggtattaagtgcgcaacaataactgcggatgaattaagggtaaaagaatttaatttaaaaaaaatgtggagatcgccaaatggaacaataagaaatatcattggaggaacagtgttcagagaaccaattatttgtaaaaatattccaaaacttgttccatcttggacagacccattaattataggtagacatgcctttggagatcaatatagggcaactgattttttagttcctggaaaaggaaaacttgaaattaaatggacttcagaagatggtaaagaccaaaaaaattacgaagtatttaattttccagggcctggaattgcattatcaatgtacaacttagataagtctattgaagactttgcgagatcttgtttcaattatggtttaataaaaaaatggcctgtttatctttcgacaaaaaatacaattttaaaaaaatatgatggaagatttaaagatatttttcaaaagatatttgatgaagattttaaagctgaatttgataa

SEQ ID NO: 207724 - DNA, 745 bp, Unknown
  Bacterial polypeptide expressing nucleotide sequence isolated from the Sargasso Sea
atattttaacggagtacctagcccagtagtttctcctgagaaaacggatatggtaatttttagagaaaattctgaagatatttatgcaggtattgaatgggaagcaggtactgaagaagctgaaaaagtaataaagttttttactgaagaaatgggtgtaaccaaaatacgatttatggaaaattgtggaattggtgtcaaaccagtttctaagcagggcacagaaagattagtagataaagccattcagtatgctattaataatgatagagattctgtcaccttggttcataaaggtaacataatgaaatttactgaaggttctttcaaagattggggttaccaatttttagtctcaaagtatggtgccaaagaattagacggaggaccatggcatacattgactaacccaattacagggagagaaatagtcataaaagatgtaatagctgatgcatttcttcagcagatactcacaagacccgacgagtatagtgttatagctactttaaatttaaacggtgactacatttcggatgctttagcggcagaagtaggggggataggaatagcaccaggtgcaaacttaggtgaaaaaatagcattattcgaagcgactcatggaactgctccaaaatatgctggattagataaagttaatccaggatcattaattctctccgctgagatgatgttgagatatatgggttggatggaagctgcagatttaataattgaaggctta

SEQ ID NO: 207725 - DNA, 682 bp, Unknown
  Bacterial polypeptide expressing nucleotide sequence isolated from the Sargasso Sea
atgagcaaaatcaaggtaaataacccggtagtagagctggatggtgatgaaatgacacgaattatatgggagttcatcaaaaacaaacttatccttccatatttagatcttggtattgaatactatgatttaggaatgaaaagcagagataatacagacgaccagatcacaatagactgtgcaaatgctatcaaaaaaattggagttggaataaagtgcgcaacaattacccctgatgaagcaagagtagaggaatttgatttaaaaaaaatgtggagatctcctaacggaacaataagaaatataattggaggaacggtatttagagagccaattatctgtaaaaatattcctaaacttgtaccctcatggacagatcctgtaattattggaagacatgcatttggtgatcaatatagagcaacagattttaaagttcctggaaaaggaaaaatggaagtaaaatggacatcagaggatggaaaagatgaaatcaaacatgaggtttttaattttactggccccggtgttgctttatcaatgtacaatttagataaatcaatagaagactttgcaagatcttgttttagttatggattaattaaaaaatggcctgtttacatgtcaactaaaaatacaattctaaaacagtacgatggaagatttaaagattattccaaga

SEQ ID NO: 207726 - DNA, 598 bp, Unknown
  Bacterial polypeptide expressing nucleotide sequence isolated from the Sargasso Sea
tatggcaaaattaaaagtaaaaaatccggtagtagagttagacggcgacgaaatgaccagaattatatggtcatttataaaagataagcttattaaaccatatcttgagatagatcttaaatactatgaccttgggatggaaagtagagataaaactgatgacaaaattactgtggatgcagcaaatgcgatcaaaaaattcggcgtaggagtaaaatgtgcaacaattacacctgacgaggctcgtgtaaaagagtttaaactaaagaaaatgtggagatcgccaaatggaactattagaaatatcttagggggtacagtttttagagagccaatcatttgtaagaatattcctaaattagtccctggttggacccagccgattgtaataggaagacatgctttcggtgatcaatatagagctactgattttctcatacctggtgaaggtaatttagaagttaaatggacttcaaaggatggaaaagataaaaaagagtttaaggtttttgattttcccggatctggaactgctcttacaatgtacaatctagatgattctataagaaactttgcaagagcatgtatgaactacggt

SEQ ID NO: 207727 - DNA, 964 bp, Unknown
  Bacterial polypeptide expressing nucleotide sequence isolated from the Sargasso Sea
ggcgtgggcgtgaaatgcgccacgatcactcccgatgaggcgcgggtcgaggaattcggtctgaagaagatgtggcgcagccccaatgggacgatccgcaacatcctgggcggcgtggtcttccgccagccgatcatctgccgcaacgtgccccgcctggtgcccggctggacctcgcccatcgtggtgggccgccatgccttcggcgaccagtacaaggccaccgatttcaccttccccggcaagggccagctgacgatgaaattcgtcggcgaggacggcaccgagatcgagaaggtggtctatgacgccccctcggccggggtcttcatggggatgtacaacctcgaccagtcgatccgcgacttcgcccgcgcctcgttcaactacgggctcaacctcggctggccggtctatctgtcgaccaagaacaccatcctcaaggcctatgacggccgcttcaaggacatcttccaggaggttttcgaggaagagttcgaagagcagttcaaggccaagaagatctggtacgaacaccgcctgatcgacgacatggtcgcctgcgcgctgaaatggaacggcaagttcgtctgggcgctgaagaactacgacggcgacgtgcagtccgacaccgtggcccagggcttcggctctctgggcatgatgacctcgcagctgatgacgccggacggcaagatcatcgaggccgaggcggcccatggcacggtgacgcgccactaccgccagcaccaggagggcaagtcgacctcgaccaactcaatcgcctcgatctacgcctggaccggcgggctgaagcaccgcgccaagctggaccagaacaccgcgctgatggcctttgccaccacgctggaaaaggtcgtggtggaaacggtcgagaacggcttcatgaccaaggatctggcgctgctggtcggccccgatcagggctggctgacgacgatgc

SEQ ID NO: 207728 - DNA, 673 bp, Unknown
  Bacterial polypeptide expressing nucleotide sequence isolated from the Sargasso Sea
tataatttagataactctataaaagattttgctaaagcttgtttaaattatggtttagtgaggaagtggccagtttatttttcaactaaaaatacaattttaaaagcatatgatggaagatttaaagatatatttgaagaagtttatcaaaacgaatttaaagataaattcgataaagtaggtataacttatgaacatagattaatagatgatatggttgcttgtgcgatgaaatggaatggaaaatatatttgggcttgtaaaaattatgatggagatgttcaatcggatactgttgctcaaggttatggttctttgggattgatgacaagtgttctaagaactcctgatggaaaaattgctgaggcggaagccgctcatggaactgtaactaggcattatagacagcatcaagcaggaaaagaaacgtctacaaaccctatagcctctatctttgcttggacgagaggtttatctcacagaggaaatcttgatggtaatcaagaacttattaaattttcagaagctcttgaaaaagtttgtattgaaacagttgaaaacggttctatgactaaggatttagcaatattaatcagtaaagatcaaaaattcttaacaactaatcaatttttagaggcgataaactccaaccttaaaaagaaacttaattaat

SEQ ID NO: 207729 - DNA, 907 bp, Unknown
  Bacterial polypeptide expressing nucleotide sequence isolated from the Sargasso Sea
ggaggaacagtctttagagaaccaattatttgttcaaacattccaaaacttgttccgtcatggtctgatcctgttgttataggaagacatgcttttggagatcaatacagagcaactgactttaaggttcctggaaaaggaaaaatggaagttaagtggacatctgaagatggcaacaaagagataaaatatgaagtttttaattttacaggtccgggtgtagcactttctatgtataacttagataaatcaattgaggattttgcaagatcttgttttagctatggattaattaaaaagtggccagtttatctttctacaaaaaataccatattaaaaaaatatgatggaagatttaaggacatctttgaggaggtatttaataaagaatttaaaaaaaaatttgaggaattaaaaattacttatgaacatagattgattgatgacatggtagcatgtgcaatgaaatggagtggtaaatatatttgggcctgtaaaaattatgatggtgatgtacaatctgatacaatggctcagggttatggctcattaggcctgatgacaagcacattattaacccctgatggaaaaattatggaagctgaggcagctcatggaacagtaacaaggcattatagaatgcatcaacagggcaaagaaacttctactaatcccatagcttcaatttttgcatggacaaggggtttggctcatagaggaaaattagataacaataatgaattaattgaattcgcaaatactattgaacaagtttgtattgaatgtgtagagggtggatttatgactaaagaccttgcaatattagtcggaccctcaagcaaatatcttacaactaatcaatttttagatgtaattgatcaaaaattaaagaagaaattaaattaac

SEQ ID NO: 207730 - DNA, 805 bp, Unknown
  Bacterial polypeptide expressing nucleotide sequence isolated from the Sargasso Sea
aatttatggtaatgatgaatggttgccagatgaaactcttcaagcttgtaaagattacaaagtttcaattaaaggtccgttaaccactcctgttggtggtggtattcgttcattaaacgtggctataagacaaaaattagatctatatgtatgtttgagaccagtgaagtattttgatggcactccaagtccagttagacgccctgatctagtagatatggtgatttttagggaaaactcagaggatatatatgcaggtgttgagtttgaatccaatacagatgcagcaaacaagttaattaaagtgcttcaagatgactttggggtagaaaaaataaggtttacagagaattgtggaataggaatcaagcctgtttcagaagaggggacaaagagattagtcagaaaagcttatgaatatgctattcagaatgaaaaagattctgtaactctgattcacaaaggaaatattcagaagtttacagaaggcgccttcatggattggggttatgagctagcacgagaagaattcggcggagagcctcttgatggcgggccttggcatacatttaaaaacccaaataccggtaaagatatcattgttaaagatgtaatctgtgatgctttcttgcaacagtgtcttttaagacctgcggattacgatgttttagcaacaccgaatcttaatggcgattatctttcagatgctcttgctgcacaagttggtggaattggaatagctcctggtgcaaacttaggtgatgaagttgccgtatttgaagcgacacatggaactgcaccaaaa

SEQ ID NO: 207731 - DNA, 638 bp, Unknown
  Bacterial polypeptide expressing nucleotide sequence isolated from the Sargasso Sea
atcttgtatgaattatggactaaacagaaaatggcctgtttatctttcaacaaaaaatacaattctaaaaaaatatgatggtagattcaaagatttgtttcaagaaatttatgaaaaagaatttaaagaaaaatttgaagaaagaaaaatcacttatgaacatagacttattgacgatatggtagcgtgtgcattaaaatggaatggaaattacatttgggcatgcaaaaattatgatggagatgttcaatctgacacggtcgcacaaggatttggttctttaggtttaatgactagtgtacttatgacacctgatggtaaaactatagaagcagaagccgcacatggaactgtaactagacactaccgattacatcaagaaggtaaagaaacttcaactaatccaatagcatctatttttgcttgggcaagaggtctttatcatagaggaaaaatagatggtaatgaagatttaaaaaagtttataaaaactctagaaaaagtttgtatagaaacagtagaaaatggatcaatgactaaagatttagcaatgttaattggaccaactacaaaatatctaaataccaatcaattccttagtagtattgatggaaatttgaaaaaaaaattaaactaaa

SEQ ID NO: 207732 - DNA, 406 bp, Unknown
  Bacterial polypeptide expressing nucleotide sequence isolated from the Sargasso Sea
tatgatggagatgtgcaatcagatactatggctcaaggttatggatctttaggattaatgacaagtacattattaaccccagatggaaaagtaatggaagcagaagctgctcatggaacagttactagacattatagaatgcatcaacaaggaaaagaaacttcaaccaatcctatcgcatcaatttttgcttggactagagggttagcccatagaggtaaattagatagtaatgaggaactaatcaaatttgcacaaatacttgaaaaagtttgtattgaatgcgtagaaaatggttctatgactaaagatttagctatccttgttggtccaaatagtaaatttttaactacaaatcaatttctagatgaaattgatggtaatttaaaaaagaaattaaattaaa

SEQ ID NO: 207733 - DNA, 784 bp, Unknown
  Bacterial polypeptide expressing nucleotide sequence isolated from the Sargasso Sea
acaataagaaatataattggaggaacggtatttagagagccaattatttgtaaaaatattcctaaacttgtgccctcttggacagatccagtaataattggaagacatgcatttggagaccaatatagagcaactgattttaaagttcctggaaaaggcaaaatggaagtcaaatggacatctgaagatggtaaagatgaaattaaacatgaggtatttaatttttcaggtcctggtgttgccttatcaatgtacaatttagataagtcaatagaagactttgcaagatcttgttttagttatgggttaattaaaaaatggcctgtttatatgtcaactaaaaatacaattctaaaacaatatgatggtagatttaaagatattttccaagaaatttttgacaaagaatacaaaagtgattttgaaaaaaataatttaacttacgaacacagattaattgatgacatggttgcatgtgcaatgaagtggagtggtaagtatatttgggcatgcaaaaattatgatggagatgttcagtctgatactatggctcaaggttatggatctttaggattaatgacaagcacattgttaaccccagatggaaaaataatggaagcagaagctgcacacggtacagtaacaagacattataggatgcatcaacaaggaaaagaaacctcaacaaacccaatagcatctatttttgcttggacgagaggattagttcatagaggtaaattagataataataacgaactaattaaatttgcaaagactttag

SEQ ID NO: 207734 - DNA, 484 bp, Unknown
  Bacterial polypeptide expressing nucleotide sequence isolated from the Sargasso Sea
atgtctaaaattaaagtaaaaaatccagttgtagagctagatggtgatgaaatgacccgaataatatggtcatttataaaagagaaattaatcaaaccatatctagatatagagctaaaatactttgatcttggtatggaaaatagagataaaactaacgatcaagtaacaattgattgtgcaaaggcaattcaaaaatttggagctggtgttaaatgcgcgacaataactccagatgaagctcgtgttaaagaatttaaattaaaaaaaatgtggaggtctccaaatggaacaataagaaatatagttggtgggactatttttagagagccaataatttgtaaaaatgttcctagattagtaccacactggactgatagcgttatagttggaagacatgccttcggagatcagtatagagcaacagattttaaggttcctggaaaaggtaaaatgacagttaaatgggagtcagaggatgaaa

SEQ ID NO: 207735 - DNA, 505 bp, Unknown
  Bacterial polypeptide expressing nucleotide sequence isolated from the Sargasso Sea
atttaaagaaagagaaataacttatgaacatagacttatagacgacatggtagcatgcgctatgaagtggaatggaaactatatttgggcatgtaaaaactatgatggagatgtgcaatctgatacagttgctcaaggatttgggtctttgggccttatgagtagtgttctaatgacacctgatggaaatactatagaggctgaggctgcacatggaactgttactagacattatagactgcatcaacaaggaaaagaaacatcaacaaatccaatagcgtctatatttgcatgggcaagaggtctttatcatagaggaaagatggataataacgaggaacttaaaaaatttgtaaaaactttagaaaaagtatgcattgaaacagttgaaagcggcttaatgacaaaagatttagcaatcttggttggtccttcaagtaaatatcttacaacaaatcaatttctagatgtgattgatggaaaccttaaaaataaactaaattaa

SEQ ID NO: 207736 - DNA, 811 bp, Unknown
  Bacterial polypeptide expressing nucleotide sequence isolated from the Sargasso Sea
atgaaattcgaacatatcagtgagcctaaaaatggttcaaaaattacagtagataaatcaggcaaattaaatatcccagacaatccaattattccctttatagaaggagacggtattggttctgatattacacctgcaatgatacaagttgtggacagtgcagtagaaaaatcttatgaaaataaaagaaaaatagaatggatggaaatatattgtggagaaaaatccacggtagtttatggagaagataattggttgccacctgaaactcttaaagcattagaaacttatttagtaggtataaaaggtcctttaactacacccgtaggaggtggaataaggtctcttaatgttgctttaagacaagaattagatctatatgtatgtcaaagacctgttaggtattttgatggagtaccaagtccagtaactaatccagaaaagacagacatggttatctttcgtgaaaactctgaagatatatatgcaggaatagaatgggaagccggatctgatgaagctcaaaaagttataaaattccttactgaagaaatgggcgtaactaagattagatttgctgaagattgcggtattggtgtgaagccagtttctaaacaaggaactgaacgcctagttgataaagcaattcgttacgctatagataacgatagagattcagtaactttagttcataaaggtaatattatgaagtttactgaaggatcgtttaaagattggggctatcaatatgccgcgtcagaatatggcgcagtagaattagatggcggcccttggcattcacttaagaatc

SEQ ID NO: 207737 - DNA, 610 bp, Unknown
  Bacterial polypeptide expressing nucleotide sequence isolated from the Sargasso Sea
aaatggccagtttatctctctactaaaaatacaattttaaaaagatacgatggaagatttaaagatatttttgaggaagtttttgaaaaggaatttaaagatagatttaatcaaaataaaattacttatgagcatagattaatagatgatatggtagcatgtgcaatgaaatggcatggaaaatacatttgggcatgcaaaaattatgatggagatgtacaatcagatacagttgctcaaggatatggatctttaggtttgatgacaagtgttttgcttgctcctgatggcaaaacaatggaagctgaagctgcacatggaacagtaactagacactttagaatgcatcaacaaggtaaagaaacatcaacaaatcctattgcatctatttttgcatggacaagaggattggctcatagaggaaaattagatggaaatgaggaattaataaagtttgcagaaacacttgaaaaagtatgtgtcgattgtgttgaagaaggttcaatgactaaggacttggctatattgataggtccatcaacaaaatatctaacaactaatcaatttttagatactttggatggtaagttgagacagaaattaaattaaa

SEQ ID NO: 207738 - DNA, 901 bp, Unknown
  Bacterial polypeptide expressing nucleotide sequence isolated from the Sargasso Sea
gaccttagtatgaaaagtagagacgataccaatgatcaaataacagtagattgtgcaaaagcaataaagaaaaatggagtgggtattaagtgtgcaacaataactgctgatgaattaagagtaaaagaatttaatttaaagaaaatgtggagatctcctaatggaacaataagaaatattataggaggaacggtatttagagaaccaattatttgtaaaaatattccaaaacttgttccatcttggacagatccactcattattggaagacatgcttttggagatcaatatagagcaacagattttttagttcctggaaaaggtaaactagaaattaaatggacttccgaagatggaaaagatcaaaaaaattatgaagtatttaattttccaggacctggaattgcattgtcaatgtataatttggataagtctattgaagactttgcaagatcttgtttcaattatggtttaataaaaaaatggccagtttatctatcaacaaaaaatacaattttaaaaaaatatgatggaaggtttaaagatatatttcaaaaaatatttgatgaagattttaaaaccgagtttgataaaaataatataacatatgagcatagattgattgatgatatggttgcttgtgcaatgaagtggagtggaaaatatatctgggcatgtaaaaactatgatggagatgtacagtcagatactgttgctcaaggatatggttcattaggtttaatgaccagtgtgttattagctccagatggtagaacaatggaagctgaagcagctcatggtacggtaactagacactttaggctacatcaacaaggaaaagaaacttcaacaaatcctattgcttctatttttgcttggactagaggatggctcatagagg

SEQ ID NO: 207739 - DNA, 616 bp, Unknown
  Bacterial polypeptide expressing nucleotide sequence isolated from the Sargasso Sea
tatgagcaaaattaaggtcaaaaacccagtagtagagttggatggcgatgaaatgacaagggttatatgggaatttatcaagaggaaattgatccttccatatctggaccttggaattgaatactacgatcttggaatgaaaagcagagacgatacatcagatcaaatcacaatagattgtgcaaatgctattaagaaaaatggcgttggtataaaatgtgcaacaatcactccagatgaagctcgagtaaaagaattcaacttaaaaaaaatgtggcgttctcctaatggaactataagaaacattattggtggaactgtatttagagaaccaattatttgtaaaaatgttccaaggctagtaccatcgtggacagatcctgtaattataggaagacatgcttttggtgatcagtatagagcaactgactttaaagttcctggaaaaggaaaactagaagtaaaatggacttcagaagatgggaaagataataaaagttatgaggtgtttaattttcctggacctggagttgcactttcaatgtataatttagataaatcaatcgaagactttgcaaggtcatgttttaattatgggctaataaaaaaatggcct

SEQ ID NO: 207740 - DNA, 952 bp, Unknown
  Bacterial polypeptide expressing nucleotide sequence isolated from the Sargasso Sea
aaaaacccgattgttgagcttgatggagacgaaatgacgagggttatatgggaatttatcaaaaaaaaacttattaaaccctatttggagttagatatcaaatattacgacttaggaattaaaagtagagacaagacattagatcaaatcacaatagattgtgcaaatgctattaaaaaatacaacgtaggtattaaatgcgcaactattactcctgacgaagggcgagtagaggaatttaatttaaaaaaaatgtggagatctcctaatggaacaataagaaatattcttggtggcacagtctttagagaaccaattttatgtaagaatattccgaaacttgtgcctagttgggaaaatccaatttgtattggaagacatgcttttggagatcaatatagagctactgattttcaagttccaggaaaaggtaaactagaaattaagtggacatctgaagatggtaaagaaaaaaaagaatttgaagtatttaattttccaggaccaggggttgctatgtcgatgtacaatttagatcaatcaataaaagattttgcacgggcttgtatgaattacgggcttaacagaaaatggcctgtgttcttatcaacaaaaaatacaattctaaaaaaatatgatggtagatttaaagatatatttcaagaaatatatgaaaaagaatttgtagaaaaatttaaagatagaggaattacatatgaacacagacttatagatgacatggtagcttgcgctatgaaatggaatggaaattatatatgggcttgtaaaaactatgatggtgatgttcagtcggatactgtagcccaaggttttggttctttaggattaatgtctagcgtattaatgagtccagatggaaaaactatagaagcagaagcagcacacggaactgttacaagacattatagaatgcatcaacaaggaaaagaaa

SEQ ID NO: 207741 - DNA, 436 bp, Unknown
  Bacterial polypeptide expressing nucleotide sequence isolated from the Sargasso Sea
aatggaaattatattctgggcatgcaaaaactatgatggagatgttcaatctgatacagtggctcaaggatttggatctttaggtcttatgacaagtattttgatgtctccagatggtaaaaccatagaatcggaagcagcacacgggactgtaacacgacactacagattacatcagaaaggtaaagaaacatcaacaaaccccatagcttcaattttcgcatgggcaagaggtctgtatcatagaggaaagttagacgaaaacgataaattgaaaaaatttgtaaagactttagaaaaagtttgcatacgaactgttgagaatggtcatatgacaaaagatctagctgtattaataggaaaaaatcaaaaatatctaactacaaatcaattcctggaagcaatagattctaatttaaagaaaagtcttaaataa

SEQ ID NO: 207742 - DNA, 427 bp, Unknown
  Bacterial polypeptide expressing nucleotide sequence isolated from the Sargasso Sea
gacaaaataacaattgaatgtgctaatgcaattaaaagaaatggtgtcggtattaaatgtgcaaccatcacacccgatgaagctagagtaagagaatttaatcttaaaaaaatgtggagatctccaaatggtacaataagaaatataattggaggaactgtttttagagaacccataatttgtaaaaatattccaaaacttgtgccctcatggacagatccattgatcataggtagacatgcatttggtgatcaatacagagcaacagattttacagtacccggaaaaggtaagttagaaatcaaatggactgctgaagatggttctgatgagagaaagtatgaagtctttaattttccaggaccaggaatagctttatctatgtataatttagataaatcaatagaagactttgctagatcttgct

SEQ ID NO: 207743 - DNA, 427 bp, Unknown
  Bacterial polypeptide expressing nucleotide sequence isolated from the Sargasso Sea
atgcccaaaattaaagtaaaaaacccagtagtagagctcgatggagacgaaatgactagaattatatgggactttattaaaaaaaaactaatcctgccttatttagaaatagacataaaatattacgatcttggtattaaaaatagagataaaactttggataaaattacaattgagtgtgctaatgctataaaaaaaattggagtgggtatcaagtgtgcaacaattactcctgatgaaaatcgtgtaaaagaatttgatttaaaaaaaatgtggagatctcctaatggaacgataagaaatattttgggcggaactgtttttcgtgaaccaataatttgtaaaaatataccaaaattagttccaagttggacaaatccaatagtgattggaaggcatgcttttggagatcaatatagagcaacag

SEQ ID NO: 207744 - DNA, 685 bp, Unknown
  Bacterial polypeptide expressing nucleotide sequence isolated from the Sargasso Sea
tgctctttcaatgtacaatttagataattctattaaagattttgctagagcttgcatgaattatggtctagtaagaaaatggcctgtttacttttcatctaaaaatacaattttaaaagcttatgatggaagatttaaagatatttttgaagagatttttcaaaaggaatttaaaattaaatttgatgaagcaggtataacttatgaacatagattaattgatgacatggttgcttgtgctatgaagtggagtggaaaatatatttgggcctgtaaaaattatgatggagatgttcaatctgacactgttgcacaaggatatggctcgctgggtttaatgacaagtgttcttagaactccagatggtaaaatagctgaagctgaggcagcgcatgggactgtgactaggcattatagacagcaccaagcaggtaaagaaacctctacaaaccctattgcatctatatttgcttggacaagaggtttgtctcataggggtaaccttgatggaaatcaggacttaattaaatttgcagaatctcttgaaaaagtttgtatagaaactgttgaaagcgggtcaatgactaaagatttagcaatattaattagtaaagatcaaaaatatttaacaactaatcaatttttagaagcaatagactcgaatctcaaaaaaaaacttaactaa

SEQ ID NO: 207745 - DNA, 912 bp, Unknown
  Bacterial polypeptide expressing nucleotide sequence isolated from the Sargasso Sea
gggagtgggtattaaatgtgcaacaataactgctgatgaattgagagtaaaagagtttaatttaaagaaaatgtggagatctcctaatggaacaataagaaatattataggaggaacggtatttagagaaccaattatttgtaaaaatattccgaaactggttccatcttggacagatccattaattattggaagacatgcttttggagatcaatatagagcaactgattttttggttcctggaaaaggtaagctagaagttaaatggacctcagaagatggaaaaaatcaaaaaaattatgaagtatttaattttccggggcctggaattgcattatcaatgtataacttggataagtctattgaagactttgcaagatcttgtttcaattatggattaataaaaaaatggccagtttatctttcaacaaaaaatacaattttaaaaaaatacgacggaagatttaaagatatttttcaaaaagtatttgatgaagattttaaaactgaatttgataaaaataatataacttatgaacatagattgattgatgatatggttgcttgtgcaatgaagtggagtggaaaatatatttgggcatgtaagaactatgatggagatgtgcaatcagatactgttgctcaaggatatggttcattaggtctaatgactagtgttttgttagctccagatggtagaacaatggaagctgaagcggctcatggtactgtaactagacactttaggctacatcaacaaggaaaagaaacttcaacaaatcctatagcttctatttttgcttggactagaggattggctcatagaggaaaattagatagtaatgatgaattgataaaattctcaaatactttagagaaagtttgtatcgattgtgtagagaatggatcaat

SEQ ID NO: 207746 - DNA, 418 bp, Unknown
  Bacterial polypeptide expressing nucleotide sequence isolated from the Sargasso Sea
gcatgcaaaaattatgatggagatgtccaatctgatactgtagcacagggctatggttctttaggtctaatgactagcgtgcttagaaccccagatggtaaaatagcagaagctgaagcagcccacgggactgttacaaggcattataggcagcatcaacaggggaaagaaacatcgacaaatccaattgcatctatttttgcatggaccagaggtttggctcatagaggtcaattagacagtaatgatgaattaattaaattttcagataccctagagagagtttgcattgagacggttgaaaatggatcaatgactaaagatttggctattttgattagtgaaagtcaaaaatatcttacaacaaatcaatttttagaagcaataaattctaatcttaaaaaaaagcttaactaat

SEQ ID NO: 207747 - DNA, 785 bp, Unknown
  Bacterial polypeptide expressing nucleotide sequence isolated from the Sargasso Sea
agtcgaaaaaacttacaaaaatgatagaaagattatttggatagaagttttagcaggacaaaaagcttatgatacaacttctgagtggcttcctgataaaactttagaaacatttaatgaatatggtgtgggtataaaaggtccattaactacacctgtaggtgaaggaataagatctatcaatgttgcaataagacaagagcttgatttatatgtttgcttgaggcctatcaaatatttcaaaggcattcaaactcctacaaaaaatccacaagatgtagatatcactttatttagagaaaacactgaagatgtctatgcaggaaaagaactagaaaattcctcagaagacgttgaaaaacttaataattttttaaaacaggaatttggatgggatataagaatagacagcgggattggaataaaaccaatatctcagactgcttctgaaaggctaataagagcagcactcaattatgcagtggaaaatgataaaaaaaatgttgctttagtgcataaaggaaacattatgaagtttactgaaggtgcatttagaaaatggggttacgaccttgtaaagtcggagttttcagatgttgcagtttcatgggaggattgtggtggtgatcctggagataaaatattagtacaagatgttattgcagatgcatttttacagcaaatcctaattaaaccacaaatgtttgatgtaattgctacaactaatctcaatggagattatgcttctgacgccttagcagctcaaatagggggcattggtatca

SEQ ID NO: 207748 - DNA, 742 bp, Unknown
  Bacterial polypeptide expressing nucleotide sequence isolated from the Sargasso Sea
gatggaagtgatggatttataaaagatgtatatgagtttgaaaaagaaggaatagcactttcaatgtataaccttgatcaatcaattattgattttgctagagcttgttttacttatggtctaaacttgggatggcccgtctacttgtctacaaaaaatacaattttaaaagtttatgatgggagatttaaagatatatttgaaaatatttttcaaactgagtttgcacaaaaattcaaacaaaaaaatatagtctatgagcatagattaatagatgatatggttgctactgcccttaaatgggaaggtaattttatttgggcttgcaaaaactatgatggtgacgtccaatcggactctgttgctcaaggatatggttcacttggactaatgacaagtgtacttatgacacctgatggaaaaactgtagaagctgaagctgcgcacggaacagtaactagacattatagaaatcaccaaaaaggtttagaaacatctacaaatccaatagcttcgatatttgcatggtctagaggactttatttcagaggaaagtttgataaaaatgataatttgatacaattcaccaaaaaacttgaagaaacttgtattgagactgtcgagtctggaaaaatgactaaagacctggcgattttgattaattcagatcaaaattggttaaatacagaggattttcttagaacattaaaagaaaatttggaaaataaattaaaattctagg

SEQ ID NO: 207749 - DNA, 511 bp, Unknown
  Bacterial polypeptide expressing nucleotide sequence isolated from the Sargasso Sea
atgagcaaaatcaaggtaaaaaacccggttgtcgagctggatggcgatgaaatgactcgtattatatgggagttcatcaaaaataaattaatcctaccatatttagatcttggtattgaatattacgatttaggcatgaaaagcagagataatactgatgatcagattacaatcgattctgcgaatgctattaaaaaaattggtgttggaattaagtgtgcaacgattacccctgatgaagcaagagtagaagaatttgatttaaaaaaaatgtggagatctccaaacggaactataagaaatataattggtggaacagtatttagagaaccaattatttgtaaaaatattccaaaacttgttccctcttggactgatccagtgattattggaagacatgcatttggtgatcaatatagagcaacagattttaaagttcctggaaaaggaaaaatggaagtgaagtggacatcagaagatggaaaagatcaaattaaatatgaagtattta

SEQ ID NO: 207750 - DNA, 858 bp, Unknown
  Bacterial polypeptide expressing nucleotide sequence isolated from the Sargasso Sea
tgttggaggaactatttttcgagaaccaataatttgtaaaaatgtacctagacttgttccgcattggactgaaagtgtaatagttggaagacatgcttttggtgatcaatatagagcaacagattttaaggttcctggaaaaggtaaaatgacaattaagtgggagtcagaagatggaaaaaagaaaatcgagcatgaagtttttaaattcaacgattctggaattgctttatcaatgtataatttagatagttcaataagggattttgctagagcatgtttaaattatggtttggtaagaaaatggccagtttatttttcatcaaaaaatacgatcttaaaagtatacgacggaaggtttaaggatatatttgaagatatttatcaaaaagagtttaagaaaaagtttgatgaaactggaattacttatgaacatagattaattgatgacatggttgcatgtgcaatgaagtggagtggtaaatatatttgggcatgtaagaattatgatggagatgttcaatctgatacggttgctcaaggttatggttcactaggtttaatgaccagtgtgcttagaaccccagatggtaaaatagcagaagctgaggcagctcatgggactgttacaagacattataggcaacatcaacaaggtaaagaaacatcaacaaatccaattgcatctatttttgcatggacaagaggtttggctcacagaggtcaattagatgataatgacgaattaattaagttttctaacactctagagaaagtttgcattgaaacggttgaaagtggattaatgactaaagacttggctattttaattagtaaaagtcaaaattttcttacgac

SEQ ID NO: 207751 - DNA, 724 bp, Unknown
  Bacterial polypeptide expressing nucleotide sequence isolated from the Sargasso Sea
ataaaatatgaggtatttaatttcactggtccaggggtagcgctttcaatgtataatttagacaaatctattcaagactttgcaagatcttgttttagttacgggcttatgaaaaaatggccagtttatatgtctaccaaaaatacaatccttaaacaatacgatggtagatttaaagatattttccaagaaatatttgaaaatgagtttaaagaagaatttgaaaaaaataatttaacttatgagcacagattaattgacgacatggtagcatgtgcaatgaaatggagtggtaaatatatttgggcttgtaaaaattatgatggtgatgtgcaatcagatactatggcacaaggttatggttcgttgggattaatgactagtacacttcttaccccagatggaaaaattatggaagcagaagccgctcatgggactgtaacgagacactatagaatgcatcaacaaggtaaagagacttcaacaaatcctatcgcatctatttttgcatggactagaggtctagcgcatagaggaaaactagatagtaataatgaattaattaaatttgcacaaacaatagaaaaagtttgtattgagtgtgttgaaaacggggctatgacaaaagatttagcaatactaattgggccttcaagtaaatacttaacgactaatcaatttttagatgaaattgatggtaaactaaaagcgaaattaaattaaa

SEQ ID NO: 207752 - DNA, 706 bp, Unknown
  Bacterial polypeptide expressing nucleotide sequence isolated from the Sargasso Sea
aatatagaatggatggaggtttattgtggcgagaaggctacaaaagtatattcaaaagatgattggttgcctgatgaaacaatagaagcccttaaagaatatgtaataagcataaaagggccattaacaacaccagttggcggtggtattagatcacttaatgtttcacttcgacaaatattagatctatatgtttgcctaagaccaataagatattttaatggagttccatcaccagttaaaagaccacaagatactgatatggttatttttagggaaaattctgaagatatatattgtggtgttgaatttgaaggcaattcaacagcctctaaaaatttaataaaaactcttaaaaaagactttaaagttaagaaaattagatttgataaaaatgttggtataggtatcaagcctatatctgaacaaggcacttcacgtttagttaaaaaggcaattgattatgctatagacaataatagatcttctataaccttagttcataaaggtaatattatgaagtatacagaaggtgcttttagggattggggttatgaaattgcaaaaagagattatggaggcattgaaattgatgatggtccatggcaggaaataataaatccaaataatggaaagaaaattgtaattaaagacgtaatatgtgatgcatttttgcaacaaattctaacaagaccaactgaatatg

SEQ ID NO: 207753 - DNA, 482 bp, Unknown
  Bacterial polypeptide expressing nucleotide sequence isolated from the Sargasso Sea
cgaacaccgtttaatagatgacatggtggcatgtgctatgaaatggagtggaaagtacatttgggcttgtaagaactatgatggagatgtccaatctgacactgtagctcaaggatatggttcacttggattaatgactagtgtacttagaactccagacggaaaaatagctaaagctgaagcagcccacggaacagtgacgagacactatagattacaccagcaaggaaaagaaacttctacaaatccaattgcatcaatttttgcttggactagaggtctgtctcataggggaaaacttgatggtaataatgagttaattaaattttcagatgctcttgaaaaagtttgtatagaaaccgtggagagtggatctatgacaaaagacctggctatattaattagtaaaagccagaagtttttaaccacaaatcaatttttagaagcaatagattctaatctaaaaaagaaacttaagtaat

SEQ ID NO: 207754 - DNA, 412 bp, Unknown
  Bacterial polypeptide expressing nucleotide sequence isolated from the Sargasso Sea
gatgcttttcttacaacaaattttattaagaccaaaagaatactcggtcattgctacaatgaatcttaatggtgactatatttcagatgcattggcagctattgttggcggtattggaattgcacctggagcaaatattaattatcaaagtggtcatgctatttttgaggcaactcatggaactgctccaaaatatgctggtttaaataaagtaaatcctggttctgtaatactttctggatcaatgatgttagagcatttaggatggaatgaggctaaggatcttatacataaaggtttaactaaatctattgaatcaggaaaagttacctatgattttgaacgattaatggataatgctactctattgtcttgttcagattttgctcaagagattgtaaataatatgtaa

SEQ ID NO: 207755 - DNA, 812 bp, Unknown
  Bacterial polypeptide expressing nucleotide sequence isolated from the Sargasso Sea
gaggcaagagttgaagaattttatttaaaaaaaatgtggagatctccaaatggtaccataagaaatattattggtggtactgtttttagagagcctattatttgtaaaaatattccaaaacttgtgccatcttggacagatcctgtggtgattggaagacatgcattcggtgatcaatatagagcaactgactttaaagtacctggtaaaggtaaaatggaagtaaaatggacatctgaagatggaaaagatgagataaaatatgaggtatttaattttactggtcctggtgttgccctttcaatgtacaatttagacaaatcaataggtgattttgcacgatcttgttttagctatggattgataaaaaaatggccagtttatatgtctacaaaaaatacaattctcaaacaatatgatggaagatttaaagatatatttcaggaaatttttgacaatgaatataaagaggattttgaaaaaaataatttaacatatgagcatcgattgattgatgacatggttgcatgtgcaatgaagtggagtggtaaatatatttgggcatgtaaaaattatgatggtgatgttcaatcagataccatggctcaaggatatggttctttaggtttaatgactagtactttgttaactccagatggaaaagtaatggaagcagaagctgctcatggaacagttactagacattatagaatgcaccaacagggtaaagaaacttctacaaatccaattgcctctatttttgcatggactagagggttagctcatagaggaaaactagataacaatgatga

SEQ ID NO: 207756 - DNA, 889 bp, Unknown
  Bacterial polypeptide expressing nucleotide sequence isolated from the Sargasso Sea
atgaaattcgaacatataagagaaccaaaaacaggttctaaaatcaccgtagacaaatcaggaaatttgattattcccgataatcccattatcccttttattgaaggagatggtattggttcagatattactcctgcaatgattcaggtagttgacagtgctgttgaaaaatcttacgaaggcaaaagaaaaattgaatggatggaaatatattgtggagaaaagtctacagaagtttatggtaaagacaattggttaccctctgaaacattaaaagcattggaaacttacctagtaggaataaaagggccccttactacacctgttggaggaggtataagatcactgaatgttgctctaagacaagagttagatctatatgtatgccaaagacctgtcagatatttcgaaggtgtccctagtcctgtaactaatcctgaaaaaactgacatggttattttcagagaaaattcagaagatatctatgcaggcatagagtgggaagcaggttcagaagaagctcaaaaggtaatcaattttttaacaaaagaaatgggtgtcacgaaaattcgattcagtgaagattgtggaataggcgtaaaaccagtttctaaacaaggtaccgaacgtttagttgataaagctattcagtatgcaatagcgaatgatagagattctgtaactcttgttcataaaggaaatattatgaaattcactgaggggtcctttaaagattggggttatcagtttgctgcatcaaaatacggagctgttgaattagacggaggtccttggcattccttaaagaatcctgatactggaagagaaattataattaaagatgttatagcggatgcttttcttcaacaaaattttaacaagaccctga

SEQ ID NO: 207757 - DNA, 756 bp, Unknown
  Bacterial polypeptide expressing nucleotide sequence isolated from the Sargasso Sea
aatgtggagatctcctaatggaacaattagaaatataattggaggaacagtatttagagaaccaattatctgttcaaatattccaaagctagttccctcatggactgatcctgtgattattggaaggcacgcatttggtgatcaatacagagcaacagattttaaagttcctggaaaaggaaagatggaagtcaaatggacatctgaagatggtaaagatgaaataaaatacgaggtctttaatttcactggtccaggtgttgcactttcgatgtataatttagacaaatctattcaagattttgcaagatcatgttttagttacggcttaattaaaaagtggccagtatatatgtctacaaaaaatacaattttaaaaaaatatgacggtagatttaaagatatatttcaagaaatttttgacaaagaatataaaaaagattttgaaaaaaacaaattaacatacgaacatagattaattgatgacatggttgcgtgtgcaatgaagtggagtggtaaatatatctgggcatgtaaaaattatgatggtgatgttcaatccgatactatggctcaaggttatggttctttaggtctaatgactagtacattgttaactccagatggaaaagttatggaagcagaggcggctcatggcacagttactcgtcatttcagaatgcatcaacaaggtaaagaaacatcaacaaatccaattgcatcaatatttgcttggactagaggattagcacacag

SEQ ID NO: 207758 - DNA, 787 bp, Unknown
  Bacterial polypeptide expressing nucleotide sequence isolated from the Sargasso Sea
aatgacttataaaaacattaaagtaccaaaaaaaggtaaaaaaatttgctataaaaagggtaaattagttgtcccatcgaatccaattattccattcatagaaggcgatggaataggtgttgacattactccaccaatgattaatgttgttgatgaagccgtaaagattgcttataacggtgaaaaaaaaattgaatggatggaagtatattgtggtgaaaaagcaaccaaagtatattcgaaagatgactggttaccagatgaaactattcaagctcttaaagagtttgttattagtattaaagggccattaacaacacctgttggcggtggtattagatcacttaacgtttcattaagacaaatactagacttgtatgtttgtttaagaccaattagatactttaatggtgtaccgtcacctgttaaacgacctcaagatactgatatggttatctttagagaaaattcagaagatatatattgtggtgttgaattcgaaggaaattcaaaagaatctaaaaatttagttaatatattaaaaactgatttcaatgtagaaaagattagatttgataaaaatgttggtataggtataaagcctatctctcaagagggaacatcaagacttgtgaaaaaagcaataaactatgcaattgataatgataggagttcagtaactttagttcataaaggcaatatcatgaaatacaccgagggtgcttttagagattggggttatgaaattgcaaaaaatgattataaaggaatagaaattgatgaaggt

SEQ ID NO: 207759 - DNA, 602 bp, Unknown
  Bacterial polypeptide expressing nucleotide sequence isolated from the Sargasso Sea
tgtttatctttcaacaaaaaatacaattttaaaaaaatatgacggtagattcaaagatatttttcaaaaaatttttgaagaagagtttaaaactgaatttgaaaaaaataatattacttacgaacatagattaattgatgatatggttgcttgtgcaatgaaatggagtggaaaatatatttgggcatgtaaaaactatgatggtgatgttcagtcggatactgtagctcaaggatatggttctctaggattaatgactagtgttttgctagctccagatggaaaaacaatggaagcagaggctgctcatggaactgtaacaagacattttagaatgcatcaacaaggaaaagaaacttcaacaaatccaatagcttcaatttttgcatggactagaggattagcacatagaggaaagttagataacaaccacgaattaataaatttctctaatactctagaaaaagtttgtattgattgtgtagaaagcggatctatgacaaaggatcttgcaatattagttggtccttctacaaaatatcttacaacaaatcaattccttgatgaaattgatcgcaatctattaaagcaattaaactagg

SEQ ID NO: 207760 - DNA, 709 bp, Unknown
  Bacterial polypeptide expressing nucleotide sequence isolated from the Sargasso Sea
tttaattttccaggacctggtattgctttatctatgtacaacttagataaatctataatagattttgcacgagcatgtatgaattatggtcttaatagaaagtggcctgtatatctttctactaaaaatacaattttgaaaaaatatgatggtagatttaaagatttatttcaagaagtttatgaaaaagaattcaaagaaaaatttaaagaaagaaaaataacttacgagcatagacttattgatgatatggtagcatgtgcaatgaaatggaacggaaattatatttgggcatgcaaaaactatgatggagatgtacaatcggatacggtagctcaaggatttggttctttaggtcttatgacaagtatgttgatgtcacctgacggtaaaacaatagaatctgaagctgctcatggtacagttacaagacactacagactacatcaacaaggtaaagaaacctcaacaaaccccatagcttctatttttgcatgggcgagaggtctgtatcatagaggaaagctagatggcaacgaagatttaaaaaagtttgtaaaaactctagaaaaagtttgtattgaaacggttgaaaatggatcaatgactaaagatttagctgttcttataggtccctctacaaaatacctaaacaccaatgaatttttagacttattaacaaataatttaagtaaaaagctaaattaaa

SEQ ID NO: 207761 - DNA, 824 bp, Unknown
  Bacterial polypeptide expressing nucleotide sequence isolated from the Sargasso Sea
tcgtaataaaagtgatgatcaagttacaatcgatgcagctgaagcagttaagaaatttggtgttggtatcaaatgtgcgactattacccctgatgaagatagagtaaaagaatttaatttaaaaaaaatgtggcgttcacctaatgggacaataagaaatatattaggtggaactatttttagacaaccaattatatgtaaaaatgttcctagaattataactaactggaacaagccaatagttgtagctaggcatgcttttggagatcaatatagagcaacagatactttaataaaaaaacctggaaaattaaaaatggtttttgaaccaactgatggaagtgatggatttataaaagacgtatatgaatttgaaaaagaaggaatagctctttcaatgtataatcttgatcaatcaattattgattttgctagagcttgttttacttatggactaaacttgggatggcctgtttacttatctactaaaaatacaattttaaaagtttatgatggcagatttaaagatatatttgaaaatatttttcaaactgagtttgctcaaaaatttaaacaaaaaaatattgtttatgagcatagattaatagacgatatggttgctactgcacttaaatgggagggaaattttatttgggcttgcaaaaactatgatggtgacgtccaatcggactctgtagctcaaggatttggttcacttggactaatgacaagtgtgcttatgacacctgatggaaaaactgtagaagctgaagctgcgcacggaacagtaacaaggcattatagaaatcaccaaaaaggttttg

SEQ ID NO: 207762 - DNA, 562 bp, Unknown
  Bacterial polypeptide expressing nucleotide sequence isolated from the Sargasso Sea
agggatattcaaaaatttaccgagggggcgtttagagattggggttacgaacttgcagaagaagagtttgacgcaaagccaattgatggtggtccatggcattcaatgataaatccaaacaacggaaatgaaattattattaaagatgtaatctgtgatgcattcttgcaacaaattcttcaccgacctgcagagtatgatgtgctagcttcaccaaatttaaatggtgactatatatctgatgctttggctgcacaagttggaggcattggaatagcacccggagcaaacttaggggatgaaatagcaatttttgaagcgacgcatggaactgcgccaaaatacgctggacaagatagagtaaatcctggttcgttaattttatctgctgaaatgatgttaaggcatttaggatggaccgaagcagctgatatgattttggttgcaatggaaaaaaccatcaagaaaaaaacagtaacttatgattttgctagattgattgatgatccgattgaagtaagttgttcagattttggcgaacatctaatcaaaaaattctaaa

SEQ ID NO: 207763 - DNA, 890 bp, Unknown
  Bacterial polypeptide expressing nucleotide sequence isolated from the Sargasso Sea
aatgtggagatcaccaaatggaacaattagaaatataattggaggcacggttttcagagaaccgataatttgtaaaaatattccaaagctagttcctagttggacaaacccaatttgtataggcaggcatgcttttggtgatcaatatagagctacagattttcaagttccaggaaaaggtaagttggaattaaaatggacatcagaagatggtaaagaaaaaaaggagttcgaggtatttaattttcctggacctggagttgctctttcaatgtataatcttgatcaatctataagagattttgcaagagcatgtatgaactatggtttaaatagaaaatggccagtttatctctctactaaaaatacaatattgaaaaagtatgatggaagatttaaggatttatttgaagaaatttatgaaaaagaatttaaagaaaaatttaaagaaagagaaatcacatacgaacatagacttatagatgatatggttgcctgtgcgatgaagtggaatggaaattatatttgggcatgcaaaaattatgatggcgatgttcaatctgatacggttgctcaagggtttgggtctttaggacttatgactagtatcttaatgtctccagatggaaaaactatagaatctgaagctgcacatggaactgttacaagacactatagaatgcatcaagagggcaaagaaacttctacaaatcctattgcatctatttttgcttgggcaagaggtttatatcatagaggaaaacttgatggtaacgaagatttaaaaaaatttgtaaaaaatttagaaaagatttgtattgaaactgtggaaaatggttcaatgacaaaagatttagcaattcttataggtccatcaacaaaatacttaa

SEQ ID NO: 207764 - DNA, 982 bp, Unknown
  Bacterial polypeptide expressing nucleotide sequence isolated from the Sargasso Sea
aaaactttacaaaaaatgatagaaagaattaattggatagaagttttagcaggacaaaaagcttatgatacaacttctgagtggcttccagataaaactttagaaacatttaatgaatatggtgtgggtataaaaggtccattaactacacctgtaggtgaaggaataagatctatcaatgttgcaataagacaagaacttgatttatatgtttgcttgaggcctatcaaatatttcaaaggcattcaaactcctacaaaaaacccacaagatgtagatataacattatttagagaaaataccgaagatgtctacgcaggaaaagaactagaaaattcctcagaagatgttgaaaaacttaataattttttaaaacaggaatttggatgggatataagaatagacagcgggattggaataaaacctatatctcggactgcttctgaaaggctgataagagcagcacttaattatgccgtagaaaatgataaaaaaaatgttgctttagtgcataaaggaaacattatgaagtttactgaaggtgcatttagaaaatggggttacgaccttgtaaagtcagagttttcagatgttgcggtttcatgggaggattgtggtggtgatcctggagataaaatattagtacaagatgtaattgcagatgcatttttacagcaaatcctaattaaaccacaaatgtttgatgtaattgctacaactaatctcaatggagattatgcttctgacgccttagcagctcaaataggaggcattggtatcagtcctggaggaaacataaactatgaaaatggaaaagcagtttttgaagcaacacatggtactgctcctaaatatgctggtcaagataaaacaaatccaggatcattaattttgtcaggagtaatgatgtttcgatatatgggttggaatagtgctgctgatctaattgttaagtcaatggagaaaacaattctagaaggaa

SEQ ID NO: 207765 - DNA, 855 bp, Unknown
  Bacterial polypeptide expressing nucleotide sequence isolated from the Sargasso Sea
caaaagaaaaataagctggatggagatttattgtggcgaaaaatcagtaaaaatttatggtaatgatgagtggatgccagatgaaactcttcaagcttgtaaagattacaaagtttcaattaaaggtccgttaaccactcctgttggtggtggtattcgttcattaaacgtggctataagacaaaaattagatctatatgtatgtttgagaccagtgaagtattttgatggcactccaagtccagttagacgccctgatctagtagatatggtgatttttagggaaaactcagaggatatatatgcaggtgttgagtttgaatccaatacagatgcagcaaacaagttaattaaagtgcttcaagatgactttggggtagaaaaaataaggtttacagagaattgtggaataggaatcaagcctgtttcagaagaggggacaaagagattagtcagaaaagcttacgaatatgctattcagaatgaaaaagattctgtaactctgattcacaaaggaaatattcagaagtttacagaaggcgctttcatggattggggttatgagctagcacgagaagaattcggcggagagcctcttgatggggggccttggcacacatttaagaacccaaataccggtaaagatatcattgttaaggatgtaatatgtgacgctttcttacaacaatgtcttttaagacctgcggattacgatgttttagcaacaccgaatcttaatggtgattatctttcagatgctcttgctgcgcaagttggcggaattgggatagctcctggtgcaaacttaggtgatgaagttgctgtatttgaagcgacacatggaactgcaccaaa

SEQ ID NO: 207766 - DNA, 433 bp, Unknown
  Bacterial polypeptide expressing nucleotide sequence isolated from the Sargasso Sea
tgttaaggatgttatcgcagatgcatttttacagcagatactacttcgaccctctgaatatgatgttattgctaccttaaatttaaatggcgattatatttctgatgcgctagctgctattgtaggtggtattggtattgcccctggagcaaatatcaattactcaagtgggcatgctatatttgaagcaacccatggtacagccccaaagtatgcaggaaaagatcaagtcaacccaagttccgtcatcttatctggtgttatgatgttagaatatattggatggcaggaagctgcagatctaatagtaaaaggtatagaaggtgctattagcaacaaaagagttacctacgattttcatagacttatggatggagcaacaaaattaaaatgttccgaatttggatctgagattatttacaatatgtcctga

SEQ ID NO: 207767 - DNA, 813 bp, Unknown
  Bacterial polypeptide expressing nucleotide sequence isolated from the Sargasso Sea
gtaattggaaggcatgcttttggagatcaatatcgtgcaacagattttaaaatacctggtaaaggaaaattgacagttaaatgggagtctgaaaatggtaatgacaaaattgaacatgaagtatttggctttccttcctcaggcattgccatgaccatgtataacctagacgactctataaaagattttgcaagggcatcaatgaactatggtctccaaagaaaatggccggtttatatgtctacaaaaaatacaattttaaaagcttatgatggtcgttttagagatattttccaagaaatatttgataaagaatttaaaaaagaatttgaaaaaaatggcttaacttacgagcacagattaattgatgatatggtagcatgtgctctaaaatggtctggaaaatttgtatgggcatgcaaaaattatgatggagatgtccaatgtgatactgttgcccaaggttatgggtctttaggtttaatgacaagtgttttaatgacaccggacggaaaaacagttgagtcagaagcggcacatggaacagttacaagacacttcagacaacatcagcaaggtaaagaaacttcgactaatccaatcgcttcaatatttgcttggacaagaggcttattgcataggggtaaattagacggaaatgatgaactaacaaaatttgctaaaagcctagaggaagtatgcattgaaactgtagaaaatggtgaaatgactaaggatttagcgattttaatcgataaaaattcaaaatttttaacaactaaccaatttttggaagctttagataaaaactta

SEQ ID NO: 207768 - DNA, 610 bp, Unknown
  Bacterial polypeptide expressing nucleotide sequence isolated from the Sargasso Sea
aaaatggcctgtttacttatcaactaaaaacacttttttaaaaacttacgatggcaggtttaaagatatattccaggttgtttttgaaaaagaatttaagtctgattttgataaacataatttaacttatgaacataggcttatagatgacatggttgcttgtgcaatgaagtggagcggcaaatatatatgggcatgtaaaaattatgatggagatgttcagtctgatacggttgcacaaggttatggatcattaggattaatgacgagtgttttactggccccagatggtagaactatggaggctgaggcagcacatggaactgttactagacattttagaatgcatcaacaaggaaaagaaacttcaactaatccaatagcttcaatatttgcttggactagaggtcttgctcatagaggaaaattagactcaaatgatgagttaattaaattttctaagactttagaagacgtatgtattaattgcgttgaaacaggttcaatgacaaaagatctagcaattttaattgataaaaatcaaaagtatttaactacaaatcaatttttagatgctattgatggaaatcttaagaagaaattaaactaa

SEQ ID NO: 207769 - DNA, 713 bp, Unknown
  Bacterial polypeptide expressing nucleotide sequence isolated from the Sargasso Sea
attgagctataaaaatataaaaattcctgaatcaggtgaaaaaataacattaaaaaatggggtcttaactgttcctaataatccaataattccatttatagagggtgatggtattggttcagatataacaccagctatgattgatgttgttgatgcagcagtcaaaaatgcttatggagaagaaaaatctatatcttggatggaaatatattgtggtgaaaaatctactaaggtttatggtaaagatgaatggttaccagatgagaccttagatgctcttcgtgagtatgttgtaagtattaaagggcctttaacaacgccagttggtggaggcataagatcattgaatgtttcattgaggcaaattcttgatttgtatgtatgtttacgtccagttagatggtttactggtgttcctagtccagtaaaagctcctggagatgttgatatggttatctttagagaaaattcagaagacatttacgctggtgttgagtttgcatctgactcaaaagaatctgcggacttagtcaaaatacttcaagataaattcaatgtagatcagataagattcccaaaaaatgttggattgggtgtaaaacctatatcagaagagggaacaaaaagactggtaaaaagagcttttgaatatgcaatcgaacaagatagatcctctgttactttagtacataaaggaaatattatgaaattta

SEQ ID NO: 207770 - DNA, 815 bp, Unknown
  Bacterial polypeptide expressing nucleotide sequence isolated from the Sargasso Sea
ttttggagatcaatatagagcaactgattttcaagttccaggtaaaggtaaactagaaattaaatggacatctgaagatggaaaagaaaaaaaagaatttgaagtattcaaattcccagggccaggagtggctctatcaatgtataatttagatcaatctataaaagattttgctagagcctgtatgaattatggcttaaatagaaaatggccagtatatctttctacaaaaaatacaattcttaaaaaatacgatggtcgatttaaagatttattcgaagaagtgtatcaaaaagaatttaaagaaaaatttgaagaaagagaaataacttatgaacatagacttatagatgatatggtggcttgtgctatgaaatggaatggaaattatatttgggcatgtaaaaattatgatggagatgtacagtcagatactgttgctcaaggctttggttcattaggtttaatgactagtgtattaatgtctccagatggtaaaacgatagaatccgaggcggctcatggaacagttactagacattatagattacatcaacaaggtaaagaaacttcaacaaatccaatagcatcaatttttgcgtgggcaagaggactctatcatagagctaaactagataacaatgaagatctaaaaaaatttgtaaaaactttagaaaaagtttgtgtagattgtgtggaaaaaggttctatgaccaaagatcttgcaatactagttggcccttctactaaatatttaactacaaatcagtttctagatgaaattgatggtaacttaaaaaaaaatttaaactaaa

SEQ ID NO: 207771 - DNA, 917 bp, Unknown
  Bacterial polypeptide expressing nucleotide sequence isolated from the Sargasso Sea
aaatataataggtggaactgtttttagagagccaatcatttgtaagaatattcccaaacttgttccatcatggtcagaccccgttgtaatcggaagacatgcatttggagatcaatatagagcaacagattttaaagtccctggtaaaggtataatggaaattaaatggacttcagaagatggtaaaaaagaaatcaaacatgaagtatttaattttacaggacctggagttgcattatctatgtataatttagatagatctattgaggacttcgcaagatcttgttttagttacggattaattaaaaaatggccagtttatttatcaaccaaaaatactattttgaaaaaatacgatggaaggtttaaagatatatttcaagaggtttttgataaagagtttaagaaaaaatttgaggatagcaggattacttatgaacatagattgatagatgatatggtggcatgtgcaatgaaatggagtggaaaatatatttgggcatgtaaaaattatgatggggatgtacaatcagatacaatggctcaaggttatggatctttaggattaatgactagtactttattaactcctgatggaaagataatggaagcagaagctgctcatggaacagtaactagacattttagaatgcatcaacaaggaaaagaaacatcaactaatcccatagcttcaatatttgcttggacaagaggtttggctcacagaggaaaattagataataatgaggagctaatcaaattttcaaataaaatagaggaagtttgtattgaatgtgtagaaagtggatcaatgacaaaagatcttgcaatactaattggtccgtctagcagatatttaactaccaatcaatttttagatgagattgatggtagattaaaaaagaaactaaattaaa

SEQ ID NO: 207772 - DNA, 770 bp, Unknown
  Bacterial polypeptide expressing nucleotide sequence isolated from the Sargasso Sea
aatgactgatattataaatggtaataaaataacatttaaaaaggatcatttgttggttccaaataatcctataattcccttcattgaaggagatggtataggtccagatatttggaaagcatctcaacacgtttttgatcaagctgtatcaaaagcttattctggcaataaaaagattatatggaaggaagtttttgcaggtgaaaaagcaaatgataagtataataattggcttccagatgaaacaattagtgttattcaagatcatttaatagcaattaaaggaccattaacgacaccggtgggaggaggaattcggtcactaaatgttgctttacgacaaattcttgatctttatgcttgtgttcgtccagttagatggtttagcggagtcccttcacctgtaaaaaaacctgagcttgttgatatggttatatttcgggaaaatactgaggatatatatgctggaattgaatggcttcatggaactgatgaggtggaaaaagttaaaagatttttcattgatgaaatgaaagttgacacgatcagatttcctgaaacttcatcgctaggtgtgaagccaatctctgtcgaaggcactgaaaggttggttcgatcagcaattaactatgcaatttctcataaaagaagatcccttactttggttcataaaggtaatattatgaagtttacagaaggaaagtttaaagaatggggttatgatttagcaaaaagagaaattcaatcatcagattttgaaggggggccat

SEQ ID NO: 207773 - DNA, 597 bp, Unknown
  Bacterial polypeptide expressing nucleotide sequence isolated from the Sargasso Sea
aatgactaaaattaatgtaaaaaacccaatagtcgagcttgatggcgatgaaatgacccgaataatatgggattttatcaagaaaaaactaattcttccttatttaaacatcaatattcaatattatgatttgggtataaaaaaccgagataaaacatctgatcaagtaacaatagattgtgcaaatgccatcaaaaaattcggagtaggtataaaatgcgcaacaatcacaccagatgaaaatcgtgtaaaagaatttggtttaaaaaaaatgtggatatcccctaatggaactattagaaatatattgggtggaactgtatttcgtgaaccgataatttgtaaaaatattcctaaattagttcccggttggacaaatccaattgttataggaaggcatgcctttggtgatcaatatagagcattagattttaaggttcctggtaaaggtaaattgaaaatgaaatggatttcagaagatgggaaagaaataaaagaatttgatgtttttaatttcggcggacctggtgttgctttatcgatgtataatttagatcaatctattaaagatttcgcaagagcttgtatgaattatgg

SEQ ID NO: 207774 - DNA, 346 bp, Unknown
  Bacterial polypeptide expressing nucleotide sequence isolated from the Sargasso Sea
atggcaaaattaaaagttaaaaatccaatagttgagttagatggagatgaaatgactagaatcatatggtcgtttataaaagataagctaattaagccatatcttgagatagatctcaaatactatgatcttggtatggagagtcgagacaaaactgatgaccaaattacggtagatgcggcaaatgcaatcaaacaacatggagtaggcgtgaaatgtgcaactattacacccgacgaagctcgtgtagaagaatttaaactaaaaaaaatgtggagatcgccaaatggtactattagaaatatcttaggtggtacagtttttagagagcgcaattattgtaaaa

SEQ ID NO: 207775 - DNA, 655 bp, Unknown
  Bacterial polypeptide expressing nucleotide sequence isolated from the Sargasso Sea
gatagaagattttgcaaggtcttgtttcattatggattaattaaaaaatggcctgtttatctatcaacaaaaaatacaattttaaaaaaatatgatggaagatttaaagatatttttcagaaagtttacgatcaagattttaaatctgagtttgaaaaaaaccatattatttatgaacatagattaattgatgatatggttgcttgtgcaatgaaatggagtggtaaatacatttgggcttgtaaaaattatgatggcgatgttcaatctgatactgttgcacaaggatatggatctctaggacttatgacaagtgtgcttttagcacctgatggaaaaactatggaagcagaagctgcccacggaacagttactcgtcattttagaatgcatcagcaaggaaaagaaacttcaacaaatccaattgcctcaatttttgcatggactagaggactggcacacagaggaaaattagataacaatgaagagctaattaaatttgctcaaagtttagagaccgtatgtattgatgttgtagaacaaggtcatatgactaaagacttagctatattaatcggcccgtctaataaatacttaactacaaatcagtttttggaagtaataaaatcaaatttagaaaaaaaactaaattaat

SEQ ID NO: 207776 - DNA, 881 bp, Unknown
  Bacterial polypeptide expressing nucleotide sequence isolated from the Sargasso Sea
tagagctttagaaatttatcttgtaggaattaaaggcccattaactactccagtaggaggcggtattaggtccttgaatgttgctttgagacaagaattagatctttacgtatgtcaaaggccagttagatattttaacggagtaccgagccccgttgtgtctcccgagaaaacagatatggttattttcagagaaaattctgaggacatttatgctggtattgaatgggaggcaggaactgaagaggctgataaagtgattaaattccttactgaagaaatgggtgtcaataaaataagatttatggaaaattgtggaattggtgttaaaccagtttctaagcagggtacagagagattagtagacaaagctattcagtacgctataaacaatgatagggactctgttaccttagttcacaaaggcaacattatgaagtttaccgaaggttcttttaaggattggggctaccagtttgccgcctcaaagtacaatgcgacagaattagatggtggtccctggcatacattgactaacccaattacaggaaaagaaataattataaaagatgtaattgctgatgcttttcttcagcaaatacttacaagaccagatgagtatagcgtcattgctactttaaatttaaacggtgactatatttcggatgctttagcagcagaagtaggggggataggaatagcaccaggtgcaaatttgggagataaaattgccttatttgaggcaactcacggaacagctccaaaatatgctggattggataaagttaatccaggatcattaattctttcagcagaaatgatgttgagatacatgggttggatggaggctgcagatttaataatcgaaggcttggctagaa

SEQ ID NO: 207777 - DNA, 721 bp, Unknown
  Bacterial polypeptide expressing nucleotide sequence isolated from the Sargasso Sea
atgtcaaaaataaaagttaaaaatccagtagttgagctagacggtgacgaaatgacaagaattatatggtcatttataaaagctaagctaattaagccctatcttgaggtgaatcttaaatactatgatttaggaatggaaagccgtgataaatctgacgatcaaatcacaattgatgcggcaaaagcaatcaaacagtatggcgtaggagttaaatgtgcaactattacacctgacgaagctcgtgtagaagaatttaagctgaaaaaaatgtggagatctccaaatggtactataagaaatatcttaggcggtacggtttttagagaaccaattatctgtaaaaatgttcctaaactagttcccggttggaccaaaccgattgttataggaagacatgcttacggtgatcaatatcgagccactgattttctgataccaggtgagggaaatttggaagtcaaatggacttcaaaggatggtaaagataagaaagaatttaaagtttttgattttcctggatctggaactgctcttacaatgtataatctggatgagtctattaaaaactttgcaagggcatgtatgaattatggcctgggaagaaagtggccagtttatttatcaactaaaaatacaatccttaaagcttatgatggtagatttaaagatcttttccaagaaagttttgaaaaagaattttctgataagttaaaaaagc

SEQ ID NO: 207778 - DNA, 357 bp, Unknown
  Bacterial polypeptide expressing nucleotide sequence isolated from the Sargasso Sea
taggtttaatgacaagtgtattgcttgctccagatggtaaaacaatggaagctgaagctgcacatggaacagtaactagacactttagaatgcatcaacaaggtaaagaaacatcaacaaatcctattgcatctatttttgcatggacaagagggttggctcatagaggaaaattagatggaaatgaggaattaataaagtttgctgaaacgcttgaaaaagtatgtgttgattgtgttgaagaaggctcaatgactaaagacttagctattttgatagggccttcaacaaaatatttaacaactaatcaatttttagatactttggatggtaagttgagacagaaattaaattaaa

SEQ ID NO: 207779 - DNA, 563 bp, Unknown
  Bacterial polypeptide expressing nucleotide sequence isolated from the Sargasso Sea
aggtaacattatgaaatataccgaaggtgcatttagagattggggatatgaattagcaaaaaatgaatttggtggtattgaaatcgacgaaggtccatggcaagagattgttaatccaaaaaatggaaaaaaaattgtcataaaagatgtaatttgtgatgcgtttttacaacaaatattattaagacctacagaatatgatgttattgcaacaatgaatctaaatggtgactacatatctgatgctttggccgcaatggttggcggaatcggaatagctccaggagcaaatatatcagatgaatatgctgtttttgaagctacacatggtacagcaccaaaatatgctgggcaaaataaagtaaatccaggaagtcttattctatctgctgagatgatgctaagacatatgggttggattgaagcggcagatttaattatgtcatctatggacagagcaattggtgcaaaaaaggtgacctatgattttgctagaatgatgagtgatgctgatcttgtttcttcatcaggatttgcagatgaaatgatcaaaagaatgtaat

SEQ ID NO: 207780 - DNA, 718 bp, Unknown
  Bacterial polypeptide expressing nucleotide sequence isolated from the Sargasso Sea
atggctaaaatcaaggtaaaaaacccagttgttgaactagatggtgacgaaatgaccagaattatatggtcttttattaaagataaactcattaagccttatttagatctcgatttaaaatactacgacttaggcatgaaaagtagagacaacacaaatgatcagataacaattgattgcgctaaagcaattcaaaaatatggagcaggagtgaaatgtgcaactatcactcctgacgaagcacgagtaaaagaatttagtttaaagaaaatgtggagatctccaaatggtacaattagaaatattgtaggaggtacaatttttagagaaccaattatttgtaaaaatgtcccaagattagtacctcattggactgaaagtgtgattgttggaagacacgcttttggagatcaatataaagcaaccgattttaaagtccctggtaaaggaagaatgactgttaaatgggaatcagaaaatggtaaagataaaattgagcatgaagtttttaattttgatggaccaggtattgctctatctatgtataatttagataactctattagagactttgctagagcatgtatgaattatggtttagtaagaaaatggcctgtttacttttcatctaaaaatacaattctaaaagcatatgatggaagatttaaagacatttttgaagaagtttttcaaaaagagtttaagaaaaaatttaaac

SEQ ID NO: 207781 - DNA, 769 bp, Unknown
  Bacterial polypeptide expressing nucleotide sequence isolated from the Sargasso Sea
aatggaaaatggaagtttaaatgttccaaatcaccctattattccatttatagaaggagatggaataggccctgatatctggaaagcatctgtaaatgtttttgacagcgcagttaagcacgcatacggaaatactaaaaaaattgactggctagaagtccttgcaggagaaaaagcctatgagtcaaaaggagaatggttaccccaaataacattagatactatatcagaaaacttagtcgctataaaaggacctcttactacgccagtaggtggtggtatacggtcattgaatgttgcacttaggcagaaactagatctttatgcctgtgtgcgccctgttcgatggtttgagggcgttccttcacctgtaaaggaaccacagttggttgatatggttatttttagagaaaatactgaagatatatatgccggcatagaatggatgcatggaggtgatgatattgaaaaagtaaagtcatttttagttgatgaaatgggtgttacaaatatccgatttcctgatacctctagtttaggtgtaaaaccagtatcagaagaaggaaccgaacgattggtaagagctgctattgaaatggctcttaagcaaaagagaaagagtcttaccctggttcacaaaggaaatataatgaaattcactgaaggagcatttagagattggggatatgaactggcaaggaaagaatacggagctcaagatctagatggtggtccttggcaactaattaatgataatgggcataaattg

SEQ ID NO: 207782 - DNA, 665 bp, Unknown
  Bacterial polypeptide expressing nucleotide sequence isolated from the Sargasso Sea
agataaatctattcaggactttgcaaaatcatgctttagctatggcttaattaagaaatggccagtgtatatgtctacaaaaaatacaattttaaaacaatacgatggaagatttaaagatatttttcaagaagtttttgacaacgaatataaagaagaatttgaaaaacataatcttacttatgaacacagattaatcgatgacatggttgcatgtgcaatgaaatggagtggaaaatatatctgggcttgtaaaaattatgatggtgatgttcagtctgacacaatggcacaagggtatggatcgttaggattaatgactagtactctgttaactcctgatggaaaagtaatggaagcagaagcagctcatggaactgtcactagacactacagattgcatcaacaaggaaaagaaacttctacaaaccctattgcatctatatttgcttggacaagaggattggctcacaggggaaaattagatgacaatcaagaattaattaaatttgctcaaacattagaggcagtatgtattgagtgtgttgaaaatggtttaatgacaaaagatttagcaatacttgttggacctaatagtaaattcttaactactaatcagtttttagatgaaattgatggtaatttaaaaaagaaattaaactaaa

SEQ ID NO: 207783 - DNA, 875 bp, Unknown
  Bacterial polypeptide expressing nucleotide sequence isolated from the Sargasso Sea
catggctaccttgatgaaactatagatgcactaaaagaatatatagttagtatcaaaggcccattgacaactcctgttggtggcggcataagatccttaaatgtatctttaaggcaaatccttgatttgtatgtttgtctaagaccaattagatattttgcaggtgtgccaagtccagtaaaaaatccttcttatgttgatatggttatatttagagaaaattctgaagacatatatgcaggagttgagtttgaagctggttcatcacaatcagatgcaatggtaaaagttctacaagaacaatttggtgtaactcaaattcgttttccttcagatgttggattgggcgtaaaacccatttctaaacaaggcacagaaaggctcgttaaacaagcacttgattatgcaataaaaaatgatagatcctcagtaaccctagtgcacaaaggaaatattatgaagtttacagaaggtgcatttagagattggggatatgaattaagtatgaattcttacaatggagaactcttagatggtggcccttgggttacgattaaaaatccaaccaatggaaaaaatattattatcaaagatgttatatgtgatgcttttcttcaacaaatacttactagaccaaaagaatatgacgttattgcaacaatgaatctaaatggtgattatgtttcagatgccttagctgcatgcgttggtggcataggtattgcgcctggtgcaaatatcggagatgaatctgcgttatttgaagccactcatgggactgcgcctaaatatgctggccaagataaagtaaatccaggatcacttattctttccgctgaaatgatgttaagacatttgggttgggttgaagctgc

SEQ ID NO: 207784 - DNA, 961 bp, Unknown
  Bacterial polypeptide expressing nucleotide sequence isolated from the Sargasso Sea
ctccttatcggtggaggtattagatctcttaatgttgcattaaggcaaatatttgatttatatagttgtgttagaccatgcaaatattattcaggaactccaagccctcacaaaaatccccaaaatttagacgttattgtttatagagaaaatactgaggatatctacatgggaattgaatgggaagcggaggataataattgtcttgaattaattaatcacttaaataacgttgtcataccaaaaagtaaaaatttaaaaaatagatctatacccgaaggatcaggtattggaatcaaaccagtgagtaaatctggtagccaaaggcatattagaaaagctattgaacatgccaaaagattatcaggagataaaaggcatgtgactcttgtacataaagggaatattatgaagtatacagaaggtgcatttagagattggggatatgaattagcagtaaatgaatttagagaagattgcattacagaaagagaaagctggattttagataatattcagaaaaatccagaaattacaattgaaaataatgctcgaaaaattgaaccaggttttgacaagcttacaaataacaaaaaagcattcatttgcgaagaaattaaagaagttattgcatcaatatcaaattctcatggagatggaaaatggaaagaacttattcttgttgatgatcggatagctgatagtatatttcaacaaatccaaactagacctcaagaatattcaattcttgcaaccttaaatctcaatggagactatgtttctgatgcggctgcagcaattgttggcggcctaggtatggctcctggtgcaaatattggagataatgcagcaattttcgaagctacgcacggtactgcgccaaaacatgcaggcttaaataagattaatccaggctcagtaattcttagtggtgtaatgatgcttgaatattttggttggg

SEQ ID NO: 207785 - DNA, 406 bp, Unknown
  Bacterial polypeptide expressing nucleotide sequence isolated from the Sargasso Sea
tatgatggtgatgtgcaatcagatactatggcacaaggttatggttcgttgggattaatgactagtacacttcttaccccagatggaaaaattatggaagcagaagccgctcatggaactgtaacgagacactacagaatgcatcaacaaggtaaagaaacctcaacaaatcctatcgcatctatttttgcatggactagaggtctagcgcatagaggaaaactagatagtaataatgaattaattaaatttgcacaaacaatagaaaaagtttgtattgagtgtgttgaaaacggggctatgacaaaagatttagcaatactaattgggccttcaagtaaatacttaacgactaatcaatttttagatgaaattgatggtaaactaaaagcgaaattaaattaaa

SEQ ID NO: 207786 - DNA, 421 bp, Unknown
  Bacterial polypeptide expressing nucleotide sequence isolated from the Sargasso Sea
atgagcaaaattaaggtaaaaaaccctattgttgaactagatggagatgaaatgaccagaattatttggtcttttatcaaaaaaaagctaataactccctatttagatttaaaaattgagtactttgaccttggtattgaaagtagagacaggtcatctgaccaaatcactatagactgtgctaatgctataaaaaaatatggagttggtattaaatgtgcaaccatcacgcctgatgaagcgagggtaaaagaatttaaattaaaaaagatgtggagatctcctaatggtacaattagaaatattttaggaggcacggtatttagagagccaataatttgtaagaatgttcctaaacttgttcctggatggataaaacccaattattattggaagaccatgcttttggtgatcaatatcg

SEQ ID NO: 207787 - DNA, 673 bp, Unknown
  Bacterial polypeptide expressing nucleotide sequence isolated from the Sargasso Sea
gtacaacttagacaattctataaaagattttgctagagcatgtatgaattatggacttaacagaaaatggcctgtttatctttctacaaagaatacaattttaaaaaaatatgatggtagatttaaagatttatttcaggaggtttttgaaaaagaatttgaaaagaaatttaaagaaagaaaaatcacttacgaacatagacttatagatgatatggttgcatgcgcaatgaaatggaatggaaattatatttgggcttgtaaaaactatgatggggatgttcagtctgacacgattgctcaaggatttggttcattaggtcttatgacgagtgttttaatgtcgccggatggtaatacaatagagtctgaagctgctcacggtactgtaacaagacactacagattacatcagcaaggcaaagaaacttcgacaaatcctatagcatctatttttgcttgggctcgagggctataccatagaggaaaattggataataatgaaaagctgaaaaaatttgtaaaaactttagaaaaagtttgtattcaaacagtcgaagatggattcatgacgaaagatttagctgtattagttggtaaaaaacaaaaatatcttacaacaaatcaatttttagacgtaatagattctaacttaaaaaaaagtcttaattaa

SEQ ID NO: 207788 - DNA, 913 bp, Unknown
  Bacterial polypeptide expressing nucleotide sequence isolated from the Sargasso Sea
ggcacccccagcccccacaaacgtccccaggatctggacgtgatcgtgtaccgggagaacaccgaagacatttacatgggggtggaatgggaagccgatgacgccgtcggtcaggagctgcgcaggcacctcaatgaggtcgtgatcccggccaacggcaagctgggcaaacgccagatcccggagggctccggcatcggcatcaaaccggtgagcaagcacggcagccaacgccacatccgcaaggcgatccagcacgccctgcgcctggagggaaacaagcgccatgtgaccttggtgcacaagggcaacatcatgaagttcaccgaaggcgccttccgcgactggggctatgaactggccaccaccgaattccgcgacgtgtgcatcaccgagcgggagagctggattctcggcaacctcgagaaggattcaggcctgagcgtgcaggccaatgcccgcatgatcgagccgggctacgacagcctcactcccgagaagaaggcggacatcgacgctgaggttcaggccgtgatcgacacgatcggcagcagccatggcggcggcaagtggaaagagatggtgctggtggatgaccgcatcgccgacagcatctttcagcagatccagacccggcctcaggagtattcgatcctggccaccctcaacctcaacggcgattacatctccgacgccgccgccgcgatggtcggtggcctgggcatggcccctggcgccaacatcggccagaacgccgccatcttcgaagccacccatggcacggccccgaagcacgccggactggatcgcatcaacccgggttcggtgatcctcagcggcgtgatgatgctggaattcatgggctggcaagaagctgccgacttggtgaccaagggcctgaggccgccatgcc

SEQ ID NO: 207789 - DNA, 761 bp, Unknown
  Bacterial polypeptide expressing nucleotide sequence isolated from the Sargasso Sea
agaaataaaatggacatcagaggatggcaaagaaaaaaaggaattcgaggtgtttaattttcctgggcctggagttgctctttcaatgtataacctcgatcaatctataagagattttgcaagggcgtgtatgaactatggtcttaatagaaagtggccagtctatctttcaacaaaaaatacaatattaaaaaaatacgatgggagatttaaagatttatttgaagaagtttttgaaaaagaatttaaggaaaaatttaaagaaagaaaaataacatatgaacataggcttatagatgacatggtagcgtgcgcaatgaagtggaatggaaattatatttgggcatgcaaaaattatgatggagatgttcagtctgatacagttgctcaagggtttggttctttgggtcttatgacaagtattttaatgtcgccagacggtaaaactatagaatctgaagcagcgcatggtacagtaacaagacactacagattacaccaagaaggtaaggaaacatctacaaatcctatagcttcaatttttgcttgggctagaggtctataccatagaggaaagcttgatgataatgaagatttaaaaaagtttgtaaaaactttagagaaagtttgtattgaaacagttgaaggtggatcaatgactaaagatttagcaatacttattggtccctcaactaaatacttaaatacaaatcaatttttagatcaaatagatcataatcttaaaaaaaaattaaattaaa

SEQ ID NO: 207790 - DNA, 814 bp, Unknown
  Bacterial polypeptide expressing nucleotide sequence isolated from the Sargasso Sea
atgtcttacaaccacatttccattcctgaaaccggcgacatgattgttgtcaacgccgacaacagcttgtcggtgccggacaacccgatcgttccctatatcgagggggatggtatcggggtcgatatctcgcctgtgatgatggcggtggtcgacgcggcagttgccaaggcctatgacggcgtgcgacagatatcgtggatggagatctataccggtgaaaaagctgccgagctctacggcggtgattggtttcctgaagagacgctgaacgctatcaagacctacagcgtggccatcaaggggccgttgacgacgccggtcggcggcgggttccgctcgctaaacgtggccttgcgtcaggagctggatctttacacgtgcctgcgccccgtgcggtggttcgagggtgttccctcgccagttaagaacccgggcgattgcaatatggtgatcttcagggagaactcggaagacatctacgccggcatcgaatatcaggctggcactgatgaggctcaaaaggttgtcgactttatcattaaagagatgggcgctaccaaaatccgcttcccccagaatgtcggtatcggtattaagccggtctctgcggagggcacccagcgcttggtccgcaaggcgatccaatacgccgtcgatcaggacctgccctcggtaacgctggtgcacaagggcaacatcatgaagttcacggagggcgccttccgtgactggggttacgagctggcgcggcaggagttcgatggtgagctgcttgaaagcggcccttgggtaagtatcaagaatcctcgca

SEQ ID NO: 207791 - DNA, 718 bp, Unknown
  Bacterial polypeptide expressing nucleotide sequence isolated from the Sargasso Sea
tatggcaaaaattaaagtaaaaaatccagtagttgagctagatggcgatgaaatgacccgaataatttggtcgtttattaaggaaaaattaataaatccatatcttgatattgatctaaaatattacgatcttgggatggaaaatagggataaaacaaacgatcaagtgactattgattgcgctaaagcaattcagaagtatggtgcaggtgtcaaatgtgcaacgataacacctgacgaggcacgagtaaaagaattcaatttaaaaaaaatgtggagatcaccaaatggaacaattagaaatattgttggtggaacaatttttagagaacctataatatgtaaaaatgttcccagattggttccgcactggactgaaagcgttatagttggaagacatgcttttggagatcaatatagggctacagattttaaaattcctggaaaaggaaaaatgactattaaatgggagtctgaagatggtaagaaacaaattgaacatgaggtttttaaatttaacgaatctggaatagctctgtccatgtacaatttagatagctcaattaaagattttgcaagagcatgtttaaattatggattggttagaaaatggccagtttatttttcttctaagaatacaattttaaaagtttacgatggaaggtttaaggatatttttgaagaaatttatgaaaaagaattcaagaaaaagtttaat

SEQ ID NO: 207792 - DNA, 847 bp, Unknown
  Bacterial polypeptide expressing nucleotide sequence isolated from the Sargasso Sea
tttatcaaagataaattgataaacccatatcttgatatagatcttagatattatgaccttggaatggaaagtagagataaaacagatgaccaaataactatcgacgcagctaatgcaattaaagaacatggtgttggagtaaaatgtgcaactataactccagatgaggcaagagttgaagaatttaaactaaaaaaaatgtggcgatcacctaatggaactataagaaacattttaggtggaacggtttttagagaaccaatcatttgtaaaaatgtaccaaagctagtgccaggttggacgcaacctattgttataggaaggcacgcttttggtgatcagtatagagctacggattttttaattccgggtgaaggtaaaatggaagtcaagtggacttctaaagatggaaaaaataaaaaagaatttgaagtatttaattttacaggtccgggtactgctttagctatgtataacttggacgactcaattaaaaattttgcacgtgcatgtatgaattatggtttagagagaaaatggccagtatatttatctactaaaaacacaatcttaaaagcatatgatggaagatttaaagacttattccaaaatgtttttgataaagaatttaaagataaatttgataaagaatcaattacttatgaacatagattgattgatgacatggtagcatgtgcaatgaaatggaatggtgggtatgtttgggcttgtaaaaactatgatggcgatgttcaatcagataccgtagcacaaggttttggttctttgggattgatgactagtgtattaatgacgccagacggaaaaactgttgagtcagaagcag

SEQ ID NO: 207793 - DNA, 760 bp, Unknown
  Bacterial polypeptide expressing nucleotide sequence isolated from the Sargasso Sea
tgtgggtattaagtgtgcaaccataacacctgatgaagctagagtaagagaatttaatcttaaaaaaatgtggagatctccaaatggtacaataagaaatataattggaggaactgtttttagagaacctataatttgtaaaaatattccaaaacttgtgccctcatggacagatccattgatcataggtagacatgcgtttggtgatcaatacagagcaacagactttacagtacctggtaaaggtaagttagaaatcaaatggactgctgaagatggtactgatgaaagaaaatatgaagttttcaatttcccaggacctggtattgcactatcaatgtataatttggataaatcaatagaagactttgcaagatcctgttttaactatggattaattaaaaaatggccagtttatctttctactaaaaatactattttaaaaagatacgatggaagatttaaagatgtatttgaagaagtttttgaaaaggaatttaaagaaagatttaatgaaaataaaattacttatgagcatagattaatagatgatatggtagcatgtgcaatgaaatggcatgggaaatatatttgggcatgcaaaaattatgatggagatgttcaatctgatacagttgctcaaggatatggatctttaggtttaatgacaagtgttttgcttgctccagatggcaaaacaatggaagctgaagctgcacatggaactgtaactagacactttagaatgcatcaacagggg

SEQ ID NO: 207794 - DNA, 790 bp, Unknown
  Bacterial polypeptide expressing nucleotide sequence isolated from the Sargasso Sea
gattttaaagtccctggaaaaggtaagatgacaattaaatgggagtccgaagacggaaaaaataaaattgaacatgaggtttatgattttaaaggatctggcatagccctttctatgtacaatcttgatgactcgataaaagactttgcaagagcgtgtatgaactatggtttggtgagaaaatggcctgtttatttttcaacaaaaaacacaattttaaaagcttatgatggaaggtttaaagatatttttgaggaaatttttcaaaaagaatttaaaaaaaaatttgacgaagtgggtattacttacgaacatagattaatagatgatatggttgcatgtgctatgaaatggagtggaaaatatatctgggcatgtaaaaattatgacggcgatgtacaatctgatactgtagctcaaggctatggttctctgggattaatgacaagtgtactacgaactccggatgggaaaatagctgaggctgaagcagctcatggaactgttactaggcattttagacagcaccaacaaggtaaggaaacttctacaaatccaattgcatctatttttgcttggacaagaggtttgtcgcataggggacagctagatggtaataatgaattaattaaatttgcaaatactttggaaaaagtttgtgtagaaactgttgaaagcggatctatgacaaaagacctagctatattaattagtaaaaatcaaaaatttttaaccacaaatcaatttttagaatcaatcgattctaatctaaaaaagaaacttaagtaat

SEQ ID NO: 207795 - DNA, 906 bp, Unknown
  Bacterial polypeptide expressing nucleotide sequence isolated from the Sargasso Sea
aaattcctgaatcaggtgaaaaaataacattaaaagatggaaccttaacagttcctaataatccaataattccatttatagaaggtgatggtattggttcagatataacaccggctatgattgatgttgttaatgctgctgttgaaaaagcttatggagaagaaaaatctatatcttggatggaaatatattgtggtgaaaaatcaacaaaagtttacggtaaagatgagtggttgccagatgaaaccttagatgctcttcgtgagtatgttgtaagtattaaagggcctttaactacgccagttggtggaggcataagatcattgaatgtttcactgagacaaattcttgatttgtatgtatgtttacgtccagttagatggtttacaggtgttcctagtccggtaaaagttccaggcgatgttgatatgataatctttagagaaaactcagaggatatttacgctggtgttgagtttgcgtctgactcaaatgaatcagaagagttagtgaaaatacttcaagataaattcaatgttgatcagataagattcccgcaaaatgttggattgggtgtaaaaccaatatcagaagagggaacaaaaagacttgtaaaaagagcatttgaatatgctatcgaacatgatagatcctctgttactttagtgcacaaaggaaatattatgaaatttactgaaggtgcatttagagattgggggtatgaactttgtagagaaggatttgatggcgatgaccttgatggaggtccatggcattactttattaatccaaacaacggaagaaaaataatagtaaaagatgttatatgcgatgcttttttacaacaaatactattaagaccaagagaatatgatgttattgcaacaatgaaatttaaatggtgat

SEQ ID NO: 207796 - DNA, 672 bp, Unknown
  Bacterial polypeptide expressing nucleotide sequence isolated from the Sargasso Sea
aatgactaaaattaaagtaaaaaatccggttgttgaattagacggcgatgagatgacaagaattatttgggatcttattaaaaagaaacttattcttccgtatttagatattgatctccattattatgacttaggtgttgaatacagagatcaaacaaatgatcaagttactattgatgctgcagaagctataaaaaaacatggtgtaggagtaaagtgcgctactataactcctgatgaagacagagtagaagaattcaatcttaaagaaatgtggaaatctcctaacggaactataagaaatattcttggtggtacagtttttagagaaccaattatatgctctaatattccaagacttgttccaggttggacgcaaccaattgtaattggaagacatgcttttggtgatcaatatagagctacagattttgtagttcctgccaaaggaaaactatcaatgaaatgggtctcagaagatggttcgcaaaaaattgaagaggatatatatgactttgaagatagcgggattgctatgggaatgtataatcatgataaatctattaaggattttgcaagagcttgttttaattacggtataaatcgaaaatggccagtttatctatctacaaagaatacaattttaaagaaatatgatggtagatttaaaga

SEQ ID NO: 207797 - DNA, 385 bp, Unknown
  Bacterial polypeptide expressing nucleotide sequence isolated from the Sargasso Sea
atgagtaaaatcaaggtaaataaccccgtagtggagctagatggagacgaaatgactcgaattatttgggagtttattaagaacaaactcattttaccttatattgatttgggcattgaatactacgatttaggaatgaaaagtagggataatactgacgatcaaatcactatagactctgccaatgctattaaaaaaattggtgttggaattaaatgtgcaaccataacacctgatgaagcaagagtagaagaatttgacctaaaaaaaatgtggcgttctcctaatggaactataagaaatattattggtggtacagtgtttagagagccaatcatctgtaaaaatattccaaagcttgttccttctggacagatccagtaat

SEQ ID NO: 207798 - DNA, 879 bp, Unknown
  Bacterial polypeptide expressing nucleotide sequence isolated from the Sargasso Sea
aggaactgtatttagagagcctattatttgtaaaaatatcccaaaacttgttccatcttggacagatccagtaattataggaagacatgcttttggagaccagtacagagcaacagattttaaagttcccggtaaaggaaaaatggaagttaaatggacatcagaagatggaaaagacgagataaaatacgaggtatttaatttcactggtccgggtgtagcgctttcaatgtataatttagataaatccattcaagattttgcaagatcctgttttagttatgggctaattaaaaaatggccagtttacatgtctacgaaaaatacaattctaaaacaatatgacggtagatttaaagatatattccaagaaatatttgagaatgaatacaaagaagattttgataaaaataatttaacttacgaacatagattaattgatgacatggttgcatgtgcaatgaaatggagtggtaaatatatttgggcttgtaaaaattatgatggtgacgttcagtctgacactatggcacaaggttacggatcattaggattgatgacaagtacacttctaactccagatggaaaaattatggaagcagaagctgctcatggaactgtaaccagacactatagaatgcatcaacaaggtaaagaaacttcaacgaatcctattgcatcaatttttgcttggacaagagggctagctcacagaggaaaacttgataataatgatgaattaataaaatttgcacaaacgattgaaaaagtttgtatcgagtgtgttgaaaatggagctatgacaaaggatctagcaatactaattggtccatcaagtaagtacttaacaactaatcaatttttagatgaaattgacgg

SEQ ID NO: 207799 - DNA, 745 bp, Unknown
  Bacterial polypeptide expressing nucleotide sequence isolated from the Sargasso Sea
attgaatatttttgatcttggtatgaaaaatcgtgatcatacaaatgatcaagtaactatagactgcgcaaatgcaattaaaaaaaatggggttggaataaaatgtgccactataactcctgatgaagcaagagttaaagaatttaatttaaaaaaaatgtggagatcgccaaatggaacaataagaaatattttaggaggaacagtttttagagaaccaattatgtgtaaaaatgttccaaaattagttcctagttggactaatccaatttgtattggtagacatgcattcggtgatcaataccgcgcaacagattttaaagttccaggaaaaggaaaacttgaaataaaatggacatctgaagatggaaagaaaaaaaaagaatttgaagtatttaattttccaggaccagggattgctctatcaatgtataatttagatcagtcaataaaagattttgcaagatcatgtatgaattatggactaaacagaagatggcctgtttatctttccacaaaaaatacaattttaaaaaaatatgatggtagattcaaagatttattccaagaaatttatgaaaaagagtttaaagaaaaatttaaagaaagaaatataacatacgaacatagactcatagatgacatggttgcttgtgcaatgaaatggaatggaaattatatttgggcctgtaagaattacgatggagatgttcagtctgatacaatagcccaaggatttggttct

SEQ ID NO: 207800 - DNA, 478 bp, Unknown
  Bacterial polypeptide expressing nucleotide sequence isolated from the Sargasso Sea
gaagatggtaaagaagagatcaaacatgaagtatttaattttactggtccaggagtagcgttttcaatgtataatttagataaatcaattgaagaatttgcaagatcttgtttcagttatggattaattaaaaaatggttagtttatttgtctacaaaaaatataattcttaaaaaatatgacggcagatttaaagatatttttgaagaagtatttaataatgaatttaagaaaaaatttgaaaatgctaaaattacatatgaacataggcttatcgatgacatggtagcttgtgcaatgaaatggagtggaaaatatatttgggcatgtaaaaattatgatggtgacgtccaatcagataccatggcacaaggttatggctcattaggtttgatgactagtacattattaacaccagatggaaaagtaatggaggcagaggcagctcatggaactgttacaagacactacagaatgc

SEQ ID NO: 207801 - DNA, 841 bp, Unknown
  Bacterial polypeptide expressing nucleotide sequence isolated from the Sargasso Sea
tatggcaaaaatcaaagttaaaaatccagtagtagagctagatggcgatgaaatgacccgtattatttggtcgtttattaaaaaaaaattaatagaaccctatttagatatagacctaaaatactatgatcttgggatggaaaacagggataaaactaatgaccaagttacagttgattgtgctaaagcaattcaaaaatttggggttggagtaaaatgtgcaacaatcactccagacgaagcccgggtaaaagaatttaatttaaaaaaaatgtggcgatcgccaaatggtacaataagaaatattgttggaggaactatatttcgtgaaccaataatttgcaaaaatgtacctaggcttgttccgcattggactgaaagtataatagttggaagacacgcttttggtgatcaatatagagctacagattttaaggttcctggaaaaggtaaaatgacaattaagtgggagtctgaagatggaaaaaagaaaattgaacacgaggtttttaaattcaatgactctgggattgctttatcaatgtacaatttagatagttcaatacaggattttgccagagcatgtttaaattatggtttagtaagaaaatggccagtttatttttcatcaaaaaatacaattttaaaagtatatgacggaaggtttaaagatatatttgaggatatttatcaaaaagaatttaagaaaaagtttaatgatgctgggattacctatgaacacagattgatcgatgacatggttgcatgcgcaatgaagtggagcggtaagtatatttgggcatgtaagaattatgatggagatgttcaatccgatacggta

SEQ ID NO: 207802 - DNA, 812 bp, Unknown
  Bacterial polypeptide expressing nucleotide sequence isolated from the Sargasso Sea
gttggaattaagtgcgcaacgattactcccgatgaggcaagagtagaagaatttgatttaaaaaaaatgtggagatctccaaacggaaccataagaaatataattggaggaacagtatttagagaaccaattatttgtaaaaatattccaaaacttgttccctcttggactgatccggtgattattggaagacatgcatttggtgatcaatacagagcaatagattttaaagttcctggaaaaggaaaaatggaaatcaaatggacatcagaagatggaaaagatgaaattaaatatgaagtatttaattttacaggtcctggtgtagctttatcaatgtacaatttagacaaatctattgaagactttgcaagatcttgtttcagttatgggttaattaaaaaatggcctgtttatatgtctacaaaaaatacaattctaaaacaatatgatggaagatttaaagatattttccaagaaattttcgacaaagaatataaaagcgaatttgaaaaaaataatttaacttacgaacatagattgattgatgacatggttgcatgtgcaatgaaatggagtggaaaatatatttgggcttgcaaaaattatgatggagatgtgcaatcagatactatggcacaaggttatggatctttaggattgatgacgagcacattattaactccagatggaaaaataatggaagcagaggctgcacacggaacagtaactagacattatagaatgcatcaacaaggaaaagaaacttcaaccaaccccatcgcatcaatttttgcttggacaagaggatt

SEQ ID NO: 207803 - DNA, 889 bp, Unknown
  Bacterial polypeptide expressing nucleotide sequence isolated from the Sargasso Sea
gaaaagcagagataataccaacgatcaaattacaatagactcagcaaacgcaatcaaaaaaattggtgtaggcataaaatgtgcaaccataactcctgacgaggcaagggtgaaagagtttgatttaaaaaaaatgtggagatctccaaatggtactataagaaatattatcggtgggactgtttttagagaaccaataatttgttcaaatattccaaaattagttccatcatggactgaccctgttgttattggaagacatgcctttggtgatcagtaccgtgccactgactttaaagttcctggaaaaggtaaaatggaagtaagatggacttcagaggatggtaaagatgaaattaaatatgaagtatttaattttactgggcctggagttgcgttatcaatgtataatttagataaatcaatagaagactttgctagatcttgttttagttatgggctgataaaaaaatggcctgtttatatgtctacaaaaaatactattttaaaaaaatatgacggaagatttaaagatatatttcaagaaatttttgataaagaatataaaaaagattttgaaaaatacaatttaacctacgagcatagactaattgacgatatggttgcgtgtgcaatgaaatggagtggaaaatatatttgggcttgtaaaaattacgatggtgatgtccaatctgatactatggcccaaggttatggatctttaggattaatgacaagcacattgttgacaccagatgggaaaattatggaagccgaagctgcacacgggactgtgactagacactatcgtttacaccaacaaggaaaaaaaacttcaacaaatccgatcgcttcaatatttgcttggactagaaggtttagctcatag

SEQ ID NO: 207804 - DNA, 863 bp, Unknown
  Bacterial polypeptide expressing nucleotide sequence isolated from the Sargasso Sea
tatggctaaaattaaggtaaaaaacccgattgttgagcttgatggagacgaaatgacgagggttatatgggaatttatcaaaaaaaaacttattaaaccctatttggagttagatatcaaatattacgacttaggaattaaaagtagagacaagacattggatcaaatcacaatagattgtgcaaatgctattaaaaaatacaacgtaggtattaaatgcgcaactattactcctgacgaagggcgagtagaggaatttaatttaaaaaaaatgtggagatctcctaatggaacaataagaaatattcttggtggcacagtctttagagaaccaattttatgtaagaatattccgaaacttgtgcctagttgggaaaatccaatttgtattggaagacatgcttttggagatcaatatagagctactgattttcaagttccaggaaaaggtaaattagaaattaagtggacatctgaagatggtaaagaaaaaaaagaatttgaagtatttaattttccagggccgggggttgctatgtcgatgtataatttggatcaatcaataaaagattttgcgagagcttgtatgaattatgggcttaatagaagatggccagtatttttatcaacaaaaaatacaattctaaaaaaatatgatggtagatttaaagatatatttcaagaaatatatgaaaaagaatttgtagaaaaatttaaagatagaggaattacatatgagcacagacttatagatgacatggtagcttgtgctatgaaatggaatggaaattatatatgggcttgtaaaaactatgatggtgatgtccagtcggatactgttgctcaaggttttggttctttag

SEQ ID NO: 207805 - DNA, 537 bp, Unknown
  Bacterial polypeptide expressing nucleotide sequence isolated from the Sargasso Sea
aatgagcaaaatcaaggtaaaaaacccagttgtagagctggatggcgatgaaatgacacggattatatgggagttcatcaaaaacaaactaatcctcccgtatttagatcttagtatccaatattacgatttaggaatgaagagtagagataatactaatgatcaaatcacaatagattcagccaatgccattaaaaaaattggtgttggaattaagtgcgcaacaataactcctgacgaagaaagggttgaagaatttgatttaaaaaaaatgtggagatctccaaatggaacaataagaaatattattggaggaacagtttttagagagccgattatttgtaaaaatattccaaaacttgtaccgtcatggacagatccagttatcattggaagacatgcttttggcgatcagtatagggctacagattttaaagttcctggaaaaggaaaaatggaagttaagtggacttctgagaacggaaaagatgagatcaaatacgaagtatttaatttcactggacctggcatagcttt

SEQ ID NO: 207806 - DNA, 651 bp, Unknown
  Bacterial polypeptide expressing nucleotide sequence isolated from the Sargasso Sea
aagactttgcaagatcttgttttagttatgggttaattaaaaaatggcctgtttatatgtcaacaaaaaatacaattttaaaacaatacgatggaagatttaaagatattttccaagaaatttttgacaaagaatataaaagtgaatttgaaaaaaataatttgacatatgaacatagattaattgacgatatggttgcatgcgcaatgaagtggagcggaaaatatatttgggcttgtaaaaattacgatggagatgtgcaatcagatactatggctcaaggttatggatctttagggttaatgacaagtaccttgttaactccagatggaaaagtaatggaagcagaagctgcacacggaacagtaactagacattatagaatgcatcaaaaaggtaaagaaacttcaacaaatcctattgcatcaatttttgcttggacaagaggattggctcaccgaggtaaactagatggaaatgaagatttgattaatttttcacaaactttagaaaaagtatgtattgaatgtgtggaaaaaggactaatgacaaaagatttagcaatacttgtgggaccttcaagtaaatatttaacaactaatcaatttctagatgaaattgataatactcttaaaaaaaaacttaattagt

SEQ ID NO: 207807 - DNA, 712 bp, Unknown
  Bacterial polypeptide expressing nucleotide sequence isolated from the Sargasso Sea
atggcaaaaataaaagttaaaaatccagtagttgagcttgatggtgatgaaatgacccgtataatttgggcgtttattaaagataaactaattaagccttatctcgatattgatctaaaatactatgatcttggcatggagaatagagataaaacgaacgatcaagtaacaattgactgtgcaaaagcaattcaaaaatatggggctggcgttaagtgtgcaacaataactcctgatgaggctcgggtggaagagtttaaattaaaaaaaatgtggaaatctccaaacggtacaataagaaatattgtaggtggaacaatttttagggagcctataatttgcaaaaatgttcctagattggtacctcactggacagaaagcgttattgttggaagacatgcttttggagaccaatatagagctacagatttcaaagttcctggaaaaggtaaaatgactattaaatgggagtcagaagacggaaaaaataaaattgaacatgaagtttatgaatttaaaggatctggaatagcactttctatgtataatcttgatgactcaataaaagactttgccagagcctgtatgaattatggtttggttagaaaatggccagtttatttttcaagcaaaaatacaattttaaaagcttacgatggaagatttaaagatatttttgaaaaaagtttttcaaaaaggaatttaaaaaaaa

SEQ ID NO: 207808 - DNA, 504 bp, Unknown
  Bacterial polypeptide expressing nucleotide sequence isolated from the Sargasso Sea
ttgaaaaaaataaaataacttatgaacatagattaatcgatgatatggttgcgtgcgccatgaaatggagtggaaagtatatttgggcatgtaaaaactatgacggagatgttcaatcagatacagttgcacaaggttatggatctttaggattgatgacaagtgtattattagctcctgacggaagaacaatggaagcagaggcagcacatggaactgtaacaagacactatagaatgcatcaacaaggtaaagaaacctcaacaaatccaattgcatcaatctttgcatggacaagaggtttagcacatagaggaaaactagataacaataataaattaattaagttttcagatactctagaaaaagtttgtatagattctgttgaagatggatcaatgacaaaagacctagcaattctattaagtccatcaacaaaatttttaaccactaatcaattcttaaatgagttagatggtagattaaaaaagaaattaaattaat

SEQ ID NO: 207809 - DNA, 717 bp, Unknown
  Bacterial polypeptide expressing nucleotide sequence isolated from the Sargasso Sea
tgagtattatgatcttgggatgaaaagtagggatgatacagacgatcaaattacaatagatgcagcaaatgcaattaaaaaagttggagtgggtattaaatgtgcaacgatcactccagatgaagcaagagttgaagaatttaaactaaaaaaaatgtggcgatcacctaatggaacaataagaaatattattggaggaacagtctttagagaaccaattatttgttcaaacatccctaagcttgttccgtcatggtctgatcctgttgttataggaagacatgcgtttggagatcaatatagagcaactgactttaaggttcctggaaaaggaaaaatggaagttaagtggacgtctgaggatggtaataaagagataaaatatgaagtttttaattttacaggtccgggtgtagcactttctatgtataacttagataaatcaattgaggattttgcaagatcttgttttagctatggattaattaaaaaatggccagtttatctttctacaaaaaataccatattaaaaaagtatgatggaagatttaaagacatctttgaagaagtatttaataaagaatttaagaaaaaatttgaggaattgaaaattacttatgaacataggttgattgatgacatggtagcatgtgcaatgaaatggagtggtaaatatatttgggcctgtaaaaattatgatggtgatgtacaatctga

SEQ ID NO: 207810 - DNA, 343 bp, Unknown
  Bacterial polypeptide expressing nucleotide sequence isolated from the Sargasso Sea
aatgagcaaaatcaaggtaaaaaacccagttgttgagctggatggcgatgaaatgactcgtattatatgggagttcatcaaaaataaattaatcctcccatatttagatcttggtatcgaatattacgatttaggcatgaaaagcagagataatactgatgatcagattaccatcgactctgcgaacgcaatcaaaaaaattggtgttggcataaagtgtgcaacgattacccctgatgaagcaagagtagaagaatttgatttaaaaaaaatgtggagatctccaaacggaaccataagaaatataattggaggaacagtatttagagaaccaattatttgt

SEQ ID NO: 207811 - DNA, 703 bp, Unknown
  Bacterial polypeptide expressing nucleotide sequence isolated from the Sargasso Sea
aaaaatattcctaagctagttcctagttggacaaatccgatagtaattggaagacacgcatttggcgatcaatatagagcaacggattttaaagttccaggtaaaggtaagttagaaattaaatggacttctgaaaatggaaaagaaaaaaaagagtttgaagtttttaattttagtgggccgggagtcgcgttatcaatgtataatttagatcagtctataaaagattttgcaagagcctgtatgaattatggactaaatagaaaatggccagtttatttatcaaccaaaaatacaattttaaaaaaatatgatggaagatttaaagatttatttcaagaagtatttgaaaaagaatttgaaaaaaaatttaaagaaagaaagataacttatgagcatagactcatagatgatatggtagcttgtgcaatgaaatggaatggaaattatatttgggcatgtaaaaactatgacggtgatgttcagtctgacacaattgcacaaggatttggatcattaggtcttatgacaagtgttttaatgtcaccagatggtaaaacaatagaatctgaagctgctcatggaactgtgacgagacattatagattacatcaagagggtaaggaaacttcaacaaatcctatagcttccatttttgcctgggcaaggggtctttatcataggggaaaattagatgacaacg

SEQ ID NO: 207812 - DNA, 862 bp, Unknown
  Bacterial polypeptide expressing nucleotide sequence isolated from the Sargasso Sea
attaattggtttaaagtctatgcaggagatgaggcttgtgaactttatggaacatataactatctccctcaagatactattgaggcaatcaggcacttcggcgtagctatcaaaggtcctttaacgactcccatcggtggaggtattagatctcttaatgttgctttaagacaaatctttgatttatatagttgtgttagaccatgcagatattattcagggactccaagccctcacaaaaatccccaaaatctggacgttattgtttatagagaaaatactgaagatatctacatgggaattgaatgggaagccgaggataataattgtcttgaattaattaatcacttaaataatgttgtaataccaaatagtaaaaatttaaaaaatagatccatacccaacggatcaggaattggaatcaaaccagtaagcaaatctggaagccaaaggcatattagaaaggccattgaacatgctaaaagattatcaggagataaaaggcatgtgactcttgtacataaagggaatattatgaaatataccgaaggcgcatttagagattggggttatgaattggcagtcaatgaatttagagaagattgcattacagaaagagaaagctggattttagataatattcataaaaatccagaaattacaattgaaaataatgcccgaaaaatcgaaccaggttttgacaagcttacaaataacaaaaaagcattcatttgcgaagaaattaaagaagtaattacatcaatttcaaattcgcatggaaacggaaaatggagagaacttattcttgttgatgatcggatagctgatagtatatttcaacaaattcaaactagacctcaag

SEQ ID NO: 207813 - DNA, 862 bp, Unknown
  Bacterial polypeptide expressing nucleotide sequence isolated from the Sargasso Sea
gttggaattaaatgtgcgaccatcacaccagacgagggtagagtaaaagaatttaatttaaagaaaatgtggagatctcccaatggtactattagaaatattttgggaggaacggtttttagagaaccaataatttgtaaaaatattccaaaacttgtccctagttggactaatcctatttgtataggaagacacgcttttggtgaccagtatagagctactgactttaaagttcctggcaaaggtaaactagaaatgaaatggacatcagaagatggtaaagaaaaaaaagaattcgaaatatttaattttccaggtccaggtgttgctttatcaatgtacaatttagatcagtcaataagagattttgcaagagcatgcatgaattatggtcttaatagaaaatggccagtttatctttctactaaaaatacaattttaaaaaaatatgatggaagatttaaagatctatttcaggaagtttttgaaaaagaatttgaagaaaaatataaagaaagaggaataacttacgaacatagacttatagatgacatggttgcctgcgcaatgaaatggaacggaaattatatttgggcatgtaaaaactacgacggagatgttcaatctgacacaattgctcaaggatttggttcgctaggacttatgacaagtgttttaatgacgccagatggtaaaacaatagaatctgaggccgctcatggtacagttactagacactatagattacatcagcaaggaaaagaaacttcaacaaatcctattgcttcaatatttgcatgggcaagaggcttataccatagaggtaaactagatggtaacgaggaattaaaaaaatttgtaa

SEQ ID NO: 207814 - DNA, 760 bp, Unknown
  Bacterial polypeptide expressing nucleotide sequence isolated from the Sargasso Sea
tggtgatcagtacagagcaactgatttcaaagttccaggaaaaggaaaaatggaagttaagtggacttcagaaaatggtaaggacgagattaaatatgaagtttttaattttacaggtccaggtgttgcgctttcaatgtacaatttagataaatcaattgaagattttgccagatcttgtttcagttatggtttaattaaaaaatggccagtttatttatcaactaaaaacactattttaaaaaaatatgatgggagatttaaagatatatttgaagatatatttaataaagaatttaaaaaaaaatttgaagaaactaagatcacttatgaacacagattaattgacgatatggttgcttgtgcaatgaaatggagtggaaaatatatttgggcatgtaagaattatgatggcgatgttcagtctgatactatggcacaaggttatggatcgttaggcttaatgactagtacattattaactcctgatggaaaagttatggaggcagaggccgctcatggaactgtaactagacacttcagaatgcatcaagaaggcaaggaaacatctacaaatcctatagcatcaatatttgcatggactaggggtttggctcatagaggtaaattggatagaaatgaggaacttattaaatttgctaaaacaatcgagcaagtttgcattgaatgtgtagagtcaggatcgatgacaaaagatcttgcaatattaattggaccttcaagtaaatatctaactact

SEQ ID NO: 207815 - DNA, 624 bp, Unknown
  Bacterial polypeptide expressing nucleotide sequence isolated from the Sargasso Sea
aatgactaaaatcaaagtaaaaaatccggttgttgaattagacggcgatgagatgacaagaattatttgggatcttattaaaaagaaacttattcttccgtatttagatattgatctccattattatgacttaggtgttgaatacagagatcaaacaaatgatcaagttactattgatgctgcagaagctatacaaaaacatggtgtaggagtaaagtgcgctactataactcctgatgaagacagagtagaagaattcaatcttaaagaaatgtggaaatctcctaacggaactataagaaatattcttggtggtacagtttttagagagccaattatatgctctaatattccaagacttgttccaggttggacgcaaccaattgtaattggaagacatgcttttggtgatcaatatagagctacagattttgtagttcctgcaaaaggaaaactatcaatgaaatgggtctcagaagatggttcgcaagaaattgaagaggatatatatgactttgaagatagcggaattgctatgggaatgtataatcatgataaatctattaaggattttgcaagagcttgttttaattacggtataaatcgaaaatggccagtttatct

SEQ ID NO: 207816 - DNA, 792 bp, Unknown
  Bacterial polypeptide expressing nucleotide sequence isolated from the Sargasso Sea
cgaatattacgatttaggcatgaaaagcagagataatactaatgatcaaatcacaatagactctgcgaacgctattaaaaaaattggtgttggaattaagtgtgcaactattacgcctgatgaagcgagagtagaagaatttgatttaaaaaaaatgtggagatctccaaacgggaccataagaaatataattggtggaacagtatttagagaaccaattatttgtaaaaatattccaaaacttgttccctcttggactgatccagtgattattggaagacatgcatttggtgatcaatatagagcaacagattttaaagttcctggaaaaggaaaaatggaagtgaaatggacatcagaagatggaaaagatgaaattaaatatgaagtatttaattttacaggtccaggtgtggctttatcaatgtacaatttagataaatctattgaagattttgcaagatcttgtttcagttatgggttaattaaaaaatggccagtttatatgtctacaaaaaatacaattctaaaacaatacgatggaagatttaaagatattttccaagaaatttttgacaaagaatataaaagtgaatttgaaaaaaataatttgacttacgaacataggttaattgatgacatggttgcatgtgcaatgaaatggagtggaaaatatatttgggcttgcaaaaattatgatggagatgtccagtctgatactatggcacaaggttatggatctttaggattgatgacaagtacattgttaactccagatggaaaagtaatgga

SEQ ID NO: 207817 - DNA, 766 bp, Unknown
  Bacterial polypeptide expressing nucleotide sequence isolated from the Sargasso Sea
gataatagagtatcagagtttaatctaaaaaaaatgtggcgctcgccaaatggaacaataagaaatattttagatggtactgttttccgacaacctattatttgtaagaatattccaagaattgtaagaacctgggaccatcctattgttgtaggaagacatgcctttggtgatcaatataaggccacagaaatgaaaatagacaaaccaggtaaactttttatgaagtttgtggatgaagatggaaaaatagatgaaaaagaagtttttcaattttcaaatcaaggcgtagccctctccatgtataatgtagatgagtcaataagaggatttgcaagagcttgttttaattatgggctcaaattaaagtggcctgtttatctatccacaaaagatacaattttgaaaaaatatgatggaagatttaaagagatctttcatgaaatttttcagaatgaatttgcatctgattttgaaaataacaaaattgtctacgagcatcgtcttattgatgatttagttgcatcttcaatgaaatggtctggaaaatttatttgggcatgcaaaaattatgatggggatgttcaatctgacgctgtcgcacagggtttcggctctttaggtatgatgtctagtgttttaatgacaccgaatggtaaaacgatagaagctgaagctgcccatggaacagtaactagacactatagacttcatcaaaaaggagagaaaacctctacaaatccaatagcatctatttttgcgtgga

SEQ ID NO: 207818 - DNA, 394 bp, Unknown
  Bacterial polypeptide expressing nucleotide sequence isolated from the Sargasso Sea
tgatggtgacgtacaatctgacagtgttgctcaaggttttggttcacttggattaatgaccagtgttttaatgacacctgatggcaaaacagttgaagctgaagcagcacatggcactgtaacaagacattttagaaatcatgaaaagggtcaggaaacatctactaatccaattgcttcaatatttgcttggactaaaggacttcaatttagaggtaagtttgattcaaataatgaacttatagaatttacaaaaaaactagaaaaaacttgtatagccactgtagaaaatggacaaatgacaaaagatttagctatattgatagacaaagatcaaaaatggctaaatactcaagactttttaaatgcaatcaaaaataatttttcaatctag

SEQ ID NO: 207819 - DNA, 538 bp, Unknown
  Bacterial polypeptide expressing nucleotide sequence isolated from the Sargasso Sea
gaagaggtctataataaagaattcaagaaaaaattttgaggatgcaaaaattacttatgaacacagattaattgacgacatggtagcgtgtgcaatgaaatggagcggtaaatatatatgggcatgtaaaaattatgatggtgatgttcaatcagataccatggctcaaggttatggctcacttggtttaatgaccagtacattattaacacctgatggaaaaacaatggaggcagaagcagctcacggaacagtaaccagacattatagaatgcaccaacaaggtaaagaaacttcaactaatccaattgcctcgatttttgcatggacaagaggattagcccatagaggaaaacttgatggtaacgacgaacttatcaaatttgcaaatacaattgaaaaggtttgtattgaaagtgttgaaaatggctccatgacaaaagatcttgcaatattggttggaccttcaagcaaatatttaacaaccaatcaatttctagatgtaattgataacaatcttaaacagaaattaaattaa

SEQ ID NO: 207820 - DNA, 442 bp, Unknown
  Bacterial polypeptide expressing nucleotide sequence isolated from the Sargasso Sea
atgagtaaaataaaggttaaaaaccccattgttgagttagatggtgatgaaatgaccagagttatatgggacttcataaaaaataagctcgttttaacttaccttgatctcaaaattgagtactacgatttaggaatggaaagcagggataaaactgaggacaaaataacaattgaatgtgctaatgcaattaaaagaaatggtgtcggtattaaatgtgcaaccatcacacccgatgaagctagagtaagagaatttaatcttaaaaaaatgtggagatctccaaatggtacaataagaaatataattggaggaactgtttttagagaacccataatttgtaaaaatattccaaaacttgtgccctcatggacagatccattgatcataggtagacatgcatttggtgatcaatacagagcaacagattttacagtaccag

SEQ ID NO: 207821 - DNA, 744 bp, Unknown
  Bacterial polypeptide expressing nucleotide sequence isolated from the Sargasso Sea
ccctgccgctattacgccgtaccccccagcccccaccgtcgtcctcaggatcttgacgtgatcgtctaccgggagaacacggaagacatttacatgggtgtggaatgggaagccgaggacgccgtaggccaggagctgtgcaagcaccttaatgaggtggtgattccagccaacggcaagctcggcaaacgccagatcccagagggcgcaggtatcggcattaagccggtgagcaaacacggcagccaacgccacatccgcaaagcgattcagcacgccctgcggcttcagggcgacaagcgccacgtgacactggtgcacaagggcaacatcatgaaattcacggagggtgccttccgagactggggctacgaactggcgaccactgaattccgagacgtgtgcatcaccgagcgggagagctggattctgggcaacctcgagaaggatccgaatctgagcgtgcaggccaatggccgcatgatcgagcccggctacgacagcctcacccccgaaaaaaaggcggacatcgacgctgaggtgcaggcggtgatcgacagcatcggagccagccacggtggcgtcaaatggaagcagatggtgctcgttgacgaccggatcgctgacagcatttttcagcagatccagacccggccccaggagtattcgatcctggccacgctcaacctcaacggcgactacatctccgacgcggcggcggcaatggtgggcggcctgggcatg

SEQ ID NO: 207822 - DNA, 646 bp, Unknown
  Bacterial polypeptide expressing nucleotide sequence isolated from the Sargasso Sea
agaggggaacaaaaaaggctagtaaaaggagcattgaaatatgctattgaccaagatagatcttctgtcactctggtgcacaaaggaaatattatgaaatttactgaaggcgcatttagagattggggttatgagctttgtagagaagactttgatggagatgatcttgatggtggtccatggcattactttattaatcccaacaacggaagaaaaataatagtaaaagatgttatatgcgatgcttttttacagcaaatactattaagaccaagagaatatgatgttatagcaacaatgaatttaaatggtgattacctttcagatgcattagcggctatggtcggtggtataggtattgctcccggtgcaaatattggtgatgaagctgcgatgtttgaagctacacatggaactgcaccaaaatatgctggcctagataaagtaaacccattatctttaattctttccgctgaaatgatgcttagacatataaactggaatgaagctgcagatcttttaataaactcaattgaaaaaactattcaagatagatacgttacctatgattttgagagattaatggataacgctacacttgtttcttgctcaggttttgcaaaagagatgatcaaaagaatgtaaa

SEQ ID NO: 207823 - DNA, 853 bp, Unknown
  Bacterial polypeptide expressing nucleotide sequence isolated from the Sargasso Sea
aaaaaactaattgagccttatcttgagttggacattaagtattatgatttgggtattagtagcagggataaaacatctgaccaaataacagttgactgtgcaaatgcgattaagaaatttggcgtaggtattaagtgtgcaacaataacacctgatgaggcaagggtaaaagagtttaaattaaaaaaaatgtggagatcacctaatggtacaataagaaatattcttggtggaacagtttttagggaaccgataatttgtaaaaatgtacctaagctagtacctgggtggactagtccaattataattggaaggcatgcttttggcgatcagtacagagcaacagattttcttgttcctggtaaaggaaaattagaaatgaaatggacctcagctgatggaaatcaaaaaaaagaatttgaagtgtttaactttccaagttcgggtgttgctttatcaatgtataatctagataactcaataaaagatttcgctagagcttgtatgaactatggattacaaagaaattatccagtttacttgtctactaaaaacacaatattaaaggggtacgatggaagatttaaagatttgtttcaagaagtctttgataaagagtttaaagaaaaatttcaaagaaataagcttacttacgaacatagattaattgacgatatggttgcttgtgcaatgaaatggaacggtggatacgtttgggcttgtaaaaactatgatggagacgttcaatctgacactgttgctcaaggctttggttctttaggcttaatgacaagtgttttgatgacaccggatggtaaaactgtagagtctgaggcagcgcatggaactgtaa

SEQ ID NO: 207824 - DNA, 393 bp, Unknown
  Bacterial polypeptide expressing nucleotide sequence isolated from the Sargasso Sea
tccaatcagatacggttgctcagggttatggttcactaggtttaatgactagtgtgctcagaacaccagatggtaaaatagcagaagctgaggcagcccatggaactgttactaggcattatagacaacatcaacaaggtaaagaaacatcaacaaatccaattgcatctatttttgcatggactagaggtttggctcatagaggtcaattagacggtaatgatgaattaattaagttttcagatactctagagaaagtttgcattgaaacagttgaaagtggatcaatgactaaagacttggcaattttaattagcaagagtcaaaaatttcttactacaaatcaatttttggaagcaatagactccaatcttaaaaaaaaacttaactaat

SEQ ID NO: 207825 - DNA, 709 bp, Unknown
  Bacterial polypeptide expressing nucleotide sequence isolated from the Sargasso Sea
gcagcaattttaaatcctcaaagggtagattttgttttatttagagaaaatacggaagacgtatatgctggtatagaatttgagaatggttcggatgaagccaataaaatcatcgaattaatgactgaatttaatcaatcaaaaaaaatacgatttcctgaaacaagttcatttggaataaaacctatttcaaaggaaggatctattaggctatttgatgcggctttgaattatgctattgataataacagaaaatcagttacaattgttcataagggcaatattatgaaatttaccgagggttatttcaaaaagtggacctatgctcatgctgaagagcagtatggagataaagtatttacttgggctcaatatgatagaattcaagaagaaaaaggaactgaagaggcaaacactgcccaaaaaaaagctattttagatggaaaaattattataaaagatgttattgctgatgcatttcttcaacaaattttactacgaccaaatgaatatgacgttattgcaactatgaatcttaatggtgattatttatctgattctgcagcagcagcagttgggggtattggaatagcgccgggagcaaatattaattacaaaactggacatgctatttttgaagcaactcatggaactgcaccaaaatatgctggtttagataaagtaaatccatcttcagtaattctttcgg

SEQ ID NO: 207826 - DNA, 766 bp, Unknown
  Bacterial polypeptide expressing nucleotide sequence isolated from the Sargasso Sea
tatgagcaaaattaaggtaaaaaatccaatagttgagctagatggtgatgaaatgaccagagtgatttggaatttcattaaaaataaactcattcttccatatttagatttaaaaatcgagtattttgatcttggcattaaaagtagagacaaaacatctgaccaaattacaattgattgtgcaaaagcaatcaaaaaaaatggggttggaattaagtgtgcaacaattactcctgatgaaaatagggttaaagagttcaatttaaaaaaaatgtggagatcaccaaatggtactataagaaatattattggaggaacagtttttagagaaccgatcatttgtaaaaatattccaaaattagttccttcatggacagaccctttaattattggacgacatgcatttggtgatcagtatagagctacagattttcaagtccctggaaaaggtaaactagaaataaaatggacatcagaagatgggaaagatgaaaaaaaatatgaagtatttaatttccccggaccaggtattgctttatcaatgtataatcttgataaatctatagaagattttgcacgttcttgtttcaattatggattaataaaaaaatggccagtatatttatcaacaaaaaatacaatactaaaaacttatgatggtagatttaaagatatatttcagaaagtttttgaaagtgaatttgaatcaaaatttaaaaaaaacaacatcacatatgaacatagattaatcgatgatatggtagct

SEQ ID NO: 207827 - DNA, 580 bp, Unknown
  Bacterial polypeptide expressing nucleotide sequence isolated from the Sargasso Sea
actctgattcacaaaggaaatattcagaagtttacagaaggcgccttcatggattggggttatgagctagcacgaaaagaattcggcggagagcctcttgatggcgggccttggcacacatttaagaacccaaataccggtaaagatatcattgttaaggatgtaatatgtgacgctttcttacaacaatgtctcttaaggcctgcagattacgatgttttagcaacaccgaatcttaatggtgattatctttcagatgctcttgctgcgcaagttggcggaatcggaatagctcctggtgcaaacttaggtgatgaagttgccgtatttgaagcgacacatggaactgcaccaaaatatgcagggcaagacaaagtaaaccctggctcattaatactttcagctgaaatgatgttaaggcatatgggttgggtagaagctgcagaccttataataagcgctatggaaaaaaccatcggcaaaaagaaggttacttatgattttgctagattaatcgacgatgctgaagaagtaagttgctctaaattcggtgaattattaattaaaaagtttaaataaa

SEQ ID NO: 207828 - DNA, 763 bp, Unknown
  Bacterial polypeptide expressing nucleotide sequence isolated from the Sargasso Sea
aatggaagttaagtggacttcagaagatggaaaagacgaaataaaatatgaggtatttaatttcactggtccaggggtagcactttcaatgtataatttagataaatctattcaagactttgcaagatcttgttttagttatgggcttatgaaaaaatggccagtttatatgtctaccaaaaatacaattcttaaacaatacgatggtagatttaaagatatttttcaagaaatatttgaaggtgaatttaaagaagaatttgaaaaaaataatttaacttatgagcacagattaattgacgacatggttgcatgtgcaatgaaatggagtggaaaatatatttgggcttgtaaaaattatgatggtgatgtgcaatcagatactatggcacaaggttatggttctttggggttaatgactagtactcttcttaccccagatggaaaaattatggaagcagaagctgctcatgggactgttacgagacactataggatgcaccaacaaggtaaggagacttcaacaaatcctatcgcatctatttttgcttggactagaggactagcgcacagagggaaactagatagtaataatgaattaattaaatttgcacaaacaattgaaaaagtttgtattgagtgtgttgaaaacggagctatgacaaaagatttagcaatactaattgggccatcaagtaaatacttaacgactaatcaatttttagatgaaattgatggtaatctaaaagcgaaattaaattaa

SEQ ID NO: 207829 - DNA, 556 bp, Unknown
  Bacterial polypeptide expressing nucleotide sequence isolated from the Sargasso Sea
aatgagcaaaatcaaggtaaaaaacccagttgttgagctggatggcgatgaaatgactcgtattatatgggagttcatcaaaaataaattaatcctcccatatttagatcttagtatcgaatattacgatttaggcatgaaaagtagagataatactgatgatcaaattaccatcgaatctgcaaacgcaatcaaaaaaattggtgttggaattaagtgtgcaacaattacccctgatgaagcaagagtagaagaatttgatttaaaaaaaatgtggagatctccaaacggaaccataagaaatataattggtggaacagtatttagagaaccaattatttgtaaaaatattccaaaacttgttccctcttggactgatccagtgattattggaagacatgcatttggtgatcaatatagagcaacagattttaaagttcctggaaaaggaaaaatggaagtgaagtggacatcagaagatgaaaaagatgaaattaaatatgaagtatttaattttacaggtcctggtgtggctttatcaatgtacaatttagat

SEQ ID NO: 207830 - DNA, 379 bp, Unknown
  Bacterial polypeptide expressing nucleotide sequence isolated from the Sargasso Sea
aatggcccaaggatatggctcactaggtttaatgacgagtacattactaacaccagatggaaaaataatggagtcagaagcagcacacgggacagtaactagacactacaggatgcatcaacaaggaaaagaaacctcaaccaatcctattgcatcaatttttgcctggacaagaggattagcacatagaggtaagcttgatggcaatgatgaacttatcaaatttgccaatacaatagaaaaagtttgtattgagagtgtcgaaaatggctcaatgacaaaagatcttgcaatattagttggaccctcaagcaaatacttgactactaaccaatttctagatgtaattgataataatttaaaacagaagttaaattag

SEQ ID NO: 207831 - DNA, 529 bp, Unknown
  Bacterial polypeptide expressing nucleotide sequence isolated from the Sargasso Sea
atatgaaaatgaatttgagtctgattttaaaaaattaaatctctattatgaacacagacttattgatgacatggttgcgtcagcattaaaatggaatggagatttcgtttgggcatgcaaaaattatgatggagatgttcaatctgatacagttgctcaaggctttggatcattgggtcttatgacaagtgttttaatgactccgaatggaaaaacaattgaagctgaggctgcacacggcacagttactcggcattatcgtcttcatcaagaaggaaaggctacttcaacaaatccaatagcatctatttttgcatggagcagaggtctaagctataggggaaaaatggatgataatagtaaacttataaattttgctgaaactattgaaaaagtatgcgttgatactgttcagagtggattcatgactaaagatttagcaatattaatatctaaagaacaagagtggcttaatactcaagactttctggaaaaaataaactcaaaccttcaatctgcattatcctaa

SEQ ID NO: 207832 - DNA, 961 bp, Unknown
  Bacterial polypeptide expressing nucleotide sequence isolated from the Sargasso Sea
agagtcttggatgcagctgtagaaaaaagctatggaagtagtaaaaaaatcgaatggatggaagtttatgctggagagaaagcaaatgatgtttatggagaaaatacttggcttcctaaagagacactagatgtgattgatgaatatttaattgctattaaaggcccattaactactccggttggaggaggaattaggtctattaatgtagctttaagacaggaattggatttgtatgtttgcctgagacctgtcacatggtatgagggagctccaacaccagtaaaaaatcctcatttaatagatatggcaatatttagagagaacactgaagatatttatgcaggtatagaatttgagggtggatcagaagattcaaaaaaattcttaaagctgatgaaggataattttggtgaaagatttgataaaattagatttcctaatactgtaggtattggtatcaaacctgtttctaaagagggatcgcaacgtttagtgtgggatgcgattgaatatgctatccgccataagcgaaaaagtgtaacattagttcataaaggaaatataatgaagtttaccgagggaagctttaaggagtggggttatgcaatagcagaaaagcgatttagcgatactacctttacatgggcacagtatgatagaattgtagaacaagaaagtaaagaagtagcggataaaatttatcaagaagctatagattcaggtaaagtaatagtaaaagatgttattgccgatgcatttttacaacaaattcttctaaggcctaaagaatatgatgtgattgcaacaatgaatttgaatggtgactatatttcagatgctctagctgcacaagttggtggaattggaatatctccaggagcaaatataaatttcataacaggtaaagcaatttttgaagcaactcatggtactgcgccaaaatatgcaggtcaagata

SEQ ID NO: 207833 - DNA, 854 bp, Unknown
  Bacterial polypeptide expressing nucleotide sequence isolated from the Sargasso Sea
aggtgaaggaataagatctatcaatgttgcaataagacaagaacttgatttatatgtttgcttgaggcctatcaaatatttcaaaggtattcaaactcctacaaaaaacccacaagatgtagatataacattatttagagaaaataccgaagatgtctacgcaggaaaagaactagaaaattcctcagaagatgttgaaaaacttaataattttttaaaacaggaatttggatgggatataagaatagacagcgggattggaataaaaccaatatctcagactgcttctgaaaggctgataagagcagcacttaattatgccgtagaaaatgataaaaaaaatgttgctttagtgcataaaggaaacattatgaagtttactgaaggtgcatttagaaaatggggttacgaccttgtaaagtcggagttttcagatgttgcagtttcatgggaggattgtggtggtgatcctggagataaaatattagtacaagatgttattgcagatgcatttttacagcaaatcctaattaaaccacaaatgtttgatgtaattgctacaacgaatctcaatggagattatgcttctgacgccttagcagctcaaataggaggcattggtatcagtcctggaggaaacataaactatgaaaatggaaaagcggtttttgaagcaacacatggtactgctcctaaatatgctggtcaagataaaacaaatccaggatcattaattttgtcaggagtaatgatgtttcgatatatgggttggaatagtgctgctgatctaattgttaactcaatggagaaaacaattctcgaaggaaaagtaacttatgatcttgctcgaggaa

SEQ ID NO: 207834 - DNA, 895 bp, Unknown
  Bacterial polypeptide expressing nucleotide sequence isolated from the Sargasso Sea
tttagagaaccaataatatgtaaaaatatacctaaattagttccaagttggactaatccaatttgtataggcagacatgcatttggagatcagtatagagctacagattttaaagttccaggtaaaggaaaattggaattaaaatggacatctgaggatggtaatgaaaaaaaagaatttgaagtatttaattttccaggacctggtgttgcattatcaatgtataatttagatcaatctataaaagattttgctagagcttgtatgaattacggtcttaatagaaaatggccagtttatctttcaacaaaaaatacgatattaaaaaattatgatggtcgatttaaagatttgtttcaagaagttttcgataaagaatttaaagaaaaatttgaagaaagagaaataacttatgaacataggctcatagatgacatggtggcatgcgccatgaagtggaatggaaattatatttgggcctgcaaaaattatgatggagatgtgcagtctgatactgttgctcaaggatttggttctttaggtcttatgaccagtgttttaatgacacctgatggaaatactatagaagcagaagctgctcacggaactgttactagacattatagactacaccagcaaggaaaagaaacatcgactaatccaatagcatctatatttgcatgggcaagaggcctttaccacagaggaaaaatggataataatgaggagttaaaaaaatttgtaaaaactttagaaaaagtttgcattgaaacagttgaaaacggcttaatgacaaaagatttagcaattctgattggtccttcaagcaaatatcttacaacaaatcaatttctagatgtaattgatggaaatcttaaaaataagctaaattaaa

SEQ ID NO: 207835 - DNA, 610 bp, Unknown
  Bacterial polypeptide expressing nucleotide sequence isolated from the Sargasso Sea
gacaagcgccacgtgaccctggtgcacaagggcaacatcatgaagttcacggaaggggcgttccgcgactggggctatgaactggccaccaccgaattccgcgacgtgtgcatcaccgagcgggaaagctggatcctcggcaacctcgataaggattcaggcctgagtgtgcaggccaacgcccgcatgattgaaccgggctacgacagcctcactcccgagaaaaaggcagacatcgacgccgaggtgcaggccgtgatcgacgccatcggcagcagccatggaggcggcaagtggaggtcgatggtgctggtggatgaccgcatcgccgacagcattttccagcagatccagaccaggccccaggagtattcgatcctggccacgctcaacctcaatggcgactacatctccgatgccgccgcggcgatggtgggcggcttgggcatggcgcccggcgccaacatcggcgaaaccgccgccatctttgaagccacccacggcaccgccccgaagcacgccggactggatcgcatcaacccgggctcggtcatcctcagcggcgtgatgatgctggaattcctgggttggcaggaggccgctgatcagg

SEQ ID NO: 207836 - DNA, 904 bp, Unknown
  Bacterial polypeptide expressing nucleotide sequence isolated from the Sargasso Sea
atgaactcatcaaaagtaaaagtaccagctaaaggcgaaaaaatttctctaaaacaaggcaaacttgttgttccagataatcctattattccttttatagagggagatggcattggaattgatattactccagtaatgaagaaggtagttgatgcatctgtagaggctgcttatggaagtaaaagaaaaatcagctggatggaagttttttgtggtgaaaaatcagtaaaagtttatggtgctgatgaatggcttccaaaagaaactttagagttgtgtaaagaatacatcgtgtctataaaaggaccacttacaacaccagttggagggggcataagatcattaaatgtagctttgagacaagaactagatctatatgtttgcttaagaccagttaagtattttaaaggaactccaagccccgtgaaacatcctgagcttgtggatatggtaatttttagagaaaactcagaagatatttacgctggtgttgaatttgaatctaatactgaggaagcaaaaaaacttattaaagttctaaaggagcaatttgatgtgcaaaaaatacgatttcctgaaaattgtggaataggaattaaacctgtttcagaagagggcagcaaaagactcataaggaaatcatttgaatatgcaataaaaaatgataggaagtcggtttccttaattcataaagggaatattcaaaaatttactgagggggcatttagagattggggttacgaacttgcagaagaggagtttgacgcaaagccaattgatggtggtccatggcattcaatgataaatccaaacaacggaaatgaaattattgttaaagatgtaatctgtgatgcattcttacaacaaattcttcaccgacctgcagagtatgatgtgctagctt

SEQ ID NO: 207837 - DNA, 664 bp, Unknown
  Bacterial polypeptide expressing nucleotide sequence isolated from the Sargasso Sea
atgtctggatcaaaaataaaaattccttcaaagggtgaaaaaatttcatacaaaaatggaaaactttctgtgccagaaaatcctattatcccctttatagagggagatggaattggaatagatataaccccagtaatgatagatgtggtggatgccgctatagcaagtgcttacggaggtaaaagaaaaattagctggatggaagtatactgcggtgaaaaatcagttaatgtttatggtgcagatgaatggttgcctgaagaaacattgcaagcctgcagggattatgtggtttcgattaaaggtccattaacaactcctgttggaggtggaataagatctttaaatgttgctttaaggcaagttttagatctttatgtttgcttgagaccagtaaagtattttgatggaactccaagcccagtcaaaagaccagaccttgttgatatggttatatttagagaaaactctgaagatatttatgcaggcgttgaatttgagtctggtagtgatgaatctaataaaataatagacattcttcagtcccaatttgatgttaaaaaaattagatttacagaaaattgtggaattggaataaagcctgtatcggaagagggcagcaaacgattaattagaaaatcatttgaatatgctatacaaaata

SEQ ID NO: 207838 - DNA, 657 bp, Unknown
  Bacterial polypeptide expressing nucleotide sequence isolated from the Sargasso Sea
ctatagaggactttgcaagatcatgttttatttatggattaataaaaaagtggccagtatatttatcgacaaaaaatacaattctaaaaaaatatgatggaagatttaaggatatatttcaaagtgtttttgaaaaagattttaaatcagagtttgaaagatataagataacttacgagcatagattaatcgatgatatggttgcttgtgcaatgaaatggcacggtaagtatatttgggcatgtaaaaattatgatggcgatgtacaatctgatactgttgctcaaggttatggatctttaggtttaatgacaagtgtattgttagcgcctgatggtagaacaatggaagcagaagcagctcatggaactgtaactcgacattttagaatgcatcagcaaggtaaagaaacatcaactaatccaattgcatctatatttgcttggacaagaggtttggcacacaggggaaagttagatagtaatgatgaattaattaaattttcaaaaacacttgaagaagtatgtgttgattcagttgaatcaggttcaatgaccaaagatttagctatactaattggtccttcaacaaaatatttaacaactaaccagtttttagatgtaattgatggaagtttaaaacaaaaattaaattaac

SEQ ID NO: 207839 - DNA, 762 bp, Unknown
  Bacterial polypeptide expressing nucleotide sequence isolated from the Sargasso Sea
agttgacacttttgaagaatacctaatcggtataaaaggaccactcacaacccctattggaggaggcttcagaagcctcaatgttgcgttacgccaacttttagacctctacgtgtgcctacgaccagtcagatggtttgaaggcgtaccttcaccggttaaacaaccagaacttgttgacatggttatcttcagagaaaacacagaagatatctatgccggaatagaagccgaagctggctcacccgaagcagaaacaattcgtgagatgatcaaagaagttttcggaagagaaataagtgaagattcaggattaggaataaagcctgtttcgcggacaggttctcaacgacttcaacgagcagcaatcaaatacgctgtagaacgcggacggaaaaacattcattgggttcataaaggcaacatcatgaaatacacagaaggagcattccaaaagtggggatatgagcttgtcaaagaagaatttgatgatgtggccgtagggtgggatgactgcggaggagaccccggtgacaaaattcttgtccaagacgctatcgctgatatcgcacttcagcaggttttaacaagaccagcagagtttgatgtaatcgcaacgatgaatcttaacggcgattacctatctgacgctctcgctgcacaagtaggaggaataggaatagctccaggagccaacatcaactatgtcacaggacacggcatctttgaagcaacccacggaacggcccctaaatacgctgg

SEQ ID NO: 207840 - DNA, 688 bp, Unknown
  Bacterial polypeptide expressing nucleotide sequence isolated from the Sargasso Sea
tttgctttatctatgtataatttagacaattcaatagaggattttgcaagatcttgcttcaactatggattaattaaaaaatggcctgtgtatctatctacaaaaaatacgattttaaaaagatatgatggaagatttaaagatatttttcaagaagtttttgaaaaagaatttagagaaaagtttgaaaaaagtaaaattatttatgaacatagattaattgatgacatggtcgcatgtgcaatgaaatggcatggtaaatatatttgggcttgtaaaaattatgatggagatgttcaatcagatactgttgcacaagggtatggatctttgggcttaatgacaagtgtactccttgctccagatggaaaaacaatggaagcagaggctgctcatggaacagtaactagacactttagaatgcatcaacaaggaaaagaaacatctacaaaccctattgcatcaatttttgcatggacaagaggcttggctcatagagggaagcttgatggaaatgaggaattaattaaatttgctgaaacacttgaaaaggtatgtgttgattgtgttgaagaagggtcaatgaccaaggatttagctatattaataggaccttcaactaagtatcttacaactaatcaatttttagatacaattgacggtaagttaagacagaaattaaattaaa

SEQ ID NO: 207841 - DNA, 797 bp, Unknown
  Bacterial polypeptide expressing nucleotide sequence isolated from the Sargasso Sea
ggaaaatacagaagatatctatgccgggatcgagtggatgcacggtactgaggaattagatcaagtaaaattatttttaacagataaaatgaatgtaaaaaacattcgttttcctaagacatctagcttgggtgtaaaacctgtatctaaagagggttcagagcgtcttattcgagcttcagttgaatacgcgctgaaaaataatagaaattcagttacgctcgtacacaaaggcaatataatgaaattcactgagggtgcattcagagattggggttatgaattagtgcgctctgattataattcaaaagactatgatggcggaccgtggcaaattataaaaaaagatgggaaagaagtaattgttaaagatgtaattgcagatgcatttcttcagcaaataatccttcgccccgaagaatatgaagttattgcgactctaaacctaaacggtgattatatatctgatgcattagcagctattgttggtggcattggaatagcacccggagccaatatcaactatgatagtggtcatgcaatttttgaagcaactcatggtactgcacccaaatatgcaaatcagaataaagttaatccaagttcagtaattttatctggagtcatgatgctcgagtacatgggttggaataaagcagcggaattgattatttcaggcattaaaggtgctattttcaataaacgagttacttatgactttcatagacttatggatggggcaacaaaattatcttgttctgaatttggtgaagaaattatttcaaatatgagctgac

SEQ ID NO: 207842 - DNA, 385 bp, Unknown
  Bacterial polypeptide expressing nucleotide sequence isolated from the Sargasso Sea
aatgagcaaaattaaggtaaaaaacccaattgtcgagttagatggtgatgaaatgaccagaattatatgggatttcattaaaaaaaaactaattttaccttatttagacttagggattgaatattacgatttaggaatgaagagtagagacaactccaatgatcaaattacaattgattgtgcaaatgcaataaaaaaaaatggggtaggtataaaatgtgcaacaattactcctgacgaagctagggtaaaagaatttagcttgaaaaagatgtggcgatctccaaatggtacaataagaaatattattggtggaactgttttcagggagccaataatttgtaaaatataccaaaacttgtaccatcctggaccgatcctgtga

SEQ ID NO: 207843 - DNA, 811 bp, Unknown
  Bacterial polypeptide expressing nucleotide sequence isolated from the Sargasso Sea
aaatgtctcaatcagacagataatggatttgtatgtttgcttaagaccaattaaatactttaatggaattcaaaccccgacaaaaaatcctcaagatgtagatataactttatttagagaaaatacagaagacgtttatgcggggaaagagttagaagaaggaagcgaagaagttcaaaaattaaacaaatttttaaaatctgagtttggatgggaaataagagaagatagtgggataggaataaaacctatttctaaaacagctactgaaagattagtacgagcttcattaaattatgctgttgaaaacaataaaaaaaatcttgcattagttcataaaggtaacattatgaaatttacagaaggcgcatttagaaaatggggttatgaattagttcaagaagaattttctgatgtagctatatcttgggaagactgcaacggagatccaggtgataaaattttaatacaggatgttattgctgatgcttttcttcagcaaattttagttaaacctgaaaattttgatgtgattgctactactaatttaaatggtgattatgcatcagacgctttagcagcacaaataggaggaattggaattagtcctggaggaaatataaattatgaaaacggcaaagcagtgtttgaagcaactcatggtacagcacctaagtatgcaggtaaagaccaagccaatccaggatctttaattctatctggtgaaatgatgtttagatacatgggctgggatgaagcagctgacttaactatcaaaacaatggaaaaatcaattttagatggaaatgta

SEQ ID NO: 207844 - DNA, 763 bp, Unknown
  Bacterial polypeptide expressing nucleotide sequence isolated from the Sargasso Sea
atgagcaaaatcaaggtaaaaaacccagttgttgagctggatggtgatgaaatgactcgtattatatgggagttcatcaaaaataaattaatcctcccatatttagatcttggtattgaatattacgatttaggcatgaaaagcagagataatactgatgatcaaattacaatcgactctgcaaatgctattaaaaaaattggtgttggaataaagtgtgcaactattacccctgatgaagcaagagtagaagaatttgatttaaaaaaaatgtggagatctccaaacggaactataagaaatataattggaggaacagtatttagagaaccaattatttgtaaaaatattccaaaacttgttccctcttggactgatccagtgattattggaagacatgcatttggtgatcaatatagagcaacagattttaaagttcctggaaaaggaaaaatggaagtgaagtggacatcagaagatggaaaagatgaaattaaatatgaagtattcaattttacaggtcctggtgtggctttatcaatgtacaatttagataagtctattgaagactttgcaagatcttgtttcagttatgggctaattaaaaaatggcctgtttatatgtctacaaaaaatacaattctaaaacaatacgatggaagatttaaagatattttccaagaaattttcgacaaagaatataaaagcgaatttgaaaaaaataatttaacttacgaacatagattaattgatgacatggttg

SEQ ID NO: 207845 - DNA, 388 bp, Unknown
  Bacterial polypeptide expressing nucleotide sequence isolated from the Sargasso Sea
atgggaattgaatgggaagctgaggataataattgtcttgaattaattaatcacttaaataacgttgtcataccaaaaagtaaaaatttaaaaaatagatctataccagacggatcaggtattggaataaaaccggtgagtaaatctggtagccaaaggcatattagaaaagctattgaacatgccaaaagattatcaggagataaaaggcatgtgactcttgttcataaagggaatattatgaaatatacagaaggtgcatttagagattggggatatgaattagcagtaaatgaatttagagaagattgcattacagaaagagaaagctggattttagataatattcagaaaaatccagaaattacaattgaaaataatgctcgaa

SEQ ID NO: 207846 - DNA, 658 bp, Unknown
  Bacterial polypeptide expressing nucleotide sequence isolated from the Sargasso Sea
ttcataaaagattttgcaagagcatgtttaaattatggtttggtaagaaaatggccagtttatttttcatcaaaaaatacgatcctaaaaatatatgatggtagatttaaagatatatttgaggatatttatcaaaaagagtttaagaaaaaatttgataaagcaggaattacctatgaacatagattaattgatgacatggttgcatgcgcaatgaagtggagtggtaaatatatttgggcatgtaagaattatgatggagatgtacaatctgatacggtagctcagggttatggttcactaggtttaatgactagtgtgcttagaacaccagatggtaaaacagcagaagctgaagcagcccatggaactgttacaaggcattataggcagcatcaacaaggcaaagaaacatcaacaaaccctatcgcatctattttcgcatggactagaggtttggctcatagagggcaattagacggtaatgacgaattaattaagttttcagatactcttgaaaaagtatgcattgaaacagttgaaaatggattaatgacaaaagacttagctgttttaattagtaaaagtcaaaaatttctcacaacaaatcaatttttagaagcaatagattctaatcttaaaaaaaagcttaactaat

SEQ ID NO: 207847 - DNA, 589 bp, Unknown
  Bacterial polypeptide expressing nucleotide sequence isolated from the Sargasso Sea
ggtgcataagggcaacataatgaaatttactgaaggagcatttaaagaatggggttacggagttgctaaaacagaatacggtgcggtttctttagatggtggtgaatggatgagttttataaatcctaaaactggaaggactattgttatcaaagacgtaattgccgattcttttttacaacaaattctgacgaggcccgctgattatgatgttatagctacaatgaatttaaatggcgactatatttctgatgctttagcagctaaagttggtggattaggcttagctccaggagctaacgttggagatcatatcgccttatttgaagctactcacggaacagctccaaagtatgctggtgaagacaaagtaaacccatcatctttaattctctcagctggaatgatgcttaatcatattggatggaaagaagcttcagataacgtcatcaaaggaattagctgggctattaaaaataagcttgttacttacgatttagctagattaatgaagaatgctacaaaacttaagtgttcagaatttgcagatgaagtatgcaaaggtatgaagatggggtatctcaaatag

SEQ ID NO: 207848 - DNA, 866 bp, Unknown
  Bacterial polypeptide expressing nucleotide sequence isolated from the Sargasso Sea
aaatattccaaagttagttccttcatggactgaccctttaattattggacgacatgcatttggtgatcagtatagggctacagattttaaagttcctggaaaaggtaaattagaaattaaatggacatcagaagatggaaaagatgaaaaaaaatatgaagtatttaattttcctgggccaggtattgccttgtcaatgtataacctggacaagtctatagaagactttgcacgttcttgctttaattatggattgataaaaaaatggccagtttatttatcaactaaaaatacaatactaaaaacttacgatggtaggtttaaagatatatttcaacaagtttttaaaagtgaatttaaatcaaaatttgaaaaaagtaatattacctacgaacacagattaattgatgacatggtggcatgcgcaatgaaatggagtggaaaatatatttgggcatgtaaaaattatgatggcgatgttcaatcagatactgttgcacaaggttatggatctttaggattaatgacaagtgtattgcttgcaccagatggcaaaacaatggaagcagaagcagctcatggaacagtaacaagacattttagaatgcatcaggagggcaaagaaacttctacaaatccaatagcatcaatttttgcctggactagaggtttggcgcacagaggagaattagatggaaatgcagatttaattaaattttcaaacacactagaaaaaatttgtattgattgtgttgaaagtggatcaatgaccaaagatttagctatacttataggtccttcaaccgaatatttaaatacaaatcaattcctagataaaattgatggtaatcttaaaaaaaaattaa

SEQ ID NO: 207849 - DNA, 757 bp, Unknown
  Bacterial polypeptide expressing nucleotide sequence isolated from the Sargasso Sea
atgagtaaaattaaggtaaataatcctattgttgagttggatggcgatgaaatgacgagagtcatctgggacttcattaaaaacaaattaatacttccatatatagatttgggtattgaatattatgatctcagcatgaaaaacagagatgataccaatgatcaaataacagtagattgcgcaaaagcaattaagaaaaatggggttggcattaagtgtgcaacaataacagcagatgaattaagagtaaaagaatttaatttaaagaaaatgtggagatctcctaatggaacaattagaaatattattggaggaacagtatttagggaacctattatttgtaaaaatataccaaaactagttccgtcatggactgatccattaattattggaaggcatgcattcggagaccaatacagagcaactgactttttagtacccggaaaaggtaagcttgaagttaaatggacttctgaagatggaaaagatgaaaaaaattatgaagtatttaattttccaggacctggaattgctttatcaatgtataatttagataaatctattgaggacttcgcaaggtcttgttttaattatggtttaataaaaaaatggccagtttatctatcaacaaaaaatacaattttaaaaaaatacgatgggagatttaaagatatttttcaaaaaatatttgatgaagattttaaaactgattttgataaaaataatataacttatgaacatagattaattgatgata
